United States Patent Application Publication US 2005/0228172 A9 - sequence listing, part 90

SEQ ID NO: 408121 - DNA, 561 bp, Homo sapiens
tgatagtgctgatgctaatgctaacacttcagtgcttactatgagccaggcacagttctaaatactttataagaattaacttacttaagcctcatatttaaccctttgaggtacgtactattattatacccattttacagatgaaataactaaggcacagagtaactcttccatgttcaagcagcttttaggttacaagagctaagatttgaatgcaaaygtgtcctgtgccagagtttgtggtcttaactgtcatataacattaccatttccttgggaatggctccagtatgaacctctccagggtgcttcaatagctttaagctaatgcaaattccttagcctgccccctaggccctctgtgatccagagggaagcctcaaccccactctgctcctcttcgctgtctgcccaccaccattctcttcatggctccctacgcctgccatgctgtcccacactgccctgcctttgtccatacttttctcttgggagggagtaagaggcaagtgggttcacttttccaggcccagctcaaatgtcctatcccttgaggaagcc

SEQ ID NO: 408122 - DNA, 567 bp, Homo sapiens
cttgcctgtgcttctgtcttcccactaaactgtcagttttttggaggcgagacagagtctaacttatctccrtcctgcacaggtttaagtaaggtgccaagcagcacataataccaaatactaattgcagatttaaatcaaacaaccagcgattttcctgagtacctaccatgtgctcagaaggaatgaccaccctatcttcatagactttatgcatattaaataacggattaattctgccacctattccactaaagactgtggtggatcagctccttggggaaaggaagtatgtctatcttagagataaggcaactaaggcagagaaaacaagtaattttctcatgttcacacaacttatcttcttcacttttgaagcatgtcttgctccaaggtggctagcaggtatttggcatacagtaggtactaaaaaaaaaaaaaaaaaaaaaaaaaaaaagaggtagagaggataaatgaatctacttaaaaagataatttaaaatatctttggcggatacttggaaaaaatatctaaattaagttggaaaatgagtccaaaaattccaa

SEQ ID NO: 408123 - DNA, 372 bp, Homo sapiens
aatattcaagcaatgagaccttcctgagcaacagctgccactttgacacttatagaaagtgcccaggcctaagctgcgcagatcagagctgggcccctgacggcctacagtcaggtgggcrcagtcaaagcaggcatttctgcttcaggcagcaatctgggtcttcgaggagctggctggaggatctgcagcccaccatgcagcaatctatatcactgccatggttttcaggctactcatgtgctgtgctccagaccctgtgctaagcactgaagatccagatgtaaatgagatgtgggtaccactcccacagagtctaggctggtgaaggagcccagtcccacgtccatgtgcagagggctgtcagtgggt

SEQ ID NO: 408124 - DNA, 585 bp, Homo sapiens
agcagcatccctccgtacaaggttcattctataggtttcctgggcacaaaaccatagccagtcatcccatactactgggatttttcctttgggacctcctccactgggaattggtggcactcagacagtctactagaaccaaggtaaacctgggctttagacaccattcaatatccaattccaaaaggaggccatgacctagaaaaagaaagaatgaaagaaaagaaaagaaaagaaaatcagtaggtaaattacaaagaatctctaagcaaatatacccgacaaaaaccaaaacaagccagacrgagaagactagaataaataactaattcttcagtgcaaagacgcagatgcacaaccacgagaaacaatagcaaagagggaaatgtgacctccccaagtgaacaaagcaaggaaacaatgactgaccctaacaagagggcaatttgtaaactttttgaccaagaattcaaaataacagttctaaggaagctcagtgatctccaagatagcacagaaaagcaattaagaaatttatccaagaactttagcaaagagatcgaaataatgaaaaaaatcaaataa

SEQ ID NO: 408125 - DNA, 518 bp, Homo sapiens
gggaggacattggtctaggcaaagatcttatggccaagacctcaaaagaacaggccacaaaaataaaaatagacaaatggcgctctgtgaaactaaaaagtttttgcacagcaaaggaaacaaccgagtgaagagacaacccactgaatgggagaaaatattgcaaactattcatctgacaagggactaatatccagaatatacaaggaactcaacaaackcatcagtaaaataataataataataatctcattaaaaagtaggcaaaggacatgaatagacatttctcaaaagacaacataacaatggccagtgggtttatacaaaatgctcaatatcactaatcgtcagagtaatgcaaatcaaattacttattgcaaaagaagacagtaagaaaggataaaaggaagagaataggaaatgactaaaaaacaagcaacaaatagcagtagtaagttcttacttaccaataataaataacacaatgtaagtggactcgattctctaattaaaaggca

SEQ ID NO: 408126 - DNA, 641 bp, Homo sapiens
agaggaatgaggctcagagaggttgggtaactttctcaagttgatacagtcagtgaatggtagaatcagattcaaatctagatttctaaagcccatgtttcgatattttgggtcaattgaacattttctttttcctctttttaaaaaatattttctatggaggtattgctatacttcactttattgaggtatagcatataatagagcatacaaatcttaagtgtacagytcaatgaatttttgcttttgcctacacattggaaccaccatccagatcaagatatataacatgaccagcatcacagaaagttatctcataccctgccccagtcagcaccacccatcccactagagctcaactctgtttgactttttacttctatcaccatagagcagtttttcctgttcttacactttcatatcaattgtactgcatgtactcctttatgtctggcttgttttgctcaagataatgcctataagattcattcatgttgttgtgtgcatccgaagttcattctcttttactgatatgtggtattccattgtatgaatatattctgatttgtccattctcttgtaaatgaatatttaggttgttttgagtttttagctatataaataaagctgttatgaacatt

SEQ ID NO: 408127 - DNA, 626 bp, Homo sapiens
gtggtgagccatctggagtagccactaccatcatgctggctgcaccaggtaggcgtgcccggggctgcacactccatggagctggtaggagctgggaacaagaaggagccccactccttcagagttaaggcaggagctccccaggtgctgctgcagccacccaagccatggctctgggtccaggcattcctgtgctcttggggcctaggaacaggcaggagccctaccctcccaggcacagctgcagccacccaaacagaggctgcaaacccaattctcccactccacagagcaggcaggagacctgagcccctgggcacagctgcagctgctcaatccatggctgcagactcaggcatctctgcatgtgcctgctcccaataccatgtctgaagacccaggcatctctgcaagtgcctgctcccactgcctggcttctccctgctgtcagtgcccactccaatctcagagcaaagttggggctgagcctaggcactgctgcagcctggctgggtgtgcacacacttggagcagtgctgacacaccagctccttcttgccacctcagcccrctccagactttgggcactgacaagcataggagggaagccgaggagagtttgaggg

SEQ ID NO: 408128 - DNA, 537 bp, Homo sapiens
aatacaatatctgaggcacacttgtgaatgtcagagaccaggcgctcacacccattaaaagactgagacctaaccataggagtattgaatatgtcccctccccatataattctaccatctataacatcaacagggttcctatctaataacaggagattacagctgaaagaactgcaaagctcagattctacttaagaaggaatttctagggaaactcaaaaacaggaaagacactagtggaatctgaagcaactatagcaaagttgaaggatataaggttaatattttttaaaagtccatagctttcctatatatcagcaatgaacaactggaatttgaaattaaaaacatgatactctttacattagcataaaaaatgaaatatttaggtagaagcctaacaaaataygtacaagatctatgaggaaaactacaaaactctgatgaaagaaattgaagaagatcttttaaaaataaataggtattccatgttcatggatagaaagacaccattatcaaggtgtcagttcttcccaa

SEQ ID NO: 408129 - DNA, 636 bp, Homo sapiens
gctttttaatcctagcctgcaactggcttagtcctttttgctggctcaggatttgagaatgaagggtcccttcaccaggaaaacatgcatatactcaaaatgttgcttgcagttttaggatrttcataaccccttctcctcagggaccttatataagggagtcctgctcttatcaggattggtcacccaggctttgatgttgctagcatctggttaccaagatagctttttcccttcacagtggcatgttgtgttgccctctgcaccatctatgatactgggaaatgcccaccattattccccctgggcttcaggatggaattttggtttccctgatgattatacttctccttaaaacacagatctggatggaatgaatcattttcttggtttgcatagatgaaattagctttatttggcttcctaggccccaggcaggcagcttaattgaccttctccttgcatattctggactccagaagcattgccctctgtcttgctggtaatgatgtagtagtccagcaacagagcttccagggattttaatcctgaaaaaggggtctgaaactgcttgtatttttttgaccaatatccacctctattaaatggacctgccctctattccattcacttagt

SEQ ID NO: 408130 - DNA, 577 bp, Homo sapiens
acatacatcaacctttccatatttttatttattttattctggcttgttttggrtttaaggggaaactttcatgataattttaccctgaagccattttcctggaatgtgtctaggcaagggattccaactggaacccgtggaggccaggaaaacactagtcatcaggatgtactgcttcatctggggaacaccataagggactcaactccaggcactggtgtctggctcttgtgcatttgctaaattgacatgactccaggatctgtagcaggcgcacacatccttgatgaatacagtgaagtcttgtttttaccagcactcagttggccaaatatcttttccagcaatgagatatcagaggacacagtgaagttattcaaattagggtggaaaaatcaccaaaattcacttaaaatcatgtttatcgaaagtccagtgggatcaggttaggtagtaaataacaatacagaatgaatattttaacgagattacaattttaagcttgtcttttttcctttatgtttcattatttactcattgtacattcacagaaatacatttgctaagcaaagagaat

SEQ ID NO: 408131 - DNA, 585 bp, Homo sapiens
tctcacaccaatcagaatggctattacaaaaaagaaaaaataacagatgctggagaggtcatgaagatgatgcaatgcttacagagtgctggtgaaaatgtaaattagttcagccattgtggaaagcagtgtgggtgtttatcaaagaacttacaacagaagtaccatttgacctagcaatcccattactggctgtatacccaaaggaaaataaatcattctacatgattcatgcatgattcagttacatacatgtgtgttaatcacagcactactcacattggcaaagatatagaatcaaccaaaatggccatgaacagyagactggataaagaaaatgtagtacacatacaccatggaatactatgcagccataaaaaagaatgagatcatgtcctttgcagcaacatggataaagctggagaccattatcctaagcaaataattgtaagatcagaaaatcacatattgtactttctcacttagtagtaagagttaaaacattgagaacacatgggcacaaagaaggcagcaacagacactggggcctacttgagggtgggaggtgggaggaaggagaggatt

SEQ ID NO: 408132 - DNA, 585 bp, Homo sapiens
tctcacaccaatcagaatggctattacaaaaaagaaaaaataacagatgctggagaggtcatgaagatgatgcaatgcttacagagtgctggtgaaaatgtaaattagttcagccattgtggaaagcagtgtgggtgtttatcaaagaacttacaacagaagtaccatttgacctagcaatcccattactggctgtatacccaaaggaaaataaatcattctacatgattcatgcatgattcagttacatacatgtgtgttaatcacagcactactcacattggcaaagatatagaatcaaccaaaatggccatgaacagcagactggataaagaaaatgtagtacacatacaccatggaatactatgcagccataaaaargaatgagatcatgtcctttgcagcaacatggataaagctggagaccattatcctaagcaaataattgtaagatcagaaaatcacatattgtactttctcacttagtagtaagagttaaaacattgagaacacatgggcacaaagaaggcagcaacagacactggggcctacttgagggtgggaggtgggaggaaggagaggatt

SEQ ID NO: 408133 - DNA, 570 bp, Homo sapiens
cagatacaacttcctctcctttgagccccttgtttgctaaatcataaatcttgaatgttaccattgtactaatgtctggtcattcagacaacatgaagttaatatcaggtcatcatatattaatggccagasagaaaacaaactgaggagagacaggaagaacatattaataccaaaaaaggaacagatctggcttaaatgggatgccttcaatttgcagaaacatcacccattattatcaaaggtcatagtcagttactgctagaaaaatcaataaaattaagggtggatgggaggaagagacccaatacgtaaatttatagtatgtcctctgtatcaaaggaacttggtgaacaactgtgcgttactaacttttggaaataaaattagttgtcaacatagtagaccatttacatagtttcataggttcctgttgtgaatatactttaaagaactgtattagtgcaaaacagagaaaaaatagggcaagaagacatttaaagattgcatctgcctgttggtcttcatcacccatttttttggcctcttgaaggtgttaatgttttttct

SEQ ID NO: 408134 - DNA, 570 bp, Homo sapiens
cagatacaacttcctctcctttgagccccttgtttgctaaatcataaatcttgaatgttaccattgtactaatgtctggtcattcagacaacatgaagttaatatcaggtcatcatatattaatggccagagagaaaacaaactgaggagagacaggaagaacatattaataccaaaaaaggaacagatctggcttaaatgggatgccttcaatttgcagaaacatcacccattattatcaaaggtcatagtcagttactgctagaaaaatcaataaaattaagggtggatgggaggaagagacccaatacgtaaatttatagtatgtcctctgtatcaaaggaacttggtgaacaactgtgcgttactaacttttggaaataaaattagttgtcarcatagtagaccatttacatagtttcataggttcctgttgtgaatatactttaaagaactgtattagtgcaaaacagagaaaaaatagggcaagaagacatttaaagattgcatctgcctgttggtcttcatcacccatttttttggcctcttgaaggtgttaatgttttttct

SEQ ID NO: 408135 - DNA, 570 bp, Homo sapiens
cagatacaacttcctctcctttgagccccttgtttgctaaatcataaatcttgaatgttaccattgtactaatgtctggtcattcagacaacatgaagttaatatcaggtcatcatatattaatggccagagagaaaacaaactgaggagagacaggaagaacatattaataccaaaaaaggaacagatctggcttaaatgggatgccttcaatttgcagaaacatcacccattattatcaaaggtcatagtcagttactgctagaaaaatcaataaaattaagggtggatgggaggaagagacccaatacgtaaatttatagtatgtcctctgtatcaaaggaacttggtgaacaactgtgcgttactaacttttggaaataaaattagttgtcaacatagtagaccatttacatagtttcataggttcctgytgtgaatatactttaaagaactgtattagtgcaaaacagagaaaaaatagggcaagaagacatttaaagattgcatctgcctgttggtcttcatcacccatttttttggcctcttgaaggtgttaatgttttttct

SEQ ID NO: 408136 - DNA, 362 bp, Homo sapiens
ggacttagagactgagtcagtgggctggggtctaggcttcactcctttttggatcaggtaactttaactttgtgtctgtttcattgtttatttagcactgctgrtacaaacacagaagagcaattgatcctcactggtgttcttcagggacagctggtggtaggtgagggtgagctgggaggaaggtggcattttgggagagaaagagtgtccactccccaagcagtttgattttctggggctgtccctttgacaccaaagatgagcccttactgttcttttctatttctctaagctccctctgataatcacaggttaagaatttttttttgtaatagtactaattataataaacttttgat

SEQ ID NO: 408137 - DNA, 362 bp, Homo sapiens
ggacttagagactgagtcagtgggctggggtctaggcttcactcctttttggatcaggtaactttaactttgtgtctgtttcattgtttatttagcactgctgatacaaacacagaagagcaattgatcctcactggtgttcttcagggacagctggtggtaggtgagggtgagctgggaggaaggtggcattttgggagagaaagagtgtccactccccaagcagtttgattttctggggctgtccctttgacaccaaagatgagcccttactgttcttttctatttctctaagctccctctgataatcacaggttaagaatttttttttgtamtagtactaattataataaacttttgat

SEQ ID NO: 408138 - DNA, 614 bp, Homo sapiens
atggcattttatacatttttcttataggaattgattgatgtacgtatttctaacttcctatatggatcgcttcctcacattttcttaccttaaagaatgacttttgtagttcttgacagatgaaagggcttttctcagagactgtagcaggaagacagggcaggtgtgggagttccttagaaggggagggctggrgcagcaagttgcatgacacctcctcagctggctcctgggaatgaagacaagaggctgtttaactacagacacactcagcaccatgagaaagctaaaacaaacaaacaaaaagctacaggcatatcttggagatattgcaggtttggttctaggccaccacaattaagagagtcacacaaattttttggtctcccagtgcatataaaattatgtttacattatatggtagtctatgaagtgtgcaatagcatatgtctaaaacagtgtacacaccttaattaaaaatactttacttctaaaaaatgctaacaaccctctgagccattagcaagttgtaatcttttggctgcagagccttgcctcagtgttgatggctacttactgatctgggtggtggttctgaaggttggggtggctgt

SEQ ID NO: 408139 - DNA, 524 bp, Homo sapiens
aggcttgtaggacaagagcactggtcataccaagagaacctgctctgaaaattgaattttccacaagcctagctgtaacccaaggaccagtttaagctcatatttcctcaaacacactgccctgactcaaagacaaaccttacctccagctgtcactcaccagtcagagcttgccagctcccagaagcttcttcagagccaatgtgctttctttccaaacaatatctaacatttctctaataaaactctcacctttctttttttaaaaaaacttttaatttaggtttgaaggtgcatgttcaagtttgttatcagtttacgtaggtgaactcgtgtcatgggtgtttgttgtacagatttttttcatcacccaggtattaaacccagtamccactagttatcttttctgctcctctgcctcctcccaccctccagcctcaggtaagccccattgtgtgttgttcccctctatgtgtccatgtgttgtgatcatttagctcccacttataagtgagaacatgtgg

SEQ ID NO: 408140 - DNA, 588 bp, Homo sapiens
gagtgtagtagtgtaattatagctcatcataaccttaaatttctggactcaagcaatcctcttgcttcagcctccagggtagctaggactacagatatgcaccaccacacctaattttatttatcttttttgtagggatgggttgtttctgtgttgtcaagctagtcttgaaatcctgggctcaagtaattctgcctcagcatcccaaagtggtgggattataagtgtgagccacctcacttgacctattttttgtttgtataacagatcacaaatattggtatacaggaaaaactatttttactaaaaaccaaataaatattaagataataggtatgmacatttttattattttttacaggtgttgaagaagaagaaaaggttgcagagatgcattaaataaagtctacaacccaggtgagtcagatgagtgtagatgctgtagaagtggcaacactcagaaaaaacagttgaggactatttctgcttttgctatcttaaaagcgatacacttaaattttataaaagaaacatgatataatagagttttctaaagggtagactatgttacgccattgacttaacagt

SEQ ID NO: 408141 - DNA, 617 bp, Homo sapiens
tatttgaaaaactttttgtaatattttggtaacaataaagaccctcaaatgaatttcaaacactataaatattcaacacatacacagaaaacattaactgtcagcaaggatattgaaaaactggaccctttatgcaccgctgtttggaatgtaaactggtgcagcccttgtggaaaacggtttggcagctccttaaaatattaagcacagaattatcacataatccaacaactgccrttcaggttatatacccaaaagaattgagagcaaggactcaaatgggtatttgtacactcatgttcatagcaacattattcacaatggcgcaaaagtacaaccaaccctaatgcctatcaacaggtaaatggagaagcaaaattgtacacacaaacatggaatattattcacctgtgtaaagaaaaaaaattctggccaggttcggtgacttacccctataatctcagcactttgggaggccaaggcaggcagatcacttgagtccagaagttccagatgagcctgggcaaaatagcaagacctcgtttctgtaagtttttttttttttaagaaaattctgataatgctatagatgaaccttgatagcactatgcaatcta

SEQ ID NO: 408142 - DNA, 617 bp, Homo sapiens
tatttgaaaaactttttgtaatattttggtaacaataaagaccctcaaatgaatttcaaacactataaatattcaacacatacacagaaaacattaactgtcagcaaggatattgaaaaactggaccctttatgcaccgctgtttggaatgtaaactggtgcagcccttgtggaaaacggtttggcagctccttaaaatattaagcacagaattatcacataatccaacaactgccattcaggktatatacccaaaagaattgagagcaaggactcaaatgggtatttgtacactcatgttcatagcaacattattcacaatggcgcaaaagtacaaccaaccctaatgcctatcaacaggtaaatggagaagcaaaattgtacacacaaacatggaatattattcacctgtgtaaagaaaaaaaattctggccaggttcggtgacttacccctataatctcagcactttgggaggccaaggcaggcagatcacttgagtccagaagttccagatgagcctgggcaaaatagcaagacctcgtttctgtaagtttttttttttttaagaaaattctgataatgctatagatgaaccttgatagcactatgcaatcta

SEQ ID NO: 408143 - DNA, 617 bp, Homo sapiens
tatttgaaaaactttttgtaatattttggtaacaataaagaccctcaaatgaatttcaaacactataaatattcaacacatacacagaaaacattaactgtcagcaaggatattgaaaaactggaccctttatgcaccgctgtttggaatgtaaactggtgcagcccttgtggaaaacggtttggcagctccttaaaatattaagcacagaattatcacataatccaacaactgccattcaggttatatacccaaaagaattgagagcaaggactcaaatgggtatttgtacactcatgttcatagcaacattattcacaatggcgcaaaagtacaaccaaccctaatgcctatcaacaggtaaatggagaagcaaaattgtacacacaaacatggaatattatkcacctgtgtaaagaaaaaaaattctggccaggttcggtgacttacccctataatctcagcactttgggaggccaaggcaggcagatcacttgagtccagaagttccagatgagcctgggcaaaatagcaagacctcgtttctgtaagtttttttttttttaagaaaattctgataatgctatagatgaaccttgatagcactatgcaatcta

SEQ ID NO: 408144 - DNA, 527 bp, Homo sapiens
tgccaggtgctggtcagtttccagaagtccaagccggctctctgaaagagctgaagccaaccttttccctcagctccatttcctgggatattctaaacttcccccaaactcagcacaaagaggaaaaaacactgtccttccttggtaaataaatgtatccattcaggaagattcatcgtggctggtagtgagaagtaaggccatcattttgctgggattgaggatgggggaggactttctgggtgactcaaggaaactgccrtgtgtgagcatggcccatggccctgctgctctggtccgggctgtcaggatctggctgggaaaacattccctagaagcctgggagtgggtgactgcaaggttgcttggtttctcgggcgctgcctgtgaccttattgtgtggagctctctgacactcaggtgcacagagctgcagccctctgccctctgctgtgctcggggaggtgggtgccctgtaatcacagggtggctctgcctgggacttgagcacccccttgggtggactt

SEQ ID NO: 408145 - DNA, 533 bp, Homo sapiens
catgacctcattctttttcttttttttttttttttttttgagatagagtctccttctgtcrcccaggctggagtgcagtggcaagatctcagctcactgcaacctctgtctcccgggttcaagcgattctcctgcctcagcttcctgagtagcttggactacaggcatgtgccaccatgcccagttaattttttgtacttttagtagggatggggtttcaccaggttagccaggatggtctcgatctcctgacctcgtgatccacccaccccagcctcccaaagggctgggattacgcttgagccaccaagctgggtccttgttcttgtatcttaaaagtcagtgatgttgagtaatttcttacgccaccacctccatggttgcctttcttctgccttcttctttcacttataaggaagcttgtgatttcattgatcccaatcatttaagataatctctccatcattttattgcaaccttaatttcacttgaaatctaattttcctctgccatgtaacctaacatatttgtag

SEQ ID NO: 408146 - DNA, 599 bp, Homo sapiens
cgggaggcagccctgacatgtttgcactactgaaaacacactagcaactgccatcctctggatttgtcttggtgggaggtggaggcagagggaagggaggtgttgtaggttttactgttgtttatattcattcacatctgaaatatccaaataatgcttttttggtccccaaaactcttgaaactacttaacacatgtgctatgtcactacttaggacagacaatattaacagcatcatcaggcattttaaatatgcaccattcttacctaagtgcaaatgggcacccctcaatcaaagaataaaaggggtccctatcatgctaacgttcttcagcacctttgcatttctgttgsatcaagtatatggtaccttataagtatcttgttgatgcagactgacttttcagactaacactatatgctcctgctaagtgactatttgctaccattgccacctccttttccttatttatgcttttccatctagcagcaatactttctcacaattttctcctctgcagtgctgcctgttgatgactaggaatactctttacaagcttatctacagcaatatctcttatttaaagccttgcctgca

SEQ ID NO: 408147 - DNA, 599 bp, Homo sapiens
cgggaggcagccctgacatgtttgcactactgaaaacacactagcaactgccatcctctggatttgtcttggtgggaggtggaggcagagggaagggaggtgttgtaggttttactgttgtttatattcattcacatctgaaatatccaaataatgcttttttggtccccaaaactcttgaaactacttaacacatgtgctatgtcactacttaggacagacaatattaacagcatcatcaggcattttaaatatgcaccattcttacctaagtgcaaatgggcacccctcaatcaaagaataaaaggggtccctatcatgctaacgttcttcagcacctttgcatttctgttggatcaagtatatggyaccttataagtatcttgttgatgcagactgacttttcagactaacactatatgctcctgctaagtgactatttgctaccattgccacctccttttccttatttatgcttttccatctagcagcaatactttctcacaattttctcctctgcagtgctgcctgttgatgactaggaatactctttacaagcttatctacagcaatatctcttatttaaagccttgcctgca

SEQ ID NO: 408148 - DNA, 599 bp, Homo sapiens
cgggaggcagccctgacatgtttgcactactgaaaacacactagcaactgccatcctctggatttgtcttggtgggaggtggaggcagagggaagggaggtgttgtaggttttactgttgtttatattcattcacatctgaaatatccaaataatgcttttttggtccccaaaactcttgaaactacttaacacatgtgctatgtcactacttaggacagacaatattaacagcatcatcaggcattttaaatatgcaccattcttacctaagtgcaaatgggcacccctcaatcaaagaataaaaggggtccctatcatgctaacgttcttcagcacctttgcatttctgttggatcaagtatatggtaccttataagyatcttgttgatgcagactgacttttcagactaacactatatgctcctgctaagtgactatttgctaccattgccacctccttttccttatttatgcttttccatctagcagcaatactttctcacaattttctcctctgcagtgctgcctgttgatgactaggaatactctttacaagcttatctacagcaatatctcttatttaaagccttgcctgca

SEQ ID NO: 408149 - DNA, 552 bp, Homo sapiens
actgatccactctagaagtttatgcattttktatcatttttcaagccaacagaaatgtgtaaggcctataattctgacatttttagttatttttaaggctgtgagcatgtaagatagtgttcatatatggaagaatatgtataaataccactaggtagcttattttgaagagatagtatctaaatttttgtccagagtagattggttgcagtttcttaggtgtgtctcttaatacgttgcctcaatgttttaaagcatgtagaaatttgaacacagtttaacttcatatagtcctttgtttataggtttaatacttctaaagactgaagacatcacagctccctttaagattcagtaatattaataaaattttagaaatatagggttagaatccaacaaattcagaggaaaattgttaaattatatagctgtagagcaggaatgaaacccaggttctaagctctaagggggccatgaggtaccatacaggtgcatcagtgactgggcatagattcagcaaaattacaggatggttaagagagtgagctgtgg

SEQ ID NO: 408150 - DNA, 523 bp, Homo sapiens
  misc_feature (1)...(523): n = A,T,C or G
tgattctcctgcctcagtctcctgagtagctgggattacaggtgtctgccaccatgctgggttaatttttttatttttttatttttatttttagtacagatgggatttcaccatgttggccaggctggtcttgaacttctgacctcagatgayccacccacctcagcctcccaagagatggaatctcactatgttgcccaggttggcctagaactcccaggctcaagtgattctcccacctcangtttgagtgtggctgggacaatagagtgcacacccagatgagggtaatttttgtaacaaagggagttaggaaactttctatcagagaaacctcaagtcccagatggtttcactggcatattttaccaacttattaaaaaaaaagaatgtaattaattcctaatgtcacaagcagtcaattactgaaaactgaccgctaaaaacatgaaattcccttggacatggcctaatatgtgtatacacatattnnnnnnnnnnnnnnnnnnnnnnnnnnnnnnnn

SEQ ID NO: 408151 - DNA, 635 bp, Homo sapiens
agttgatggatatgagttgcttccactttttggctactatgaataatgctgccatgaatatttgagtataaattttatgtgaacatatgctatcacttctcttgagtatatacctcagagtggaattgacaggctcattttcttttttgctttatcatcttcacaaggagtttatgtatcacattgatctttccaaagaaccagcctttagatttatttcgggttttactatatggtttttctatttcattactttcatctttctaacaatctcctcatcttctatcttgtattattctttatactaacttcttaacattaggttatctttatcttccctcttccttaataacaaaggcctttaaggccatcaattttcctctgacaactattttagctaattttcattggcttttacaaaaaatatttccttttcattgctttctaggtgatttcctcttcatccaaaagatatctgggaatgttttaatttctatgtagatttttttaaccttttagaaaaactgttaaaatttgrtatatgttagcttacagtcagagaaagtgcctgcaaaatctctgctctctaaaactcagttttcttagcagccaagtgcagagatgctcaaaaatat

SEQ ID NO: 408152 - DNA, 357 bp, Homo sapiens
cctgcaaaggcacatggacaaagagctctgttgtcctatctctatttctttttagcctccaaagacagagaggactccaccaggacattcagctactttagctttttagcagctagcgacacttcggtacttaaaatggataaatattgatctcctcctacaggagttcacaaacctctaaagcccaagctcttcgtcccaatgtctattgctttctcatatttacccatggactccagcaccattctccagttgcttgcccaacagaaggcagaagtttcaaagcagtgtttctctgcccaaggtgtcaygacagttgtttataggtcacagcagccatttgcttcagaaagccag

SEQ ID NO: 408153 - DNA, 633 bp, Homo sapiens
ttaggcttgaaaaccgattagaactcttgtcctataatgctaaaattaaggaagcgagatattgctaagcacctttcacacaaactgtttaatttaatctttgcatacaacaactttgttgcatacactggttttctgcctatgttttagatgaaaaaactgaagcttacagaaaaaattgccaaattcacacagctgctaagagtcaaagccaagatttagtctctgttctttctattacatcctattatattttttcctcattcagtaaatctttaccaggttcccattgtgttaaatgataatgtctaacttttggcaccacattagcccctgacatgctatcataattgttgcttagaccatgtaaattgagttttgaaaaaatttttctattgcaaaatggtttttagctggatgtagaattcatgggttctcaatggtcagaaggggtctaaattgtagtgataattatagttaatgaattgttaaggaacttcgcctrtgggatctcttaaccaccatgcctttgctatgaagtatttcttaaccctatttaaagatgaggaaagaaagatttagaatggttaagtggtttaccgaagattgcagatctagtaagtggcagaactg

SEQ ID NO: 408154 - DNA, 563 bp, Homo sapiens
atcatttttaattctagactgaagagttatattttaaaaagattctatcacagcaaccattgttcctacttacaactctttcaccttgtacccttctctagaaccttctccaaatctatgcctttctgaaataaaattgccattattaatctgggcaagcactgagttaaaatcgtcccagaatagtggtctgatggggtggtgattaagagcttargttctccagagctgtacttgagtttaatttcccatgtgttttatacttagctgtgtgactttgaacaagatacttaccctttctgagccttcgcatatctttaaaattgggataataaaggtacctgtctcacgggattgtggaatctaactgaaaaaatgcagatataaccaatgactgcaacaaagtaagatctcagtaaatgttggctactattggtgttggtggtgtgattagtattcctgtttaatacaaggatagaatgcatttacttttcactgtgcttcccactaataattttgctagtctttttggtactcatggctttagaagagttacagtgatt

SEQ ID NO: 408155 - DNA, 458 bp, Homo sapiens
ggacagtcataaaatcttaaagttccaaaattatctcctttgactcattgtctcacatccaggccacagtgatgcaaaggrtgggctcccaaggccttgtgcatctctgcttcattgactctgcagggtatagccttcatggctgctttcacaggctggcattgagtgactgcagtttttccaggtgcacagcacaagctgtcagtggatctactatcctggggtctagaggatggcagctttctcaaagctccactaggcagtgcctcagtggggactctgtgtgggggctccaaccccacatttcccctccacactgccctggtaaaggttctccataaggggctccacccttgcagcagatttctgcctggtcatccaggcattttcatacatcttctgaaatctaggcagaggctcccaaagctcaatttttgtcttctgcacagccgcaggcc

SEQ ID NO: 408156 - DNA, 458 bp, Homo sapiens
ggacagtcataaaatcttaaagttccaaaattatctcctttgactcattgtctcacatccaggccacagtgatgcaaagggtgggctcccaaggccttgtgcatctctgctycattgactctgcagggtatagccttcatggctgctttcacaggctggcattgagtgactgcagtttttccaggtgcacagcacaagctgtcagtggatctactatcctggggtctagaggatggcagctttctcaaagctccactaggcagtgcctcagtggggactctgtgtgggggctccaaccccacatttcccctccacactgccctggtaaaggttctccataaggggctccacccttgcagcagatttctgcctggtcatccaggcattttcatacatcttctgaaatctaggcagaggctcccaaagctcaatttttgtcttctgcacagccgcaggcc

SEQ ID NO: 408157 - DNA, 573 bp, Homo sapiens
cacttcccaccaggtccctcctccaacattgggaattaaaattcgacatgagatttgggtggggcacagtgccaaaccatatcaagaggtcttatgaattatctgttttcaaaagaagtttcttttgctaggcaaattcaatcttaaaaatcgacaagaaaagcagaatgaaagatctgtctagtccacccaaaaatacaaatctttcttcaaaatgcagaaagttcacacctatgggatgggatgggagaagggaggaaaagaaggaaagagaagaaagaggaaaggcatgggagtgtaaaggagaggacagaagatgagacaaatgaatgctgtatgggggatcttccagggagcctacagtcctgagggaagaatgcatcctcgaaasactttaccgctgtacactggcctcacaaggccaatgctaaatatatgctcctgaacctaagcaacttttggcaatatttctcctacaagggagtacacaagggaatgctcttcaactttcctttgggaggaaaatgtggggagaaggaaactatttggcttcagcttccatctcctcatcag

SEQ ID NO: 408158 - DNA, 537 bp, Homo sapiens
ccttccttgtttttggtacaggatactcagaatccgttgtgaaatctaaaatgtttggtatctgtagtcttgaggaagcttatggcagagattaaactggcatataactgcaatactttcaaatgtaaattttgaattagcttctaattatataatgagacattttgctttcttttcttgaacttacttttttttcagctttatattttaatttttcttccttactgaaagcaaattagtgatgtggtgatgttgtccagaaaggaaactcccccatagaacatgttctccactgacatccaatacggcacgtgaaaccacagaagccagggacattgttaacartatgtgcgagaagtctggctttaaaaagttgacaaagtcatccactctcactatggtttcatgtagcagaataaatcaagagccaagatgatttgggtttctattttcagtgtataattctgatccttgagatgattaaaacatttatataaaacaaacatccagacattaagtcaatgcaactttgctgtg

SEQ ID NO: 408159 - DNA, 537 bp, Homo sapiens
ccttccttgtttttggtacaggatactcagaatccgttgtgaaatctaaaatgtttggtatctgtagtcttgaggaagcttatggcagagattaaactggcatataactgcaatactttcaaatgtaaattttgaattagcttctaattatataatgagacattttgctttcttttcttgaacttacttttttttcagctttatattttaatttttcttccttactgaaagcaaattagtgatgtggtgatgttgtccagaaaggaaactcccccatagaacatgttctccactgacatccaatacggcacgtgaaaccacagaagccagggacattgttaacaatatgtgcgagaagtctggctttaaaaagttgacaaagtcatccactctcactatggtttcatgtagcagaataaatcaagagccaagatgatttgggtttctattttcagtrtataattctgatccttgagatgattaaaacatttatataaaacaaacatccagacattaagtcaatgcaactttgctgtg

SEQ ID NO: 408160 - DNA, 560 bp, Homo sapiens
catgacctaaacacttcttattaggccccacctcccaacattgttgcattggggattaagtttccaacacatgaactttgggggacacattcaaatcatagcagagtttgttcttctgtttattatttgtttctccttctagagtctgtatgtttcttgtatattgttttatccctagcagctcactgctgagcctggaccacagtaggtgcrcaataaatttttcaatgaatgaatgagtgtaacccccggagcagtagtttgcaacctcaaccccacattagaatcacctgatgaggttttcaaaatcctaacactcaggccacataccacatcagtttaatcagaatctatgggggtgagatccaggtgtcagtcatttttaaagtttcccatgtgattccagtgtgcagccaaggctgagaatcactgccccagagcctccctattcaacatgtgattcacagacttgcagcattagcttccttaaggaagctggttagaaatacagactttcaggccctaccgaggcctaatgcacccagatctgcattttaaca

SEQ ID NO: 408161 - DNA, 660 bp, Homo sapiens
acaatgttagtgattttgagatagtgaagaaatggaagaatatccagtaaatgttaaaaaaaaactgttcagttgacaaaaaagcaaaaaagctacagcactatgcagaatattcaaaataaactatagatacatttaaaaactaaagaaagaaacttaaattatcaaaagaaactcttgaagtactttgtttcattttcaaaaacctttttatttacatacaaaataccaatgccaaaacaagagaactcagtacattgggctttatcaaatgtgtaacttggtatgaaaaatatcataaactgaactaaaagtcaaatgatagtcttgagaaaatctttgttactgcaaacaaagaagtattatttataatataaaagaactcctttaggtcaataagttgaagacaatctacccaawagaaaaattggtgcctagattaaccaaagcaatcttaaaaaaaatatttttttgacagttcctactttccaatctcaaaacatattacaaagctacaacaatcaagacagtgtggtactggcagaaagatagacaaatagatagaactgagacttcagggcagaaaaacttttccatttatggtgaactgatttttgacaagggtgctaaggcaactcattgaagaaaaaatagcctttc

SEQ ID NO: 408162 - DNA, 646 bp, Homo sapiens
gaccattacaaggtaccaacaacatccggcagcaattatcttgtattacagtcctaacatacctggatagactagccaatctttatgccattttagtgtttcgtttttaataaaaatgtccataaatgtgtatgcatttgcatgtcttatatagataggaaacagaatatttgattactttatcaagagcttgttcagaaggtttgtacaatgaagataatagatgttctatacaaaagaaaatacaatgaagagcagaaatattacaaaatgtgcaatagtaaaatggataaagtaattagataataaaatcctagtttgaaayatagtctaagttctaaagttgtttttttcattttttaatacatattagtcttttatggaagacaatcttcttaatcatctaaaattatcacaggattttgatagttcttatatatcatcattctttatcaattatgtccttcatagtattctcaaaagtataaataatttagggacataaagaaatgtccacctcataatgactcctattagatccacatatactcattcatcccccaactacttatttattacttatatattgagcacctactgttactcaggcactatttattaaagttctaggcataaaatggtgaac

SEQ ID NO: 408163 - DNA, 675 bp, Homo sapiens
  misc_feature (1)...(675): n = A,T,C or G
tcttnntgctacgtttattaaggagctcattcttactgatcaatatgttgatatatcaagagtcaaatatccctgattattcttgctaattttwttttagagagtatattttcctctttgggaatgatttttaatactttctttttgttcggaaactatattttctttggaatcacatctttttataatgcatttttttaattcattattttggtttatcattggttgaactgcaatgtgcttttttattaacttttttcattgggtagtatcgcatatactttctcaggtctcaaatatgtaaagttgtcttttcattaattttccataaggttgaaaatttaggtgtatgaaattttgggtcatgccatattctttatcaaggattcttagacattgccatatattctggagttttttttgtagaacataatgtgagggtaatttgaccagtgatttctattcaggagaattcttattttattcgtatgccataaaatgtttttttttaacacattaaattcaaaaacttgaccagggcaaacccaacacctttcccagtttgtaaaagtgaagttagttcaaaagcaatgtgtgctgtgttgtttatgtcattaatttatcttgctgaattataactacctgttgacctttctccctgtctcataggcttca

SEQ ID NO: 408164 - DNA, 675 bp, Homo sapiens
  misc_feature (1)...(675): n = A,T,C or G
tcttnntgctacgtttattaaggagctcattcttactgatcaatatgttgatatatcaagagtcaaatatccctgattattcttgctaatttttttttagagagtatattttcctctttgggaatgatttttaatactttctttttgttcggaaactatattttctttggaatcacatctttttataaygcatttttttaattcattattttggtttatcattggttgaactgcaatgtgcttttttattaacttttttcattgggtagtatcgcatatactttctcaggtctcaaatatgtaaagttgtcttttcattaattttccataaggttgaaaatttaggtgtatgaaattttgggtcatgccatattctttatcaaggattcttagacattgccatatattctggagttttttttgtagaacataatgtgagggtaatttgaccagtgatttctattcaggagaattcttattttattcgtatgccataaaatgtttttttttaacacattaaattcaaaaacttgaccagggcaaacccaacacctttcccagtttgtaaaagtgaagttagttcaaaagcaatgtgtgctgtgttgtttatgtcattaatttatcttgctgaattataactacctgttgacctttctccctgtctcataggcttca

SEQ ID NO: 408165 - DNA, 568 bp, Homo sapiens
tctcactgtttcctaaattaatcatttaataaatgaataaagcagacgtgaatgccctataatagtcacaatgctgatgttcattgagaaggtggacratggaaccccaagtgttccagaaaaaataataaggaataatgggaagggtaagaatataaaacagccgacaacccaacactaaggaataatttctgtgacttgcaaaaagtgcctgagacctgatttctgtagggaaattttttaaaagtcaccattgtgaccctagttttgccatgctgatgctttactattttattttattaaggttctgtagctcttcactaaatacacaccataaaaattctgcccaaacaaaaaaagatgtcatcaaaaataaatagtgaaaatactatctaatgcaaatttctggtagcaaatttctgtctatgacactcctagcttgacaaatttggatcatactacagatggataattttttggcaataatgttagttttctcccaaatagaagctatgtgttcaccgctttccagatgtacaactccctctggttaattcttacaaaaatg

SEQ ID NO: 408166 - DNA, 568 bp, Homo sapiens
tctcactgtttcctaaattaatcatttaataaatgaataaagcagacgtgaatgccctataatagtcacaatgctgatgttcattgagaaggtggacgatggaaccccaagtgttccagaaaaaataataaggaataatgggaagggtaagaatataaaacagccgacaacccaacactaaggaataatttctgtgacttgcaaaaagtgcctgagacctgatttctgtagggaaattttttaaaagtcaccattgtgaccctagttttgccatgctgatgctttactattttattttattaaggttctgtagctcttcactaaatacacaccataaaaattctgcccaaacaaaaaaakatgtcatcaaaaataaatagtgaaaatactatctaatgcaaatttctggtagcaaatttctgtctatgacactcctagcttgacaaatttggatcatactacagatggataattttttggcaataatgttagttttctcccaaatagaagctatgtgttcaccgctttccagatgtacaactccctctggttaattcttacaaaaatg

SEQ ID NO: 408167 - DNA, 622 bp, Homo sapiens
gtctccaatttgccaactgtagatctgagaacttgtcagccttcataactgcatgaaccaattttttataatctctctctctctttctcaatatatatatatatatgtacacacacatatacacgagtgaagccttgtgtatatgtgtccacatatgcagttacacatgcatatacacatgcacatacatactatagttattgctactctggagaagccagacaatacaaccaaaaaaggattaattctataaaaatttcttgaagattgatgtcaaggttataaaaatcattaaaaaacaagttttgaaaaagtaaataaacaaatttattctgatagttatatatcaatttccaaatacaataatttgagagagaatatttttctcaagcacaaataaaactttactactactrttttacatttagtcgcatactagcatgtaagcaagtcttaacaaatgtcaacttaaacaccaccagttctttgacctcatgcaattaggttggaagtcagttgcaaatgatttaagtccccatttatttgaaaaagtaaaaagcataataaagcagttctcaggaattttatgaatccatacatcaaagaaaataaaaattaaagc

SEQ ID NO: 408168 - DNA, 622 bp, Homo sapiens
aatggaattaattttggggggctagttgtgtgtgttcagcatatgaataattttatttttaaaaatttatgtggttcagtatttgttttgtcaaaagtgtgaataatatatatgtgaatatatattgacatattatttagcttttaatgaaaatacttagggtaaaacaaaattctacaagttgggcaaggctcagtgagaatagattttctttgctccatgtaatgtcacctggggcagctttaatgggactggaagatctactaccaaaatagcctcacttacatagctgtcaaattgatactcattctcagctgagagctcagctagagctgctggcccaggatctcctccatgtcacctctcaactggcaaggttggayataacacagtatgacagtctcaagttagctgaactaaaactactggtagttcaactcagggtagttgaatttgagtcccactaagttagagagattagataaaaacctcgagctttctgttgaaatttcagaaaggatgcactttaggaaggaaatctatatgccaggaataaggaattcataatgagaataaggataaaacccaaatagtctcatcccaaaaagtataagaccagggt

SEQ ID NO: 408169 - DNA, 610 bp, Homo sapiens
aaactaaaaacattgacacacaccaaaataaatacccaacaggggaaaaagacaatctagagaatgagagaagatattttcaaattatgtatctgacaaaggactaatatccagaatctacaaggaattcaaacagaacaacaagaaaaaaatcaaccccattaaaragtcggcgaaggacagacatttctcaaaagaagacatacaagaagccaacaaacatatgaagaaatcctcaatatcactaatcatcagagaagtgcacattgaaaccacaatgaaataccacctcacattagtcagaatggccactattgaaaagtcaaaaaccaacagatgttgacgaggatatggagaaaagggaatacttttatgctgttggtgggaatgtaaactgtacaacctttatggaaaacagtatggagatttctaaagaaactaaaaatagacctaccattcaatccagcaatcccactactgtgaatctacccaaaggacaagaaaccaccatattgaaaagacacctgaacttacatgtttatcgcagcactattcataaaagcaaagtcataggatcaacctgtttccattaataaatgattggagaagg

SEQ ID NO: 408170 - DNA, 365 bp, Homo sapiens
ctggcatctccttttgttttattctggcaataaggttgatgttgggacatcaatcgcctgtctttagaatcatatataacctatgatttagaacgaggttktcatcaaaaatttgcaaacatttgcatatatcttcattcaccatctcttcccactctgctaattcactttcttgtcttctaaatgcttttgcaattgaacattgccagccacaacccctttctaggaaaatgttctttttcaacaatatagacgagattgcttttctaactgcagtcattgatctaatcagaacttcataaatctttaataaattccaacttaatgcattactgaggtaccatcgaaattatttcaattattgt

SEQ ID NO: 408171 - DNA, 589 bp, Homo sapiens
tggccctgctttcctggcccatctgctccctagatcttgtgtaagaccagtcatggcctctgttaactttaactgagcagcaaggtaccttgttctggctccatagtgcccacttaaaaacaaaacaaagcaaaaaacaaacacagacaatgcaattttttgaatatcctcaaataaggcctcagctaaaacagaaragagaaatttgagaccaactgatacacgatttttaaatcagcagaactgtcttctatttttttacaagtagtgaccagttggcagtgagaaacctagaaaacttgtgaaaattaattttcttccccaagaacctgccataaatcatcctttataattttactcaagtggcatgagagtgatggtctgtatatcatccacaaatttcttcattgcaatgaggttaaaagatagtgttattaagaataatggttaatactatacttgcatgttaactaaaaatttaaagtttaaaatgcagtttattttaccaagaaatggatacccattattccaactgtattcatctggatgtgtttgagaattaaatacataatgtctggaacacaatata

SEQ ID NO: 408172 - DNA, 605 bp, Homo sapiens
atctgctaccatcaacccaataccagagctcacagacccaatacagcaactacacaatagaaattacaaagcaaccagaaccagaaattaacacttcacaataggatcaaaaacttacatatcaatattaaccttgaatgcaaatagtctaaacacttcacttaaaaggcacacagtggcaaggtggattaaaacaacaacaagaccaatctatctgctatcctcaagatgtacatctcacaygtaatggcatccataggccaaagaaaaatctaccaggcaaatgaaaatcaaaagagagcaagaatcactattcttatatcagataaaatatacttaaatcaacaatagtaaaaacgaataaagaagggaatttgtattagtctgttcttgcattgccataaagaattacctgagactgggtactttataaataaaagaggtttaattgactaacagttccataggctgtacaagaagcgtgactggggaggcctcaggaaacttacaatcatgccagaagacaaaggggcagcaggtacatcttcacatggtcagagcaggaggaagagagagcaaagggggaagttctattcacttttaag

SEQ ID NO: 408173 - DNA, 590 bp, Homo sapiens
tttcaaccaagttttctcttattaggtaaataccatggactcatgcttatgtttaggaaaaaaatattgtgttatttgtgtaattaaaacgacccaacattttggtatctggtaatgcttctcttacatggcaatgtgtccggtgtctgtgacaggatgttctcagtagaaatgactgcaggggaaatgaaaacaaatcaaagtcttagaacttgagtttttggtttttctaaaataaatgttttcctcctcacagaaatgggaagtcaaatacctaatttatatgcttcatttaagcattaaataggaaaaaatggccaaacgtgattgaacattatgctagctgcaccaagatcagagaccaatactcagtacaggcccttttgcctcgttctgtttcatggtgaagaactaaccctccaatatgaccattagccatcttcagatgaatacttttaaacaagttgttaatgattgagtaaaagccatcccaattacaggaaaagtgcctcaccagtacagctacttcwattaataaattaaattatttcattttctaaatgaaaaacaccgtgttttaagcagagccc

SEQ ID NO: 408174 - DNA, 559 bp, Homo sapiens
agaacctgatttctaatcgaagagctgctattaaatgtttgatttgaaggacctagtgttcattcaggatatttttaactcaaatattctatgataatcattgtaactttaaacgatacagatagaactaaggagcataattaactgtattatccaatgttattgagaataattgttagccattactaaagtgtaatacatatattacatatatttatattttacatatatttatatataaacgtatactaatattttgtataaaatacagaagataatatgtataatataaagtatataaatatttttatataatattcatatataaaaatatataaacagatatattaatataaatttatgtacatatataaaagatatgggrtcttgctatgttgcccaggctgctggcctctaacttctggactcaaacaattctcccatttcagcctcctgagtagatggggttatgggcacgtaaaatgttggtacaatgtgaacttttaaaaatctttttgaatttccacttttgggaagagggagtaaacatactttacct

SEQ ID NO: 408175 - DNA, 504 bp, Homo sapiens
tgaactctgggcatggagaaacaaaggataataatagtgatctgctcctgcataaagttatgcccttccactgtcctttgttagtatcattatcatagtacatgtaagcaatagcagaaaaccaaaatgtggcaaagaagtatttgagatatgatacatcctattggtgggagcaggataatgagatgaatatgttattaaattaaactgagcaggggaaggatgagwataggaagaagtaagtattaccaaattgctcagataactcagaaagagctcatataatgcattagagcaattctactcataaagtactatttgactagaccaccaagtccttaagagctgacttttaagtaggcaatgacaacaacaaatactttatggggaaggtagaaatttagatgcatttacagggtgtgtcatggggtatacatgacttcccttcagctactttctgtctttattatgacgactttcttagagggtctaccattgcttcca

SEQ ID NO: 408176 - DNA, 504 bp, Homo sapiens
tgaactctgggcatggagaaacaaaggataataatagtgatctgctcctgcataaagttatgcccttccactgtcctttgttagtatcattatcatagtacatgtaagcaatagcagaaaaccaaaatgtggcaaagaagtatttgagatatgatacatcctattggtgggagcaggataatgagatgaatatgttattaaattaaactgagcaggggaaggatgagaataggaagaagtaagtattaccaaattgctcagataactcagaaagagctcawataatgcattagagcaattctactcataaagtactatttgactagaccaccaagtccttaagagctgacttttaagtaggcaatgacaacaacaaatactttatggggaaggtagaaatttagatgcatttacagggtgtgtcatggggtatacatgacttcccttcagctactttctgtctttattatgacgactttcttagagggtctaccattgcttcca

SEQ ID NO: 408177 - DNA, 554 bp, Homo sapiens
aatgttaacaaattacaatcaaacaaaaaatttaagatatgaattttcctgtttctagtaatcaccatcatcatcatcaccatcatcatcatcatcatcatcaccgtcatcatcaccatcatcaycatcatcatcaccatcatcgtcatcaccatcatcatcatcaccatcatcatcatcatcatctccctctgaaattcactgtacggtaacaagctatatgatttactcttggatgcttacaggaagaggccaagaggccagactgaaggggagaatgaagatgtttgtcttcacccaatcaacattgatttcattaagaagactaaattttttttctttaaatttccatattctatacagaaatccttaagattactagaagttttaaaagacatatcaacaccttctatacacaaaagttgaaattatatatttttattagcaatgagaacatttttaaaaagataacaatgggtacacaatttataatcaggggagaattatagttccgagagtgtattaggttactagggctactataaacaatcatc

SEQ ID NO: 408178 - DNA, 585 bp, Homo sapiens
catatcgctattttttaaattaaggaaaataatcagttacatttggatatacagcatctcaatataaagaaatgaagttacgtatttgcaaaggttttcttacattttatgtaaaaacagcttatttttttgaatgcatagatataattaaccaaactaggattgagactagagcatcagtcaattttgtaattcattggaagaactgcttttgttttgaccctgcatacaaatgcaaaatatctaaattttaaatatttaattgattatatttttcttttaaaactctgtaggtataaatatttgaggttcgcttatatacatatgtatatttccactaggttatgttggggaacggcaagtgtaaaaaaccatgcaaatgtattctttattctcataaaaattcaataaaataaacttttaaaaatactgtcaaatagttaaatagatgttaaatcaaatttttgcatcagaaatgttcagtaactgaataaaccaaagcctgaaaaaatggcatcctacaacacacacamacacacacagttaaatatgcccttttctgcatactaaggcatttcattccag

SEQ ID NO: 408179 - DNA, 621 bp, Homo sapiens
taacattacccaaagtgcagagaaggcacataaaataataattgaagaggagttttgggtagacagagaggaaaggtaatgaaaaatgtttatggtccagtgaggtctgggaagaaagtcaccaaagtggagaaaaaagcaaggagtaaaacatagagagcacagctttcacctgctcttctgaaatcccagagtcagaggtgtggagctaattgaagggaaaggtttttgcccacctctgttttgatctctgaaaagatagcttcattgtgtggtgtttgcgtcaacataggtcagccatggcacagaaaaataaaatgacgatatggcatttttaagcagagagagaatgttgagagaaggttcagagctgcccttgtgaacggggacaaggacgggactctgaagtgcccacatgtcccctggaagagatggaagagagctgagcccagagctgggaagcattcctgggatcaccctgacaagagacaaggcagtcacagtgctgaagccacagcatgaacagccttgttgggcatctaatggagggtgatttagaaaataaaagcagagcacaaccaactcctgaastatccaatagaacaagtcaaaaatgtttgc

SEQ ID NO: 408180 - DNA, 562 bp, Homo sapiens
gacattaggggtttaatatgaatgagtgggggccttgggaattcagtccataataccatgaatctagagaattataagctgtcacatagasagatatactcatggtggctagcagaatgccatgcatgttaataaataagtattatttatttattcatgttttaagattcaactctgacaatatctaggtaaacaataaatttttgttgaatcaatatgattgattcaatgaataaatttgtttactatcttgagtggtcaccatcacactatgtgaataacacaacttaagggttagagacttagctgagatacaagttaatatattactcccatctttcttatttaaaagttagtattttaattaaacaattgaacttaagcaatgttacaagttaagcagataaatcttatttagcaagatctttctttagtaaatatctagaattgaatatttttctcgctttttcttctttattagctttaatcagacctaattcatatacttaaaaatggaggactgaatatttactacaattaaatcctatactgatactaaatc

SEQ ID NO: 408181 - DNA, 543 bp, Homo sapiens
gttttttttcctgtggcactgtatttttcttataggacaaaagaagtataagtagagagaaaaccatttcaatataaagtacaaccttaacatatagaacatgtgtcgtttttgtttttatttttttgagacagtgttttactttgttgcayatgctggagtccagtggcacaatcacaccttactgcagccttgatcctcctaggctcaagttatcttcctgcctcagcctcctgaatagctgggactacaggtgcacatcaccatacctagctaatttctttttatttttagtagagacaaggtcttgctatgttgcccaggctggtcttgaactccttgcctcaagtaaacctcaggcctcggcctcccaaagtattgggattacagatgtgaaccactgtgccaggccggaacatgtgttctaaaaaactaatttacaatcattgtatgtacctttcggtaaaaatattagtcattaatagggccaactgttggcatcttatttagcatctgactagaataaaatggccttcatcacgt

SEQ ID NO: 408182 - DNA, 572 bp, Homo sapiens
gaaacagcatttggtaaaagttaataatcattatggattaaaatcattcataaaatagcaaaagatggacattttctggttatttataaatacatttataactaaaagatctagcatcaagcttaagaatacaggtgatacagatgataaacagcttctaattaactttaacactctaagacaaaaacagaaggggagaaaggcagtgaaggagaaaggaggagaagaagaaagatgggaaggaggaggggygggggaaggataagagaaagaaagaaaagtatgttaccgaacttgcagaaaaagaagcaaaattaacattattttcaaatgataggattgtagagattgaaaaaacaagacactcaagtaaaagagactcaaagtcaaaaccactacaaactataagagatctggtataaacataaacatgcttcaataaaagcaataaccatttttcaaacattatataagagatcatatgtagtatttctaggcaaaggtagtataactacagaataattagcaagaaagtgaagaaatgttttagaatgcttctgaaagacagaaac

SEQ ID NO: 408183 - DNA, 620 bp, Homo sapiens
cagtgtacggataaagaaaatgtggtacatatacaccattaaatactgtgcggcaataaagagactgaaatcatgttctttgcagcaacatgaatgcagctggaggcaattaccctaagtgaattaatgcagaaacagaaaaccaaataccacatgttctcacttataagtgggagcaaaacattggatatacatgtacacaaagatggaaacagtagatgctggggactgctggtggggagagagagagggagcaggagctgataactgtctattgggtactatgctcrttacctgggtaatggaatcaatcatatcccaaaactcagcatcatgcagtacacccatgtaacaaatctctacatgtacccccttgaatctaaaataaaaattgaaatgactttaaaaaatcttttaaaataaaagaacactctggctgctataaggaaagtggattttgacagggcaacagtggtgatggagagactgggtaagtaggctatggtctcagtccaatagagagatgatggtagtttggataggatggtggcagttgggtggaaggagagcattggtaaaggaaatattgtgaaagaggaactgataggacttgctacata

SEQ ID NO: 408184 - DNA, 598 bp, Homo sapiens
cccaatacagagcatgatgccatcttataggccaccggttttccttgtgtctagtcaataaatgagtactctaggatctggagctcaaatgagtcatggatcaagctgtagctcacatgggacaaagcaaattaattgatacaaaatgaaaaactttatatggaggcagtttataggtgtgatagctagtcagactttcttagattcttttttaatgatcatttttgtaataacaattgttttattaaatgacagaactcagatgaaggtgtgtgcaaataagttttaattacattcagataaaacatgcatatttctaaggaggccaagtgtctttgtccatttcctgctgatgcaatgaaatrctacagactgggtaatttataaatagtagaaatttatttggcatatggttctggaggctgggaagttcaaaagcatggcaccagcatctgctgagggtcagtctatggcagaaggcattacatggagagtgagcatgtgagacacagagaaaatgggagcaaacttatccttgtataggacccactcctgagataactaatctactctctagataatggcattaataataatc

SEQ ID NO: 408185 - DNA, 539 bp, Homo sapiens
ggtgtcctttcctcactttatgtttttgtttgctttgatgaagatcagttgactgtaagtatttggctttatttctccattctctattgtgttccattagtctatgtgcctatttttataccagtaccatgctgttttggtgactrtagtattatagtatagtttgaagtcaggtaatgtgaggtctctagatttgttctttttgcttagtcttgctttggctacatgggctcttttttggttccatatgaattttaggattgcttcttcttgttgtgtgaagagtgatggtggtattttgatgggaattgcattgaatttgtagattgcttttttcagtctggtcattttcacaatattgattccatattccatgaccatgggatgtgtttccatttgtgtcgtctataatgtcttgcagcagtgttttgtagtttttcttgtagaggcctttcacctccttggttagatatattcctaaacattttactttttctgcagctgtttcactgttggtgtatagcagtgctactgatttg

SEQ ID NO: 408186 - DNA, 539 bp, Homo sapiens
ggtgtcctttcctcactttatgtttttgtttgctttgatgaagatcagttgactgtaagtatttggctttatttctccattctctattgtgttccattagtctatgtgcctatttttataccagtaccatgctgttttggtgactatagtattatagtatagtttgaagtcaggtaatgtgaggtctctagatttgttctttttgcttagtcttgctttggctacatgggctcttttttggttccatatgaattttaggattgcttcttcttgttgtgtgaagagtgatggtggtattttgatgggaattgcattgaatttgtagattgcttttttcagtctggtcattttcacaatattgattccatattccatgaccatgggatgtgtttccatttgtgtcgtctataatktcttgcagcagtgttttgtagtttttcttgtagaggcctttcacctccttggttagatatattcctaaacattttactttttctgcagctgtttcactgttggtgtatagcagtgctactgatttg

SEQ ID NO: 408187 - DNA, 622 bp, Homo sapiens
tgtagatgctgttcagctgctgatagcatctggcctttaggcaggctaaaaaaacttagagttaataatgttagattcaattgtatatgtggtgtcccatggtcctagtttccccctttctgcttttgcaattgtcattttagggagagattcattctttctactgtggcttgtccttgagaattatatgggatgccagtaatgtgtttaatattccatatagagaaaaatgtacctagagcttggctagtgtagcctggggcattatctgtttaatagaagctggaatgcccatcactgcaaaaggtgacacttaacacagacagaagactctcctgattggcatgtagcccagacaaaatgagaaaaggtgtccacacatacatgtacataagctagtctcccaaacgagggaacatgtgtgacatccatttgccaaagagaattaggttccagtcctcgaggattaactcctcctgtaaaagataaggaaygcaccatttggcaagttgggcatcgctggataatagctttagcttctttccaggtaatgctgtatctgcgtttgagaccagaggcattaatatgggttaaattgtgaaagtgtctggcattagatatt

SEQ ID NO: 408188 - DNA, 622 bp, Homo sapiens
tgtagatgctgttcagctgctgatagcatctggcctttaggcaggctaaaaaaacttagagttaataatgttagattcaattgtatatgtggtgtcccatggtcctagtttccccctttctgcttttgcaattgtcattttagggagagattcattctttctactgtggcttgtccttgagaattatatgggatgccagtaatgtgtttaatattccatatagagaaaaatgtacctagagcttggctagtgtagcctggggcattatctgtttaatagaagctggaatgcccatcactgcaaaaggtgacacttaacacagacagaagactctcctgattggcatgtagcccagacaaaatgagaaaaggtgtccacacatacatgtacataagctagtctcccaaacgagggaacatgtgtgacatccatttgccaaagagaattaggttccagtcctcgaggattaactcctcctgtaaaagataaggaacgcaccatttggcaagttgggcatcgctggataatagctttagcttctttccaggtaatgctgtatctgygtttgagaccagaggcattaatatgggttaaattgtgaaagtgtctggcattagatatt

SEQ ID NO: 408189 - DNA, 586 bp, Homo sapiens
tgttgcattgctctagtttatgctctaacattccagtctgtaaacttaacatgaatagcaaatgaattattgttctccattttttctgaatactctgcataaaacttgcatttgtagtcatcacaagtacatatgtggcacttaactcggcacaataataacctttgagtgtcattggaagccartattcatggggtcacaatgaataatgcagcatcacgagtaatggtgtaaccagcaattaaataaatgatattaggaaactgcaaaatcaagataatctctgttgcttcaacacaaacaggttccagtgagccatggcattgtccgtaacatcattgctctcttttcattgtgatgagaaaataaacacgaagagatattttccagaacacaattggcagagatggtgccagaacacaacaaaaaactttctgaggccaaccttctatttaatatccaaataaactatcagcacaatctatccaacttttatttttgtcatcagtcacagttctctactatatttgtaaaaggatgctttatcttggcatagctgcagcccatttctgtgttaagattttta

SEQ ID NO: 408190 - DNA, 483 bp, Homo sapiens
ccacattcacttccatctttccatttctatccacccaccagccaccccgcctctcccagcaagctgaattacaccacattcaaatcttctgcaatggaactccctaaaatatgctcttttttcaaaatatgtttacattcaagtcactcaagtgctacattgctgagtcaaagacttcagacattttaaggaaggatagagaaataggagactagggcctgtggtctagtgttctgtagtattctaactctttatcctcttctcccagtccccaatctcaccccttatctatggtctttggctgttctgtttttttgtttttttkgggtttttttttttgagttttgtgcttgttgcccagactagagtgcaatggcatgatcttggctcactgcaacctctgcctcctggattcaagtgattcttctcctcagcctcccaagtggctggtattacaggactgtgccttcatgcctggctaag

SEQ ID NO: 408191 - DNA, 483 bp, Homo sapiens
ccacattcacttccatctttccatttctatccacccaccagccaccccgcctctcccagcaagctgaattacaccacattcaaatcttctgcaatggaactccctaaaatatgctcttttttcaaaatatgtttacattcaagtcactcaagtgctacattgctgagtcaaagacttcagacattttaaggaaggatagagaaataggagactagggcctgtggtctagtgttctgtagtattctaactctttatcctcttctcccagtccccaatctcaccccttatctatggtctttggctgttctgtttttttgttttttttggktttttttttttgagttttgtgcttgttgcccagactagagtgcaatggcatgatcttggctcactgcaacctctgcctcctggattcaagtgattcttctcctcagcctcccaagtggctggtattacaggactgtgccttcatgcctggctaag

SEQ ID NO: 408192 - DNA, 569 bp, Homo sapiens
ccgtttctcaaagatagcccaaggaatctcgccacttccttgccttttacacatctggattcatccagagacataaaccctgaccaggactagcttcaaaagggtcccacccgtgcagtcacatagggctcagaagggccctgtacttactttcttgctctgctatggcaatcttgaaattcttaatttttaaaccagcacccgcctcccctccccgccacctccacaacattttcattttgcactgggcctggccttaattctcaattttctcaaaggctgtcatgtaactatataaaaatatagttaaaagagtttcttctctagacatgtctttagtcactaggacatcaagagacaggacggatgcttctattaactgagagttgttggaatcataaaggctttgtaatccaatastcaccctccacgccttctcaatttcagaacctaagagagtttgcttagagaaagaacctgagaggttgtaaagctgagctgaccaaagctcattgaatcacatgtagctattcagcacttgaaatgtggctggtctgaaaaaagatgtg

SEQ ID NO: 408193 - DNA, 631 bp, Homo sapiens
gcttaggaataaggaaggatcctttggctcacactttgcctgtcccatgtccttgggaacccacccgtagtggaaaggggtgggtatttcaggagcagcagcagcagcattttgtctgcatcaaagttcctttgaaccgattgtaatttttgccttttggttacattggctttacctcatcttatcagggggaaaatggcttcattgtatcttagatcgtcagagcttkgaggaccctttgagatgagggaggaggacttgcatagggtcatacagggggctaagggcagagctagttctagaaccaggtgtctgccttcccaaaccacaatccccaggctccctcctgtccctgcttctctcaggccctcccgcaatctgtcatctagtgcatgttcctagttacatttgctaggggacataccacaggactcagaaccttgtctgttttacttttttagggatgagggtgaagattgatgttgggcaagttgcacggtggcaaaaaagcatacagcatttaagggcagatggagatggtcaaggttgaggggagaggtgtgtcactgatcaatgctaagacccaggcaggggtttgtaagagagcttcgtctgcctggtagacacatcg

SEQ ID NO: 408194 - DNA, 631 bp, Homo sapiens
gcttaggaataaggaaggatcctttggctcacactttgcctgtcccatgtccttgggaacccacccgtagtggaaaggggtgggtatttcaggagcagcagcagcagcattttgtctgcatcaaagttcctttgaaccgattgtaatttttgccttttggttacattggctttacctcatcttatcagggggaaaatggcttcattgtatcttagatcgtcagagctttgaggaccctttgagatgagggaggaggacttgcatagggtcatacagggggctaagggcagagctagttctagaaccaggtgtctgccttcccaaaccacaatccccaggctccctcctgtccctgcttctctcaggccctcccgcaatctgkcatctagtgcatgttcctagttacatttgctaggggacataccacaggactcagaaccttgtctgttttacttttttagggatgagggtgaagattgatgttgggcaagttgcacggtggcaaaaaagcatacagcatttaagggcagatggagatggtcaaggttgaggggagaggtgtgtcactgatcaatgctaagacccaggcaggggtttgtaagagagcttcgtctgcctggtagacacatcg

SEQ ID NO: 408195 - DNA, 631 bp, Homo sapiens
gcttaggaataaggaaggatcctttggctcacactttgcctgtcccatgtccttgggaacccacccgtagtggaaaggggtgggtatttcaggagcagcagcagcagcattttgtctgcatcaaagttcctttgaaccgattgtaatttttgccttttggttacattggctttacctcatcttatcagggggaaaatggcttcattgtatcttagatcgtcagagctttgaggaccctttgagatgagggaggaggacttgcatagggtcatacagggggctaagggcagagctagttctagaaccaggtgtctgccttcccaaaccacaatccccaggctccctcctgtccctgcttctctcaggccctcccgcaatctgtcatctagtgcatgttcctagytacatttgctaggggacataccacaggactcagaaccttgtctgttttacttttttagggatgagggtgaagattgatgttgggcaagttgcacggtggcaaaaaagcatacagcatttaagggcagatggagatggtcaaggttgaggggagaggtgtgtcactgatcaatgctaagacccaggcaggggtttgtaagagagcttcgtctgcctggtagacacatcg

SEQ ID NO: 408196 - DNA, 572 bp, Homo sapiens
ccatactgttcctatcattgtaataataaacttacatatgtaaaacagttcaaaaatgttcctcttacagcctcacatatacttaccaatgaatgtctatatttgaaatactcagggaacacataagagtaggtaattagcacaatacataggtctattatctagaagcctggcttctcaggtcaaaagaattgtcatttttctaaggcctcaacttttgattggctttgctttggaggttaatttataagtttccacggaatttgggggttgtgataatttgacatrggtgaatgaaattggaaagtcatgtacatcaggcaaacaggacaaaaggcagtgaaacaaccaggtgcatccttcactactagtcacatcagttgtgaagtccattactttatcaaaaactgttctcactttctcttgaaagccaatgttggtctctcaaggatctaagttaattcctttgtagacctcattcaggagaagagggctaagggagtcctcacttgttagccactaaggaaccaagaatcctcaaactgcagattctctctttggtgtcccagagc

SEQ ID NO: 408197 - DNA, 508 bp, Homo sapiens
ttggctgggcgtggtggctcatgcctgtactcccagcactttgagcagctgaggcaggtgaatcacccgaagtcaggagtttgagaccagcctggccaacatgggaaaaccccgtctctactaaaaacacaaaaattagctaggcatggtggcgggcacctataatcccagctatttgggaggctgaggcaggagaatcgcttgaaccagggaggcggaggttacagtgagccaagatcatgccacttcactccagcctgggtgaaagagcgaaactccatctcaaaaaaaaaaaaaaatagaagaagaaaaggcaagatttgtagsggaatgtgtggggttgacgcaggtgcttcagcacagagaacagagaagttgaaggtccagggagagggcagatggagctctggtctgagctttcatcgtcagagttgacccagtggagaagtcctggtgtatcagccagagtcctttggttgaaacacacagagatggcagctgatttaag

SEQ ID NO: 408198 - DNA, 454 bp, Homo sapiens
ccaacaagcacatgaaaagatgttcaacattgctagtcattaagggaatgcagtttaaaccacaatgaggtaccactacatactcaccagagtgattaaaatttttaaaaattgacaacatctaatgttggtttagatgtggagcagccagaactctcatacattggtggacagataaaaaatgttacatttgctttggaaaaggtctggcaatgtctcataaagctaaacgtatacctatcctatgactcagcaattcttctcttacatatttactcaatagaattgaaaacatatgtttgcaagaagacttgcacaagaaggttcataaaaactttgttagygagagctaaaaaatggggagattccaagtagccgtcaataagagaatgagtaaacatactttagtatattcatacaatggaaaattactctgccaggaaaaggagcaaat

SEQ ID NO: 408199 - DNA, 533 bp, Homo sapiens
cctgtgaaacgctcctcattggagaaatctgaccggaaagtgatggacatgaaggagccaggggagaggaccacctcctggccgggagtctgctctgtgtctgtggtctccctgccacagaaggttgccagcacctggtcctcagtttctacctttgaggtcaaagagaaagggaacaagatgagcagtttcccagctaggcttctttccttatctttagaaagaaaaaggaaggggccacccaagagtaggctagtcagcctgagaaacccaaagaaaggargttaaggattcttgagaaaagacgcattacaagttaattcaatgtggacatctgatcagtttcattcgtcttatttagttccattagaagtagcttgatatttgttgttgctgtcaataaccaagcagcttatttattaaaaataactcaatatgaaagttttaaaaagttagataacctcgcagacagattctctgcacaacaggaacttaccacatttccaaagaatggaaactgtatacacaatata

SEQ ID NO: 408200 - DNA, 451 bp, Homo sapiens
tctcttccagcactttgtgagttagatatgtgtttgtgtgttcattccttctgaccagaaaagaaaccagcttcccatagcttggctctgtggtttcttcaacctttacaagtttgccagttaaacctcaatttagaaaactaaaaatctgtccccattttacagttccctataaattttctgcatttctcattgaaatcagaggcagctggtggcatgaatcaggctatgaagtacaccaaatggctcttaaagagatatcatacttaaaaaaaaaaaaaggattttagagttctgaaatcaagaacttcaaattctaattggttttaaactctttaacctttcttattcctcattatacttgacactscttaccagacctttcatacaagttctatcctgcaagtctgaaaacccaaccaccctagttatttttattagttaagtgtta

SEQ ID NO: 408201 - DNA, 558 bp, Homo sapiens
tattattctaaactgacggctcataattctgactgtacgtcggaatgatctgtgctgccttgaaacatgccagtgctcaggcctcaccccagagcaattaaaccagaacctcctgaggagggactttggcattaatatttttaaattttttacgtaaagccatggttttttcaattatttttcacaggattaattgctttggccagatgcctgggcatgatatgggcatggacccagcttcttctgtgagctctttttattcccttcttctgttgaagttaattcaccatatggtattgagcatgatgtgacatctcttggggtatccttttcatcgtctgtcaaattagggtgctctrtaaaggatccatgcagtcccttccaactcttcaattcaaaaatggagtcttggtgtggagtgggttgaaacaaggggcgtgtacggacagtgtatggaaaagatagcaagtgccgttcatgccgcaatcatagatatatgcaggcatttttacagagtcctgctagcctgttcctacggggggcctctgaaatctcagc

SEQ ID NO: 408202 - DNA, 373 bp, Homo sapiens
acagagtcctgctagcctgttcctacggggggcctctgaaatctcagctctatatattacttttgacatttctgcaatgtagctaaactttttgattagccggaggatagatagcaggtgttgggaactatacagccggtgcctcgtwtacaagaagccaaaaacattcagagagtgtgacgaggaatgaaagctgccacttatattcttcaatttacagcccctaacgcaagcaggcaagcatatgctcaagcccattacatgaagggagatatttgtttcatatgtttgaaaccgttttgagatgcaaacaaagtagaagggaaagcttcctgggccttcctcccacgctgaccagttgcctaccacacat

SEQ ID NO: 408203 - DNA, 569 bp, Homo sapiens
ctctttattagtctattatctctgattcctacaggaataagttgtaggtttttgatccttttacyaagaggaagaaaacttgctttgcttattctttctttattaaagattttgcatactttgactgagtttgtggtgaaataccattttcaacgttaaatctgtttaaggtactacagattccatcaatgcatttaagcctcacccagtatgataacatttactttttcaaaaagagaatcaagagttaaatgaagctgagctaaagaaatatcaacttttacttaattatgaaaattacattttcaacagtaaaatggaaatgtcagactcccaaatgtgatactttctaggagtttaagttaacactattatcagagctttgaatgagcaaaaccagaagaaatcttagaaattatctagttactatattcccataatacagactgaggaggcaaggtcagaaggggaaagctaattacggcaggccagagacagagacatgctgagatcttgttctcctggctgtgattgagatgaatggcaggggcctgtgtttataaatgtaa

SEQ ID NO: 408204 - DNA, 529 bp, Homo sapiens
ggcatatagtaagagagacacacaacatcacaayggtatgaattcaggtcaaggtggaaagctaagtgcaagctgatgggtagaactagaaaggtccatgaaggaaactgaagctgattgatagagtatgactcagcccaacacaacatcccttctttcttcctgttctcaaagcctttagtgtttctaccagcctctgttccaagatcacctttaattcaacaagcagaaaagggcagagacctcagagtaagcagtaatcatggaaagagaaccataattatgtccaaagttgaggcattagaaagcattgtccaatttcccaaataaagatcaagtatttgggaagtgcaggatatacagtagtaaagagtcagagatgaagtaggaaggtgagtggaggcgagattcttaagggccttgaatgtcatgccaagtagtttgcattttatcagcaaaaagtgtgggtaggaaggggacggtcaccatcagaagtagatgtaaaaagtaaatatgggggaagagcagg

SEQ ID NO: 408205 - DNA, 605 bp, Homo sapiens
gctctggccacattcctattggacagaagaggaggtcagagttcagagagtgggtgagcagtctgcctctgaaatcccaaacccagaagtcttmcacactgagttgaaacccactgactttttctaatcgcctggccaatgctagcccctagcatatatgctttttctggctataaatggaagagaagcttttccctttccatctgaataaaagcgcaaatatgccatgtggcccccaggtaaatccacatccctctccaaaattctgttttttcctctgttcagtgagaggatggaacaagatgatccccatggtcctttcaattctggaattgtaatcccaatcctcctcaccagaacttccaagatgaccccaccaaacactccttatcatagtcaggataacaccagaaaacagaaatcgtatgtttacagcagctgcttctcaatgttgcataactgcaagcactccagtaggagcctgcagcctgctggggatgccttggtggtatgtcatcacagaacttgtaaacatatcatgccaacactgtcctttaccaagaaacttaaaatatcactgacttgcctttgacaggataaaattc

SEQ ID NO: 408206 - DNA, 605 bp, Homo sapiens
gctctggccacattcctattggacagaagaggaggtcagagttcagagagtgggtgagcagtctgcctctgaaatcccaaacccagaagtcttccacactgagttgaaacccactgactttttctaatcgcctggccaatgctagcccctagcatatatgctttttctggctataaatggaagagaagcttttccctttccatctgaataaaagcgcaaatatgccatgtggcccccaggtaaatccacatccctctccaaaattctgttttttcctctgttcagtgagaggatggaacaagatgatccccatggtcctttcaattctggaattgtaatcccaatcctcctcaccagaacttccaagatgaccccaccaaacactccttatcatagtcaggataacaccagaaaacagaaatcgtatgtttacagcagctgcttctcaatgttgcataactgcaagcactccagtaggagcctgcagcctgctggggatgccttggtggtatgtcatcacagaacttgtaaacatatcatgccaacactgtyctttaccaagaaacttaaaatatcactgacttgcctttgacaggataaaattc

SEQ ID NO: 408207 - DNA, 605 bp, Homo sapiens
ctccttttaaccctatatccttgatgtattcgacatttcttccatcctctccactgctaattccttagttccaattcttattcctctcaactagtctattgtaatagccttctatatgtctaccagatgtcagcctctccccatctagcctaccttctatgagtatccagaaggatcttcttggaacatagctttgattatgctactctaaaaatctttcaatgcctccccattgtctatggaatgaagcacagtaatcctattgaaaatctaccataagctggacactatgccaaagactgggtctgcaaagatcagtaaaaagaattcttcgmagtaaaatgaactataaagtcctcaaggaattcacggttccatagaatataatgaaataagtgcataataaagccagacaaagtaacacaaggattatcagtcagtatataagtttgggagtggtcatttttagatggccagggagggctttggaaatagttgatgtttgagattagtctttagaggtaaataataatttggcagtgcagttctctaagtaggatttcttagcagagctaccatcaaagcagggaggttgaagaggatgg

SEQ ID NO: 408208 - DNA, 661 bp, Homo sapiens
tggtaccagtgggtcacagaaagaccagggacctgggaaacgatttctgcttttgggttttggtttctgccctcttttctctctacttctctactaattcactgtgaagtgttaacagaggttgagaatctgttaaaagtgacttctctaagcccagccctaggttctcagagcccccagaaggagattcctctcctccctgtaagctggcctgcctcgttcaggaccattaggtctcttgcctaatgtactgtagccatcttgagtctccctcagttcactgcatttaatgcctcatttgaaagggaaagctgatcacatctctctttggtttaaaatccttagatggctccctattcccaaaagcaagctgggaattcaaggctttttataatcctgcacatagagatctttccaaatggtgggatgttcttcctccaaaactgtcggtctctctaaggactatatcattacagtttttccaaaatgcccgggggtcctttcatatctcctctttctcatatgctactccccattgcctgggaggctcctcctcctcttggtttrctactgcaaggtaaaacagtaccattctttccagaaaacactagtgcagaaaggtcttagcaatggtgttgctactgagagtcacaaaatagtt

SEQ ID NO: 408209 - DNA, 585 bp, Homo sapiens
tcacacacacaaacacacaaacacatgcactaaaaatgtctgggagaacatcaataaaatgataacttactatttttgaactataagataatacctgattttaaaattattttcctggatatttgtatatttttcaactttataataataaatttattttaatcctgatatctaagtgaaaagaggaaaaagaaaacacagaggggtagtagaacaaaacacttctagagtccagctctcaacactgcatgtacttggaaatcagtaattctgggtgaaatttatcatgaatttaacagatatttccagaaatttctccagaacaaagaaacttaggatattttcttatgtactgaygtctgtatctatggtagacactgttttttgttttacattttcactttaagtttcatcaacatggaataatgaacaaaaggagcaattatgtccaaatccagacaatgtaacagaaaaagtagataactaagaatatttcactttgatttacataactgttgagcacattatcccaagagagaaatgatcaatggaagggagctggggaaacaagataaaactgtgtga

SEQ ID NO: 408210 - DNA, 597 bp, Homo sapiens
attatgtccaaatccagacaatgtaacagaaaaagtagataactaagaatatttcactttgatttacataactgttgagcacattatcccaagagagaaatgatcaatggaagggagctggggaaacaagataaaactgtgtgacgaggcctatcagagtgaaaacgtcaacagggcacccatggaatagttgcttgcctgctgcagaaaggtcacttaccaaagcagattagtttaatatgccaaacctatttcatgttttagttacattcagcttctctaaaggtctatattatgaatcatttggtgcactatagacatgctagcttgagactgaacaagagataacataccctggagctgacactatccatctttttaatacgtctaataatggaatagtcagacatactraattataccattttatgtatttgtgaaactgtagactgatttggctgtgcaagtctttctctcttgtaaattttttttcaacccttatccgtggtgaatttgaatgtggtatccctggaagaaaagctgtgaaagcaaaggacattttttttgcatatgttattaaaatagaaatagcaagaa

SEQ ID NO: 408211 - DNA, 643 bp, Homo sapiens
  misc_feature (1)...(643): n = A,T,C or G
tgtgaacctgtccatggatcacaggcgagaacgaagtaccctcatctgcattgtgcagatacagaaacagtctgaaaacaaatactttttcaatgttcatatattgaatggaaaacctcgtgtctccaataagcatctcacttggacattcgttaactatatagctgaaaaagttactttacataaatcaaatagctttaagactatgttttattcccacaatccttttagagggacatgagtgagaatcatcatgcaggacttgcttaatgtgaactaagataataaatcaaaattaaaacaattgatgggacactgaaatttattaaaatgaatctatgtataagattatagagaaaatgtcattaaagtaaatagcanagtttgttgcaaaagaaaaaaaaatggtaggaaatcaaccagtaattttcttgcaagttttttttttctcatcattttaatagccctgttgagtgaaatgtttttattctccatctggaataggacttgtaaaagcatrtaaatgtatatggtgttaattgaagcttatatttttgaagatatagataagtatgtttagggtggagtaaaaagtgtagttgaatttttgctaataacaggttatgatcttaaagaatatatg

SEQ ID NO: 408212 - DNA, 511 bp, Homo sapiens
gtaagtcttgttggcatccacaaggtgccaactctgcaggtgtgcagagtgcaagagttgtgggggcatgactttttccaccaggattttgaaagttactcagtgagcctcaaggtccaggcagagatctgtcacaaaagtggggcaaccttatagtgttcccccaggacaatgtctagcagagccatggttggggccactgcagagagcctcaactatggcaatgcttagtggaaccayggtgtcaaggttttccgtaagaaccctgacctgtaaggtccccaatgtgccatgccagccttggtgagctgcgggcacctgactccaactcctgacatatgtgcagtggctgtatccaacaaatccatgagagcagggccactaggagccttgggtttccaacccatgcctcagtctgtctggaagattagacatagggatgaagattattctcaagcattaagacaagatttaatgttgctttctctgttgggctttgaacttacttggt

SEQ ID NO: 408213 - DNA, 507 bp, Homo sapiens
tcaaaattttagaataataaagagcattacaagagaagcatggaaggaagagtgtgccagacaaaaaagacagcttggggagtaaatggaggagttaataaaagaaggcaactgcagcctaggtagctccaggagaatggcaagccatacaacattagaggaaggccagaaccaagcaataccatttttttaactatgcaaatattttgagaatgggagtccaccgaaagcttgtaagcagtgatttgaacgactgattcatactccrtttgctgaatacagacaggagacaagcaaggatggaaacagggagatcatttagattgatactgacactcccaaccagaaaaggtgatacttggaactatagcaagacaatgttaaaggaggctgtagaagatggctcagatatgattacattactgaagatgagaagagggaatagatgtgggtcactctcaagattctgactgcagtgattaggtagattgtggtgaaacttattga

SEQ ID NO: 408214 - DNA, 615 bp, Homo sapiens
tctaaggcaaatcaatattttaatttcattccttgatgcattgattycaaagattttaatttcattcctttaaagcacttattcatatttgaaaattcccttccccagtgaaaatcattatctgcattcaaactacttatattgtttgaatatataaaaatatataaaatagaaagtcaatgctatgcacacaatgaaatgccttagaatattaaggtcattcattagatgtcatagagaaaattgtaatgtgattttgcatatacattgatagtgaataaatgactaatttcgctatattcaccatatgcccaacattggtagatataaattttatttcacaggctatggctattaaatttcaggattttagaaatcaagttactacatcactcaggatgcatatatacacatctttgacatgagaaactaaatataatcaatattgaggcaactgattacaatcatggaagaggctctatatttacggtgaaatctgctctattttattatactaaacccagtaaagcaatatgacgcagggccataactagcctactcgaactattttctcttattcgtcaatttcatgagcaaaacaccatgcacatggta

SEQ ID NO: 408215 - DNA, 615 bp, Homo sapiens
tctaaggcaaatcaatattttaatttcattccttgatgcattgattccaaagattttaatttcattcctttaaagcacttattcatatttgaaaattcccttccccagtgaaaatcattawctgcattcaaactacttatattgtttgaatatataaaaatatataaaatagaaagtcaatgctatgcacacaatgaaatgccttagaatattaaggtcattcattagatgtcatagagaaaattgtaatgtgattttgcatatacattgatagtgaataaatgactaatttcgctatattcaccatatgcccaacattggtagatataaattttatttcacaggctatggctattaaatttcaggattttagaaatcaagttactacatcactcaggatgcatatatacacatctttgacatgagaaactaaatataatcaatattgaggcaactgattacaatcatggaagaggctctatatttacggtgaaatctgctctattttattatactaaacccagtaaagcaatatgacgcagggccataactagcctactcgaactattttctcttattcgtcaatttcatgagcaaaacaccatgcacatggta

SEQ ID NO: 408216 - DNA, 615 bp, Homo sapiens
tctaaggcaaatcaatattttaatttcattccttgatgcattgattccaaagattttaatttcattcctttaaagcacttattcatatttgaaaattcccttccccagtgaaaatcattatctgcattcaaactacttatattgtttgaatatataaaaatatataaaatagaaagtcaatgytatgcacacaatgaaatgccttagaatattaaggtcattcattagatgtcatagagaaaattgtaatgtgattttgcatatacattgatagtgaataaatgactaatttcgctatattcaccatatgcccaacattggtagatataaattttatttcacaggctatggctattaaatttcaggattttagaaatcaagttactacatcactcaggatgcatatatacacatctttgacatgagaaactaaatataatcaatattgaggcaactgattacaatcatggaagaggctctatatttacggtgaaatctgctctattttattatactaaacccagtaaagcaatatgacgcagggccataactagcctactcgaactattttctcttattcgtcaatttcatgagcaaaacaccatgcacatggta

SEQ ID NO: 408217 - DNA, 606 bp, Homo sapiens
attagaatttaagttgagtaaagctaaaggatacactgtttatgccaatcaacaagtttaataatatgatatttctatttaatttactttatcaaaatagatgtagacataaaattttacatttggaaatataatttgctttactttcttgctgaaagtgtgcatttgttaatctttctcaattctaayataaaatatttggagtaatctaataaaatctgttatcagccatagataagtaattgtttttgatttcaaagtactttctacttatggcagctttgggcagaatcttagttttaatttacttacatcattcatgaaaattaacctgaaaaattatgtcagtttcaaagagaaaatcatataaccaaacaactatttgttaataaaatactctttctttcctaaattaatgcaatgaaagtagaaaaataagtaaaacttatcttgacccaaggagaaaccaggaaaatatccttggctgcctgagatgcaaaaatttatttttgaataaaatcatggtaagtgttctacaaacttttagaaacaatattagaattttgaaatattcagacctcatttgttttatgaaaaaaagtataa

SEQ ID NO: 408218 - DNA, 606 bp, Homo sapiens
attagaatttaagttgagtaaagctaaaggatacactgtttatgccaatcaacaagtttaataatatgatatttctatttaatttactttatcaaaatagatgtagacataaaattttacatttggaaatataatttgctttactttcttgctgaaagtgtgcatttgttaatctttctcaattctaacataaaatatttggagtaatctaataaaatctgttatcagccatagataagtaattgtttttgatttcaaagtactttctacttatggcagctttgggcagaatcttagttttaatttacttacatcattcatgaaaattaacctgaaaaattwtgtcagtttcaaagagaaaatcatataaccaaacaactatttgttaataaaatactctttctttcctaaattaatgcaatgaaagtagaaaaataagtaaaacttatcttgacccaaggagaaaccaggaaaatatccttggctgcctgagatgcaaaaatttatttttgaataaaatcatggtaagtgttctacaaacttttagaaacaatattagaattttgaaatattcagacctcatttgttttatgaaaaaaagtataa

SEQ ID NO: 408219 - DNA, 633 bp, Homo sapiens
ttgtttttaatctcttttttcttgaagccgtctataggaataaaactgcattacacactatccttacagtattagagaaatctgagtataactacgtatcactaataaaattgagttttttaactttcattctttattattaattagcattattctgttttatcatcttaaaggatgtccttgagcaactcctgtaaagcaagcccactgttaatgaactcctatagcttttatctgggaaacttgttatgtttctctcatttctaaaagacagcttggctgggtaaagtattcttggttggcagttcattctttcttcagcactttcttttttaaattattttttaatttatacataatatttgtacatacttatgagatgaatgtgaaattttgttatatgtatgggacatgtagtcaagtcaaaatatttagggtatctatcacctcaagtatttatcagtcttatatgttgggaacatttcaagtcctttcttctaggcattttgaaatatacaatacatttttattaactatactaaccttattgtgctattgaatattaacatttatttcgtctatctaactcaatgtttgtaccyatttaccaacctctcttcaccccttctctca

SEQ ID NO: 408220 - DNA, 633 bp, Homo sapiens
ttgtttttaatctcttttttcttgaagccgtctataggaataaaactgcattacacactatccttacagtattagagaaatctgagtataactacgtatcactaataaaattgagttttttaactttcattctttattattaattagcattattctgttttatcatcttaaaggatgtccttgagcaactcctgtaaagcaagcccactgttaatgaactcctatagcttttatctgggaaacttgttatgtttctctcatttctaaaagacagcttggctgggtaaagtattcttggttggcagttcattctttcttcagcactttcttttttaaattattttttaatttatacataatatttgtacatacttatgagatgaatgtgaaattttgttatatgtatgggacatgtagtcaagtcaaaatatttagggtatctatcacctcaagtatttatcagtcttatatgttgggaacatttcaagtcctttcttctaggcattttgaaatatacaatacatttttattaactatactaaccttattgtgctattgaatattaacatttatttcgtctatctaactcaatgtttgtacctatttaccwacctctcttcaccccttctctca

SEQ ID NO: 408221 - DNA, 604 bp, Homo sapiens
gactcatcagttacctcaatcgcctctagacgctgttattcttgattgcaatgctcattatcttctcctggtgaactccaatgtccccttttctccaagtgtttagggactctggattggggaagggtttggcggaaatgttgaatctaaatggaatcaaatgcatctgtaccctgaacctaaaacaacaatcatctttgactcaggacactcccttttcaaaaatttgcactgtcagatatacttatcaattcttaggaaatttctttcaagtatacttcatgttctttactcctctctttctytctttctttctctttcccttcctctctccctctctctccctttctctttctctttttctttcctctccttccttcttcccttccttcctttctcttttctttttctttctttctttttctttcttctttctttctttcttttctttcttctctttctttcttttctttcttctttctttccttctttcttcctctctttccctttctctccttcttttcttttatctttccttctgtatttctttctccttccttccttcctccctccctccatcccttccttccttctttcttctttt

SEQ ID NO: 408222 - DNA, 536 bp, Homo sapiens
taaaattaatttaaatatgaattttatttaacgccctttatccaaaatgttatcatttcaacaagtgttcattataaaaaatcaaaagacgtaacttttccttttgttgttctgattctatattttcaagttctggtgtcaattttatattaacagtacttgtaaattcagactagttacattttaagtgctgaatagtcccatatgactagtggctactctattggacagtagagttttacargattgaaactatacctgtatcactgataggtacaatgccaggacaatttttatgtcatatcagggcctgaaaataatataacaatgaaagacatttgtgaactaatgtacaattgaggtgcatgtcatgtgataatttatcacaatatcccacagtgaaagtgttgattcatgttccaatggtaagcaatggactactgcttactggttgaggaagtctaatattcatcaatactaagagctgttcagaaaaaagacattttaagacaccaatcttttaaatttccttttcc

SEQ ID NO: 408223 - DNA, 533 bp, Homo sapiens
tagccagttgggggggagggattgaaaaaaagggcactctgataggacagaaatggaacatgggaggggaaaaaataagggaataaaagctggccaccccagcctgtagcagtaacccactcgggttccgtactacgctgtggaggctttgttctttccctctttacaatagmgcttgctaccaatcacttgttgggttcatgccatctttaagagctgtaacattcaccacaaatatctgtggcttcatttttgaagtcagtgagaaccatgaatccaccaggaggaacgaactccaggcactacagcagacaagggagaatccagccaaagcccatagagggagcgtttacattagctatccatcccaacagttagaacctgagttcgagccagctccagcaccaaaatataaagtgttctagggttctaaataaatttcaaaggcagtttttcaagatatttacataatttgtcttccaatggctgtagaatacccactcttctcagcacacgggtcaatcgcaaggaca

SEQ ID NO: 408224 - DNA, 533 bp, Homo sapiens
tagccagttgggggggagggattgaaaaaaagggcactctgataggacagaaatggaacatgggaggggaaaaaataagggaataaaagctggccaccccagcctgtagcagtaacccactcgggttccgtactacgctgtggaggctttgttctttccctctttacaatagcgcttgctaccaatcacttgttgggttcatgccatctttaagagctgtaacattcaccacaaatatctgtggcttcatttttgaagtcagtgagaaccatgaatccaccaggaggaacgaactccaggcactacagcagacaagggagaatccagccaaagcccatagagggagcgtttacaytagctatccatcccaacagttagaacctgagttcgagccagctccagcaccaaaatataaagtgttctagggttctaaataaatttcaaaggcagtttttcaagatatttacataatttgtcttccaatggctgtagaatacccactcttctcagcacacgggtcaatcgcaaggaca

SEQ ID NO: 408225 - DNA, 573 bp, Homo sapiens
tgttaatttgtatttattaaaaaataaatttatgataataaggagtacaaagcaggcaatctttgtagctagcaatttagcttttacattaatttaaatttattaggaaggaaatatatgaaaattaagttatagaaacaagcaggaaataaaaatcatacatgattgcccaccaagagaatactactcttaacatttcagcacttgtcttacagtagcctttctacatttctaataacasatgtacacatatacacaccacacacagagaaaataatgttctcaggacacaagctgaagaaggcaaaatctctagcttttattgttttgctgcctcaggtattcacattttattgggctttcattctcccttgagagtgtaaaaatgttagattttggtctctgtcattctgggaccttagaaaatataacagactgtttttgaactattctttaggcactccatgacactacatccatcaatcctagatcatcacatggttgttgaggagattttggggggaagtttgttctagatcttaattatttcatggactcccctaaaaaagaaag

SEQ ID NO: 408226 - DNA, 617 bp, Homo sapiens
caaaaacttttcctcatagcaatagctaggaattccaagcttacctagaatttaaatgtcatgaattagcttcttttgcagtagtatgtgataatttattatcctttctctgcaacatgttagcatgaactcccagttttgttgctgataaaggatgtgaaatagaattagataaccaataactgaactttaaaaaatacttcaaaatgttattcctatacttcatctctatatattccaaatattttaatttataaatgatcatctgcaaatggccttttgtaacatgtttttatgagttacctatgtatcataaacatctctctgaaagacttgagaatggctacctatcaattatgtaaatgtagataatatatgtgtataaatcatattggtcatttgaaattaggcttatacatccattgtgttccatttaggttttcattaccacctatagctttaaactcttttgatctcttttatttgggtaagkttttataaaaaaaactttgagtatagtttgtgtaataattatcacattttaatactatgaggccagcactttaaaaaaactttctaaaacattctgaaattatgtgaatgtgtatataagtaaa

SEQ ID NO: 408227 - DNA, 607 bp, Homo sapiens
cagcgcagtttaaatccaatacttctttattatttttctatctagatgacttgtctaatgttgacagtggggttttaaagtctccaactattattgtggagtcagtctctctatttagatctaatattttctccatgtatctgggtgctccattgttggttgcaaatatgttttaaattgttatgccctcttactgaatgtatcccttaatacttatataatgatcttgtctcttttcactgttttcatttaaggtccattttatctgatataagtatagctacttctgctcatattttgtttwtgtttgcatggaatatcttttttcatcccccttttttttagtctatatgtgtctttatagaggtgagttccttgtaggcagcatacagttggatcttttttttttttttttaaatccatggagccagtccatattttttaagtggaaagtttgatctatttacattcaaggttattatttataggtgaggacttattcctgttattttcttaattgatttctggttgttttgtatttttaaattctttttctctcttatttatctttatttaataaattatttattttcttgagaaagaatca

SEQ ID NO: 408228 - DNA, 579 bp, Homo sapiens
agaatgaggatttattaagtctaatttgccaagatccaatgtttctgattatagatgcctaagtaggctcctagacttcttggaagaatataaaatggataaaatagctttccaagtagagctcataacactacataaatcgtttgatagaagaaaaattagaaaatgattattatagagtaagaatgccgttaaataagaaatacttagtttgctatattttatttactgttatatgttccttgtcatccttaccttatttaagtgaaatacttttccctgagaaagaaaaagtttattatataactgaaaatctccttacttgctacatttgggattttagaaacacttagaattgttaaagatttgaaataacagagatgaaaatatcctacacagaatgagaaaaactctgcatcattttctgtatacttttttagtataagcttatctaaaacaggattcctcactaactgcctgttacattttaagtttgtctctattttattctgcrttataaagcctctctgctttcactcttctaaacaaaatagcaccaactctcatctaaacaagtat

SEQ ID NO: 408229 - DNA, 480 bp, Homo sapiens
tttacaattaaatcatgaagcattattcttgctgaaaaagaggtgagtaaatgtggtagaagcagttttcttgttgatcatccaaaggtaatttaattagctgatcattacctcttggaatccaaagctagttaattgggctgtgggcagagtaaagtgacttccttgacatgcaggcttagttagagaattactttactctctctgatcatcatagggaccttgtaaggcctggcaatcctgagattccatggagatgggaacaattgctctgatttatttttacacttctgttttcagttttatgcctcatgtttagtcttttgtgtgctaagtttttagatgtttatttgactaaaatattacaataaatctaagagatttgttgccatttgtgaaatagaatggattcattctgacttgttttaaggcaaagtgagaatccyattatgatagttggctttatggtctttagagaaa

SEQ ID NO: 408230 - DNA, 601 bp, Homo sapiens
gcacaattagtaaaataattttacttcttatcagagtcaaacctggttgaaagcatttcgcttttagaaacctctttggtgtctatgaaactatgctattttsaatctcttctctatgaatatccattcccatcttcttttgataccaggacattcctcagagctcctcagaattattttgcttcattctgcaccctgtttctaggtaatcttcccattcctatggcttctaacactcaaaatagacttgtggctacccatttgagatccatcctagattttactctttcaccaagaacatgttcaaaagctactcattggacacctctacttggattaccaacaggcaacagaaatccagcaacagaaatacctgaagcctgctctttcttttgaggaaactcttctacattgagaacatagtttttccagtcatcacaggacctacttactctttttataaattcataatttaattaattactaagttttctggttttatcgccaagataccgattgtaatttgtgcctttctatttctatcactaacttctttaaatacacattgatttttcactttagagactatccaatctccttg

SEQ ID NO: 408231 - DNA, 601 bp, Homo sapiens
gcacaattagtaaaataattttacttcttatcagagtcaaacctggttgaaagcatttcgcttttagaaacctctttggtgtctatgaaactatgctattttcaatctcttctctatgaatatccattcccatcttcttttgataccaggacattcctcagagctcctcagaattattttgcttcattctgcaccctgtttctaggtaatcttcccattcctatggcttctaacactcaaaatagacttgtgkctacccatttgagatccatcctagattttactctttcaccaagaacatgttcaaaagctactcattggacacctctacttggattaccaacaggcaacagaaatccagcaacagaaatacctgaagcctgctctttcttttgaggaaactcttctacattgagaacatagtttttccagtcatcacaggacctacttactctttttataaattcataatttaattaattactaagttttctggttttatcgccaagataccgattgtaatttgtgcctttctatttctatcactaacttctttaaatacacattgatttttcactttagagactatccaatctccttg

SEQ ID NO: 408232 - DNA, 601 bp, Homo sapiens
gcacaattagtaaaataattttacttcttatcagagtcaaacctggttgaaagcatttcgcttttagaaacctctttggtgtctatgaaactatgctattttcaatctcttctctatgaatatccattcccatcttcttttgataccaggacattcctcagagctcctcagaattattttgcttcattctgcaccctgtttctaggtaatcttcccattcctatggcttctaacactcaaaatagacttgtggctacccatttgagatccatcctagattttactckttcaccaagaacatgttcaaaagctactcattggacacctctacttggattaccaacaggcaacagaaatccagcaacagaaatacctgaagcctgctctttcttttgaggaaactcttctacattgagaacatagtttttccagtcatcacaggacctacttactctttttataaattcataatttaattaattactaagttttctggttttatcgccaagataccgattgtaatttgtgcctttctatttctatcactaacttctttaaatacacattgatttttcactttagagactatccaatctccttg

SEQ ID NO: 408233 - DNA, 601 bp, Homo sapiens
gcacaattagtaaaataattttacttcttatcagagtcaaacctggttgaaagcatttcgcttttagaaacctctttggtgtctatgaaactatgctattttcaatctcttctctatgaatatccattcccatcttcttttgataccaggacattcctcagagctcctcagaattattttgcttcattctgcaccctgtttctaggtaatcttcccattcctatggcttctaacactcaaaatagacttgtggctacccatttgagatccatcctagattttactctttcaccaagaacatgttyaaaagctactcattggacacctctacttggattaccaacaggcaacagaaatccagcaacagaaatacctgaagcctgctctttcttttgaggaaactcttctacattgagaacatagtttttccagtcatcacaggacctacttactctttttataaattcataatttaattaattactaagttttctggttttatcgccaagataccgattgtaatttgtgcctttctatttctatcactaacttctttaaatacacattgatttttcactttagagactatccaatctccttg

SEQ ID NO: 408234 - DNA, 421 bp, Homo sapiens
actaacttctttaaatacacattgatttttcactttagagactatccaatctccttgtgtataacattgcccatccctaccaaacctacttccacagtgcaactcagagatgttccccaaaccaaacagctctgtgtcacaactcatcttggtaaggagtctctctgtacaattcccaagcaaaacccactttcaaatagagaagtctttttttcttacactctgccctagagaaattaaagactgtaggccttataaataaaggggccgatcaamaagcaacttgtaaagtggctgatagcttacattatagctatcaacagtgtttgaaatttcaatgtgatcattgtcttctatttaagtacgtaactgcttttaagaatatggcctctggaggcagactatcttattgtgaatcttt

SEQ ID NO: 408235 - DNA, 476 bp, Homo sapiens
tttagaaagtttattttgccaaggttgaggatgtgtgcctgtgacacagcctcagggggtcctgatgacatgtgcccaaggtggtcagggtacagcttggttttatacattttagggagacatgagacactaatcaatatacataagatgtacattggtcctgtgaagaaaggatagacaatttgatgcagggagggggcttccaggtcacaggtagttgggagataaatggttgtattcttgtgagtttctgatcagcctttccaaaagaggcaatcagatatgcatctatctcagtgagcagatggatgactttgaatagaatgggaggcaagtttgccctaagcggttcccagcatgactttttcctttagcttagtgattttgaggcccccaaatttattttcctttcacaatcctcaatgttatacayggagtcagaaaagtagggactaaagatatgatgctccatggtt

SEQ ID NO: 408236 - DNA, 624 bp, Homo sapiens
ttggctgacaagtttttgtttttctttcagcactttgaatatatcctcctactctcttctgtccttaagggattctgcaaataaatctcacagctgtgttgggactcctttaaatgtaatacaattattatatcttgtttctttcagttttttggctttaagttttcaagatttaagtctgatgtgtcttggtgtatttggattgtatttcactgatgaacactgaacttcttgtacctaaatgttgttttgtctccctagatgtaggacattttcagccactattttttgaagtatgctttgtacaccttttcctttctcttctccttcagttacttctattatgccaaggttatttcattctgtgtctcataacamccctagactttcttcattccttttattctttcattatttttcacctctgattgaatcactctgtctttgagctcactgattctttcttttggttggtcaagttcgctgttcaagctttctgttgaattttttcagcttagttatcatattccttatctccacaaattctatttggttatttttttctatttatatatcatatttctcatcttgttaatgaattatttatcaaattttatttaattt

SEQ ID NO: 408237 - DNA, 597 bp, Homo sapiens
agatgacaaatcactttagctgaaaccaagaacttccccagtgaagtttatggcagcatcattgatttgtttatccgtatctagcagcacattaaaaatatgcacaggaactttagttgggttgctactaaacargaaataaggaattttaaatgtatttaaacataatcaatgtgattaaagtaagtctatacagattttgttttgaattttttcttatatatgaataattaaaaataatttttttattattgcattaaaataatttattcctacttgagttttcccttattttaaaaaaagaaagaccacagaagtctttaactgtaataaagtatttaggttctaaatccttaattctaatttttaacaaaaaaattctataaacaaatatccttcaatgtatatcacaaattagatgtctacttagaaaatgttctatatgcattactaattttttttcctgcaatgaaacaagtggaatgttttcatgattacaggtatatcttacttcgcaaatattgaacaagtttaacattgaatttatagaattaaaggacctccaaattcattttagtcaatatcactgtaccacag

SEQ ID NO: 408238 - DNA, 597 bp, Homo sapiens
agatgacaaatcactttagctgaaaccaagaacttccccagtgaagtttatggcagcatcattgatttgtttatccgtatctagcagcacattaaaaatatgcacaggaactttagttgggttgctactaaacaagaaataaggaattttaaatgtatttaaacataatcaatgtgattaaagtaagtctatacagattttgttttgaattttttcttatatatgaataattaaaaataatttttttattattgcattaaaataatttattcctacttgagttttcccttatttwaaaaaaagaaagaccacagaagtctttaactgtaataaagtatttaggttctaaatccttaattctaatttttaacaaaaaaattctataaacaaatatccttcaatgtatatcacaaattagatgtctacttagaaaatgttctatatgcattactaattttttttcctgcaatgaaacaagtggaatgttttcatgattacaggtatatcttacttcgcaaatattgaacaagtttaacattgaatttatagaattaaaggacctccaaattcattttagtcaatatcactgtaccacag

SEQ ID NO: 408239 - DNA, 508 bp, Homo sapiens
ttatgggcacactctcagatagctgaaacattatcctttcactttagaatccctcaccatcagctttcttgacatggacaaatttatcaccctggagagtcgttcaaaattctttcctctgctgaacttcaaaaagtactttcccaaccccttacttctgaaattatcttccgtctcctactggcctccttaggcatgatttaatatatctcaagactggctcccaagtgacctatatcttctccacaggaatcatgagtttcagaccatatactkgtgaagagtaaaagtagttcttaaattcaggcctattttaatacattcatctagcaaaagttccacccatataattccatcctgtatatatttcaggcatgaattgaagaagtatatgtatgtagaactagcaaaaaggaactttaaaacccttattataaatatatttaatgaaatgtatagtcttaatgagataaagaatcagagaaataaaaacttataaaaccaaatg

SEQ ID NO: 408240 - DNA, 552 bp, Homo sapiens
gccataagactaatgataggtaaaagctttcaaaataaagagaagratataattcagaaatggcaggtagatttggagaaaaatttagagcagattgtgtgtttacaaaagttttattagcatcactagaggtgtggtttcaaaggaagaaaaaatatgagagatattcaagattcaataggatgtcattcaaatgaatacagacttgttgcctaaagctaaagaaatgcagactccactgaggaatcaataagtttgctaagtataaataggttttgaagaatttcatctaactatgtcagactaaagaatgccatataaatgatatgcagatttggagaccctgttgtctatagaatgtcaatatataacaaaagaagcatcctgagtagaagtaaactccaatctttaataaataatgtcaataatgtgaaattatcttttcaaaccctactacattttaaaattaaatataaaaaataaaataaattatatctagaggtccaatgccagtatattcacagatttttaatgatcaagattagtcctaga

SEQ ID NO: 408241 - DNA, 552 bp, Homo sapiens
gccataagactaatgataggtaaaagctttcaaaataaagagaagaatataattcagaaatggcaggtagatttggagaaaaatttagagcagattgtgtgtttacaaaagttttattagcatcactagaggtgtggtttcaaaggaagaaaaaatatgagagatattcaagattcaataggatgtcattcaaatgaatacagacttgttgcctaaagctaaagaaatgcagactccactgaggaatcaataagtttgctaagtataaatargttttgaagaatttcatctaactatgtcagactaaagaatgccatataaatgatatgcagatttggagaccctgttgtctatagaatgtcaatatataacaaaagaagcatcctgagtagaagtaaactccaatctttaataaataatgtcaataatgtgaaattatcttttcaaaccctactacattttaaaattaaatataaaaaataaaataaattatatctagaggtccaatgccagtatattcacagatttttaatgatcaagattagtcctaga

SEQ ID NO: 408242 - DNA, 552 bp, Homo sapiens
gccataagactaatgataggtaaaagctttcaaaataaagagaagaatataattcagaaatggcaggtagatttggagaaaaatttagagcagattgtgtgtttacaaaagttttattagcatcactagaggtgtggtttcaaaggaagaaaaaatatgagagatattcaagattcaataggatgtcattcaaatgaatacagacttgttgcctaaagctaaagaaatgcagactccactgaggaatcaataagtttgctaagtataaataggttttgaagaatttcatctaactatgtcagactaaagaatgccatataaatgatatgcagatttggagacmctgttgtctatagaatgtcaatatataacaaaagaagcatcctgagtagaagtaaactccaatctttaataaataatgtcaataatgtgaaattatcttttcaaaccctactacattttaaaattaaatataaaaaataaaataaattatatctagaggtccaatgccagtatattcacagatttttaatgatcaagattagtcctaga

SEQ ID NO: 408243 - DNA, 593 bp, Homo sapiens
ctcctggcctcaaatcgaccttggaaggattcttccaaagttctggggttacaggtattagccaccactgccagccaccacttggatgtttaaaatttcaaacgtttaacagagaaccaaaagcctgtctttatatattttaagccctaagtcataaagtaataatcaattgactatttaaaatgtaagaatatataaaccattgtgcccttcaaatagaataaatattttcagtattaatttaactatagcttgtctttttataaaccactccttcaattgtattgacaaaatcttgaagttagatcccattatcaacacgtatacaacaaattmttctggcaccaatattatagggctttaagatttatgaatcccatttctacaaagtaaattttaaaattagcaggcatggaggtgtgcacttttaattccagctactatgaaggctgaggtgaaaggattgcttgagcctgggagatagggctttcgtgagccacaatcatgctactgcaccgcagcgtgggtgatagagtgagacactgtctcattaaaaaaaaaagaagagttatgatcaaacagtgaccaccaaa

SEQ ID NO: 408244 - DNA, 593 bp, Homo sapiens
ctcctggcctcaaatcgaccttggaaggattcttccaaagttctggggttacaggtattagccaccactgccagccaccacttggatgtttaaaatttcaaacgtttaacagagaaccaaaagcctgtctttatatattttaagccctaagtcataaagtaataatcaattgactatttaaaatgtaagaatatataaaccattgtgcccttcaaatagaataaatattttcagtattaatttaactatagcttgtctttttataaaccactccttcaattgtattgacaaaatcttgaagttagatcccattatcaacacgtatacaacaaattattctggcaccaatattatagggctttaagatttatgaatcccatttctacaaagtaaattttaaaattagcaggcatggaggtgtgcacttttaattccagctactatgaaggctgaggtgaaaggattgcttgagcctgggagatagggctttcgtgagccacaatcatgctactgcaccscagcgtgggtgatagagtgagacactgtctcattaaaaaaaaaagaagagttatgatcaaacagtgaccaccaaa

SEQ ID NO: 408245 - DNA, 552 bp, Homo sapiens
gccataagactaatgataggtaaaagctttcaaaataaagagaagaatataattcagaaatggcaggtagatttggagaaaaatttagagcagattgtgtgtttacaaaagttttattagcatcactagaggtgtggtttcaaaggaagaaaaaatatgagagatattcaagattcaataggatgtcattcaaatgaatacagacttgttgcctaaagctaaagaaatgcagactccactgaggaatcaataagtttgctaagtataaataggttttgaagaatttcatctaactatgtcagactaaagaatgccatataaatgatatgcagatttggagaccctgttgtctatagaatgtcaatatataacaaaagaagcatcctgagtagaagtaaactccaatctttaataaataatgtcaataatgtgaaattatcttttcaaacccyactacattttaaaattaaatataaaaaataaaataaattatatctagaggtccaatgccagtatattcacagatttttaatgatcaagattagtcctaga

SEQ ID NO: 408246 - DNA, 608 bp, Homo sapiens
acttaattgttgacgctcattagattctattcttgtataattcacaagtgttaattgtggtaaaaatgactaatgtttcacaagatttctggttctgttctcctgccagaaacatgctgtttgagttctgccctttgttagggactgaatgtttatgcctcctcaatactttcgttgaaatcctatcccttaaggtgatggtattaggaggtgkggtctttggaaggtaattaggattagataaggtcaacaaaatggatcctttgtgaatggaattagtgcccttataagattgcttagagtgtctgcttccctggttcctctctttgccatgtgagaatacagtgagaagatagcctactgtgaaccagaaagtgggccctcgccacacactgaattggctagtgactaggtcttcgatttcccaacctctagagctgtgagaaataatgtttgttgtttaagccacccagcttatgatattttgctatagcagcccaagctaagacaccccataacttactttaagtaatgataagtaagcagaactcatccactacttctgggtagaagaattacagagctagcacatgattctccatgatttt

SEQ ID NO: 408247 - DNA, 598 bp, Homo sapiens
aagtgttgaaagattttaggaagcaaaatcaaaatgatcacatgttgggattgcagcaaaaccaaggataactacaagtgtactattaactcatataaggaccatatcttcaactgagatagagacttaaaaagaaaaaactgattaagtcctgtccatgacccaggaacattgctttttaaaattttaagcagaacccttaaaatgcgcttgactactcttattcatgttatatcctcataccaatattttgtttcccaaatacaaaaatctatatttattggtctaaaatgcaagatgacaatttttaaaaaatgtaatggcaatgtggcctcattagttcctctaaacccaaattacaaatttgtaaatagcacttcttatagttattttgaaatgattacaagcccattgaatttctctttcctgccagatgctccatcatttgaatattttgcacaatttataaaaaattattttatatatgcaactgcatggaacatatctcctcaaaaacttaacgtcaygatttgtatacttaccaactattccaacattgcttttgtcatatcctttaactaaaccacatccattattc

SEQ ID NO: 408248 - DNA, 573 bp, Homo sapiens
cctccagaggacaattcatcccagtcaacaccttgatttcaatcttatggtaccctgagcagaaaaccctgccacttctgacctacagcaccataagcttataaatgtgtattgttttaacctactaagtttgtgctaatttgcagcaataaaatactaatacaaatatccagaaataggtaaacaatatctataaaaatctatagcaaacatcatcctaatgatgattaattaaaggtgtttgtcctgaaattattaatgagacaggaatgttgttactacattgcactggagtcctagtgtcagtctaacaatctagaaaaacaactgagatgtataagaaatggaaagaaaaaaytaaactgtcatttttgcagaggacataattgtatatgtagaatatccagaataattaacacagaaattattagggttaataactaaacttaaatagcagctagagaaaagatcagcatgtgaaattctatatgcaagcaaaaagtggataataaaaattttaccctgaaattttcttaaaagcataaaaattttaaacaactgggaataaatgtt

SEQ ID NO: 408249 - DNA, 573 bp, Homo sapiens
cctccagaggacaattcatcccagtcaacaccttgatttcaatcttatggtaccctgagcagaaaaccctgccacttctgacctacagcaccataagcttataaatgtgtattgttttaacctactaagtttgtgctaatttgcagcaataaaatactaatacaaatatccagaaataggtaaacaatatctataaaaatctatagcaaacatcatcctaatgatgattaattaaaggtgtttgtcctgaaattattaatgagacaggaatgttgttactacattgcactggagtcctagtgtcagtctaacaatctagaaaaacaactgagatgtataagaaatggaaagaaaaaactaaactgtcatttttgcagaggacataattgtatatgtagaatatccagaataattaacacagaaattattagggttaataaytaaacttaaatagcagctagagaaaagatcagcatgtgaaattctatatgcaagcaaaaagtggataataaaaattttaccctgaaattttcttaaaagcataaaaattttaaacaactgggaataaatgtt

SEQ ID NO: 408250 - DNA, 361 bp, Homo sapiens
ttttggaagtttactttcaaactacccaagtgygagagaaattatgagccagttcccccaaactgtctaataagtaaagttatgtgaatagcagtaacatcatcttctctttgaatataacaatacttttcttctatctaaacagagagagaagacaagagtgcagccattttatttcattatacatttctttaagtttatgaaaggatgaggatggcaaatatccaacaaatattaacttgaactacagacattcttaggtcaggccctcatatctcatctcaactgcccttctctctaggactcaggcaggactgccagtcacactacccaaccacctggctgcagggatgggtatgtg

SEQ ID NO: 408251 - DNA, 484 bp, Homo sapiens
actgcacatattcgagttcacatctcagaaatgcgggtggccactgattccatacacaggcacatacacacaaactcatgcccaagataagaagggtaggaagagagaatggtgagggagggtggattcttgccagggtcctggggctcactcacatccagctgctgctacctctcctaatcattaaggatgaagcaggtggagaaaacagtgcaaagccagggggactgcaatgcagagcagtagagcaagtgaactcaccttcaaagttctgtgagaaagttgatagtttttttctgaatttcttttcaatttctmatcttctctggaacttctcttttcttcatacatttcttaaactcataagtaatgagcaccctactctgtatatatccctgttctgggtctaacacagggaaaatttaaagaagcattgtcatggactgaatgtttgtgtccccctaacatttgtatgttaaagctc

SEQ ID NO: 408252 - DNA, 554 bp, Homo sapiens
ggtgtggtcccttctgaacacccagtgctgccatgccaaacggggttcttccccaacctgggatgctacagttaagtacagcttggggcaagtttctagagcccaaagacctactttcagggtagcccagactggaagcaaactcttctagtcactggccagcaagccctgtctacgcaccatgagtgctaaatccagatataaggtcctttgtgtttgccccaagaagacatttctgtttacttaaatggatgcttccttaactgagaaacaaagtgaaagctatcaggttaaacatgcttgctaatcaaacagaatattagatttwaaatacatttaagttaggacactcatgaacttgaagctaaaattttgatattaagaccaaagtttatgaatgcatctcattaaggttgcttaaatcacagttgtcactgatgccctactgatctagacttgatttcacagtgaattatcttttctcttttcaatggacaattaagattttcaaagcactaactgaatttgacttttacatcagtcattagcataat

SEQ ID NO: 408253 - DNA, 563 bp, Homo sapiens
atgaatcaagttatttttattttctatcactcttttcctttgccttataggctgacggaaaactcaacaagtggggacctcccctgaaatgataggaaagaatttaacctcatggcataaaaacaactcatgaatggtgtttggatgaaaaggttatgcgggagtcaaatgtttgaaggggctcaggtacttactaaaatcctggccagaaatcttcatagaaatgtactcatggtgaagagttccttctcacctgcaaacccccttctactctgctcattcaaaactggtttgcaacttgaagctgtsaaggtcttgctactcaaagtgtggtccctggacatgctcactgttagaaatgcagattctcaggccccaccctagacctgatgagttagaagctaacctctgcgaacatggacatttgagaagcactgctccatgtcactgagccctccctggaggaaacatgatattcaccccacgaagaccaccttcctcatgatgccctctgccctccagaaaaataacatatacactgcccatgttatttgagagatatt

SEQ ID NO: 408254 - DNA, 475 bp, Homo sapiens
tccatcagctttagggtttggctaaaacaatgcccctgcatcctcccctcctccctcttcctttgcgtgtgacaggccaacatgctggaaagtcaagagtgcaggccaccaccaccaggctgccctgtaaaacgggatgggctttaattaatttacatgtaatcagagaaagacaagttccccagacaaagcccatttcccaggcatggggatggccttttattggagttaaagcgatacagatgggaagtagtctgagagaggcagtgacacaaaagaatttccagatgcsgtcagattctctttagtgaaaaagcgatacataaatatgttatctgagcacttgacatgcataccaaaaatgttttccttccacagataatgaaatattttggaagcagaatggtctgttgatttgggtaataaatgagtgaatagcccccatatgagacaaaacatggtccttggaattgta

SEQ ID NO: 408255 - DNA, 599 bp, Homo sapiens
cttgaactcctgatctcagatgatccgcctgcccagcatttattttctatatgaaactttcccaaccagggtcttgtaagagtagtctttggtttgaaccccattctgacattttgacatgtggtgtctccactgttgtcagagagtaaattaacaacagtttctaagcacaaaatcattataaacttatcacttttgtaaatgtgtcacagcaacactgactgttctaagagagggtaaattccacagaagggaagcagacaggtagcatcattgcacagctcactggcaaaagaagtgcatcggctgctgtctcctcctctactcccctgggatctgagtgtgggcrtcaaatacaggatgaacccccctcaacccccctcaacccccctgctcctgcaagaacaacaataaaaggcaataaaattccaaggccatagcttcccctccagcctctcccacacctccactctcagcctcgtggtttgccacaccctcccgtgtctctgaggccttggtgccaactgcactttatggaggagaagggggtggtaaatagttaaagagcagttactaggtcttggcaatttggatgtaat

SEQ ID NO: 408256 - DNA, 599 bp, Homo sapiens
cttgaactcctgatctcagatgatccgcctgcccagcatttattttctatatgaaactttcccaaccagggtcttgtaagagtagtctttggtttgaaccccattctgacattttgacatgtggtgtctccactgttgtcagagagtaaattaacaacagtttctaagcacaaaatcattataaacttatcacttttgtaaatgtgtcacagcaacactgactgttctaagagagggtaaattccacagaagggaagcagacaggtagcatcattgcacagctcactggcaaaagaagtgcatcggctgctgtctcctcctctactcccctgggatctgagtgtgggcatcaaatacaggatgaacccccctcaacccccctcaacccccctgctcctgcaagaacaacaataaaaggcaataaaattccaaggccatagcttcccctccagcctctcccacacctccactctcagcctcgtggtttgccacaccctcccgtgtctctgaggccttggygccaactgcactttatggaggagaagggggtggtaaatagttaaagagcagttactaggtcttggcaatttggatgtaat

SEQ ID NO: 408257 - DNA, 585 bp, Homo sapiens
aaagattggatactggcttagactgatgggaatggtgactggatgtctaacctcaccctgcagggttcctgactgcttgaaactcctttgcctcaaacctgaattggtccagcacctgggcagtgggggactgggctgaatagactgacataagccttcttgtacacaatccgttagggcaggatgccttaaggtgtgggcagcaggggaagcagacacttactcatggtaaggacagagatgmggtggatcagtgcaataaagtatgcatagttctgtggtatatttgtatccaactcctttcctgccacaggacctttgcgtgtgttattcccaattcttagcctccctttcacccctttgcaagactagctcctttttgtcctacaggcctcagcctattttttgttcctcagaggagacttttatgactgctgtattataaatagatctcccagtttctcttattctctttcttagtcttttatttgttgctttcattatacatattagaatttgtaatcattttacttatttctgtttacttgtatacttaaaaatctattttccccactagaatgtaaa

SEQ ID NO: 408258 - DNA, 410 bp, Homo sapiens
gtcactgcaggccagacatgttatctttttgtactttccagaacacagaacagtgtaaataggtgcaacagagctatgatcaatgatgttttctcttcatcaggactgcctttagcaataactctttggctaggccctggtacctttggggttcaggcctcctaggggagccctgtgatgggtsatggttctgccacaagtggacaagggccacagctattctacatagaacttttgtgcaaattagaaaaaggtgcccctttttgtagcactgtgcaaaagcaaaaggtttgggaaatagggtgttggctggatttcagtccctccttgctgccttggctggatatctttgtgaagtaaacaacctgaatcactgtacatggtggtcttgactggaaaggtctctaagg

SEQ ID NO: 408259 - DNA, 538 bp, Homo sapiens
tgaacctgcatgtatttagaccactggaatgaattctgtgttgctggcagccaactatcattccagcaagggcacagttcaagcaaaggcactgaagcaagaatgcacacagctttgggggttgcttgattactccccagggtggagtaatcccttggtgtggtttctttggattttaattttcattaggatctattcccctactctcacccatgggcatcttcctggcaactcacagtakaatgtaatggattcctgggacccaggatcacatcttcctttgtcccttggtacctccaactacttgccagcttttcacccagtcagccaatggcactaatgacctcagggaatgagtgtgcatggaaaaaagcaggaaataaaagaggtaatgcttggcttttgagttacaaaatcaactgttggaactcacagcaaagacattattttgagaaaggtttttctaatttcaaaaaccaggatactgtacattcctgtgaaatttcaaaataccagcaacaaaagaccccacaaactt

SEQ ID NO: 408260 - DNA, 535 bp, Homo sapiens
agctgggtgttttaaaattaattaatataaaataaaaataaagaaatagatttgtgtggcccaggccaccagtatacattatcaaatccacttagttcatcattgtcttgtgtctgtgatactgagaggtaggaatcagaatctggcctgttctttttcaacctacatatcaaatgtgaatccaaatgctccaggagagtcttcagggatcatggtatgcaaatgaagacccactgtttttcaaataacatggttctttcatattgaatcctatctctgtaggaggaytgacaaatgttctctattatcaaccacgacttaatatactttcagtggagggctatggagggtgctggtagtcaggggagggatgggatagaagacaatgttcccttttacagtagtcttagtggtgaccctaactcctagagagactcctagaaaggtcttcatctgtcacctgccaccatcctggtgcattttggagaatgcattagaagatcagtccagatactaaagaaaaaaatcagttcat

SEQ ID NO: 408261 - DNA, 564 bp, Homo sapiens
tatacaaaaagtcgatgtttattccccactgaacttctggagagtgggtgggttttttctgcttgcatgtgattataacagaactaaggtttggatagcttagaaaatgttttcattgtgttattttcaagtgcacttaaatcaggttgttcttaaacaattttagaggaaatacagattcaatatgaaaatgcaccagaattttatttaccaaaagtcaattcagtccaaattttctgagaagattatttctgaatgacagaaatgacaatagatgtgttcagattcaaagactataacttagcaggatttctcttgtgggtatttcagctcaaaggagataccagaaaacaattttcaggtawaagaccagaattttaaaggagttagatggcctaatataactaaactggaaaattggatctgtgattactcaaaccaaaagacaacccccagacccccttaattatgccaccagaaaatagaattctagggcagtgtatcctctagaaggggaatccctcccaaaacctatctaatacatgggcatgtagaacattaatc

SEQ ID NO: 408262 - DNA, 564 bp, Homo sapiens
tatacaaaaagtcgatgtttattccccactgaacttctggagagtgggtgggttttttctgcttgcatgtgattataacagaactaaggtttggatagcttagaaaatgttttcattgtgttattttcaagtgcacttaaatcaggttgttcttaaacaattttagaggaaatacagattcaatatgaaaatgcaccagaattttatttaccaaaagtcaattcagtccaaattttctgagaagattatttctgaatgacagaaatgacaatagatgtgttcagattcaaagactataacttagcaggatttctcttgtgggtatttcagctcaaaggagataccagaaaacaattttcaggtaaaagaccagaattttaaaggagttagatggcctaatataactaaactggaaaattggatctgtgattactcaaaccaaaagrcaacccccagacccccttaattatgccaccagaaaatagaattctagggcagtgtatcctctagaaggggaatccctcccaaaacctatctaatacatgggcatgtagaacattaatc

SEQ ID NO: 408263 - DNA, 572 bp, Homo sapiens
aacactttttagcagaagaaacatcatcattttttttgtttgtttaaattgggctaatctgtactgggcacctatgcccagggattaatgtgtctattcaaactccccatggaggtgaatgtttttcttgtttattcttctcatttcacagatgagatggtacagcctctgacctgggttctttacacgaatcctcttagttcatgcacgtttcagttctggaagggggggcattcttttgttattgtacactctgcatgagatttgtactgtggctctgtggacctgtctccttgcgaaggccaggctgaacgcaggcttcatgaagacttaagcacctgcaatatctgtagctcccttggggaaagatgctctgcaacgcagacccctgcgctggccayccccatccctgttccagagaaaacacgaggactggtctggtgggaggcaatgcttcctgtttcaggggatgatctcatcttgaacctgagggaggtctagccggtgttgattcgttttagcagggggcctcctgcgattttcagccttcccttgggtcagcataagggcat

SEQ ID NO: 408264 - DNA, 572 bp, Homo sapiens
aacactttttagcagaagaaacatcatcattttttttgtttgtttaaattgggctaatctgtactgggcacctatgcccagggattaatgtgtctattcaaactccccatggaggtgaatgtttttcttgtttattcttctcatttcacagatgagatggtacagcctctgacctgggttctttacacgaatcctcttagttcatgcacgtttcagttctggaagggggggcattcttttgttattgtacactctgcatgagatttgtactgtggctctgtggacctgtctccttgcgaaggccaggctgaacgcaggcttcatgaagacttaagcacctgcaatatctgtagctcccttggggaaagatgctctgcaacgcagacccctgcgctggccacccccatccctgttccagagaaaacrcgaggactggtctggtgggaggcaatgcttcctgtttcaggggatgatctcatcttgaacctgagggaggtctagccggtgttgattcgttttagcagggggcctcctgcgattttcagccttcccttgggtcagcataagggcat

SEQ ID NO: 408265 - DNA, 445 bp, Homo sapiens
gcaggaagccatgttcttcgtgtggaatttttagtttttgtgccatatcatgagcagaaatcggctgagcttactgtatggaaatcagggtgtgaaagtagggcacagacccaacatgagatctragcagccatgagtcagaaatcagaggaacatgggaaatgagaggtgcttgggtttctcctttccaaccaatcctcactggggattgggctagggctgggatcagggagggcaactgagcggtcactgtgtgctgcacaaaaatctagagattttatacacgtgatcccctctaatccctccaatagcagcaagatagacatcactgtacccattttacagatgaggaagtgaaggcttataaaaacaaaagcaacatgttcaaggccatagagttggtggcaatgtcaggagcagaatctagatttttcgtctcaaagta

SEQ ID NO: 408266 - DNA, 631 bp, Homo sapiens
aacttggcttgaacatccaggttgcacatgtgtgagttgcaagcaggttcctggggttctgtgtgcttggggcaggaagtgagaggtactggtacaggcctgaaaaaaggagacatcatgctgcccccacatgaagctggtcaaagcctatgtggaactggccaccccaaggacagtgggatagaaagtgaggctgaaaggatatgaagatacacaacgggcattgtatacagtccaccccttgcaccactcagttctacacatgtccttcattaaggtcagtgcatacagtgttcccttcaaggtggtggtcaaggtgatggtcagcgacaatatcttcaaagatagaatgcagctggccccgaagccgtaagtaaccattatccttcccctctrccactcaccctagctttgcctcacccacagccagtgtaggacacaagggaaaacttccagtttgtcctctgaaggtttgctgaagagtcaactgacaaaaggcagattatttggagaaaaggcataaaaatgaattaacgtgcagacaagggagaaccacagaataattattccaacctcccagtgggattcacaagtttatataccatcttaaggctatagaaagaataggggc

SEQ ID NO: 408267 - DNA, 631 bp, Homo sapiens
aacttggcttgaacatccaggttgcacatgtgtgagttgcaagcaggttcctggggttctgtgtgcttggggcaggaagtgagaggtactggtacaggcctgaaaaaaggagacatcatgctgcccccacatgaagctggtcaaagcctatgtggaactggccaccccaaggacagtgggatagaaagtgaggctgaaaggatatgaagatacacaacgggcattgtatacagtccaccccttgcaccactcagttctacacatgtccttcattaaggtcagtgcatacagtgttcccttcaaggtggtggtcaaggtgatggtcagcgacaatatcttcaaagatagaatgcagctggccccgaagccgtaagtaaccattatccttcccctctgccactcaccctagctttgcctcacccacagccagtgtaggacacaagggaaaacttccagtttgtcctctgaaggtttgctgaagagtcaactgacaaaaggcagattatttggagaaaaggcatamaaatgaattaacgtgcagacaagggagaaccacagaataattattccaacctcccagtgggattcacaagtttatataccatcttaaggctatagaaagaataggggc

SEQ ID NO: 408268 - DNA, 543 bp, Homo sapiens
aatggctctgacatatggaaaaatcagggggtgatggtgatcataaggattatggcactgactagctattgttaatggccataagaacgacgaagaaagaaaataacaaccacrggccagccagatatcaactcagggcacagtgtaaaagccagagggttccatgaggcatttaaaaaggcccttatcttgaaaagctggagggatgactgtactgaaaatcaagctccaacacagagcccacccatatcatttaagtatttgctgtggttgggcactcagcaacttcctgctgtgaacaccactgctccctgactgtgggctttctccagccttcagagcatgcctaactgccattcagtgcaggacagggtgccccagagttgaagcttctgggaacagcagaaattagtgtataaataccccagtttctctgcctttctggtgagacaactctaaggcatgttccacatttctcccagatgtcctcagcagagttgagtgcctctttcctcaacagcaatcttatgttggcttccttct

SEQ ID NO: 408269 - DNA, 623 bp, Homo sapiens
tttgtattacttatgcctgtaatacatactttactcatatctatatctaggccgttatgcataactttcatttctttcagaataataatttcccattttcctgtcacccttttcttcaaataaccatttaaaaccattatagagacagttagagtgcctactttttttttttatttttttgagacagagtctcgttctgtcgcctaggctggagtgcagtggcgctatctcggctcactgcaagctccgtctcctgggtttaaacaattctcctggattagcctcccgagtagcttggattgcaagcacccgccaccatgctcagctaatttttgtatttttagtagagacggggtttcaccatgtttgccaggctggtcttgaactcctgacctcaagtgatctgcccgcctcggcctcccaaagtgctgsgattacaggcgtgagccactgcgcagagggcctactttcttaactaccatcaccattacttacaagctgctcatggcattttgaaaacgctgaagtaagctaatgctatagaccaaatgtttgtcctctatgaatttgtagaaaactttgtttcaaactttggtcataatatttttcttaactccagtaat

SEQ ID NO: 408270 - DNA, 542 bp, Homo sapiens
tgtgtaataaatttaatggaagatacaaaagcttttagtatttaccaaaatcatatatgccaactcatgagttttgtatgcactgaaaaagaaaagaggtgcttgtaatgcaggttgtactattatttgaacactagctaaataatgtccagaaacacatttctgagactagrttttgttatttaggcagctttaactagactgcctcaatgttctattaaaaacatattatatattattatatatattatatatatcttatatatttttaaagagaaattggcaagtatgttccctggcttgttggaatgaaaatctttttaaaatttaccttttattaccaatatattttttaaaacatattattttagcgtaactattttagggtcaatatttttgtttattatttggaaagtaaactgtttatcatttgatgcgcagttctaactgagacagtggacggtatttttcgttattgttgttaaaattctatgatacagttttgtttaggtaaaccaagtttgaatttttaaaagatcatt

SEQ ID NO: 408271 - DNA, 542 bp, Homo sapiens
tgtgtaataaatttaatggaagatacaaaagcttttagtatttaccaaaatcatatatgccaactcatgagttttgtatgcactgaaaaagaaaagaggtgcttgtaatgcaggttgtactattatttgaacactagctaaataatgtccagaaacacatttctgagactaggttttgttatttaggcagctttaactagactgcctcaatgttctattaaaaacatattatatattattatatatattatatatatcttatatatttttaaagagaaattggcaagtatgttccctggcttgttggaatgaaaatctttttaaaatttaccttttattacyaatatattttttaaaacatattattttagcgtaactattttagggtcaatatttttgtttattatttggaaagtaaactgtttatcatttgatgcgcagttctaactgagacagtggacggtatttttcgttattgttgttaaaattctatgatacagttttgtttaggtaaaccaagtttgaatttttaaaagatcatt

SEQ ID NO: 408272 - DNA, 607 bp, Homo sapiens
tagtcatataataactacctgagatgttcactcaattttcatttacttcagcattattaaatatttaatttttatttgtagttacagcttcaatcccatctcacttttattgctttgttaaattcrtatacaaaataagagggttaccaggaaatttgtaacaacttttaattgaacatgttagtcaaggagccccagaacgattacagattatgtggtatcactttggcgactgctactcatgatgtttattcacatttaatagaataaatctacagacatttgattctaagaaaagtaagctaatgaagcatgtaatatataactgacgacttttctcaatgtaaacataggatgtagatgtcaaactgtcatgaatattagaagaaatgcaaatgatgttatgcaaattttcccacaagatgctcactcattgtaatgtatcttttgattatgtgtctgagcatctaatgtctgtagatgatactctaaagatatgtgtcacttttcaacttttaatttttacaatacatatgtctgcattggaatagaagcttctgccatcacacctacatgtgtaagtgatagcatctgtgactctatatgc

SEQ ID NO: 408273 - DNA, 607 bp, Homo sapiens
tagtcatataataactacctgagatgttcactcaattttcatttacttcagcattattaaatatttaatttttatttgtagttacagcttcaatcccatctcacttttattgctttgttaaattcatatacaaaataagagggttaccaggaaatttgtaacaacttttaattgaacatgttagtcaaggagccccagaacgattacagattatgtggtatcactttggcgactgctactcatgatgtttattcacatttaatagaataaatctacagacatttgattctaagaaaagtaagctaatgaagcatgtaatatataactgacgacttttctcaatgtaaacataggatgtagatgtcaaactgtcatgamtattagaagaaatgcaaatgatgttatgcaaattttcccacaagatgctcactcattgtaatgtatcttttgattatgtgtctgagcatctaatgtctgtagatgatactctaaagatatgtgtcacttttcaacttttaatttttacaatacatatgtctgcattggaatagaagcttctgccatcacacctacatgtgtaagtgatagcatctgtgactctatatgc

SEQ ID NO: 408274 - DNA, 560 bp, Homo sapiens
aaaaaattgcctacttgaatctgatttaaatcaggtatataaaattgtaaggttttaggctaaacwtcttgttatgttgagattgaggtttgtttaacttggaaatgtaaaaccaatatgatgatgattattcatattttaatctatagcatataaaatgtcctagtataaaaatgtttatggcttaaaaatcatatttgaattttttttcattcatcaaattatgactcctatttctagtggactcatttgtgttgataaatgtttagcctttattacttatataataaatttagatcatcttgttattaatatgttgaatcaattcacatggcacatgaaaatacatatacacattaaatagaaacatgatgaaaataagattaagttgctctaggccatacaaacacttactttgttgaggttttaaatggaaaatagaaataataggtagatttaccaaagcaataaaattactgattttagacagtatgtcaaataactaaaagatatggtcgcaaatattgaaaatactcaactaaaataattaccaaggaaaa

SEQ ID NO: 408275 - DNA, 560 bp, Homo sapiens
aaaaaattgcctacttgaatctgatttaaatcaggtatataaaattgtaaggttttaggctaaacatcttgttatgttgagattgaggtttgtttaacttggaaatgtaaaaccaatatgatgatgattattcatattttaatctatagcatataaaatgtcctagtataaaaatgtttatggcttaaaaatcatatttgaattttttttcattcatcaaattatgactcctatttctagtggactcatttgtgttgataaatgtttagcctttattacttatataataaatttagatcatcttgttattaatatgttgaatcaattcacatggcacatgaaaatacatatacacattaaatagaaacatgatgaaaataagattaagttgctctaggccatacaaacacttactttgttgaggttttaaatggaaaatagaaataataggtagatttaccaaagcaataaaattactgattttagacagtatgtcaaataactaaaagatayggtcgcaaatattgaaaatactcaactaaaataattaccaaggaaaa

SEQ ID NO: 408276 - DNA, 485 bp, Homo sapiens
ttcccttgggtgcctatgccaccagggccctgggtttcaagcacaaaactgggcagccatttgggcagacacccagctaactgcaggaattatttttcatacctcagtggtgcctgaaacaccagcaagacagaaccgtttactcctctggaaaggcggcggaagcccaggagttaagtggtctagctcagcggatcctacccccatggagcccagcaagctaaaatccactggcttgaaattcatgctgccagcacagcagtctgaagtcaacctgggacacttgagctttgttgggggaggggcgtccgctattactgagrcttgagtaggtggttttcccctcacagtgtaaacaaagccacttggaagttcgaactgggcacagtcctctgcagccctgcaaagccgatgtagccaggctgcctctctagattcctcctctctgggcaggacatctctgaaagaaaggcagtagccacagt

SEQ ID NO: 408277 - DNA, 518 bp, Homo sapiens
aagtacatcatttccctatgattcctgggaaggtactgctcattggatttttgagactctagactctttatcatgctgatctttagtgaaaaacttttgtattataactcctgattttaaatagttatgtcagtagatagatgaatgggcagatggagagacagataaaagataacctgaataagtagtatgattcatattatatagacrtagattttgtaaaatatatgttcagaaaaccatacgcactgtcatacatttaagtaggggaattcatctgaatcctagacacagttgtgtggtacatattttctgtattttaacattttaaaacagtaattacttcgaaaatggaatattcttgatgatgtttgtgatggtgtttgacaatgaatttggcaatttgacaaaaatatattttacctcaatagcctctgaaagccaattttgcatttaaattttgaatctgttacaatacaaaatccattggaaatcaattaactgagatagtagcatat

SEQ ID NO: 408278 - DNA, 597 bp, Homo sapiens
gtctgtgaattgaacctgactatgacacaccccttcttcagtactcttatgaccctctttgacttcactggaaaagttaaatactgagcttgatttactggccctttagtacctttctgttgcttcttcccacattttcatccctttctgcagtgtttcaaatggaacaggctatggcattaactatgcacttttgcatatatgtttccttctacctagagcaccattgcccatcagcaacaaatatccccaaccatttctcagctctgacttgagtccatccagacttcaccgaggcatctttttgttttttatttgaatgatccctgagccctcttttccccttttacttggttagttgttctaattatctgcttctacagtgctttctgtttccctctcttctaactttgtcattctctattattgttaaggtttccctcattatrttttccacattagactgtgttccttaattgcaacactgtacattattcacctatgtgtcacacacacttacagtgctctgtctctctctcttcccatgaatccatactgatatgtccaattccaagccaatacacagagctcatgctg

SEQ ID NO: 408279 - DNA, 625 bp, Homo sapiens
ggtttggggtttgaaaacctccacagaaatttacactggttttgtcatcttcttctaattttcccatcagaagtttttagatgattatctatacttcttttattttagttaaataggattagttgccaaagttgattatttttaaaatctttatggtgctttctagctttatatatagaaatcagaagaaagatcacacaaaccaaggagggggaggtgaaaaggagtattttataatttttcatagaatattgaaacagggatatctgtttctcttttgtgtaatcttttcattaatgtaacatgatctgaacattgcgacatgccctttaagctcagcttgattggcagaaagccatgagttctctccgcctctgacagcacaatgccaaagcatgctgtcgcatcacagtaaatctcattattatttatgctatgtgagtgtgcattgattttcattcaaagtgagttcccataagactttttttttttatactggacagtaatctatcaggtttcatttaaactctcctccttgtccacggcctttaatcttataaaagtctakattgataaaaacaatttggatttttaaagctaaaggtaaggaaatagcacatagcac

SEQ ID NO: 408280 - DNA, 593 bp, Homo sapiens
agagtgctaggattacaggcgtgagccattgcacccgggcctgtgaaaatatttcttagaatctatctccatttccatgtgggaactaggttccctcatattaatggaaatccacaaatagcttaaaggaggtatatgatattcctgattgctgtgaatgtgtgagtccttttaggaatttcaacctctatgaatttaggagcttgacttgcctgcattaactttttagtgttccatttatttatttttgcatatgacagttatatgataagactgataagacagattaaaaaaagcaactttatgttctayataacatagactaatatgacatatctctgagggtatttagatagactgatataaaggagtagtataaagttatcactgtctttcagcaagtaacaagtttatcagtgattgttctccattggatagaaataagaattagtaaattttcctaaaactatataattatggtttctttcctagagaacagaatttctatgacttagataaagcattgggattgtatttgttttgtattactgtgtaataaattatcacaaatttaatgggtcaaaccccccccc

SEQ ID NO: 408281 - DNA, 593 bp, Homo sapiens
agagtgctaggattacaggcgtgagccattgcacccgggcctgtgaaaatatttcttagaatctatctccatttccatgtgggaactaggttccctcatattaatggaaatccacaaatagcttaaaggaggtatatgatattcctgattgctgtgaatgtgtgagtccttttaggaatttcaacctctatgaatttaggagcttgacttgcctgcattaactttttagtgttccatttatttatttttgcatatgacagttatatgataagactgataagacagattaaaaaaagcaactttatgttctatataacatagactaatatgacatatctctgagggtatttagatagactgatataaaggagtagtataaagttatcactgtctttcagcaagtaacaagtttatcagtgattgttctccattggatagaaataagaattagtaaattttcctaaaactatataattatggttyctttcctagagaacagaatttctatgacttagataaagcattgggattgtatttgttttgtattactgtgtaataaattatcacaaatttaatgggtcaaaccccccccc

SEQ ID NO: 408282 - DNA, 593 bp, Homo sapiens
agagtgctaggattacaggcgtgagccattgcacccgggcctgtgaaaatatttcttagaatctatctccatttccatgtgggaactaggttccctcatattaatggaaatccacaaatagcttaaaggaggtatatgatattcctgattgctgtgaatgtgtgagtccttttaggaatttcaacctctatgaatttaggagcttgacttgcctgcattaactttttagtgttccatttatttatttttgcatatgacagttatatgataagactgataagacagattaaaaaaagcaactttatgttctatataacatagactaatatgacatatctctgagggtatttagatagactgatataaaggagtagtataaagttatcactgtctttcagcaagtaacaagtttatcagtgattgttctccattggatagaaataagaattagtaaattttcctaaaactatataattatggtttctttcctagagaacagaatttctatgactyagataaagcattgggattgtatttgttttgtattactgtgtaataaattatcacaaatttaatgggtcaaaccccccccc

SEQ ID NO: 408283 - DNA, 637 bp, Homo sapiens
caaaaccaattattttggcatgcaacggcaattatcacaattctctttcaaaaggatctgcatggctttatattaccattttttagacataaaatttttatgataatatgcatcaaataattgtaccccaataggccagttttctagatgccagagatttattttttatcatctattattcacattctcctcacacatgtgccattagcttcactttgtaaaggcttttctcaatatcatgaaaaataaataatgtgagaaatgtatgaagatttgggagaccattcccagtaattcaataggatcaacttaatgaaatatttcatcataaagtgtgtttataattggtacattttccttggagaggagctttctagctcaaatatctatcatctatgatttatagcaacttggcttaaaatgatccacagttacattcatattagcacttgtaaacagcagtttacaaattaaaataaatcatcattcacttttgaggaagttaatctgggcacaaatgcagctaaagggtgagcaacatgatctctaattctcacacccaacaacccatggtaatcttttctactcsgtgttaatatagctctttgttattcctctctcctagaatttatctacc

SEQ ID NO: 408284 - DNA, 548 bp, Homo sapiens
gatgtcattctctctttacttactccatcctaccagaaaaaaaaaaaaaaatacatattctgcttagctttgttccaggtagttgaggtagtattagacatagcgcgaaaattatctgttttgggacccaaatattttgaaagttatttaaattctctgttcttgccttcttaatgatagaaaatctagtacatggtaatgataagtcagattgttttctaaccatgactaccctcacatcacacaaaaacacacayagaaggagggagaaaggaaagcagagagaaacagtgacataaagaggaaagaggatttagctgtctcaataagcctttggtattgtatagttctagactatgtgcctattgtctgaattaaaagaagtgagcttcattcattcaacatttattgcctgctttttatctgctagatactatcctgactgctggtgatatgttaacataaacgtgaaaggaccttgtttctggagttgaaagtaagaaaatagtaattctgtctctgaaattagaagaaagttttagagatga

SEQ ID NO: 408285 - DNA, 576 bp, Homo sapiens
tcaacagcagcaatttaaattctttaagagagcggtgttgggaattgaggtcctgtttataatactcctttttcccatccaagataagaaamaactgaaagttgtactcatgatagacatcaaaattattactagattaaatgtatgaacaaactagcttcctcatatttcaccaaacaataagtccctgtgtaaagatgaactgcttcaagcagaaatatgtccacaaatgtggtctttggttctgttttaatcaagtagaatgagtagcatggatcttcaaagaggaatcatcctagaaggaataacacatttgaacacatcatgcttttgttttctcaactgaaaggaagtgcaagtccatattgggtaatttgtcacatttcatataaattggtccttagaagtttgatgctattctgaaatagcatttaatgtatgtatcttaacttgtagcctcagtccttttccctgttgattgtaagaggaatttagagaaagttctcaaaacagtcatcagataggctatagaaattgatgactgcacatatttaataaacatctgccataattaac

SEQ ID NO: 408286 - DNA, 646 bp, Homo sapiens
aatcaatgctaaaataaacattcccaaactctgttaaaatatcctaatttatttagagtggatttcatgtactatgaagaggaaaacaccatgctccactagtttttatgtgtttttaaaggtaatttaacatagttatggttgcatgctaatatattcataagaaggatggaaaataatcaacaaatatagggtaattaagcatcaggccaagttataaaagaaggaaaacttgcataattaaattttaaatgtactttcttaatatctaattgactaattctaaaaaaatagaaatgtaatatgtattcatctgaatttttgttgggttttctttcaacttggatttaaaggagtagacattcgtggaaattcttcctggaaatgtttttcacaagtgctactttcaaactcagaaacaagcactaccctactgactaactgattcctcaggcaaggtttataaattcactctgrtgtagaccatatttaacactttctaattataggtatgtggaatgctaattaattggttgtgtgatactaattagctagcaccttccccaattgtcttaagtgaaaatatttccttttggattttcctatggaggaaatgtgatattctctattaggaaaggaatatcaa

SEQ ID NO: 408287 - DNA, 646 bp, Homo sapiens
aatcaatgctaaaataaacattcccaaactctgttaaaatatcctaatttatttagagtggatttcatgtactatgaagaggaaaacaccatgctccactagtttttatgtgtttttaaaggtaatttaacatagttatggttgcatgctaatatattcataagaaggatggaaaataatcaacaaatatagggtaattaagcatcaggccaagttataaaagaaggaaaacttgcataattaaattttaaatgtactttcttaatatctaattgactaattctaaaaaaatagaaatgtaatatgtattcatctgaatttttgttgggttttctttcaacttggatttaaaggagtagacattcgtggaaattcttcctggaaatgtttttcacaagtgctactttcaaactcagaaacaagcactaccctactgactaactgattcctcaggcaaggtttataaattcactctgatgtagaccatatttaacactttctaattataggtatgtggaatgctaattaattggttgtgtgatactaattagytagcaccttccccaattgtcttaagtgaaaatatttccttttggattttcctatggaggaaatgtgatattctctattaggaaaggaatatcaa

SEQ ID NO: 408288 - DNA, 657 bp, Homo sapiens
catttcagccatacagtgttccaarctttttacaattattacctggtttaatccttataataaatctatgatgtaaatactatgagtgcttaactttaattaatacagctttcctgttaagtagtactgaagcttatttatactgaaataaaaataaccaatagtcatctggatagttttccatttttaatttctgaaaaactttacaagataaatattttgtctaaagatgtaattataactgttaggaaaaactattatacagtctttattattgagattgtaagtttacatatgtaacttttcctatttcttttcatattccttttcccttatattcctttatatgatattttgcctctgaatattatataggtagggtcattcctcaaagtagaatgatattaaatagatccttcctattttatgttgtctggaagaaggggttcttagttaaatggagaccattactgatttgtgagatgaaattaatgtcctataattaccagctgccatgacctttaacagaattttaaacaaggagaatctagatagctgaggattttcagtaaacttttgttttgttaaaaattcttcagttctagttacctagtactgtaacatgtctgcatacagtttaacttcatgaattactat

SEQ ID NO: 408289 - DNA, 589 bp, Homo sapiens
ggacagtgcagcgctatatgtgtctaactttaacctttgttatatgtctaacatcagcctatttgatatcaaaaattgttcaggccaggcaagatggctcacacctatcatcccagcactttgggagtctgatacaggargatcacttgagcccaggagcttgaaacccagcctgggcaacatagggtgaccccatctttacaaaaaataaaaataatttaaaaaatagctagcatggtggtatatacctgtagtctcagctacttggaaggccaagacaggagaattgcttgaacccaggaggttgaggctgcagtgagctgtgattgcatcactacactccagcctgggagacacagtgagaccctccctcaaacaaaaacaaaaaattgatcagtatgtcatgcacaaaaggtcttttctaaaaatatggcattaatactgatctggaaaggcacaagctatataaaagcaccataatcttatttgtataactggcttttaatggtagaactccagtgacaggaaaggcacaatgctgaattgcttcaattttttcatgtgccacctgaaattatattagctgaca

SEQ ID NO: 408290 - DNA, 589 bp, Homo sapiens
ggacagtgcagcgctatatgtgtctaactttaacctttgttatatgtctaacatcagcctatttgatatcaaaaattgttcaggccaggcaagatggctcacacctatcatcccagcactttgggagtctgatacaggaagatcacttgagcccaggagcttgaaacccagcctgggcaacatagggtgaccccatctttacaaaaaataaaaataatttaaaaaatagctagcatggtggtayatacctgtagtctcagctacttggaaggccaagacaggagaattgcttgaacccaggaggttgaggctgcagtgagctgtgattgcatcactacactccagcctgggagacacagtgagaccctccctcaaacaaaaacaaaaaattgatcagtatgtcatgcacaaaaggtcttttctaaaaatatggcattaatactgatctggaaaggcacaagctatataaaagcaccataatcttatttgtataactggcttttaatggtagaactccagtgacaggaaaggcacaatgctgaattgcttcaattttttcatgtgccacctgaaattatattagctgaca

SEQ ID NO: 408291 - DNA, 592 bp, Homo sapiens
atttgtataactggcttttaatggtagaactccagtgacaggaaaggcacaatgctgaattgcttcaattttttcatgtgccacctgaaattatattagctgacatgactcagtaaaaattattcattattctaagagccattatcagtttattacagactaatcaatagaattctcattacctgttctaagatttttaaaagtaaacgtcaattctttatgtgttagatcaagagtttagttgcagactcctttagaacaccagcaaatggctctaggctttgcagcactgactsggttaaattaatggaaaacaatgttttgtttagttccttcacccttattaatgaatagtgcctttatatcatttatgttttttcaattgtcatatcctgtgaaaagaaaaccttggaaaaacacagttttgggtgatgggaaacctaagaaggaaataacatgaaagattagaaagtatatatacatacacacacagataggtagcatttagggctcatttgtttcttagcatattgatattaaatttgatggacaggaaggtacaaagcaaaaaacatgccataaaattggttag

SEQ ID NO: 408292 - DNA, 605 bp, Homo sapiens
gtcatgcacaaaaggtcttttctaaaaatatggcattaatactgatctggaaaggcacaagctatataaaagcaccataatcttatttgtataactggcttttaatggtagaactccagtgacaggaaaggcacaatgctgaattgcttcaattttttcatgtgccacctgaaattatattagctgacatgactcagtaaaaattattcattattctaagagccattatcagtttattacagactaatcaatagaattctcattacctgttctaagatttttaaaagtaaacgtcaattctttatgtgttagatcaagagtttagttgcagactcctttagaacaccagcaaatggctctaggctttgcagcactgactgggttaaattaatggaaaacaatgttttgtttagttccttcacccttattaatgaatagtgcctttatatcatttatgttttttcaawtgtcatatcctgtgaaaagaaaaccttggaaaaacacagttttgggtgatgggaaacctaagaaggaaataacatgaaagattagaaagtatatatacatacacacacagataggtagcatttagggctcatttgttt

SEQ ID NO: 408293 - DNA, 679 bp, Homo sapiens
tttctaaaaatatggcattaatactgatctggaaaggcacaagctatataaaagcaccataatcttatttgtataactggcttttaatggtagaactccagtgacaggaaaggcacaatgctgaattgcttcaattttttcatgtgccacctgaaattatattagctgacatgactcagtaaaaattattcattattctaagagccattatcagtttattacagactaatcaatagaattctcattacctgttctaagatttttaaaagtaaacgtcaattctttatgtgttagatcaagagtttagttgcagactcctttagaacaccagcaaatggctctaggctttgcagcactgactgggttaaattaatggaaaacaatgttttgtttagttccttcacccttattaatgaatagtgcctttatatcatttatgttttttcaattgtcatatcctgtgaaaagaaaaccttggaaaaacacagttttgggtgatgggaaacctaagaaggaaataacatgaaagattagaawgtatatatacatacacacacagataggtagcatttagggctcatttgtttcttagcatattgatattaaatttgatggacaggaaggtacaaagcaaaaaacatgccataaaattggttaggatttttttctcatagataag

SEQ ID NO: 408294 - DNA, 634 bp, Homo sapiens
aatcttcaccacttaatgtactgactctaatcctaagtagattaaaaatagatattataaatctattaataatggtatgtaaagaaaatggtttggtaagttacataagatatactgaatttaaggcaagatacaaagtggagactgcaaacatactaggaacacagcttagtaataaggtaatatatacattcatgtcttatatacacagaagtaaaaaagatgctatgatgcctgatgttgttttcaaagggatgagttcctgyagaggaaggaaaacacatctagatgggtatagcctaataattaggaccaccttaaagcctgtttttgcctatgaacacatcgaaaataacaaaaatcttaatccaaaaatcttgaaaaatagtgtatgtttgtaaccatagtggaaattcattataaaaacaaaatccaaacttttaaagtctggatttctaaagttcaccaaaaagtatattttctagaagtactctgttaccagctaaattgtgtgtcctaaaagacaagttgaagtcctaattcccattacttagaatgtgaccttacttggaaatagggtcttcctagatgtaaatcaaattaagatgaggtaggtcatttgggtgttccctaa

SEQ ID NO: 408295 - DNA, 635 bp, Homo sapiens
ttctcgcctaccacacatacgaaatatacatcgttttgtataaaagttagacatcacttgtgagaagaaatttcctgggcataacagtagtcaatgatgttaccgatctactcagcagcatctacaatggaagaaatatcataccttatgctgtggtgtggatgtttgccccctccaaaacagattgaaacttaatccccaatggagcagtaycaagagtctgttaaaaattcagcctggcattctgtagccttcttgccatgtgataccctctgctgcctcaggacccttcagacagtctctaccaagcagaccctcaccagatgcagctccccattcttgaactttctagcctccagaattataaaaaaacacaattcttttctttataaattacccagtctcaggcattcagttatagcaacagaaaaaggagtaggataccttaacaaatgttttattcagttagccaggttagtgtatatcttttagtatatatttaactaggtcctcattcacttgtctaaaaggataaggaaaaattgctctgacacagaccggatacacacattattgaaaactattccatttcaggctgattttcaattaagtccccattctaaattacttaataa

SEQ ID NO: 408296 - DNA, 536 bp, Homo sapiens
tcatgtctctctgggccactcacatccccaataaataaacagtgtattctctaaggaaagagacaatgtgcaattcacttttgtgtccaccacragctagcccaagtccacaactcagcagaggctcattaaatatctgtcaatatgagatgaaggatgtgtgttttgagggagggtttgcttaggaatgatgatatgacaagaataagaaatgcctgtcaaaaagctaagaatgtaagagagagcaagatatgcaaagggtagatacaatattatagcatacagagtggaatgagaatattaatgtaggggaaaactagagatcaggactatatcactatttgatcattaaataatattgataatgttcttaataaagagtctacatgatgagtaaatcattgaaatgtggtcgatatgttgtttttgagtaggcaggtaagaagaatgcaccttggaaggtttttcatcttggaaagtttacgaaagagtaaaaatcagtcaataagagaattaagtatttattccacaaacac

SEQ ID NO: 408297 - DNA, 555 bp, Homo sapiens
agggttgtctagtataaaattagccctcttccagtatcaaaatatttcacatgccatcttagaataattaacttaccccagaaaagctaaagagaaagggagaaggcagttgttttaaatgaccttaagacttttctacatattgctattcagacttccagtgataaaacaagaaaytgctataggcctttagacttaagagtcacccagtccactcactcttcatcttgctaagcaatgcaggtcacacctgagattcaacagctaagtgtacagccttggctgtgcccactcaacacggagtgaagcagccagcatgcagtaaaaaaaaaaaaaaaaaaaaaaaagccactggagttcattctgttgtactttctcatccttatcgtcttatttttttctctttgtcaatctgtttgagaactctttggtgtctattatctctcactttcctacccatccttcaaagcggctccccttctcatcaccactgtggaaaactctttcatttcatcctacccttgctcggacccagtgaacttacacccaatctat

SEQ ID NO: 408298 - DNA, 617 bp, Homo sapiens
gactttacaggtgcttgtatatcctgtcacctgatttgggaggtgattactgtgtatacagtgcctcctttgtgaaaattcacagcattttatgcttaggatttgaacartcttctgtccatatgtagtagttgaaataaatggtcaaatttttcatagaaattctattaaatcacatatatttgtcacagcttaaatattcatggaaaacagtcactatataattatgtacattgaaaaatttagagaaaagtgacaaaagctgaaaagtctaagagaatcattttttctaaggctcaaattgccatttttcatcataaaaattcttgctgtgtgtattgtgcaaattttagagaatgcattgtataaaatgagttatgatttcttaatatttcaacataagtctggtatattttatatagcatgaaatagaaataataacatgaagaataataatttcagaaattcaattcacaaaacttagtttttgtgtttttatagtaattttccatcttgaaggttaaaaaggaaaacaagctttagaaatattacttattatcaagctgtgaagtcactaacaaggacaatactttgctaaaaaaaaatcttgtgaagga

SEQ ID NO: 408299 - DNA, 574 bp, Homo sapiens
atatttcttctggtgcacttaaatcttaagacagaatgttgaatcagcacatatcatgacaacccaaagatcaataactatttgtaaattagatgagaaaaaagtatatttattgaatacctaatactgtctgcttgcttctgtgacatcatgtgacatgattattatgaaaagtaacataataagaataaagtagttctttactatagcctcaaagtctccattgctaacgagagctgctttagaaatattggcataaaaccttttttataagttgcacataattacaggatcagctttgggtttcaattggtaagaatttcagttctgtgyggccttaatgaataatatctgaagtacaaattaaattttttctatcaggaggcttattcagaaaattataggccatttattccttccataatatatgagaaagataaatttttccctaactctattcttcaaagagtaaaacatcctggctacagcattcatccctttgttttgtctgtctgtttgtttgtgtgtttgtttgtttgcatccttgcttactattaaggaagcctagatggta

SEQ ID NO: 408300 - DNA, 574 bp, Homo sapiens
atatttcttctggtgcacttaaatcttaagacagaatgttgaatcagcacatatcatgacaacccaaagatcaataactatttgtaaattagatgagaaaaaagtatatttattgaatacctaatactgtctgcttgcttctgtgacatcatgtgacatgattattatgaaaagtaacataataagaataaagtagttctttactatagcctcaaagtctccattgctaacgagagctgctttagaaatattggcataaaaccttttttataagttgcacataattacaggatcagctttgggtttcaattggtaagaatttcagttctgtgcggccttaatgaataatatctgaagtacaaattaaattttttctatcaggaggcttattcagaaaattataggccatttattccttccataatatatgagaaagataaatttttccctaactctattcttcaaagagtaaaacawcctggctacagcattcatccctttgttttgtctgtctgtttgtttgtgtgtttgtttgtttgcatccttgcttactattaaggaagcctagatggta

SEQ ID NO: 408301 - DNA, 532 bp, Homo sapiens
tacttttctattaccttttcatttagtagactaaagatttaaatgtgaaccttttctacacataatattcacggtgctttttttctgatctcagatttagacataaaataaaatatgagagaaacttaattcccattttataatatttatgaatttaataatttaaaatcattttaattgaaataacatccttaatgtaatcatgatagtttaaagcagaatgacaatgcctagtagtaaacctatcttgataattttgaccaggacctctgtaaaaactgtccacaggaagtttgctaggtacacagagagagttcttgtctgtagagcmcactgtgtgtttcttcttccagtaatatacagtgcaagtgcttgggacagttccacttggcccaatcccattttccaggccagtgagcataatggcagggtagaaatgagatgtgtctatgtgcctttggtaattactgagtatatgttaatgaagagcttttccttggccttccaccagcacggttaaatatgaccaacg

SEQ ID NO: 408302 - DNA, 561 bp, Homo sapiens
ggagtctagggaagcacacagcaattgggaaaaacataaagcagtcagagtttctccaagactaagcccaaaatactgtacttatggaccacagagtaaaacatccccatagctaaaatataaggacaaagaaaattaagtaaatctttatttacattccttgaggatggccaggacgtggtgccttgtaactaaaggtttcttcctgataattgctacaaattgcatcattagataaatattttaactgtgaagtgccaaaaaaaaaaagtaaagaacaggaatttgaattctagtcccgattatggatatagttcattcttacctggcttgaaagtcaaaatwcaattcagaatgactttaatattaatagctttcccataaagcaagtggtagtgtaacagtattcctaaatactgcaggaaacctctccatctcttatccaaaactggcactacctgaaattgatgagatggctgatcatacagaataaaattctacatgactatttaagtcttcatctgccccccaaatttctgtttttctataataataattatc

SEQ ID NO: 408303 - DNA, 610 bp, Homo sapiens
tacagtataaaggaggaacaaaaataatgtgtctctatttctagagcagattgtaaaagaggtcaggagaatcagataaggaacaaggcaagcataaagcttttaaaacaaaattaggtcctcaatatgagagaactggaaccaaaggtcagagtttacagtgagccccttcttctccaacatggtctctgctttaaaatcagtattacgggcatggtgaggtggctcacaccggtaatcccatcactctgggaggccaagacaggcagatcacatgaggccaggarttctagaccagcctggacaacatggtaaaaccccatcgctattcaaaatacaataaaattagccaggtgtgatgtctggctaattctcaggtgcctgaggcatgagaattacttgaacctggaaggtggaggcttcagtgagctgagattgctcagcctggatgagagagacaccctgtctctaaacaaataaataaatcagtatagcagttgaagagcatgcactatggaggcagacttttttaatttgaatactagtttcaccatttttgaggtgtgaaaccttagtcaagctattttgttatttaacttaatatcagacc

SEQ ID NO: 408304 - DNA, 585 bp, Homo sapiens
ttgtctgattacaagcctaaccaaccatatcaaagtaacacccatgcttggataaaagataactgtgtcaaatcaaactcaacacagaagtcacagagaggtcctgaagtgctctcttcaaatggcctgcatttctaaaatttatagactcattacttttgcaagtctccttctgacctcattatttagctcccatgcttgctatctgattcagtgcatacttatattgcttggctcaaactaactttatgtcccaagtttaaatttctcctggagagaatattatcccagtccagaggcagtaacatttcctcccatactttagcaggaarcaatattcaggcataggcagacaggtgtatttttcttaaggttcccatttgtaaccctcttgataatcatgtcagagggttttgataagcttgactaatgtagcatgatcacccaggctggacaagaaacatagtaataggacagagacattctgaggagacacctgatggggtcctaatagtaaacccagtagaaatggagtcagttctaagaaattattcccttacttcacaccatttcctaaagccattt

SEQ ID NO: 408305 - DNA, 642 bp, Homo sapiens
gaacacaaagaaaaaaaatacatatatatatgctctgcaagtatctacataaataaatgagcaaccaaccctgagagtcaagaattctgggaaggaggttatataacccttgcatgtgtgcctttactttgatagcaattagcagtacaatgtagttagtgtaaaagcacaaatcagacagaatgggttcaaatatcagctctgttagtggtgtttacccaaggaaataatttatggagaatttcaaatgtatacagaagtagatggaatagtatactcccatctaccaattaagcttcatgtttaatttttggaatgattctgtatcaaataacaccctccaaggagaagggaagaaatgtgttagctagcaatgcattaaaatttagagaactatatagattcagagtaaagtattattttacttatggagaaaaatctcttaaaatagaacsctcaaaacatcatatatctccatttggcagagtgcgtagccatcatttgtttcttggagaaaaaaataaaaagataaagcaacaagttaagttccaaggtttgctaaagcaaaccagagtaaataagcgcataaaggtgtatgtaaccttttctgatttcaggttttattctctccaatctcctatg

SEQ ID NO: 408306 - DNA, 588 bp, Homo sapiens
tcatatcatcagcaaagagatagtttcacttcttttcctatttggatagcttttatttctttctcttgcctgattgctccagttagaacttgcaatrctatgctgatgcagactggtgagtgtgggcatccttgttccagttgtcaagataaatgacttgagctttattttattcagtatgatgttggctgtgggtttgttatagatggctcttattatttggagctatgttcctttgattgctagtgtgttgaaggtttttatcataaaggaacatcggattttatttaaaaattttctgaatatattgagatgtcatgtggtttttcttttaaatgacacagaataggagtctgaataaaaagccaaggcccaatcatctgttgtttccaagagacccatctcacaaaaatgacatgcacagtcttaaagcaaatgagtggagtaagataccacataaatgaaaaataaaaaaggagaggagtcactattcttatatcagataaaacaggctttaaaccaataaaaatttagaagggcaatgaaaggaattatgtaatgataaggaataaaattcctcgagaagcc

SEQ ID NO: 408307 - DNA, 542 bp, Homo sapiens
tgtgtgtgtgtatgtgtgtgtgtgtgtgcrtgtgctctctttgatagtaactccatattagttttaggttttgcaaataccttctctcattttgtcattagtatgttaagtttgtccagagttttagctttaactgttcaacggaagtctttaacttctatgtaacaaagcttacccactttttgccatatgcttcatggttctaaaattttatttaagaagcccttatccaatcttaagtcactatgcttttaatagtcctaatccttttgagtttcattcttgtaggtggttttaggcagaaatccagcttcacttatctccatatagtaaatcagtttttacaatgccatttattaaataatctgccccattccaattgaattacaggactctacattaccttcccatatatatatgcagaatttttctaaatgaaattgtgaagaactgacattgttacaatagttagtcatgcatgaaaaaacacggagatataatttttaaattgttttcaatgctcttgactaaaggtttaaagt

SEQ ID NO: 408308 - DNA, 613 bp, Homo sapiens
tagcagtaatagttcaggtgacatcattccctaatgtggcttctgacactggattagctaaaggggtattttttttttaatctaatagttgtggctagaggttcctggcmtctctatgatggctaaggtggtaagatatttgaataagtagttcctacagcaactgagaagtcatattagaagggtagtttccctgtgaaaaagccaggttggtcctgtttttttattttattttattttatttttgacactgagtcttactctgttacccaggctggaggagtgtagtggtatgatcttggctcactgcaacctctgcctcctgggttaaagcaattctctgcctcagcttcccaagtagctgggattacaggcgctcaccaccacgcccggctgatatttttgtatttttagcagagatggggttccaccatgttggccaggctggtcttgaactcctaacctcatgatccacctgcctcggcctcccagaatgttgggattacagactgagccatcacgcccggcctgtcaagtcatttttagagattttgtctagaaccaggtcttctggcccttcaaataatttgtaagtacctaactccctataact

SEQ ID NO: 408309 - DNA, 613 bp, Homo sapiens
tagcagtaatagttcaggtgacatcattccctaatgtggcttctgacactggattagctaaaggggtattttttttttaatctaatagttgtggctagaggttcctggcctctctatgatggctaaggtggtaagatatttgaataagtagttcctacagcaactgagaagtcatattagaagggtagtttccctgtgaaaaagccaggttggtcctgtttttttattttattttattttatttttgacactgagtcttactctgttacccaggytggaggagtgtagtggtatgatcttggctcactgcaacctctgcctcctgggttaaagcaattctctgcctcagcttcccaagtagctgggattacaggcgctcaccaccacgcccggctgatatttttgtatttttagcagagatggggttccaccatgttggccaggctggtcttgaactcctaacctcatgatccacctgcctcggcctcccagaatgttgggattacagactgagccatcacgcccggcctgtcaagtcatttttagagattttgtctagaaccaggtcttctggcccttcaaataatttgtaagtacctaactccctataact

SEQ ID NO: 408310 - DNA, 613 bp, Homo sapiens
tagcagtaatagttcaggtgacatcattccctaatgtggcttctgacactggattagctaaaggggtattttttttttaatctaatagttgtggctagaggttcctggcctctctatgatggctaaggtggtaagatatttgaataagtagttcctacagcaactgagaagtcatattagaagggtagtttccctgtgaaaaagccaggttggtcctgtttttttattttattttattttatttttgacactgagtcttactctgttacccaggctggaggagtgtagtggtatgatcttggctcactgcaacctctgcctcctgggttaaagcaattctctgcctcagcttcccaagtagctgggattacaggcgctcaccaccacgcccggctgatatttttgtatttttagcagagatggggttccaccatgttggccaggctggtcttgaactcctaacctcrtgatccacctgcctcggcctcccagaatgttgggattacagactgagccatcacgcccggcctgtcaagtcatttttagagattttgtctagaaccaggtcttctggcccttcaaataatttgtaagtacctaactccctataact

SEQ ID NO: 408311 - DNA, 602 bp, Homo sapiens
ggtcaaatggcctgaacaacaatcaagtggctcttttcttctcttttctcctttttttgagacagaatctcactctgtcgcccaggctggagtgcagtggcatgatctcggctcactgcaacctcggcctccagggttcaagcaattctccttcctcaggctcctgagtagctgggatcacaggcacccaccaccatgcctggctaatttttgtatttttagtagagacagggtttcaccgggttggctatgttggtctcgaactgctgacctcaggcaatccgcccaccctggcctccaaaagtgctgcgattacagacatgagctacaccgcccccaccagcatgttttctcaagccaattaccatcctcctcagaggstggactgggcatggcctgtggtctgacagaggcacacattcccaaaagagaagcaaattagtaatatgaagataaagtgggaatggataacaagcaaatatagccaatgttcattagaaattggaagacaaactactttataaattaactatcaataagtagcagggcatttgcataattttctgccagactatatatggctttgccattgtattaattgt

SEQ ID NO: 408312 - DNA, 602 bp, Homo sapiens
ggtcaaatggcctgaacaacaatcaagtggctcttttcttctcttttctcctttttttgagacagaatctcactctgtcgcccaggctggagtgcagtggcatgatctcggctcactgcaacctcggcctccagggttcaagcaattctccttcctcaggctcctgagtagctgggatcacaggcacccaccaccatgcctggctaatttttgtatttttagtagagacagggtttcaccgggttggctatgttggtctcgaactgctgacctcaggcaatccgcccaccctggcctccaaaagtgctgcgattacagacatgagctacaccgcccccaccagcatgttttctcaagccaattaccatcctcctcagaggctggactgggcatggcctgtggtctgacagaggcacacattcccaaaagagaagcaaattagtaatatgaagataaagtgggaatggataacaagcaaakatagccaatgttcattagaaattggaagacaaactactttataaattaactatcaataagtagcagggcatttgcataattttctgccagactatatatggctttgccattgtattaattgt

SEQ ID NO: 408313 - DNA, 505 bp, Homo sapiens
ttgttctctctctcacattctttattctctaggttactttgtttggttttttttttttttgcctctttgctctcatctttattagacatctaggaggagcctctgattattgggttttttgtgtgatttcttttcccccatcctgtcaattattttgaaaatctaatagtatatgagtgaagcctggaaaaaaaaagcctaggattctgtgtactgctcatccctacacatttttttgcagtttacttgatctagagttcaaagccttagctagcttaggatttgagtgaaaggcttagctagtaattgtattaatggcacatattttgtcaagaatctcacagaggtgttaaagaaagccagaaagctgtatygaattgttactacatcttatttacccaaatcccttctttcagtatctttgcaagcccataaatcaaaatgtttcactgagttttcaatccctgttattacatttagagaaagaatttacatttacctaaaa

SEQ ID NO: 408314 - DNA, 505 bp, Homo sapiens
ttgttctctctctcacattctttattctctaggttactttgtttggttttttttttttttgcctctttgctctcatctttattagacatctaggaggagcctctgattattgggttttttgtgtgatttcttttcccccatcctgtcaattattttgaaaatctaatagtatatgagtgaagcctggaaaaaaaaagcctaggattctgtgtactgctcatccctacacatttttttgcagtttacttgatctagagttcaaagccttagctagcttaggatttgagtgaaaggcttagctagtaattgtattaatggcacatattttgtcaagaatctcacagaggtgttaaagaaagccagaaagctgtattgaatygttactacatcttatttacccaaatcccttctttcagtatctttgcaagcccataaatcaaaatgtttcactgagttttcaatccctgttattacatttagagaaagaatttacatttacctaaaa

SEQ ID NO: 408315 - DNA, 582 bp, Homo sapiens
ggaagtgcaggttcaatcaggtgactggaggatgaatcaggatttatcttctagtgacaaggccctgacaaggggaagacctgaatatgcataacacaaaggagaaagttacactgggactctcataagaatattcatgagagatggcaaacccaaaagcagttcgcatgcaccagacatttctatatttagaatggtcagttcagatggttgttaatctactacctattcagtggctacagaaaagaagagatttcttttgacaccgagaaacatgggctggtgtggaaactggtgtaaattttatatcattttttaaaaagcaaatattcataggaatgaatgacaaaagtcactaattcatagaagcatcctgcccattgatgaagactgtctctttagtctgtttacaatcacattgtaatccaaaatcttctaggatgcaggaaaactggattcttctatttttctaggagttcaaytgtgggatttgaatcatacattttgcacatcagataaactgtgggaaatttattttatatttatatttaattacaaccacaaaaacaaacagacaaaaac

SEQ ID NO: 408316 - DNA, 667 bp, Homo sapiens
gtctaattttgcatcatcaactgaattatttcataaagtaatatgaacctaccattagaagggtggatataatttaatctcctttcttgtattaaaataataataaaactaccacttaacattcatatcacatattgcaaattacagtatcttctatgtaccgtattatcttttattttagtttcaaaaaatgccatgaagcaagagggggagttattgttagcctttctttgtctaatttcattggtaaaaacactaaaacccagagatgtaaattgatatgctcaaagtcagccagccaagaagcagcagagacagaacttcagctcaagagttttagcctctggcctcctactctttttctacaacattcgtcctcctggataccagccctataatcctttgagaaacacttatctatgctaccgtcagcttctacccatattactctggcttagatttttacagtcragaaatagaaagaattgaaaaatatgatgattgaaccagcctgagttcatcggctgggattatggcgtttgaataaatcaaagcctttcggcagggtattagggaaacttgaacagcctcaagtttctcagagaaaagagaataaacaaattaaacaaacactctcatcatgcaaaatcccttttgataatgttcc

SEQ ID NO: 408317 - DNA, 612 bp, Homo sapiens
ctgtataggttattttttggcttcatggactggttgccacagatagtattctgactttctgctatggttactgtaaacaatagtttgcttttttgtgttgactgctacaggtcatgagtcagatttccatttcgtatatagtctgacaattgaccatttgtatatttagtctctcagtccactttttaaatcaatctctcccttgtgagagattgaccagttctgagaatgcttcagatccgtatattcaccactcagagattgtttagtaatcctcatagtcaattgcattgtaagattgtttgacctttttcttgttgcatcatcatggtgagtatctcatgaaacagtagttgtgtataagcatttaaatctctggatagaattctgaggaccagcatcacaaacactataacagaaccaaaaacaattaatagtccttgtaaggtgtttttaactctatttgmccaacacaggccaaacaaacaaatgccatgggccatagaatcaaactttaaaagcaaaatagcttttttttttccttaaggaatattcaccctatttcatcttgcatatttcattgatctaagtacagcaagaagtaaggcaatg

SEQ ID NO: 408318 - DNA, 612 bp, Homo sapiens
ctgtataggttattttttggcttcatggactggttgccacagatagtattctgactttctgctatggttactgtaaacaatagtttgcttttttgtgttgactgctacaggtcatgagtcagatttccatttcgtatatagtctgacaattgaccatttgtatatttagtctctcagtccactttttaaatcaatctctcccttgtgagagattgaccagttctgagaatgcttcagatccgtatattcaccactcagagattgtttagtaatcctcatagtcaattgcattgtaagattgtttgacctttttcttgttgcatcatcatggtgagtatctcatgaaacagtagttgtgtataagcatttaaatctctggatagaattctgaggaccagcatcacaaacactataacagaaccaaaaacaattaatagtccttgtaaggtgtttttaactctatttgaccaacacaggccaaacaaacaaatgccatgggccatagratcaaactttaaaagcaaaatagcttttttttttccttaaggaatattcaccctatttcatcttgcatatttcattgatctaagtacagcaagaagtaaggcaatg

SEQ ID NO: 408319 - DNA, 664 bp, Homo sapiens
ctgcatgaagtagggcagagtttagggccagagtttaaatttctagacatgtgaaccttcatattaccaattcatagaggaataactagtttgtcctcaagagaataaaccaaatgcccataggactagtgggggaagcttttggacaagtgagctcaaggcttcctaaaagttttgctaattttaatttaagaatccgattggtcctttgaaacttttgaggattagagtataaggaaagtgtggtttttgattaagggataacacctgacagaattcttttataatggtcattttaaagagtgaacctcacttactgtaaaagtttaggtgtcytaggttgcaagcacaaagccagacagttttttaagtgtctatatgtgttgcggcttttttccaatacagtattttgacccatcctgaaaatagacatacaataactaaaaaatattcaaatccaatagagggtggatgtaatggttaattttatgtgtaaacatgattgagataagaggtgcccagataggcagtaaaacattttagggtgtatctatgatggtgtttttagaaaatattaacatttaaatcagtagactgaagaaagaagatctgccctgaccaaagtgggtgggcatcatccaatctgttaaggacatgaccaaag

SEQ ID NO: 408320 - DNA, 664 bp, Homo sapiens
ctgcatgaagtagggcagagtttagggccagagtttaaatttctagacatgtgaaccttcatattaccaattcatagaggaataactagtttgtcctcaagagaataaaccaaatgcccataggactagtgggggaagcttttggacaagtgagctcaaggcttcctaaaagttttgctaattttaatttaagaatccgattggtcctttgaaacttttgaggattagagtataaggaaagtgtggtttttgattaagggataacacctgacagaattcttttataatggtcattttaaagagtgaacctcacttactgtaaaagtttaggtgtcctaggttgcaagcacaaagccagacagttttttaagtgtctatatgtgttgcggcttttttccaatacagtattttgacccatcctgaaaatagacatacaataactaaaaaatattcaaatccaataragggtggatgtaatggttaattttatgtgtaaacatgattgagataagaggtgcccagataggcagtaaaacattttagggtgtatctatgatggtgtttttagaaaatattaacatttaaatcagtagactgaagaaagaagatctgccctgaccaaagtgggtgggcatcatccaatctgttaaggacatgaccaaag

SEQ ID NO: 408321 - DNA, 611 bp, Homo sapiens
aggcagtgctgtggctggtttggtcttttatccacatcactcaaactttctccatatcagcaataagggtgtttcacattcttatttgttcactggggtagcactttaaatttttgtcaataacttytcctttacattcacaatttgactgtttggcacaagaagcctagtttttagcctatcttggcttttgacatgccttcctcatgaatgttaatcatttctagcttttgattcgaagtgagagatgtgtgacttttccttttaattgaacatttagaagccattttaaggttgttacttggcctaattcaacattgttgtgtctcagaaaatagagggacctgaagaggagagagatggaggaatggctggttggtagagcagtaagaacagatgggatatttattgattaaactcacttttttatatgggcaccatccatggcatcccaaaacaattacaatagtaacatcagagattactgatcacagatcatcataactgatataataatgaaaatgtttaaaatgttgtgagaattaccaaaatgtgatacagagaacagagtgagcacatgctgttggaaaattggcactggctgacttact

SEQ ID NO: 408322 - DNA, 546 bp, Homo sapiens
attcttcccttgttacaagttaccacaaacttgataatataaaaccatacacaggtattagcttaaaatatgkcagactgcttcatcaaagccagcaaaagagagagtttgctggcaaaatgaaacttacaatctcttgtaatctagtcatgaagtgtcatcccctcagggatgatgattagaagcaaattattcaaggggagaagattactcaagagttgtgaacatcaggaggcaggtttatttgggagtccttttcaaagctactgactgtagatatttttgtgtctttatttaatggagatactcttggcttctggcttagaagtagtctacaaattatgacaattatccttttttatagtatttgtgttgcactcctcaaatgtgtaatttctgaggcttaatttatgtaccatagctgattttccaataaatgctcaaccaaccaatcaataagaaatctgacactttcagatattagaacagtaatcattagaaactctacttacaaccatgacacagaaaacagtggtaagatttgta

SEQ ID NO: 408323 - DNA, 546 bp, Homo sapiens
attcttcccttgttacaagttaccacaaacttgataatataaaaccatacacaggtattagcttaaaatatggcagactgcttcatcaaagccagcaaaagagagagtttgctggcaaaatgaaacttacaatctcttgtaatctagtcatgaagtgtcatcccctcagggatgatgattagaagcaaattattcaaggggagaagattactcaagagttgtgaacatcaggaggcaggtttatttgggagtccttttcaaagctactgactktagatatttttgtgtctttatttaatggagatactcttggcttctggcttagaagtagtctacaaattatgacaattatccttttttatagtatttgtgttgcactcctcaaatgtgtaatttctgaggcttaatttatgtaccatagctgattttccaataaatgctcaaccaaccaatcaataagaaatctgacactttcagatattagaacagtaatcattagaaactctacttacaaccatgacacagaaaacagtggtaagatttgta

SEQ ID NO: 408324 - DNA, 657 bp, Homo sapiens
tgtactcgtcccatacccataaagcttcaaatgttcttgctaaaaatttgataataaaaacttatgggacagaaatcatagataagacttaatataccacttaccaaataacaaacagtggtatgaatatttaatttatgtaattgcctccaaaattctraaaggtatttattatatgcctatttcatagccaaggaagctgagacagagtttaagtaacttagatttagattcaataaatggcacaacagggataaactcagacagaatttgtagtggttgtgctcttattcacttctgtatattggttctcaaataggatataaatatcctaaactaatataatattagagtaaaacatcaaaacttagaatcagagtccaaagagactatattaataagaaaaaattagatagtgtagcatactttaaaatgtcaatcatctcgaagcaaacaagaacaatgcaagagtagcaacaacaaaatataatttaaaacaaaaatgtataatatagcttaaatatgactattttacactgatgagaaaagtgcaatttattaacatatagcagtcctctgcttttgtgtatgaaatgacatagtaaacaaacaaacaaaaatgttcactacaagtataatttgacagaactgtagtcc

SEQ ID NO: 408325 - DNA, 657 bp, Homo sapiens
tgtactcgtcccatacccataaagcttcaaatgttcttgctaaaaatttgataataaaaacttatgggacagaaatcatagataagacttaatataccacttaccaaataacaaacagtggtatgaatatttaatttatgtaattgcctccaaaattctgaaaggtatttattatatgcctatttcatagccaaggaagctgagacagagtttaagtaacttagatttagattcaataaatggcacaacagggataaactcagacagaatttgtagtggttgtgctcttattcacttctgtatattggttctcaaataggatataaatatcctaaactaatataatattagagtaaaacatcaaaacttagaatcaragtccaaagagactatattaataagaaaaaattagatagtgtagcatactttaaaatgtcaatcatctcgaagcaaacaagaacaatgcaagagtagcaacaacaaaatataatttaaaacaaaaatgtataatatagcttaaatatgactattttacactgatgagaaaagtgcaatttattaacatatagcagtcctctgcttttgtgtatgaaatgacatagtaaacaaacaaacaaaaatgttcactacaagtataatttgacagaactgtagtcc

SEQ ID NO: 408326 - DNA, 591 bp, Homo sapiens
aatacaagaatggctattccatcaacagagaagactcaagggctgctggttgcccatttttatggttatttcttgatgatatgccaaacaagggatgaattatccatgcctcccctttttagaccctttagrgtaactttctgacattgccatggcatttgtaaactgtcatggaactggtgggagtgtagcagtgaggatgaccagagatcactttcatcgccatctttgttttggtgggtttgggctggcttctttactgcaacctgttttatcagcaaggtctctatgacctgtatcttgtgccaacctcctatctcattctatgacttagaatgccttaaccatctgggaatgcagcccagtagttctcagcctcattttacctagctcctattcaagatggagttgcttttgtttacacacctctgacatttccccactctgcaacctaagggttgcagagaggattcatcttctgtaacttcttcaggctgaatagggataatgatattcctgcctaacagtgagggtctcttgtgttcagggtagagaagagctcagtataaagcattagtatggagacagcca

SEQ ID NO: 408327 - DNA, 494 bp, Homo sapiens
gtttctatgcaggtgaataggaacagctaggacttgcatagatttcttgagtatgaatagatagaaaggtcttggattatccgtaatctttaagaagtgagtaatttgccttcttgagataaattattccctaggtcatgaaatttatsttaacgaatatagcatttctttagaaacttcattcctttactgagttgaagagaagataattaagtttacttaatagtattagagtatatctcatttacttaatagtattagaatatatctcatttttggaacatagcaataattcatgtattagataagagtagaatcacaggaaaatttaagttcctaaggtccaggttaaggacttattaaataaatagatgaatattcaagtaaactccagataaataattgtccagatatatggatgtaatttgaatagaaaggaaaatttgtattaatgatatttttctagagagaggcaaataaggccaaacacagac

SEQ ID NO: 408328 - DNA, 494 bp, Homo sapiens
gtttctatgcaggtgaataggaacagctaggacttgcatagatttcttgagtatgaatagatagaaaggtcttggattatccgtaatctttaagaagtgagtaatttgccttcttgagataaattattccctaggtcatgaaatttatcttaacgaatatagcatttctttagaaacttcattcctttactgagttgaagagaarataattaagtttacttaatagtattagagtatatctcatttacttaatagtattagaatatatctcatttttggaacatagcaataattcatgtattagataagagtagaatcacaggaaaatttaagttcctaaggtccaggttaaggacttattaaataaatagatgaatattcaagtaaactccagataaataattgtccagatatatggatgtaatttgaatagaaaggaaaatttgtattaatgatatttttctagagagaggcaaataaggccaaacacagac

SEQ ID NO: 408329 - DNA, 494 bp, Homo sapiens
gtttctatgcaggtgaataggaacagctaggacttgcatagatttcttgagtatgaatagatagaaaggtcttggattatccgtaatctttaagaagtgagtaatttgccttcttgagataaattattccctaggtcatgaaatttatcttaacgaatatagcatttctttagaaacttcattcctttactgagttgaagagaagataattaagtttacttartagtattagagtatatctcatttacttaatagtattagaatatatctcatttttggaacatagcaataattcatgtattagataagagtagaatcacaggaaaatttaagttcctaaggtccaggttaaggacttattaaataaatagatgaatattcaagtaaactccagataaataattgtccagatatatggatgtaatttgaatagaaaggaaaatttgtattaatgatatttttctagagagaggcaaataaggccaaacacagac

SEQ ID NO: 408330 - DNA, 554 bp, Homo sapiens
ggggctgctggccatcagtcaactcattaacacacaaaagatatcattttggagatgctaaagatttcagaagtcatatgccgggaaataggtcatagactaaatatatattttacagtatcacactcagtgtttcttattgccactacagggtctaaggtcttttaaaacattgtggtgaattttaccaggaagcagaaatatcccttaatattttcttaattgttacttacatcatgccaagtctgtcttccaacagctacagcccagccttaagatgactgtatccctagctgacaccaacayctttgatgcagttttgtgagccacgctgagtcaggtgcacccagctaagcatgcctgaactcctgacccacagaaatttaaataataaaggttattgtttaaagctgctagctttggggtaatttgtagtagatgactactgcagactctattagttgtagctaaaaaaactgcaatttaaactagcttctacaaatagttacgagtttttttttttttttttttggtgcagagaattccaagtgttt

SEQ ID NO: 408331 - DNA, 554 bp, Homo sapiens
ggggctgctggccatcagtcaactcattaacacacaaaagatatcattttggagatgctaaagatttcagaagtcatatgccgggaaataggtcatagactaaatatatattttacagtatcacactcagtgtttcttattgccactacagggtctaaggtcttttaaaacattgtggtgaattttaccaggaagcagaaatatcccttaatattttcttaattgttacttacatcatgccaagtctgtcttccaacagctacagcccagccttaagatgactgtatccctagctgacaccaacacctttgatgcagttttgtgagccacgctgagtcaggtgcacccagctaagcatgcctgaactcctgacccacagaaatttaaataataaaggttattgtttaaagctgctagctttggggtaatttgtagtagatgactactgcagactctattagttgtasctaaaaaaactgcaatttaaactagcttctacaaatagttacgagtttttttttttttttttttggtgcagagaattccaagtgttt

SEQ ID NO: 408332 - DNA, 554 bp, Homo sapiens
tgtgccacctgcacgttgtgcacatgtgccctagaacttaaagtataataaaatatatatatattaaaaaaaagatcaggtaggttgaagaagtcagaagcagttactaggaggtagtgagaaaaggatamaccctttattatctctgcttagaggcaacattgtagagtagaaagatgactggctttccattcctgattttaccacttataaggtaagtgacaatctttctgcaactcaatttcaccatttaaaaaactgaatgtgatatacctattcatcagggttataaaaaaagaaaagcaaaaatgtaggtaaaggacctaacatagtcatagcaaataatatatactccaagagcaattattttcctgggaagaagttgaagtacaaattcaatttatgtgactctctattcttttataaaagacactgcagataaagtcaactttttctcattcacccatttttatatcttaggacacaaaagatactgaaaagtgctaggactttaaaggatacaaattaaagtaaggtaagtaccaggagtatag

SEQ ID NO: 408333 - DNA, 581 bp, Homo sapiens
aaaaattagctaggtatggtgacgcatgcctgtagtcccagctactcaggaggctaaggcagggggatcacttaagcctgggaggttgaggctgcaktgagctgtgattgtgccactgcgcttcagcctgggtgacagagtaagatcctgtctcaataaataaatacatagatagacagatagatagatagatagatagatagatagatagatagatagatagatacatagatagatacatagatagatacatagatagatacatagatacatagatagtttcttttgttagcatgcatataatttaaattacttcttcttgcctaaaactctgccaacttctcaccaccttcctaccttgaatcccaatgcatgggcagctccagttgtctacctgtgtctttgaacatgatgttgtctataggcctggaatcagttttcatgtttttttttcttctagaattctatttattcttcaaaccccattacaaaacatcccactgatagaaagcatttgtagattttgatttctctccattttgcatctataatgtcgtttgcttttactgaacatggtaatg

SEQ ID NO: 408334 - DNA, 584 bp, Homo sapiens
cacaagctctctctttttctgctgctgtctatgcatgacgtgacttgcctttcaccttccaccatgattatgaggcctccccaaccacatggaactgtaagtctattaaacattttttttttttttgtaaattgcccagtcttgtgtatgtctatcagcaatatgaatgaaactaatacatatataagtgagtaygtgcaatacttgtctttctctgcatggcttattaacttaagccattaacataatgacctccagtttcatccatgtttctggaaatgacaggatttccttgtttttatggatgaaaaatattccatagtgtatatgtaacacatttttgttatcctttcatccattgaacatatagtttgactctgtatatttgctattgtgaatagtgctgcaataaacatgagagtacagatatctatttcacacgatgattttattttctttggctatatagccagtagtaggattactagatcaaacggtagttctatttttaattttttcaggaatcttgcttattgtttttcttattgtctatactaatttgcattcccatcaacagtgtatga

SEQ ID NO: 408335 - DNA, 584 bp, Homo sapiens
cacaagctctctctttttctgctgctgtctatgcatgacgtgacttgcctttcaccttccaccatgattatgaggcctccccaaccacatggaactgtaagtctattaaacattttttttttttttgtaaattgcccagtcttgtgtatgtctatcagcaatatgaatgaaactaatacatatataagtgagtatgtgcaatacttgtctttctctgcatggcttattaacttaagccattaacataatgacctccagtttcatccaygtttctggaaatgacaggatttccttgtttttatggatgaaaaatattccatagtgtatatgtaacacatttttgttatcctttcatccattgaacatatagtttgactctgtatatttgctattgtgaatagtgctgcaataaacatgagagtacagatatctatttcacacgatgattttattttctttggctatatagccagtagtaggattactagatcaaacggtagttctatttttaattttttcaggaatcttgcttattgtttttcttattgtctatactaatttgcattcccatcaacagtgtatga

SEQ ID NO: 408336 - DNA, 644 bp, Homo sapiens
ccgggtgctgtgagctgtcatctggtttctttagagctttaaaggtattttttgtgtgtgagtagttgttcaagctgatatttctgtggrggtatgattgctggagagtcctagtccatcatctttctctgccttgtccttcaatcccatgttgagtatttaattgtagattgtttctacaatcaaaatgatatatcacactttgattataatccatagattatagaatgtattcaggaacattcaccaatggaagtaaatataattcaaattatttgaaatttcacaggtaaatctgttcatgatagtgacttcagtcttcaaaaaagaagcctccaatttaattttatttcaaattttactatttccataatgatggataaatatgtcttgtgatgaactgaactcaaaaggctgaggtaagatcacttaagctcagaagttagagaccagccatggcaatatagtgagaaattgcgctatacatgtatatatatatataactttatattatgtatatatatttattgctatgcacctaatcacactttcagtatttaaaacccacaagaatcagcttatgtattagttacaatgataaaaagccctaaatattcacaagaagttaaaacaagtttgcataa

SEQ ID NO: 408337 - DNA, 644 bp, Homo sapiens
ccgggtgctgtgagctgtcatctggtttctttagagctttaaaggtattttttgtgtgtgagtagttgttcaagctgatatttctgtgggggtatgattgctggagagtcctagtccatcatctttctctgccttgtccttcaatcccatgttgagtatttaattgtagattgtttctacaatcaaaatgatatatcacactttgattataatccatagattatagaatgtattcaggaacattcaccaatggaagtaaatataattcaaattatttgaaatttcacaggtaaatctgttcatgatagtgacttcagtcttcaaaaaagaagcctccaatttaattttatttcaaattttactatttccataatgatggataaatatgtcttgtgatgaactgaactcaaaaggctgaggtaagatcacttaagctcagaagttagagaccagccatggcaatatagtgagaamttgcgctatacatgtatatatatatataactttatattatgtatatatatttattgctatgcacctaatcacactttcagtatttaaaacccacaagaatcagcttatgtattagttacaatgataaaaagccctaaatattcacaagaagttaaaacaagtttgcataa

SEQ ID NO: 408338 - DNA, 533 bp, Homo sapiens
agcagcaaagcattcaaaatgtgtccttgctgtttctaaaaacctatgctcaattgcataaacaaaaaaattatctgaatctagaatttacatttaaaagggaagcagagcataaaattttggaaaatttgtagtcyaaccatgtagtaagaaagaaaaacccattttctggaaaggtattcaaggctgaagaaatttgcctaggtaaagaggagccaaatgttaaaagccaagaaaagagagaaaatgcctctagggcatttcagagacctttattgcagctcctctcaacccatcacaggcctgtctctttctattgtttcttctttcatcccgatgctccaagataaatttttttattatcacccttgatgtttgaataaattactttagctaatctttaaatgtagatatatttgtgacttttttttttttagcttttcttcatctgagaatgtctttgtttttcttaaaatccagaagaataagtctggcatttatagaatttgtagatagtagttcttttttaagta

SEQ ID NO: 408339 - DNA, 524 bp, Homo sapiens
atttaaaagggaagcagagcataaaattttggaaaatttgtagtctaaccatgtagtaagaaagaaaaacccattttctggaaaggtattcaaggctgaagaaatttgcctaggtaaagaggagccaaatgttaaaagccaagaaaagagagaaaatgcctctagggcatttcagagacctttattgcagctcctctcaacccatcacaggcctgtctctttctattgtttcttctttcatcccgatgctccaagataaatttttttattatcacccttgatgtttgaataaattactttagctaatctttaaatgtagatatatttgtgacttttttttttttagcttttcttcatctgagaatgtctttgtttttcttaaaatccagaagaataagtctggcatttatagaatttgtagatagtagttcttttttaagtacaagaaaagtgcttcctttatgctttcatggttgcagatgagaaatctaccatcaytcctattggtatttccctaaaggtat

SEQ ID NO: 408340 - DNA, 538 bp, Homo sapiens
agggttcacaagaaaaccaagatgcacaaattgcaccataatgtatattttgtcctcctttgccaggcaaccattggccagggcctgtggacactggggcagtggtgaaggttcgtggcatttgtctgagaacagttcttgagagaagagacatttaggagttatcaaccyacattcaggggacctggggtaagttcatgagtctggccagtaatggggatcagaacagtgttttgctaaacacttaaacttcaggatcttgtaaagtagtggtcagatagttggaattaattaaattggacagcttaaagttcctcactcacactctttacagttcttattagtttcttgccaccattgagaacagttcagtacaccagccggagaggggctattttaattaaaataggcttgatactgtgttattttatcattgttccacatgccaagaatcctttattttttgatcagcattttaatgcttgctttcatggtcaatttcactgacagtgatacaatatgataataaataaccaag

SEQ ID NO: 408341 - DNA, 579 bp, Homo sapiens
agacagccatcaggtgatgctcaggtggttgttaactgtctctctgaaataataactgtttgcagccagagccagggaaaggcggtctctcaataaacagcaacatgtaactgaaactggtggtcagcagcttcccaataagatctcaggagctgggaaagtgggcgcatgcatgtgcactaagaggcaaaaatggcagagttcaaatggtatatgaccttctaggggcattctattggtcaaagaaaaacgcctcargtaagcatgtgtacagactcagaaaacgctgtgcatgcagcccttcccaagtgctggcaggccactgcacattcagagaactgatcccaagggaagaatcagggcaaagggactcaaccccccggaagcatgctgacgtatacaaccccaagtcaaagtcaaaaagtgcacttgatctctcaagtcgctggcttggctttcttccaaatgtacttacttcatttcattcctgctctatctaaaactttttaataaactttcactcctcctctaaaacttgccttggtctctctctctctctctctctctctgccttattct

SEQ ID NO: 408342 - DNA, 579 bp, Homo sapiens
agacagccatcaggtgatgctcaggtggttgttaactgtctctctgaaataataactgtttgcagccagagccagggaaaggcggtctctcaataaacagcaacatgtaactgaaactggtggtcagcagcttcccaataagatctcaggagctgggaaagtgggcgcatgcatgtgcactaagaggcaaaaatggcagagttcaaatggtatatgaccttctaggggcattctattggtcaaagaaaaacgcctcaagtaagcatgtgtacagactcagaaaaygctgtgcatgcagcccttcccaagtgctggcaggccactgcacattcagagaactgatcccaagggaagaatcagggcaaagggactcaaccccccggaagcatgctgacgtatacaaccccaagtcaaagtcaaaaagtgcacttgatctctcaagtcgctggcttggctttcttccaaatgtacttacttcatttcattcctgctctatctaaaactttttaataaactttcactcctcctctaaaacttgccttggtctctctctctctctctctctctctgccttattct

SEQ ID NO: 408343 - DNA, 579 bp, Homo sapiens
agacagccatcaggtgatgctcaggtggttgttaactgtctctctgaaataataactgtttgcagccagagccagggaaaggcggtctctcaataaacagcaacatgtaactgaaactggtggtcagcagcttcccaataagatctcaggagctgggaaagtgggcgcatgcatgtgcactaagaggcaaaaatggcagagttcaaatggtatatgaccttctaggggcattctattggtcaaagaaaaacgcctcaagtaagcatgtgtacagactcagaaaacgctgtgcatgcagcccttcccaagtgctggcaggccactgcacattcagagaactgatcccaagggaagaatcagggcaaagggactcaaccccccggaagcatgctgacgtatacaaccccaagtcaaagtcaaamagtgcacttgatctctcaagtcgctggcttggctttcttccaaatgtacttacttcatttcattcctgctctatctaaaactttttaataaactttcactcctcctctaaaacttgccttggtctctctctctctctctctctctctgccttattct

SEQ ID NO: 408344 - DNA, 595 bp, Homo sapiens
gataatttttcagttgaaaaatggaactaagcagcttcctaagtggaatcagagagcgacagagaggtcaaggcaagcacaagtgctcttgaaacaaggagtgaccctttgagggtggcttgggcacttgttgagactccagacacactgcaagcagaaaacaacattagcccagacaggatgtatgagtcaaggatatctaaagaagatgcaaaacgtrgcatccaggcatttgcaactttccaattgccgggctccacttgcggtccgcgctgctggttggagcatactgtaaaggaaatataaacagtttaaattaagtaccagagctaaatctctcacatgactttctgaaaagatgaggaatgaaattatcagcacaattagaagtcttgagtctgctgggtcaggggacaggagaggaattcttggcacaaaagaacaggaagcacagcaactcggccatatatggaggaggggtgagcctttcaagcaaaattactatgacctcaaagcttctgctactcagacagctgtattgaattctgttcaatgccaaagtagtaccttaagccagtttatctggtttggcttt

SEQ ID NO: 408345 - DNA, 578 bp, Homo sapiens
gcaataaaaaccaggagcctcctgacctgggtcatttctaaaaggagttgttttctttcagcttttccaattttaagagcagttacacttacaggtgtgtgtgtgaaagagtgtggtaaagggaacatttgctaacacggaaaatgtgaaagaagtctaggaatcttccaaatgtattgtagatttggactttaagcaatcwcaatatgaacagtgaatacaatgaaataaagcaaacataatttgcaatcagatgcaatagacaaacatgtttagaccaacctcgctgattttattctttagtgacttgttgcatccaaatggacttcttggattggaaactccattcacatggaaagagagtaaacagcgcatgcaaagtcccattttgcaagcagaagtctttcaatgttttggcaagtaactttgctatttggatgcattctactccagctagtccttctgggaaacctaaggcatcattcttacctactgttgaaaagaaggaaaggcaccatttctgagatggtccaaaatcgactttgcaaagagttattcaacagtagtagtttttggaa

SEQ ID NO: 408346 - DNA, 612 bp, Homo sapiens
tgctcagctctgtggaggattcaaaaataaatccagtctctgcctcgtggaaagatttagagcattgaaatcagagaaacacaaagtaatgtactataatttctctgggcttcagttttctcatctgtgtaacaaaacaacattaatactmatttaatgttttataaaacacttaagctacataatatatgtgatgtttcttgaacgtaatgaaggtttaataaacacaactgctcaccttgcatctctatggccatgtctacttgtcactataggagctagtaggggagagaggacaatggctcagataattgaagcacaaggtagagagtggcaaatgccatatgaaaagtagataaattaggagtttagaaaatgaagatatgtttttttggaattgtttcaagatgatggactgagcatattacacagactctggctcccccaatagacctttagaaaatatggaaaatatattgtttgtggaaagttaagttaaaaatgagtttaaaataatttggattgttgtaaaggatagatttttttttctgtatcttttgtaagtttgagtttctgcctatcctgtgggaaggagtcttcatattgatggtc

SEQ ID NO: 408347 - DNA, 612 bp, Homo sapiens
tgctcagctctgtggaggattcaaaaataaatccagtctctgcctcgtggaaagatttagagcattgaaatcagagaaacacaaagtaatgtactataatttctctgggcttcagttttctcatctgtgtaacaaaacaacattaatactaatttaatgttttataaaacacttaagctacataatatatgtgatgtttcttgaacgtaatgaaggtttaataaacacaactgctcaccttgcatctctatggccatgtctacttgtcactataggagctagtaggggagagaggacaatggctcagataattgaagcacaaggtagagagtggcaaatgccatatgaaaagtagataaattaggagtttagaaaatgaagatatgtttttttggaattgtttcaagatgatggactgagcatattacacagactctggctcccccaatagacctttagaaaatatggaaaatatattgtttgtggaaagttaagttaaaaatragtttaaaataatttggattgttgtaaaggatagatttttttttctgtatcttttgtaagtttgagtttctgcctatcctgtgggaaggagtcttcatattgatggtc

SEQ ID NO: 408348 - DNA, 569 bp, Homo sapiens
atcaccagtggggttacatagcttgatttctatttgacattcttttatgagaagtgatggtagaggccacagataattcatgaacagaacagttaatttactcaaacatttcttagggtacaaaattaaacagcgtcattctcaaaataaaacacattattccaagcagcaattttgttaaaaaaaagaagaaaagagaaaaaacaaagactaagtactaaatctttagcataaacttaatttgtcacagcaaccttttaggatctatgcctcaaatacatcaaagttaataaaggcatattataaaacaaaattgcaaaraaatcatgactcgttatattcatgattgaacatttacatgattactatataaatcatttttttaatatatctgccattatagctgttacattaaaatatctatataagtagaattttactacatcacatgcctaggtaataattcacacaaaatgaatgtcaaatgcaaacactgtcaataagaaatacccagatgatgaatgtaacatatttaattacagatatcccaattactctgaattaatcat

SEQ ID NO: 408349 - DNA, 622 bp, Homo sapiens
gagcccaggaagtctcacagagctgaagtccagtatgtctggagggcaacccaagatgaggtgctggaatagaaaaacttgtaaaactgtcttaaagatatcagaaaaccactgaagagtttaacacgaaatgatccrtttgtgttttacaaggtcactctcattgcagcgtagaccaaacagtggaatgaatgatgaaacatgtcgataattcatttttgtcaggaagaaattttaagtacctaactccaattagttttaatatatttatttatttataatctatatagctgcattttgttggccaatatctcaagacactgcatgcatttacgctaaggttcattgttaataataataacataatttcaaaatttttgatgatttcttgtcaaatgtgattagaccattgttgtgattatctggtaacacagcaaagaaaaagccagatttagaatttttggttctaatattttcctactgttcacttatagtatagtaatgatgtcaattcaaacttttattgtagggatattttaaaatctaattttcaattttttgaagactaaaatttagtgacataaattgcaagtccatttaaccaggcataggtcaattgtgg

SEQ ID NO: 408350 - DNA, 618 bp, Homo sapiens
ccatagggtagttttgaaatttacgtaatttaagccttacagggtgaaaatcatggagatgtgttgcttaaatwccacttccagaaagagctccatgccagctgcaaggaatgtggttagctgccagcctctagttgtgagcttctgcatcgcctgtctcggcttttcagtctaggccacactatatttggcaatccctagacaatgactaagtcaggtggcagtagcttaaggacatagttttcttggactatccttcagtcaattactgaagaagcttgtggtacaagggccaagtgatttctactcaaagctgggttgcactaattgccagtctttgctctagagcgccccacggggttggtcaaagcttagtcagatttgtatcatccgctgaggactccctttgctcaatcctgcttcctctcttttccttttccagctgttactctcaacaaattatttgttgctacacaaaatttatcttcatgtttttctatttttgtttaatatcatattagtgatgtttatattcctggtggtagacatttgggttgtttcaatttgggactatcatgaataaagatgctatgaacatgtgtataagaatattgtggg

SEQ ID NO: 408351 - DNA, 577 bp, Homo sapiens
tggttagctgccagcctctagttgtgagcttctgcatcgcctgtctcggcttttcagtctaggccacactatatttggcaatccctagacaatgactaagtcaggtggcagtagcttaaggacatagttttcttggactatccttcagtcaattactgaagaagcttgtggtacaagggccaagtgatttctactcaaagctgggttgcactaattgccagtctttgctctagagcgccccacggggttggtcaaagcttagtcagatttgtatcatccgctgaggactccctttgctcaatcctgcttcctctcttttccttttccagctgttactctcaacaaattatttgttgctacacaaaatttatcttcatgtttttctatttttgtttaatatcatattagtgatgtttatattcctggtggtagacatttgggttgtttcaatttgggactatcatgaataaagatgctatgaacatgtgtataagaatattgtgggcatgggttttcarttctttgggtgagaattgttgggtcaaatagatctacaataagcaatgtatgagagttc

SEQ ID NO: 408352 - DNA, 459 bp, Homo sapiens
tttgtgggccatacagtctttgtcataagtacttccctgttacagcagaaacgcaaccatagacagtttataaacaaatgarcatgattgtgttacaatgaaactttgtttacagaacacgcagtgaactggatttggcccacaggccatagttttctaacccttttattagttgtcagagatggacaaaaagaatcagtggtctggcacaattgactagatcaatgaaaatgaaatttaacagatttaacatttttgcatttcaagccaataattcaacttcataagtattagaaaaagatggatggcttaatagtacagtttaacataattggaagctcaatattcctctatttaatgtgtctcccaaggaagacagtgctccatctgtagcaccagagaagcaccaaataaaacattgcctgggtcaaactatactgggagtgttggatcaaattc

SEQ ID NO: 408353 - DNA, 459 bp, Homo sapiens
tttgtgggccatacagtctttgtcataagtacttccctgttacagcagaaacgcaaccatagacagtttataaacaaatgagcatgattgtgttacaatgaaactttgtttacagaacacgcagtgaactggatttggcccacaggccatagttttctaacccttttattagttgtcagagatggacaaaaagaatcagtggtctggcacaattgactaratcaatgaaaatgaaatttaacagatttaacatttttgcatttcaagccaataattcaacttcataagtattagaaaaagatggatggcttaatagtacagtttaacataattggaagctcaatattcctctatttaatgtgtctcccaaggaagacagtgctccatctgtagcaccagagaagcaccaaataaaacattgcctgggtcaaactatactgggagtgttggatcaaattc

SEQ ID NO: 408354 - DNA, 571 bp, Homo sapiens
atggatggcttaatagtacagtttaacataattggaagctcaatattcctctatttaatgtgtctcccaaggaagacagtgctccatctgtagcaccagagaagcaccaaataaaacattgcctgggtcaaactatactgggagtgttggatcaaattctagatcatccatttgaaaagtgctttgcaaacaggagagcatacacaagagaatggttgttttcctgagacagtaaggcrtgttataagataaattgttttaaagaaagggacaatttaatctggagaatggaagacttcagtgtaccatacctctgtcttcagacatgctaatccagatggattagattcctcctcagtttttcctgaagtcaaactgggaatcattaaatgttgaaaaagtagggcaaaatttagattcaacaaaagaaagaaatttttaaacaaatgtagctgtcccccaatgaaatagatagatgtattttccctatggaggtgtatttgtctgttcgtgcactgctttaaagacatacacaacactgggtaatttatcaagaaaagaggtttaattg

SEQ ID NO: 408355 - DNA, 637 bp, Homo sapiens
ctgaatgtcaataaattcctttgctaattcgaattagaattttacctctattacttgtcttgcacttgttaactttttagcacaatgtctactcaggtttaaaataaaatgtttgtgatggagcataataaagtattggacattaatattggtatttataatggttaacagtaactgtgattgattaaggacaacagcatgcccttggtttctgtctttggttttagtatttacaatgcaatatgactttttaaaaagcaagctatgcagaaaatgtgtaaatttttgatgtgtaatgtgtaaatgatgagaaactgctatctcaccatcaagttgcaatcgagctaagctacaaatagcaacattgattataataagactttgaactgaccttgttctgcagatagattttgcatcagtgttctttgcagtgtttactggtatatctgaaacatttattcttgtaatttgacaatttgtgcacgttgaattaataattaaatygacatgattaattcaacatgcacaaatcttcaaattagaagaaatgttgaaattaatgttgaaattattattgtgtgatatctgtacaagttagctacctgtggttagtattcttacaatttctctctccctc

SEQ ID NO: 408356 - DNA, 530 bp, Homo sapiens
cttctatctccaacttcttagattctttgcttaagaacccaatcaactagagaaaaagcatggcaaattgcataggatgatctttgcttaagaacccagcaaactagagaaaaagcatgggagattatataggatgtttcatgtctgggcatggaaatgcaggagtatgtcacttttcctcatgttacatggaccaaaacttaatcacattgatctatttagatacagggaagactataaaatatagactactgtgacttaaggagtagaagagaaatggatatttgtaaatattgacaaaaattgtttatgctgattttgtaaattatggttcaatcaatatttaaagtgtaaatgttgtctttggaaagtgtaagagtatcaaaccatttgtaactcaaaggtcaagaagaaattatttttagatcttatrtatatagtctcattacctattaacatattgtgtatgtgtatagtaatttcaagtccaaattttaaaacctgtttaataaagtctcttgactataaca

SEQ ID NO: 408357 - DNA, 543 bp, Homo sapiens
atcttatctacagaaatgaccccctcatccatgggtctgctccaaatgtcctctttccaagttctagatatacagtttaaggagagtgctactccttgtctcccggatgcctccactgcaaccacaaactgaacatgaccaaagaaaactgcactttgtctctcagaggggactcctccttctaatctacttcttttaaagatgcctctatttgctcattcacccagtcaaaacgctatcatttttgacttgtccattgttgaccatgttcacgtaattgaaaagtctgtagagtgtatgtccacaatgcttttcaatcccacttaaactacaatgcttastgcaaatcctcatcaattgcccttttgcctgcaggcctttctgctctaatccactgaaagcacaagtgcccagttatttttatttttttgaagttactaggtctctctttaatgcactcaattacatctttgagtacatataattgaatatttaagtcctctaccaggtggactttttctccccttccagctttatatcctg

SEQ ID NO: 408358 - DNA, 641 bp, Homo sapiens
atttcccttttagatattcatttatttaaccataactcgcttgttcatttagtcaacaaacatgaatatccactctgtgccaagtactattgtagcgactaaagaatgagatacagcaataaacaaaattatgttcctgctatgctaatgcttatgttctagcgagtatatggaaaataatcaagcaaagaaaaatacatatctaaaacatggggttgataataactgccacacaaaaaagaaaacagaggaagagaagtaaaaataccaagggaaagcaaggtattgcagtttcattaagggtgttcagtgaaggccttaaatgagatagcatttgtgcagacatctaaggaggtgaaggagtaaggcatgtgtatatctggaaaggagtatttcaaactgtgagaacagaaaagacttaagggaggcacatgcttagcgtgtgcaaggaacagaaaaaaaaaamaactgaagggtagggataaatggggtacagcaatcaaggggagagtacaggacaataaaaccagagaagtaccagcagaaggaccctagaggtcatggtacagactgggattttactttgaatgagacagaatgtcttgaaaaatattgtagaatacctctgcctttagggtgcc

SEQ ID NO: 408359 - DNA, 536 bp, Homo sapiens
acaaatcttctccttccacttgacacagtgcagttatgtgtttctcatggttttgttcatgtttcttatatgaatgacctggttggcatrgctgctttcaataaaatagagtagtctacatgagacacccaacgtcagactggcttgctactttaattcccattgcagccatcaaaatgaaaacatgtctgtcggccagaggaaatcaacaaacatacaataggaaagcaaaatattttctctactattttctcttcacttggaaatagaaaaggaggttataacttgctaatctctgtggctctgttgtaacaactgaatcactctctggggagacacagactcctgttggagaaacactgtgataatcaatggtttaaatgtccttagctgactgaaatgaagaacaatcagccattccaactttgctgtttcctgaaggttccttgcttctcaatccttaatgcttttgcagttgaagttatccctaatggttcatccttccctttcacctctctacttccttctttttgatc

SEQ ID NO: 408360 - DNA, 538 bp, Homo sapiens
aaggcactcttctttacgtgcaaatgcctatcaagagttccatgaatatctcctttgtacactcatcctgctccatctctaacttagttgtcagtgtctttcagaagactgttactgttgtgagaaagagatctcagtcattctgacttaatctatatatctaacaggctctcaataaacatttggccactgtaccagggctagcgcaaaaatgtcatggcaagctagaactttcaaatctatctgtcttcattgacagacttttaagacttttcagaataagaaaagcattgactgaatgctaagaatattcctactstaaagcattgtgttatgtctagctcatgctagaatttaaggcctccctttctctatctattagacctaattaattaccaaatctgattctttctctgactctaaatacctgtctcatttccttcccactaccggacctcacagtacttcccttaattcaggccactattttcatccagatcagttaccactatcttctcacatgtcttccggcctcagt

SEQ ID NO: 408361 - DNA, 538 bp, Homo sapiens
aaggcactcttctttacgtgcaaatgcctatcaagagttccatgaatatctcctttgtacactcatcctgctccatctctaacttagttgtcagtgtctttcagaagactgttactgttgtgagaaagagatctcagtcattctgacttaatctatatatctaacaggctctcaataaacatttggccactgtaccagggctagcgcaaaaatgtcatggcaagctagaactttcaaatctatctgtcttcattgacagacttttaagacttttcagaataagaaaagcattgactgaatgctaagaatattcctactctaaagcattgtgttatgtctagctcatgctagaatttaaggcctccctttctctatctattagacctaattaattaccaaatctgattctttctctgactctaaatacctgtctcatttccttcccactaccrgacctcacagtacttcccttaattcaggccactattttcatccagatcagttaccactatcttctcacatgtcttccggcctcagt

SEQ ID NO: 408362 - DNA, 597 bp, Homo sapiens
attataaactcattataaataggaactctatataatgtctaaccatgttatctgtagcatctaatgcaaagcaaagacacatagtgggcaatcattaaatacttttttaattgaatgaagtagaacaccaggattcatttgtacagagagcaagataggtatacatgctggcatatgacagaatgataaatagacaagcgttaagaatctggagtttttgtgagacaggaagcatagtaagatttctctgtgtgtttccctccaggagtgattcagagcaggaggataggaaaggaggatcctatctattctaaaagactgcccccagttcaggattacttcactcagtctatgggctagtaaatagattgcatttaaagtaggamtttgtaatgtttcgacaaatacagagaaatccaaatgaagaaaagacagaatggtttctactggtattggaaaggcttattttcactactacatttgtccaaaccctacagattagtgattaactgagaaattagttttgtccttcttgtgttctagaataaggtgaataaacaatcacaaataaagttttgtctcaagattttaattgtt

SEQ ID NO: 408363 - DNA, 554 bp, Homo sapiens
aaaacatatacattatatatatgtgtgtgtgtatatacacatatattttttaaaagtttgacttacagttctgcatggctggggaggcctcaggaaacttacagtcatggaggaaggcrgaggaggagcaagcaccttctgacatggctgtgagggaagggagaaagagtgcaatgtaaaagtgttccctgttcactacatccacaccaaaatctattattttttgatttttagattatggccattcttgcaggagtagggtggtatcacattgtggttttgatttgcatttccctgatcattagtgatgttgagcattttgtatatgtttcttggccatttgtttaacttcttttgagaattgtctattcatgtccttagcccacttttttatgggattgtttgtttttttcttgaagttcgttgtagattcaggatattagtcctttgtcagatgtatagattgtgaagattttgtcccactttctaggttgtctgtttactctactgactgttgcttttgctgtgcaaatctctatagtttgattacatcc

SEQ ID NO: 408364 - DNA, 577 bp, Homo sapiens
gctgctgcttggtatggatgttctattcattactgacagaagggtattgaaatatcctattattagtagcttgctatctatctctcccttcagttctgtcaatatttgttttgtataactaagtgctgttacactagatgtgcatatatttacaatttttatatcttcctggtgaactgacacttttatcatgatataatggcmttctttgcctcttttgacaagttttaacctaaaatctctttttttctgatataactgccctgctttcttttggttaccatttgcatgggtcatctttctcagtttttttttttttttaaatttcagcctatctaaagtgagtctcttgtatattgtatactacatatattggatcttcttggtttttgttttgttttgttttgtttttaaatctatttggccactgtagtcttttgattgagaggcttttatccatttaaatttagagtaatactgatagtctattagtctgttctcacactactagaaagaactaccagagactgggtaagaaaagaggtttagctgactcacagttccagaggcttaacag

SEQ ID NO: 408365 - DNA, 542 bp, Homo sapiens
tagtgggatgaaaaatggaaaaggcagagggcttatttcaaggaagcttctgtttgttagaagaggtgaaactaaaaataaatgtagctcacatgtctcttgaggccatcctatcttttggaaatgaaattaaatggattcgatggccttatatattatcccatgaaaaatatcttgccttgcatatttttgaaaattcctggaagttatatgtcaacattgtcagttttggcttargcgttgggtgtttctattcccactgaacacttgatttaacttaaatataattttctgtgtctattatctttcatctgtactaggcctagacatagaactcaacccgcttcttctgagagaggcagcagggcatagaggttgtttgatgacagtctttgtgcttaggattgaattctcactctgacagtacctgtataagctgggcaagcagtctatcctcagtttactcccttgtaaaatgggctaaaaatttttcttattcatacagtgttttgtgaaagcaaatgtgatcatttagacaaata

SEQ ID NO: 408366 - DNA, 542 bp, Homo sapiens
tagtgggatgaaaaatggaaaaggcagagggcttatttcaaggaagcttctgtttgttagaagaggtgaaactaaaaataaatgtagctcacatgtctcttgaggccatcctatcttttggaaatgaaattaaatggattcgatggccttatatattatcccatgaaaaatatcttgccttgcatatttttgaaaattcctggaagttatatgtcaacattgtcagttttggcttaggcgttgggtgtttctattcccactgaacacttgatttaacttaaatataattttctgtgtctattatctttcatctgtactaggcctagacatagaactcaacccgcttcttctgagagaggcagcagggcatagaggttgtttgatgacagtctttgtgcttargattgaattctcactctgacagtacctgtataagctgggcaagcagtctatcctcagtttactcccttgtaaaatgggctaaaaatttttcttattcatacagtgttttgtgaaagcaaatgtgatcatttagacaaata

SEQ ID NO: 408367 - DNA, 541 bp, Homo sapiens
acccacattaaagcaagctgcacaagcatcagctccccaagcagcaattcctataggatgtcttgaagagggccaggcagtgcttgtacattgactgaattgtgttacaaaagaagatggatgagcttggaaaaccggagttgttcatactagatattaagaatgcctacttgcttttctagatggaaacagtcttccaagactttaagaaaacttgccttttgttctggaggaagacagcgtctctatcttccaaagctgtttgcttcacaaacatccttgagaatgtagtccggaaataaaaggagtcaatacttctgttcttaagatgtgaagaaacatgagaggcccatggagaatcatcatccaataatattagccgaaattgcaaattgtaacacaatacaaaggtgtgaaaatattcagagggtgttttctggccatagaagaaakaatctagaaatcagtaacaaaagtacacctagataatccttaaaatgtttggaaactaaaatgtacttttctaaattagatgtacgtt

SEQ ID NO: 408368 - DNA, 537 bp, Homo sapiens
ggagtaacttttgattttttcattcccctctttcttgacaaatccagttagttgttaagctccatcaattgtaatttatacatgaacaccttttaccaagtcattaggtttcgatttcacaccacacagcactctcagatcagtcttttcaactacagttataataatgtaatttttcagctaatgaacatttagtgtatcccaacatctgatgtatacagygcttatgcaaaggagatgagggtctgaacttatcttttagtgtatacctttcactgctccccatgtagactggaaactctactcaaaactcttatttttttccaactttttcatctcagcactttttgcttggctatttttttctcctggaatgagcttccttctaatctgggatctactttattttttaatgtctagaaaatgtcacccttcgtaaagtgtcttactgtcatctttaaaactttttttctgaagttccataaactttatttttaccatgatattttatcttctattataaatatttgtgattaa

SEQ ID NO: 408369 - DNA, 572 bp, Homo sapiens
acatgaacaccttttaccaagtcattaggtttcgatttcacaccacacagcactctcagatcagtcttttcaactacagttataataatgtaatttttcagctaatgaacatttagtgtatcccaacatctgatgtatacagtgcttatgcaaaggagatgagggtctgaacttatcttttagtgtatasctttcactgctccccatgtagactggaaactctactcaaaactcttatttttttccaactttttcatctcagcactttttgcttggctatttttttctcctggaatgagcttccttctaatctgggatctactttattttttaatgtctagaaaatgtcacccttcgtaaagtgtcttactgtcatctttaaaactttttttctgaagttccataaactttatttttaccatgatattttatcttctattataaatatttgtgattaagttttatcttccttataagctcttagttgttaaggtttctgtatattttaatctgccctcttttcataacgcttatcataacaccttaaacattacagatacaagatatgactt

SEQ ID NO: 408370 - DNA, 537 bp, Homo sapiens
ggagtaacttttgattttttcattcccctctttcttgacaaatccagttagttgttaagctccatcaattgtaatttatacatgaacaccttttaccaagtcattaggtttcgatttcacaccacacagcactctcagatcagtcttttcaactacagttataataatgtaatttttcagctaatgaacatttagtgtatcccaacatctgatgtatacagtgcttatgcaaaggagatgagggtctgaacttatcttttagtgtatacctttcactgctccccatgtagactggaaactctactcaaaactcttatttttttccaactttttcatctcagcactttttgcttggctatttttttctcctggaatgagcttccttctaatctgggatctactttattttttaatgtctagaaaatgtcacccttcrtaaagtgtcttactgtcatctttaaaactttttttctgaagttccataaactttatttttaccatgatattttatcttctattataaatatttgtgattaa

SEQ ID NO: 408371 - DNA, 610 bp, Homo sapiens
tagtctcattctttggaaagaattgtatttcccaaacttcaccaagttcactgaaaggttaaagggtaaatatatggctgatgagagtgctgtcctgcttattagaagaaatgagctggatgaaatggatgactatctcccmcttttctaaaactaagaggaaaccacatatcattgaaacccattgaggcaaaaaacagactaaatgtaagtcatgactatccaaataatccagaatagagttatgccatcaggattgcctttcatagtctgttctagtttatttaaaaggagagacagggattatggtcatcagaacattctacagaaatgttcgagagtcaaagtccctaatcatgtgttcagccacagctcacccatggattaacattgtgatcagcacaataaaggtctaggcctcacataggtacggtaaattcttcttataaagatgtcttagaaacctggaaatccctcagccctgtggaaaggtagtgccaggacacaagtcattgctaatgagccccagaagaaaaagtaacacagtaatgtgaatgtaaaccttattcagtagcagtttttccagcagctcccatttgctgaacattat

SEQ ID NO: 408372 - DNA, 508 bp, Homo sapiens
tcagggttcttgaatgaaaatctatatgtaactgactttagctagtttaataagaaacgatcctattaaatgaaatgatattagacagtttgtagaccctccaggagggccagatgattagatgtggagtgcatgcagccagaaacaaagtccaaatgaccagcagaaatcttttcctggctacaccactgcctccaccacagggtccagccacgcaaaattgcctctctcacctcggtcactgagcactggatcctcttgatagaacccctgcaacttctggacacacagtgtaactgctgtcccyctcatgataaatcccatatgtcacctccttatttgcaagactggcttctaaattaaagtctccagctggttggcatgataaccctccagtagtgaagcaaggtattgagggagtggatttgtgactttaattctatgaaataatgagcttacaaagtaagaaatactctaggaatagaaagagtgtttataggtagcaggt

SEQ ID NO: 408373 - DNA, 501 bp, Homo sapiens
ttattcaaaatcattctttcattcaattagtattgactgcaccttttctaaataccaggaactatgctagacatgtggaatataatgataaacagaaattgtagtaccatttcttatggagcttacagaccagttgggaatgcacagtaaccaaactaggacacagattggattatatgctgtggttaagtgccaagaggagagatatacaaggctacaagagtgcaaacaagggagacctgaccatgtctggagggtcagtaaagtctttgcggtggagataatgatgagtacaagtgagtaaaaatgtggaagggtgtcaagaaaagaatgtgtagtccaagtcaaagacctgaggcagaaagaaccctagttaaatctsggagctgatagaaaagccacagggcagtatgcaaggtgaaaaacaattcaaggtaaagctagtgagaaaaagggaagccacatcagacaggctctataaccatgaaattgaaaaaatat

SEQ ID NO: 408374 - DNA, 624 bp, Homo sapiens
ctctttgtcacaagtctggaaaatacagaaaaaaattacctttctttctatttgcagactcttaaaaagctatgttggcaatggtgaatatttattttaaatgctgtcagtttgaaatttgttgtcaccttaataaaaacttaaaacaaatgacataagtaaacagaatttaaccaaaaaaataaatgagtcaatgaacatgaatagaaatttcttattttatctggcaagcgagtgaagatatatatcagttttatatccttcttgaaagttatctaagtgttcatcacacacaaaacaatgtttcctcccaaaagaaaaactacatttaaggaatttagcttaaataggtaaaactaataaactattgaaacttctaaattagatttayattttttatgtctcttttaaggcagtgaaggtaaaaatgattttatttcactttacacagtattaaatttcctctaaaaacttccacatagtttataccaatataaataaaaagtgtttcttccaggaacttaaaggaattacatttgaacacaattaagaaaataaatgtaaaccttaataaccttactcatgtcaaattgtgctccaatacacctaagtgtcaaatagtag

SEQ ID NO: 408375 - DNA, 495 bp, Homo sapiens
aagtaaacagaatttaaccaaaaaaataaatgagtcaatgaacatgaatagaaatttcttattttatctggcaagcgagtgaagatatatatcagttttatatccttcttgaaagttatctaagtgttcatcacacacaaaacaatgtttcctcccaaaagaaaaactacatttaaggaatttagcttaaataggtaaaactaataaactattgaaacttctaaattagatttatattttttatgtctcttttaaggcagtgaaggtaaaaatgattttatttcactttacacagtattaaatttcctctaaaaacttccacatagtttataccaatataaataaaaagtgtttcttccaggaacttaaaggaattacatttgaacacaattaagaaaataaatgtaaaccttaataaycttactcatgtcaaattgtgctccaatacacctaagtgtcaaatagtagtacacacctctttgcttatttgtgaac

SEQ ID NO: 408376 - DNA, 590 bp, Homo sapiens
ctttgcttaaagtaaattctgtgaaaatatttaatgaaaaagtcagatagtttattttctaaaatatttgttttctgctgtgcaatctttaaagaggttaccaaaaaagaaacaaaacaaaacaaaaaaacaccaaaaacccgaaactgaaaaatgtaccagagaagaaagggagctggcatacttcagtattagcaaacttaatttagaatggtcatatgtcagacatagaaagtacatggcccggtagaaggtatcagctgagaaggcccactagttggcatttgctttgtcaaatgactgccagccaggatctgaccttcagggtgctracaaaattggaaagcagctaatagactcagaaaaccaagctcataaaatagtgatcaatatgactcatgactactgtccccaaaggcagtctctgctctaaccccatgccaaatttagagctagactcagcacttctttgctttctcattgaagctctacttgcacgaaatcctgtattattgaagttgatgctattggatatgttagagaagagatggagaaagaggttttactttgcgcacctacaataatttgag

SEQ ID NO: 408377 - DNA, 535 bp, Homo sapiens
gtgtgttccctcagggtgtatccctaattcacagttacaactattttctcttatactgttttccttttaagttctagacatgaccaacaggatctcaagatctcccctgtgggactgaaccagatttaccttttgcaggtctcaatttgataacacacctttgtttgacctctttcccttacttcttgcttctctactcaaaactttacatttctcggggaacttttcctaataggtaaagtgcatggagcctcatctcagggtctacttttaagaaactcaccccaagacaccacctctcttcaacagaacacaatttctctttaaacattctaaaactaaccattcttgattagctttaagcatgctattttggccaggcttgtcttgattccagcaacagaaatatttcatgtttatgttaccttttgcacgtgtctaattttatcagttgtgtgttgactttataattgaacttggtgwtttggcttttttctccttgaatctgctctactgtctggagtgaactgtcatt

SEQ ID NO: 408378 - DNA, 550 bp, Homo sapiens
ggctataaaatactgttatcttggctctatactaatctggcatgtttattcctttttcacattctttatataaagatgtgtcttcataatcctaatttaaaataatgaatttggtaaagcaattataagtcaccttatattaatagaaaataacccaaggtcatgtagaaatatatattgacactcctcagtattttagaacattttatctcaattacccattggagattttaattcagttgtgcatattcaaaaatgtagttttttgataatttcctttttgcctgcaaaggagcagggagaatttgtttagaagtcatattgcctagtctgtctgcacagaaagcttttctttaccaacaggaaaagtgttgatattgaattaataccaccatcgtaacaagaaaaaagttaacatctgctctactgtaaaagagaagacagtaaagctattcattttttcttgttctaataacactcttttgaataaatttagtcctcactaagactttacaataacattatagyaatgtgaggcccattaaaaatg

SEQ ID NO: 408379 - DNA, 579 bp, Homo sapiens
gtcctgaagcccaagctcacctttcttttcctaatatggtcaagtaactggctgaaaaatctaggaaagcagttggtgaggatatttgaagacttttctgtttcacccatggaaagccgaccacagtcaggaaatgcatcataccctaggcagaagaaggcacaacatgtgaaacactcaagtaaaaatacatcttaaattatgttaataaaagaaattacactataattgccaaagtcttcccaagcccaaaacatgctaataaatatataaaaataaaaaaacattttattgcctctgaaggaaatataagtattaacacttcatgtctattcattataattggtaaatgtttattgaaaatagaaagttttttttaacttattttagtctgtacaaayacaaagacatgaaaaactttagaagtgactctggtcattccagacatttttcactgataaaaatcaaaagggacaacttctaagtttttaaaacttggcggagagtctacaactaccaattgttggcagattttcattccctcccccatcttgtgagtctggtttttgtgtagtaaac

SEQ ID NO: 408380 - DNA, 592 bp, Homo sapiens
ttagccaactcatatttaacgtaattttctaaagtatacagcttagattttattttgccaaaattatcatggttcatggttcattgccttcaaaattatcaacgtggttcattgccttcaaatcttcacatttggtttagagattctttcttgctttaatcctccactaagtcaaactgcttgcaaatacactttacagtaaatctgyactaaggggatgcctagttgtacttttcatttacgcttgcacttgccttcttctggaactggtattttacagtaatagctacacattcttagttgtttgctaaagtgaagtcttgtttacaatatatagaacagcgtatataaggcgcactatttcacaattgtgtaattacagcagccaaggcttaagttaatgagtttcctaaatagctttagaagagagatcgcaatatgaaaagcttagcgtggaaaacatagggattatctagtccatcagagctccatctcaactattctagaaagatagctttatatcctatttcaaaaactgtccaagaaatagattccaagttaaaatctgtatgaaagaatactccccaagact

SEQ ID NO: 408381 - DNA, 566 bp, Homo sapiens
atgagcataaatagtcaatattggctctaggaaatcaattactccactgttatccatcaacaatcctcttgagctcaggcttcatatctatcacttaagataggtgagaaaaarcccctttcaatgatataaaaatagcacataatcatgtgaagttaagtggatgccacccagtattagatgtgggaattgtgagacagaaatacataatatcatcttaaatgtagtttcatttgcttgtttgtttgtttagtgtatgttgagctcaactttttccatctagtacctatctttcactcattccatctctgaatgatctggataggttttctaaacaaatgactttattaagatgatacctccctccaaatcattgaaagtgtttctgacacaaaggtgccctttgcagcctggaaattctactaattttcaaaatacaattaatttctcagggtttaaagaatgagttttagtctatagtcttatacttgatagtgtctgtagcagttatactattataccaatagtgagtgtacaaaaattacttgtggttataatacataaag

SEQ ID NO: 408382 - DNA, 543 bp, Homo sapiens
gatggattaaaaaaattaaaggagagttttcttctcctttatctgtctatgcgataaaaaaattttacttgggggaaatttattttggtattttaaattttctttctggatatttgtttgttagttttcaagtactatcagaagcatataacttttaagaataaagccaaggtcactgaaacagtttgcaaaaaaaaaaacaccgtgtgattgactatctacttggggagcagcrtctgtttttgttgtgggaattctctgccttgcacataactacaaaactctatctactacccatgtcttttttggatttagcattaacaattggtcaaacagtagaacaaaaattttaaaacactcttcagttgtttttcaccccataaatccagactttcttctctattgtgctatttctcagaaaggttgcataggttacttctaagtagacatgcattgtattcactatcaagtagcctacaatgtgcttaaaaacatccacacttttaaattgtaacaacaaatcaagaaaaaacttctactgat

SEQ ID NO: 408383 - DNA, 556 bp, Homo sapiens
ggtctgacagtgactttagtccaacagcttccagacaactactccgcgtatattagactcatatctgaatacttagtgcaataattgaattccaataacctctgcaagctaaatatattgcctttattcaaggaacactagaaattcactgtaacagtgccctttggagttcataatttgagatgtccttcaaagtaagattgctttataaagatgccattttactgcctaagtaactaaaccttcctggccatgaaccaagacagagtcatggcatttaatcttattatgcatattccacagcttcatatacacaaaggtgtattctgtggcaagtttttcaatatctattggcaaaatatttgcagaaatttatttttctatttctaggaactaactggattgattctgtttcaagtgaaagaaccaaggacacacagtaaaagctgaaggcaatcttgaatttgaaattaaatctgaamtttatgtcagtcacataagtaaagagaaggtttcagcaattatttaatacacttatccggttcagaaaataatc

SEQ ID NO: 408384 - DNA, 595 bp, Homo sapiens
aattccagtaacacctttggatctgaaaacaggtaaacagttttcatcagatcctgaagggaatttgtcacccacccaaagtgttagaaaccacttcaaatctcagccatttgtttccatacagtcactgtttagtgtgtcattccatcttgtaagagagctactagtcttgcaggttgagatctaatgttgtctatgacactaatgttgttttgtgcttccayagtagctgctctttatgtttttagtacatagttattgaagccaaaactgatggtgcaggggagaactggatgaaagagcacatttccgggagattactatgaagaggactctatattttttccattattattatttttttcaggtgaatatttgaaagctattcactgtaaccccgcattcacagattttaagattttaggaaatggtaacacaaattctcagaatgttccctgagaaatatctgaaatcaatctgcacaaggaatcaaaacatccaaattcaaatcccagcttcatctctagttgagggacataaggcaattcactcaacattctgggcttctcactctcattttaaaaagaaagtggtt

SEQ ID NO: 408385 - DNA, 462 bp, Homo sapiens
acacaaaattagggtataacttgagaataattcttatgataattaataatagtcatacattcccatagtttttaggatttttttgaagcattgtcacatacatcattgtttaaaacatcacaagaatacttcatagtagatattgctatttttttccataggttattggggtgcaagaggtacttgattacatgagtatgttcttcagttgggatctgtgagattttggtgtacccttaacagataagaaaaataagcataaattcttttcaaatgatatttcaagctcacccaaaatagtagagttaagataagaagtggagtcccatgacttcttctaatatttaagaactgcaaaattttttaaatcgcttttgcaaaaattgtaacagtgagaaaattatgatggtgacagagatctgacttaamcaactccatcttgcctttaacccccaaactgcc

SEQ ID NO: 408386 - DNA, 449 bp, Homo sapiens
taaacaagtccatgtttctaattttaacttaaattagaaaaatatccttcttttattggtcattmtagttataaattctgctaaaaccaaccacttcactctacgtacaaagatcaagctttgccttccctaggtttttggtgaatgctaattaacattcctcagtataaccttaactgtgacttgctagttagccctgaaggacaacattctattttaagaaaaatatgtataaattcatggttggtttaaatgcagatgtagcctgttcttgaaagttagtaaaataggttaagcttaggttgttaccccagtcatggtattgcactaaaaactccagggatgccatcacataaatgcatggtagaaataatggatttaagataagatagaataaagatcgtaagatttatttttgtaagatgtaattatttgaaaatcaatattta

SEQ ID NO: 408387 - DNA, 449 bp, Homo sapiens
taaacaagtccatgtttctaattttaacttaaattagaaaaatatccttcttttattggtcattatagttataaattctgctaaaaccaaccacttcactctaygtacaaagatcaagctttgccttccctaggtttttggtgaatgctaattaacattcctcagtataaccttaactgtgacttgctagttagccctgaaggacaacattctattttaagaaaaatatgtataaattcatggttggtttaaatgcagatgtagcctgttcttgaaagttagtaaaataggttaagcttaggttgttaccccagtcatggtattgcactaaaaactccagggatgccatcacataaatgcatggtagaaataatggatttaagataagatagaataaagatcgtaagatttatttttgtaagatgtaattatttgaaaatcaatattta

SEQ ID NO: 408388 - DNA, 597 bp, Homo sapiens
attattttaaaaggatggttgcatgaaaatgggggaggctgtaaaggccaagttctcatcatttatggtaagaggtcaaattcaatgcctaaaattaataaactataaaaattgataacacattaaaaaatgtgaaacccaatgagaaatgaaataattaaaagtgcaaagtggttaccactgggaggcagggcatgttgtagaagaatgtgtggataaggttgctctttttwaatgagacttatagaacttgttttattcctaaaataacaagcatgtcttactataaaaaaaaattaaattacaagaaactcctgcaggtatgttccacggtggctgaattttaaaattcataaataaacttgattctaaatccattttctaaaacagactttatcatgtttctactgctgtagtttaacacagatattctgaaatgcacaaaaaaaaacaaaattaatgtacaggtggaaaagcccacacagaagccagggctgaccaggaggtatgctcaacccagaaacttgaagcttcactggccattagtgccactgtggaacaggatctgaactcgactagtgggagagccacaactga

SEQ ID NO: 408389 - DNA, 558 bp, Homo sapiens
tctaaatccattttctaaaacagactttatcatgtttctactgctgtagtttaacacagatattctgaaatgcacaaaaaaaaacaaaattaatgtacaggtggaaaagcccacacagaagccagggctgaccaggaggtatgctcaacccagaaacttgaagcttcactggccattagtgccactgtggaacaggatctgaactcgactagtgggagagccacaactgagatgattccccaaacatattaaatcaggtgctcaacaatgacaatcttgaaggggaaattcttaccaagtgaaccaacaacaaaaataagaacagatcycatctctgttggaacttgttgggaagaacttagtattcttaatatcaatgcttctcaacttacgacgaggttaattcctgatcaactcatcctaaactgaaaatattgtaagtaaaaaatgcatttaatacagctaacttgtggacatcataccttagcctaatagcttaaacatgcccagaacacttacgtcagcctacagttgggcaaaatcatcccatacaagacc

SEQ ID NO: 408390 - DNA, 597 bp, Homo sapiens
ggctttttcttatagctaatgacactaaaattatacaagttttggatttatacattagctgtcctaatgtttgaaggattgcattctgtactggtatatgatattccacctagcctagcccaagacccatctctccaattactagggacataccagtgaagaaacaaggtttgaagaggattctattcctgtggctcaaagacatacacacattctgcactgcttcttttgctatagcaattaaagccatggattttcacatgtacatccatctaataaaagttgagctcgaaaagcccaaagtgcatttgagtaatgttgacagcctgcccarcttcacaaatggtttttgggtaatgcatgatcaaatatgtaatgtgctctcgtgcttccctctctagctaagaaaactgattgattcttgacaggagtatgaatggtgattcttgactgttgttctcccgctataccattcttcttatctcccctaagccaattcatcattatttctggaaaaggaatattagggaatccaaataattcagctaaatctgaatgttgaaatgggcctagaatatagccaacagtgaagagcca

SEQ ID NO: 408391 - DNA, 574 bp, Homo sapiens
aatccattcaatagggaagaaccttcatgacctaataaccttttaaagttatttaaaacttttgatactgctgcattggggattaagtttcaaaaacatgaactttgggggatgttttcaaaccatgtcagcatcaactactgttttagcagcattatgtagaatatgggcagaacagccaacatcttttatagaatcattcatattttgcttaatcatttaataaatattgtttgtaccttcagataaatatcsaccaaaatgtttatttgtagtatgtccatcaattcataaaagaaaaatttttttctttattaacttcaatttgaataagagcatttctgaaaaaattgctattatttctgaagttttatcagaaacagttttgcttacagtagccttatggctaagcaagccttttcatgaaaacaatattacacaatcaaagggaaatgtttttctgaagtatgataacttgcattgtggctacgttatgaaaaagatgagacatttagatttttataatctctataatagtaaatggaactttttcatttaaaaaatttttgcaatc

SEQ ID NO: 408392 - DNA, 574 bp, Homo sapiens
aatccattcaatagggaagaaccttcatgacctaataaccttttaaagttatttaaaacttttgatactgctgcattggggattaagtttcaaaaacatgaactttgggggatgttttcaaaccatgtcagcatcaactactgttttagcagcattatgtagaatatgggcagaacagccaacatcttttatagaatcattcatattttgcttaatcatttaataaatattgtttgtaccttcagataaatatccaccaaaatgtttatttgtagtatgtccatcaattcataaaagaaaaatttttttctttattaacttcaatttgaataagagcatttctgaaaaaattgctattatttctgaagttttatcagaaacagttttgcttacagtagccttatggctaagcaagccttttcatgaaaacaatattacacaatcaaagggaaatktttttctgaagtatgataacttgcattgtggctacgttatgaaaaagatgagacatttagatttttataatctctataatagtaaatggaactttttcatttaaaaaatttttgcaatc

SEQ ID NO: 408393 - DNA, 568 bp, Homo sapiens
ataacacaaatttgcactgtgtgtccatgatgaacgtactgggcatgtcctgacagaaccaagagtctgttgagttctgtttaattgctttagctagaataacctagttatcctgagacaagctgagacaacttcttcctcagtgtttcttttgctatgcaatcatgaattattgatctcactgtttatgttcagtgtcttttaatgacattttaatttttcacatgacatcctcatctacacagctcactgaggataacaaaaataacaccttttgtatgactataaacagtaagtcttacactccttatttatcatctgcaaccctgtgtcattgtgataggtgtacttgattatatttctccttcaaatatgtgatggcttaataatctctagaagctctctgacaagtatttttttttttaagtaatgagatttttgttcacctgttttgagaaagcagatgtkataattaaaagaatgtcattatagatcatagatttttccaacaatgtgtaaaaattattattctttttaaagagttttcaagatatttacatataaaaat

SEQ ID NO: 408394 - DNA, 597 bp, Homo sapiens
ccgttttctctgttacttctgtcgtataagtaggcagaatcaaaaagctatgtttgatcatctcagttatttactggaaaacagcagtgttggtcttggtaagtaaatgacttttatttcatctttaaggttgaaataatataatattacatttaaaaagcaaacgtttkgttaaaaaatgtgcaatggacctgaatagacatttcacaaaagaagacagatagttggccaataggtatatgaaaaaatactcgacatcactcatcatcagcaaagtgcaaattgaaaccacagtgagctatcacctcacacctgttagaatgcctattattgaaaagacaaaacataataagtgttggcgagggtgtggggaaaagggaacccttatacatgttggtgggaatgtaaacacagccattttagaaaacattaaggagattcctcaaaaaattaaaaatagaactaccatatgatctaacagttttacttctgggtatatatatccaagggaaatgaataatcagtatgtcgaagagatacgtgtacttccatggtcattgcagcattattcacaatagctgagatatggaatcaacc

SEQ ID NO: 408395 - DNA, 597 bp, Homo sapiens
ccgttttctctgttacttctgtcgtataagtaggcagaatcaaaaagctatgtttgatcatctcagttatttactggaaaacagcagtgttggtcttggtaagtaaatgacttttatttcatctttaaggttgaaataatataatattacatttaaaaagcaaacgttttgttaaaaaatgtgcaatggamctgaatagacatttcacaaaagaagacagatagttggccaataggtatatgaaaaaatactcgacatcactcatcatcagcaaagtgcaaattgaaaccacagtgagctatcacctcacacctgttagaatgcctattattgaaaagacaaaacataataagtgttggcgagggtgtggggaaaagggaacccttatacatgttggtgggaatgtaaacacagccattttagaaaacattaaggagattcctcaaaaaattaaaaatagaactaccatatgatctaacagttttacttctgggtatatatatccaagggaaatgaataatcagtatgtcgaagagatacgtgtacttccatggtcattgcagcattattcacaatagctgagatatggaatcaacc

SEQ ID NO: 408396 - DNA, 486 bp, Homo sapiens
attgctgacatatgctacagtgtgaatgaatcccaaaatcatatgctgagcgaaagaagccaggcacagaaagatatatgctgcatggttatgtgtacaagtgtcctagaaaatgcaagctaaattgtagtgagagaaaaccgattgtctgggactaggtgtgtggggagaaagggactgcaaagggcccagggagctctgaggagtgacggcmatgttctgcgtcttgattatggtgtgttctcacagatgtctacatctctcaaagctcattgaatttatacttcaaagagatgagtttattgcacattggttctcttgcttcactatagttgatataaaacatttttagctatattattatttatatttgaaactgatttaacttaagctggatataactcaatttgcttgataagttgctcctctgtcagtcttacttccattgataatgacttttctaaggatttcttttaaaattgaatt

SEQ ID NO: 408397 - DNA, 509 bp, Homo sapiens
acctttgctgccctttcattttagcagtatttattaagaaaaaaatcttcagtagtttttggtttgatttgtttttattcttttgtgtttgatttttaaactagttttactcagggccccgtatgtttatctgtttttgtttgttttgtgtggtttggatatgtcttcttgtcaattattagttttggaacattgggtcttttattggactaatcttatttcaaaaaataattttttctcccatctgccatttgtagtctatgtttatttctctgaaatattttaggattaactaatttatctatgtatttttttsttctcacaaataggaaaaacaacatttcttattgtattttaaagtttattattaatacccattctgacattgctaccactatgtggctcccgtgtttattttattttctgcttgacatttggatgtacaagtgcagtcaacaaaaataagtcatatggttactaaactgagttagctaccttcaagaacaatc

SEQ ID NO: 408398 - DNA, 575 bp, Homo sapiens
ctgtgaattctcagcatatcagattataaaacagaactggcatatgatatgtcaaatttaacattgagaattcctgagttatagaaactttatttaaaaaaacaatttgggattaatatgcaaaaattatttatagttatattatgtaatttgttgtttttattatttagagagtcatatatgagagttgttataatttgtttaaaacccaatgttgtccctattgttattagacccaggtgtaagttattattttaattatgtactttttatgtttacgtacaccttgatgcactgatataaatacacaatcttaaggacaaataggcaatctatcattgtttccctgagtgctcagaggtgatgagaggtgtgtatctgaggacaagggaaatagctgggtccttgaaatactgtgagttgaaaagtatcaatcttttggttttttcaccacccagagcaatgaakcaattatgtaaacttaagtacataaaaatccagttgccacctgaaagttttatcatcttacaaaactctgctggcccttcctgttcttcctgataacgtgattgaca

SEQ ID NO: 408399 - DNA, 545 bp, Homo sapiens
ccatttttcctgcgtgatacattaccagttcaaccctcctttatggtcctagctgctacagaaattacctgacattaaataataatctatatatgatcatagacataagctgccactgtattaattttaaaaagtttttcttttcacctacactaaagactttrttacaaatccaaagaataaaatccagacactgggtccttcttaatattcttatatatatacatgtatcattattatagtaatttatttaggtaaaaatgtatccatttaccttgcatccaaagtctgacccaaaatatgaagacagttgacaattgatgttgcatcattgcctaaagaggaaacaaaatgctgtataaattgccctgagaatttctcaatgttcttcttttctaccaatatttgtgctagaaaaattagtcaatgacacaacagtaatattttaaaaggttttttaataatcaagtttgaaatcatgcagtttttctgcttaaaagtggttatgcaaatgtaagtagaaaagcaataaagcatgtctcatc

SEQ ID NO: 408400 - DNA, 545 bp, Homo sapiens
ccatttttcctgcgtgatacattaccagttcaaccctcctttatggtcctagctgctacagaaattacctgacattaaataataatctatatatgatcatagacataagctgccactgtattaattttaaaaagtttttcttttcacctacactaaagactttattacaaatccaaagaataaaatccagacactgggtccttcttaatattcttatatatatacatgtatcattattatagtaatttatttaggtaaaaatgtatccatttaccttgcatccaaagtctgacccaaaatatgaagacagttgacaattgatgttgcatcattgcctaaagaggaaacaaaatgctgtataaattgccctgagaatttctcaatgttcttcttttctaccaatatttgtgctagaaaaattagtcaatgacacaasagtaatattttaaaaggttttttaataatcaagtttgaaatcatgcagtttttctgcttaaaagtggttatgcaaatgtaagtagaaaagcaataaagcatgtctcatc

SEQ ID NO: 408401 - DNA, 613 bp, Homo sapiens
agcgttacttaacatttttatttacattcataatatatctgttgtttcttgttttttcttctctaggaaaaagaaatttatcgctggccaatcaaagaatctttaaaaactatgctggcttggggctggagaattgaaagaactcgggagggagacagcatggccctttacaaccggactcgtcgtatttctcagacaagccaggtaagaattcatcacggtgatgaatcaactgtttatgttatggattaaataattttttaaatttaattattgagtttttctaaaraataatctgaaaattctgaagagtcacaaaatttagaagggagagaaaaaagctatatatatattttttttagtttcaaaggaggttaaatgatgattaagttactggactttatgtacaagccttccttttcctggctagtatagaagaagtaaccagttgtaggacatggatgaagctggaaaccatcattctcagcaaactaacacaggaacagaaaaccaaacaccgcatgttctcactcataagtggaagctgaacaatgaaaacacatggacagaggaaggggaacatcacacaccggggcctgtcagggagtggggg

SEQ ID NO: 408402 - DNA, 626 bp, Homo sapiens
cgaggtcatgtgagctgcttacctttgaccccctcatttctcctgggagctaaatctgtcattattcttttcctgacccctcagctcactatgtatgtggtttacaccaaatattgtttattattgctatttacacaaatatcatttttgaaaaaaaaatgagggtctaacagcatgtgcttcacatgctccatatttgaaatatacttttaaataaatttgaccttggtcaaattttaattttaaataaattgagttctgatttgggcatactttacattcaattgtctttgggatgtatcatatatggatggaagctataaaagtgtattttatctatttttttgtctgtgtacttttctaagtagattagcttttattttaatctgtttcaacaaatgctgagcacaaactgcgtactagataataagaatacaaagatagcaagacaattctaatsctaaaagtcataaaatagtgttagataaggtcaagttaaatctactacaacatggtatggtaagggtgggactagtggtatgaataaggcactacacagtatagagaaagggatgtttttttttttaattattctgtcaggtagataagaaataagaaattactac

SEQ ID NO: 408403 - DNA, 625 bp, Homo sapiens
ttgcttttgtacaaagggataatccatttaaagcactagctgaaaaaaawttttaataaaaaagtattttgaaataaaatattttaactgttttaaaaaaatcttcctaggaaaatttaatgagatttgctcctaatgaagttaaaatttgtgatttttaaaaactattaaacctgaatttacttggtgtacagactgtatctgacaaattcaccaaacctataaaaactactttaaacttctactaattagcttgagaatatgctaagatcacacaaacaaaaaaggtatcagatttctagcagcttttgaatatactgtagagaaacagaaggatttactggaacaaaagatatgttcttcaatagcaaatggcatccacgtgacatagatgataatgctaagcaaatgggaagttatattagacagtcctgtagcaggatttggctttctggatcagaatgctaaattctagacaaggaagagtccttcttttgccaggaaggaaaaggtgaataagctaaatacataaaggggcaggtgtggaataaataatttcgaagaaaataaataaaatggaggatatgtcagatcattcaggtatccacaacagaattcaaaactg

SEQ ID NO: 408404 - DNA, 560 bp, Homo sapiens
tgtgtgcccttctttcttcttcacatgttatctccaatatattgatgtccagcaaatatttgttgaatgaatgaatgtttagaaaaagttatggctcctcataaataaaatgtttaagtaggaaacaatgatgacctgccatggaatttagaacggagattcatgctacaaacaaaaagttgaaattaatgaaatacacagattcttatccttttcagatgaaagttacttccctttattaaaattaaacatgaaaatcaggaaggatacttatttacctttgccataatatctgcataggccatatataaaaaatcttcctccagtttgctggggaaagcaagaagaaaacatcagtgtttaagcagaaggctaggcacatgcacacgtatcatcgctgcttaaaataacctttgttctttttctaacaagtatacctttttaaaattaaatgaayacaaaactaagacaatattaggatattcagaaatatcctgaaatcagaaagcaaagatcccggggatcctaaatagctgtcccatcttaccttacagaagggc

SEQ ID NO: 408405 - DNA, 561 bp, Homo sapiens
ttgcattatttgtattgaaaagttagaagcaatctaagtacccaataaccagaatatggctaaataagttgtatacatctacatgccagaatattatgtcatattttgttttttgtttgtttgtttatgagatggagtttcactcttgttgcccaggcaagagtgcaatggtgagatcttggctcactgcaacctccgcctcccgggttcaagtgattctcctgcctcagcctcccgggtagctaggattacrggcatctgccaccatgcccagctaatttttttttttttttttttttttagtagagatggggtttcaccatgttcgccaggctggtctcgaactcctgacctcaggtgatccacccacctcggcctcccaaagtgctgggattacaggtgtgagccaccacgtctatgtcatctttaaatgttgaagtttcaacaatattttatgccctggaaatactcatattatgaagggaaaaatggagaatttttaaaacaatgaattcagaatgttatatgtataatatatatgtaaatgaatttatctactga

SEQ ID NO: 408406 - DNA, 651 bp, Homo sapiens
tttccagtatgaattgcagcattattaactgtaatcaccatgctgtacattagatctccagacctgttcatcctacataactgcagctgcgcgtcatgtcttaactggtaaacactgtaaagcccaataaataatgatgggtggactcttcctatctttagattgtaaccttgtttttagattcccatcttcccattgtaaccttttccttttttctgcagttggaggatcctgctattagatggcaaatggctctttacaaagacttaccaaacaggactgatgatacctcagatccagagaagacggtagaaagagtattggatatagcaaatgtgctttttcatcttgaacaggtcaggctttgtgtcaattcaatcatatttgccttagccacatacaaatattttaaaaagagaatgtgtgttaatttgttaactatgacccaagaaacatatatgttcagcatattcattctaaagaataagagtccggtgtgcttagtatttcataaagacaatttctaagcttayaaatcttgtagcaatatatagattatatattttgggagatcctggcctttgttttgttgtcttttttcaaatatttctgaaagtattaggattatatttttaaattattctaaccaaa

SEQ ID NO: 408407 - DNA, 487 bp, Homo sapiens
tgtgctcttgtcatttccaagagatctcatcaacatcaaggggttgagaatttaaaatgaataatatagaagtattattaattaaacatgatttagtctttcttttaaattccttctcaaagcacctataaacacctgagaaccaggatagactataaaagaatgaactgtcaagaagttatccacctaaattaagtagaaggtgaacaaaaaattgctggtttttagaaatcaacagggcagagaatgatagactgaacacaggagactgaacacatggtaaatgtggagcatgagaagtrgaattttcaccagactgtgctgataaagagcttgtgagttcagcacagaacagcagtcagtatcatcttttctaagtcatggacccatctaaatatctggcaaaagccatcttctcaacaaaatttacaagccatctcaaaacttggcagactagtcagaggcttcatgattcccaagataaaga

SEQ ID NO: 408408 - DNA, 509 bp, Homo sapiens
tcttggatttttaatttgcttttttatcagaaccattaaccccattaccaaatcattatgacattgaaagtgcaatttttctgctttcaaaattcttcttggaatatagcagaagatactgaatttttttttttgatcatgaggtagtcctggacttcataaaagcaagacaaagttttgaagttgatcygatttcttaaaaatagtttgattttttaaaatcctcactacaacattaactaccaattaaccttccccacctttctatctgtatctgataatttgtttcactgaggttcttactgatatatttataatcatctaatcaaatttatgtgaagttgaagcaacacaaattgattaagcaaagagattgaattgatctttaagtattggttaccctaactttttgatactcttgattgcttaattatttatgggctaccttttcctcaagattttccaaatactttcacaagtgtagtttagtattctgtgtaccttattct

SEQ ID NO: 408409 - DNA, 601 bp, Homo sapiens
tgcccagaactataaaatatcttcaaaaagttcatggaaaatacacattatgaaaaaaattatgtgtgaatttcaaaaatttttgcaccaaaataaactcatactaacttttcataatgtgtgtgaacaggatctcatttgaggccttaagaaggataagatatcagtttgaaaagaacccctattggagcaacattgaattctgctaaaattgaagcaagaataaacattaaatttagggtaaagcttgggtggaagaacagtgaaatcattaatgctttatgaaaagtttatggggacaatgcctcaaagatatcagcagtttaaaaatggataacttactttaaaaagggacaagaccatgttgaagataaagcctgtggtagcaaacctttcaccttgatttgtgaggaaaaaatgaagcttgtttgtaccctgattgaagargactgatgcttaacagcagaaacaatagccagcaacatacatgtctcaattgattcagcttacataattatgactgaaaaattaaaattaagcaaactttccactggatgggcagcaaaacgattgtattcagatcagctgcagacaagagcag

SEQ ID NO: 408410 - DNA, 573 bp, Homo sapiens
taattcatatagcacatctgatagagcctttttaaatgctcacttttattggtcttatttcaaaattaattcatgtttatagtctagcatttagaaaattccaaggcaaagcaggctacatttgtgtgtttcctcttggtgtctccagtgccccatgccgccactgcacagaggacattaagcattgaacacagagaactaaaccacttaaggaaccacccataatctcaataccaatagatacttaccctcacttttttgatatgttwtttccagtcacttgtgtatgtaagcatacatacaaaaacaggtgtgtgtgtgtgtgtaaaaatgtgtgtttacagagttcgttttacaggaaagcacaaagtcagatagttgttatcgggcacctatgggaaatgtcataggagactaaagatgagacgaaaactttgggaccaccactcttaatcatcctaatacttgatctttccatggctaccctgagatagaataaatggcttttgtaaaacaacttaaacctcatctccttaattgaggtatcctgctttcttactcttatttacgtgt

SEQ ID NO: 408411 - DNA, 621 bp, Homo sapiens
cctgttaatttttgttttgtacttattgaaagaaggactcactaagtcattgcttttgccctatttaaaaaaaattatattagactctccatagtttggaaaaaaaatttccattttgtaaaataagtagattgtactagattcacttttcatgtctaaacattttctgtgattttatgaattcaattaaatatcaattgcatttcctttccaaataaatgaattccaacatgacagatttttctgtgataccaatgtctagtctagttcctaggataaagtctgtgtataatatatttttgttgttgcattgtatctacaacaaatctttccaaaaggaaaaggtaaacaacatttccagcatcttagaatgcaatattgcttttaagaaggggaattaatgacaatacatattttacaccttcatattccttttttcaaaacatcatattgtaacaatgaggatgcaaaatagtttgtgaaactgatttttaagcttctgcttctacaatagtctttaatcatgtagaaaaattatgtttaaaaatgtccttctwatattgagtaacagctgtgctacacattctgctagtactaacaattcataaattaaagtaactg

SEQ ID NO: 408412 - DNA, 561 bp, Homo sapiens
attgtgggagacttgtattttttttctccttcagaaatccgaaccaatttgccttaatttgttactaaaatattcttgactactagatgatggtcagaggcaatgctatatcttaaaactagacaagcctcctgcatattccagatacaatgcaacaaaggttgtgcttttaagagkctgtaatagatgaacgcagccactgatttgtgtgtttatttataagtctccggtattccttaggagtagagtagtctattgtgttctatttgcacaattatctgctaatatttatttctacaggcaagattagtaccctccctctttatttttttgtgattaatgctataaagaatggtattccaaagagtttctacatatgaaggatctaattttgatgcaagaaaaaaaagtaaatagatgcatggagggtggagacaaaactgagagaaatacagcagaattgctctcctttgcaaagacaaattcttgacgacaaaaccatccaccccgagacaaattctgattgtcactgaaattcaaaaatgaagcagtcttcagtta

SEQ ID NO: 408413 - DNA, 594 bp, Homo sapiens
ccaaaaacaaaagttttgaccaaaaaaaaaaaaaaatagaatakacttcatcagagttaaaaatcttttgtgtttcaaaggacactatgaagaaagtaaaaaaaaaacctacaaaatgggagaaaacacttacaaatcatatatatatatatatatatatatattaagggactagcttccagaatatataaagaatgttttacaactcaacaataaaaatataagtaatccaattagaaaatcagcaaaagatttgaatagacatttctacaaaaaggatatataaacagccaataagcacatgaaagaaaaaaatgctcgatacagttagtgatcagaaaactttaaattaaatcacaataggagagcacttcacattcactaggattctataattaaaaagaaaataagtgctggcttggatgtatagtaattgaaactctcataccttgctggtgggaatgtacaatgctctagccttgttggaaacagtttgatagtttctcaaaatgttaaacgtagagttaccatattacctcatcaattctaagagaaatgaaaacatccacacaaaaagctgtacacatatatttc

SEQ ID NO: 408414 - DNA, 594 bp, Homo sapiens
ccaaaaacaaaagttttgaccaaaaaaaaaaaaaaatagaatatacttcatcagagttaaaaatcttttgtgtttcaaaggacactatgaagaaagtaaaaaaaaaacctacaaaatgggagaaaacacttacaaatcatatatatatatatatatatatatattaagggactagcttccagaatatataaagaatgttttacaactcaacaataaaaatataagtaatccaattagaaaatcagcaaaagatttgaatagacatttctacaaaaaggatatataaacagccaataagcacatgaaagaaaaaaatgctcgatacagttagtgatcagaaaactttaaattaaatcacaataggagagcacttcacattcactaggattctataattaaaaagaaaataagtgctggcttggatgtatagtaattgaaactctcataccttgctggtgggaatgtacaatgctstagccttgttggaaacagtttgatagtttctcaaaatgttaaacgtagagttaccatattacctcatcaattctaagagaaatgaaaacatccacacaaaaagctgtacacatatatttc

SEQ ID NO: 408415 - DNA, 625 bp, Homo sapiens
ccatatgcctaatttttcctggtcatgtgacaagaacctggattttagctaaactaagaagcaaaaatccttcatcatattggcggctcatatgaggacatgaggaaaagtgagtaaaatgcggaccaaaaaatctttttccctcttgcttctgagcctttttgtccttggacttattctgagagtagagaaaactgtgcctcccatccctcgttgctctcaggggtgaggaatactggcctcagtccaacctagccttttctatggaattttccttcctttattgggactgtaatggcactaccccaccccaatggccacaggcacatgcaggacagacaggtgagtggtkcctccacactctcatcccctcccagctggggctggggcacatggcccaagggccccacgcggcagcctggccagtgtccccggccacacatccatggagtcttcccatccctcaaccaaggggtccagctctgtccaacagtaattaaaagtttctctccatgttggaggaatccatttgcataagaataacaggttcttctgcaaggcatctttccagtcctgcactttaagctgttttttcttttcttttctccaccttgtcagcagttaa

SEQ ID NO: 408416 - DNA, 625 bp, Homo sapiens
ccatatgcctaatttttcctggtcatgtgacaagaacctggattttagctaaactaagaagcaaaaatccttcatcatattggcggctcatatgaggacatgaggaaaagtgagtaaaatgcggaccaaaaaatctttttccctcttgcttctgagcctttttgtccttggacttattctgagagtagagaaaactgtgcctcccatccctcgttgctctcaggggtgaggaatactggcctcagtccaacctagccttttctatggaattttccttcctttattgggactgtaatggcactaccccaccccaatggccacaggcacatgcaggacagacaggtgagtggttcctccacactctcatcccctcccagctggggctggggcacatggcccaagggccccacgcggcagcctggccagtgtccccggccacacatccatggagtcttcccatccctcarccaaggggtccagctctgtccaacagtaattaaaagtttctctccatgttggaggaatccatttgcataagaataacaggttcttctgcaaggcatctttccagtcctgcactttaagctgttttttcttttcttttctccaccttgtcagcagttaa

SEQ ID NO: 408417 - DNA, 498 bp, Homo sapiens
ggtgtggggagatggagaactcaagagagggagagtcaggattcagctcgaaggagkgtgccattgagatggacccattaaattggaggaagggtcctgattcatctcttccctttaccccctcgctgaatgattcctctacagaaagagcttagacacccaggtctaatttcagccacaattgaagcctaaacaaacaaataaaacaacaaacaaacaaaaaacccccatatagctacaaaatatttatttatgaggctgctacatcaataacactaattatactgtaattgccaagaactgaaattaatgtgattttgtagaaatccacaatcaatctcaggcctaatttctgtgaatgaatgcactctgaacaaaattccagtttagagagcatattttattcttagagtacttggcaaaatgacattggggaggagaactgtaagatgtaatagtatacttcattcctcaactataaaggcaataaagtcagtc

SEQ ID NO: 408418 - DNA, 508 bp, Homo sapiens
tgcggcatcactagccagttcacagaaagtgttctcaaaaattcaagacgtactagatgattttgatgcaattcagctagcttacatgtctacactgatcagattaaaatgttgctgaaggctgataaaccaccatttatgcacctgtgatcattaattaaaattatatgtagaaaatcctaggtgagagtttctctgagaattatctkgcacttataattctgttttggtgactgcttctctaaggacctgaaccaacacagtagaaaatgcagtttagaaagattatttcagtggctaattggaaaatggaatttgacagaaacaaaacttaccagatcagataaaatgctgtattctcattcatctcttcaaatcagtattcatgttccggcatccccaaacttgggaatgtatcatgtttgtggtgacttgtaactgaaagcaggctgagtgctgatgtgatgttgggcatgagcatcaaaagacattggagatgcaaagaacc

SEQ ID NO: 408419 - DNA, 593 bp, Homo sapiens
ctgcaattgaccaatgtgaagttagaaattagtttcttatcatggggagaaaaccacaagaatcagtgaacttgaatggtgccgccaaccttaggtaagccacttgaacaatttgggtcttatgttccccattttatagaatccagacacaaatgggaggctcctgacttttaggattcaaatgaaatatggccatagggctctaggtttacatttctatcattctttcttgagatgttgaggaggatagcttacattgttcttcaaatcctgctcaaccagatttgtgtatgtctgtaattatccaccactcatctcagctgtcactcagaacaagccatggaatttagtccctttacctttttatccataaaataaccacacttacaatccaacagtgacaacaaaataaagataactgaacaaataccacctcccaaaagatccccctaacaagaaataagtgcaaacaaaaagtgaccactctaagaccattttgtgttgagcagaatacagmaatacatggggagatagagagggcttagattccatcaacacaaaacacttaagattgattattgggcctccctgtt

SEQ ID NO: 408420 - DNA, 561 bp, Homo sapiens
aaaagaccaaaaaattctaccagcaagatgtctcattgtcctcgctgaagtgttcgagagataggcaagcaaacagggctcttctccctcaactgcagatcctgataatttcaacaaggaggtggaaaaaccctgttgttcccgagcttatgtttttgtccaattctacattgcttgttatacttctaggacatgcatatcttctgcttctgactgtgatgcaacctgttacccttctgatggctgaacctcaaagtagtcttcccttttttcataagaattagtgacagtccaatatttttgattaacataaaagttatttttgaacttagattattttttacagaatacatctctttggaagatttacaaagatttataaatacacaatgcaatatataaatacaatgtactcataaacatacaatgcattgtgtatttaaaaatgtttgtaaattgccacctctgtaaggtggcagagagcatgctcagaaaagtcattatcagagccatttctattgactaawatataacctccaaagaatcaactgtcagaacaag

SEQ ID NO: 408421 - DNA, 548 bp, Homo sapiens
ccaggactccatttctttagctgataaagaaaacttattctagatgttttctaaaattgtttctggcttttaaatttctgtgcttctgagagctaacattctgtgggtattgtgttcagctgaagcaaggtgctcatgtttgaaatggtgcaagataactcttatgatgtgggtagagtgggtcttgaataatcagtgtattgyactggagatttttttaaaaatcaagcaacagatattgatcaagtacctacttgcgatggttaattttaagtgtcaacttaactgggtgaaaggatacccatatagctggaaaaacattacttctaagggtgtgagggtgtttctggaagagatgagcatttaaatcagtggactgagtgaaggagacccaccctcagcagtatgggtaggcaccatcctatctagtgagggcctggatagaacacaaaggtgaaggaacagcgagtttgctctcattctcttgctgagctgggacgtccatattctcctgcccttggacattggtactcctagtcttgggcctt

SEQ ID NO: 408422 - DNA, 605 bp, Homo sapiens
tttgaaaatattgccaaattctctttgagaaagcggactatgagaaagtttgctttcttccatacctttcaatttggtcaatatttttaaaattttcagtttgttaggtgaaaaacaaaccttcatttgcattaatttgacaatagtgagggcaaaagcttttcacatatttactaaccatttatcttcctcacccttccttccaccctccctcttgagctctctcccttcttactccctccatcctataatttctccctcctccccttcctccccccccatccattccttctttcctttcttcttcctttgaatgacaggctcatgcttgtggttcaactgtaacttgcttccccaatatccatcccmcccttcttttttagtgaaaatacttcaattttattcagggctgtcatctgttaaattaaatgacaacaactgaatttctcagcctaccttgcagctagggttggccatatggcacagttctagctaatgagaactggaagttgccaagaggaactttggggaaagccctttaaaatgagggtggatatgccagcttgtttcattttgcttttgccctgtgtctcttccttctgcct

SEQ ID NO: 408423 - DNA, 595 bp, Homo sapiens
tcagctattattgtgacaacaaacaactccaacgttttggtagtttaaaacaatagacattagtatttttctcatgaaacatcatatctatggatttggctatggcccacgttcaagtatcttctcattctggatcccaggttgaaacattatgatgttctcttggtataggcaaaaacacaagacagagctcaactcaaaccctacaattgcaygtaaagcttctacctggatagggacaatgtcaagtttactcacattcaagtggccaaagcatgtaacacggtcaaacccaaagtcaaacaagtgggagatgtatacttctcccacaggagtattagacgatttgagtgacctttgttttctgttaggtctctgactaatacagttatctatagaaaaaatatttttaaggaaagcttattacaatgatacatacagctcccttgctgcacccaaaggcagaaattgcagccagccttcaggaatgaaccggaatgtgagactggagtactttccggtcttgccttttctcctctctgctcctttctgactgtttgcttccatttttctctttttgcaggacagtttcact

SEQ ID NO: 408424 - DNA, 607 bp, Homo sapiens
ttaagccagtctgatttggaatttgggttacttacatatgagaacatcttagctgatacagttaagtgaaaatagaagtaaattgcagtaaatgaaactgcaagtacacatagataatttcctacttttgtacacaatttattcctccaaatgtttttagaagtcaaataatagaggaggtgacaattgggccgaagtgggaaggtttactgtaagttgatgaagggacatgcagaggacagtgtgaggacagaggcaggaaggaatttgatgattaccagggactcaaagacaaccaaggtggccgaagggactgaaggtggagaggtggggccaagtgagactgggaaagttggggatcagaccaggcacacatttttaagttaattaaagagagatgtcttcattcaaagaacaatggcaagtaaataaaggttttaaataaggggttggggaacccaaagctgggacagtatgaagagaggatcagatttacattttgaaagagaaagatcattacagctgcagagtggagaatgaattcaaggggagggccaaggcgkaatgagaaagatatgtaggcttacatccctgcacacagggtggg

SEQ ID NO: 408425 - DNA, 630 bp, Homo sapiens
gtgccttatggataaaatacatattttccataagcttcattcaggcatgagttacagtgatgttagcagtgagttcagtgttaatgaatcagcagtatgtattaaatagaaaatttgtttaaacaaaatcacatataaaacaaagttatgttttgattcagtgatgaaaattgtgaccagaggctcacaggaacctaatcatgtatttcccctagcagaaattattcaataattcattgtttggggtgactttatagaacataactaccttgaataatgagaatcagctgtatagagaatatctgaactcaagttctttattagttctttttttcttttttttctttttgagacagagtttcactctgtcacccaggctggagtgcagtggcaccatctcagctcactgcaacttgggcctcctggactcaagcgatcctcccacctcagcctcctgagtagctgggactacaggcatgcactaccacacctggctattttttgtattttttgtatggatgatgtttcaccatgtcacccaggctggtcttaaactcctrggctcaagggattcacccaccttggtctcccaaagtgctaggattacaggtgtgaatcatcgcacccagc

SEQ ID NO: 408426 - DNA, 627 bp, Homo sapiens
acctggtcatcccttcctaccttatgccttcagccctaactgtggcccaagaagcctcaagaactccatgaaacacagtctgaaaaaaaaaattgtttaattcatttktactcccagtctagggaaactttggcatttcatgtttattttgccttcattttaaatgatgttgagcattttatcatatacttgttagccatttgtgtatcttcttttgagaaatgtctgttcagatttttttgcccatctttaatcagattattagattttttccgacagagctgtttgagctccttatctgttctggtaagtaatgccttgtcagatggatagtttatggatactttctttcactttgtgggttgtctcttgactttgttggtttttaacctttgctgtgcagcagctttttaagttgatgtgatcccttttgtccatttttgctttggttgtctatgctgtggggtatagttcaagaaatcttttgagtgctggaagtcctggctagagcaagcagacaagagaaagaaataaaagcattcaactacacaaggaagaaataaatttatctttgtttgcagatgatatcatcttatgtttggaaaaacctaaggactccacaagaaa

SEQ ID NO: 408427 - DNA, 530 bp, Homo sapiens
gtctgagtccagattgtggtgttttttttattaatttgtttatcaggactatagtttccttgaaattcaaggtttctgagagagaactgtacaaatcatgggtgcaaagccggaccataatactaaacatgactagatctctctcaatcatctatctcactctctatatataatttttctaaggtaacaatattttttattgtcactaatagaaaccgataagatataaaatcctttaaaaatagaatgatgytgattctttgccttgggaataaatgtgggtaatacaaacagaagtgttcagtttgaagaaagcaagaatacacagtgaattttaaaaaatgcttatgcatacagactattgtgagaatgggttcagtttggtagaaagaaaaataacagatgattaatagttaaatgggtaaataggaacctcgaattacctcaacattaaggaaaataaaacaagtaacaatagcaaaaactaaagttatcaatcttctaacttgcacacatcagaattttttaag

SEQ ID NO: 408428 - DNA, 554 bp, Homo sapiens
agaatgttcaacttgtcaaacaaagattattgttgaaacctcgaatgtggtcactccttgaataaatcaagcaattaatctcagccagttggtgacaagttgattagattcaatctcttccatcctagaaatacaaaattcatcctgatgaagattaacaggtgatttggatatagtttcacctttccttcccatagttgtcaactctttgaagactcacaatgtttgagctgcttacataggatcctactaaataattccttggaccaaagacctgctttctatccaaagatggatagctgtggtcaacaactatggaatccattatggcytaccacatactatattatccagaaatgacttgcatgatagaccagtggattgacttattgaaggcatggctgagacactagtttagagataacaccctgggtgaatggagtacaatccttcaggatgaagtccaccttaaattaatggccactatatgacactatgtctgcaaaagttggaatacagaagtccaggaatcaagacggtagaaacaggaatgg

SEQ ID NO: 408429 - DNA, 549 bp, Homo sapiens
attttcttaattcttaaaaaagaattgtctacattttaaattcaagtaaatttttttgtccagtatttttcaaaaatatttttaawatttgtttcttggattattttcataatatttgttttcctaatgatgcttctcaattttatttagaaatgagatatctgagtgaatagagtgttattaattagtgcttatgagtatattgttgaagttgaggttgaagaccttttacattaccaaatagaagtagtatgtctaatggttaggtgttgggatttgaagataataccttgggcctgcatcctgggaagctgtgtgaacttaggaaattaatttaatttttctaagcctgagcttatctttctgtaaaatggagatgtcttactttgagttttctcagaagctgacttcgacacaggaatttgagtgcaagtattttatatgaaaagtaacaacaacaacaacaaaaaccagtatgaatgagtgaaagtgagacaaaaaaagaaaggtagccaataaaatgtgttttaatgggcagttgacatgtaa

SEQ ID NO: 408430 - DNA, 549 bp, Homo sapiens
attttcttaattcttaaaaaagaattgtctacattttaaattcaagtaaatttttttgtccagtatttttcaaaaatatttttaatatttgtttcttggattattttcataatatttgttttcctaatgatgcttctcaattttatttagaaatgagatatctgagtgaatagagtgttattaattagtgcttatgagtatattgttgaagttgaggttgaagaccttttacattaccaaatagaagtagtatgtctaatggttaggtgttgggatttgaagataataccttgggcctgcatcctgggaagctgtgtgaacttaggaaattaatttaatttttctaagcctsagcttatctttctgtaaaatggagatgtcttactttgagttttctcagaagctgacttcgacacaggaatttgagtgcaagtattttatatgaaaagtaacaacaacaacaacaaaaaccagtatgaatgagtgaaagtgagacaaaaaaagaaaggtagccaataaaatgtgttttaatgggcagttgacatgtaa

SEQ ID NO: 408431 - DNA, 410 bp, Homo sapiens
tttttaatgaaaataactgcccattaagatcagatttgaatgtccaaagacaaatcttttgcgtatttagcctcaggttaacgtactatgcatacttgttttcatctatatttaatccagggcctcagcttctttctcctcatctcatttacttgtgcaatacaaacytagaatgcttcaccgatgtatgatgtattaggggtttcatgtataaaaagcatcaacaaatacagttatgctctttaatctgtcgatttttaagtaaggaagtaacataatgaaatttgtttcacagctataactctcatgatcaagtatactgtggttggtggctgggagtaaaggggctttactcccttttcagaagctaaaaggaggttctaaagtccttctagggacttgtaaagtcc

SEQ ID NO: 408432 - DNA, 548 bp, Homo sapiens
tcattttctcccaatctcaattatgtccacgtataccccatatataggttggtgtaaaagtaattgcattttttttgccattacttttaattcccttaaaacttccaccattgcttgtaattatatgtttatatatgtgatgctactgttaatggccttcttctttactctgtgagattcatgaggggaggccttaactgtttttttcaccactgtatcaccaggcttgaccacaatgtctggctcagagtagaaggtaaataagtttaaaatgaaaaaaaaaaaaaaaagaatgaagggaaataatcattaaaagatttccatttgcatacagaagacatactttacttctttcactatgtttgacttcagttgctctgaagtctttgtgttattattgtgaatattarattgtaggtccatttttcttggtccactggagcctgaatcccgtggagtttattcatgttccactcatctttgcaccttcatccccttaaccaaggacctagaatggagtaggtacacaatttttctgactgagtcat

SEQ ID NO: 408433 - DNA, 443 bp, Homo sapiens
aaattattttattttcagttcaaggatacatgtgcaggtttgttacataggtaaacttgtgccatgatggtttgctgcacccatcagcccatctcctagttattaagcccggcatgcattagctatttatcccgatgctctcccttcccctgctctcctctgacaggacccagtgtgtgttgttccctccctgtgtccatgtgttctcaytggtcagctcccacttataagtgagaacatgcagtgtttgtttttctattaaaaagtcaagaaacatgttgatgagtctgtggagaaacaggaatgcttttacactgttggtgggaatgtaaattagttcaaccattgtggaagacagtgtggcaattcctcaaagacatagaggaagaaatatcgtttgatccagcaatcccattatatcccaaaggaatataaattattgt

SEQ ID NO: 408434 - DNA, 496 bp, Homo sapiens
cagtcataaccagaatgagagtaatgattggaaaaatatgtgcctaataaacgttattgaatcactatgccactcttgaaattgtttttgaaatcattgctaaaaactccatcttccttttttattattttttaaattgatagataaaatgatgtgcatttatcacatacaacatgatgttctgaagtatatgtacattgtggaatgactaaatctagctaattaacatatgcatgaactcacatagttacaatttttgtggtgkgaacattcactttcaatagttttcaagaatgcaatgtattgctattaactatagttaaccatgttgtacaatagatctcttgaacttactccttctatctaactgaaatgtagtattctttgaccaacagctcctcaacttcccctcttcccctacaactgccatagcctctggttaccatcattctactctctagttctatgagacaaacatttttagattctgcatgaa

SEQ ID NO: 408435 - DNA, 591 bp, Homo sapiens
gggaaagattggttttatccttgtaattgctttcctaaagacagaaatcatggacagtgacatccagctgaaaatctcttaggtcacttgaggcaagttcagttatcacttgcctcagtcaccagtaacaaaccccttccctcactggggacataggtgagtatattcttcttaattctacagtaaaaacagacaaagtcgatgttttacagaaaacaacaggctttgcccaagaggacttacttttaatttcttgcttaatagcatctatcatctaggaaaggagcacacagatgttggtgttagtgttttagtatcataagtatcattcgcaagaaagaaaaaggctcaagcatctctttacttttcattctatacttccttcacactagagtcatcctctccatgcccatgattccagcgatcacttacaaatgtctactctcaaaactataattatagaccttacttctccattcttggatgyttttagaagtttctggtgcatgaataaacacaattattatttttccttctggtttccacaaggaagcaaatctacatggataataaccaaattggaaagtacta

SEQ ID NO: 408436 - DNA, 595 bp, Homo sapiens
actttttgtttactgtaaaggatattacaaaagagagatgaagacatgtttaaggggaggtcaggggggaggcttgtggagcttccatgctctccctgggtttgtcaccctccagaaacctccacaagttcagctttctggaagctcccaaactgtgtccttttgggattataaggaggcttcattacgtaggcataattgattaaatcattgaccattggcaaccaacttaaccttcagcactagttgaggctgaaagcctcaaccctctaatcatgccttggtctttccagtgaccagccccatcttgaagccatctaggggctgacagccgctagtcaactcattagcatacaraaaggcagttaacattttggagactgcaaggattttaaaagttgtatgcagggagacagggatgaggaacaaatatatatttcacaatatcacaattacctaaactgttcagttttcagcaaaaaaatgtgagtcatacaaagaaacaggaaagcataacccatacaccaggagaaaaagcaaacaaatagcttgtgagagggcccagatttcagatttaatagcaaagacttccaag

SEQ ID NO: 408437 - DNA, 605 bp, Homo sapiens
gcaatctataaaatgaaggataggtctaaatttttttcttaaattccttccatgctaatattgcctgtgagtcacaaggaatcaaaagtttgttaaaaatgtcaattcaggctgggtgcagtggctcacacctgtaatcccagcactttgagaggctgaggtgggtggatcacttgagtctagaagttcaagaccagcctgggaaacatagtggacactctccctcctaaacccccgctcctctacacacacacacacaaattagccaggcatggtagtgcacacctgtggtcctagctactcaggaagctgaggagggaagatcacttgagcctgggaggttgaggctacaatgagccatgattgcatcacggaaaattcactttratttactggcgcatcctacaaaatcttgggaatttagtgttaattcaaattataaccagttttaactaaacttgtgatttaactagaaagttctcctctgaaatggagtcatatgacaatgcaaacatcaaattatctgttccgttgtcattacaattattttgatcaaaaccataaaaattcattcaaaaaggcctcgactatttatgctgagaatt

SEQ ID NO: 408438 - DNA, 547 bp, Homo sapiens
aagcttttttgagggcatggatttttatgttgtttattcatcttggtttttccttgtacatagcagagtgctctgcatttggtaacactgatctcatatataattaacttgtgtgtctctttcttttccaactagcattaaatagtctacctcactatactttttgaatatttcctaagaataaaagcaatatattttccacctataattccactcctcagaaaccaccacattcgcatttaatgttgtgttcctgcagatgttttttcctatgcatatgggctcatttttataaaactctacttaagatttgatgtctacgtatggtcagaacccttaatttctacctaactatgctttattgagtagcttgayttagatcttgtgtttgtgagtaggaaattgtccttcattaatttgctttttgatgatatttaaatgtaattttcagctaaatctcaaaattttagaaagtaaagtctgagaccttaaataattttgcttttatatcagactttaaaaaaaaacagatatgcccaaattgtta

SEQ ID NO: 408439 - DNA, 533 bp, Homo sapiens
catatctcaatcctctgctagtacgatcataaggagatctgtgtttacttggagttgtaattgacagrgggatgtactgaaggagaccttgggaaatcaagcacattaggggattgtactgctctgcaaagctaccttactctactccaaccccactgtttatgttgtggtgtcttgaacacagctgagtcattgcccttctctcccaggcagaatgcccaccttaggggctgctagagtaaacacactttgcttagcaagcaactcctatcaagggaagcctggatatgtctctgaacacgaagcagtactgttctagttcccatatcatttcaacatttccatcccaatttttctcaattgcataatatttcaacttttacattgtttctctcatccctagctaattcaatcatggctaacactgggtgccagaaaatgatgtgcaaaaattctacatagaacactatgaaacgttattgagcaatcttaataaaggaaggatgtatcttgttcattatgggaaggctcaa

SEQ ID NO: 408440 - DNA, 518 bp, Homo sapiens
ttttctatccttccaaccagtcttattaccttctgaaaaagctgtgatcacaagaaatagcctcttttttccttctatcaccagtcaaggccgattctatctaagattagctttcttacatatagatggtgctccaatttgccacagcacccacctctctattgaattacaccctactgactttgctgattggtgttaccagtcaggcctcatggatatttgagtttgtgatccttggtctcttacagcaatgattttcaagctgtgttcctcagaaagtatagccagttggcacacatttatcacccttaccagaaaaaaaaaaaaagattcaaaatgattgtcttcctcaaaactgtccttatgtgaaggagaaggttgtttctggwtttaaagccccatactgcttaatattctgcattgtctgcaaccatctcattttatttaggtaaactaggacaaataataatgataatgaaactgatgataaaacaataacagcagcacctaacacctgc

SEQ ID NO: 408441 - DNA, 591 bp, Homo sapiens
taggcctgtcaccagattctttccttccatagtctgtcttagccataacaaatttcttttatcagtactgttgaaactgagcttcataaaaccttcatctctcagaccacattttccaaatgaaagttccaaagatggaaaagtatattggatggatactagtttaacctattataacatggcattcaaaaatgtgtttttgttrctacatgtaactttttggtagtagtatttttataaattctttgaatgagataaaataccacttgcttggtgctcacaagttgagttccttttcattggttttctgacttttatgatgtagaaaaaatgaccaattgcatagatgattgttcatgttgattctgtgtgaaatttttgaatgcaaaattttactgagatgtaaaaattgggtatgatgaatgaatgaaaaatatctgtattctttcacaagtagttttcctggagcacatcacaataaacttcctgtacactaatcgatatccccaaatctgtttcatggggaaccctatttaaatcattagtaattccgtctttatcatctaattctagaaaattgtcagtatctta

SEQ ID NO: 408442 - DNA, 591 bp, Homo sapiens
taggcctgtcaccagattctttccttccatagtctgtcttagccataacaaatttcttttatcagtactgttgaaactgagcttcataaaaccttcatctctcagaccacattttccaaatgaaagttccaaagatggaaaagtatattggatggatactagtttaacctattataacatggcattcaaaaatgtgtttttgttactacatgtaactttttggtagtagtatttttataaattctttgaatgagataaaataccacttgcttggtgctcacaagttgagttccttttcattggttttctgacttttatgatgtagaaaaaatgaccaattgcatagatgattgttcatgttgattctgtgtgaaatttttgaatgcaaaattttactgagatgtaaaaattgggtatgatgaatgaatgaaaaatatctgtattctttcacragtagttttcctggagcacatcacaataaacttcctgtacactaatcgatatccccaaatctgtttcatggggaaccctatttaaatcattagtaattccgtctttatcatctaattctagaaaattgtcagtatctta

SEQ ID NO: 408443 - DNA, 593 bp, Homo sapiens
aagaggcactgaatccattgccaggagctcatctttcttatatgataagctgtggtctgaggacaaattgtgtacttcagcaccatccacatgttcarctggtcctctttcttcctttccaaagccacgaccttatgcagggattggagataaacacaccacctgtgaccccaagtcactcagttctatctagggctacaaataaagagagggagggagggagggagagagagagagagagagagcgggtgcgggcgagcgcgagcgagcacaagcagagtctttttctggcagtgtgctcactcctgtgtgatacagcagaagctggtcatagtttttgaaaagctgtattaagaagtgaggactcatttgtcgtagatatatttggctgatttgttttattttctatgttgtaaaatccaaatttatagatgtgttcaatatgacataacataattgccatcaacaaatttaaaccagatcagaagtattgagaatatttaatgtcagggaatactcatttccaaatatttacaggggaaagttgtcagttattgtatttacatgtaactttttgtattgacattttgctt

SEQ ID NO: 408444 - DNA, 593 bp, Homo sapiens
aagaggcactgaatccattgccaggagctcatctttcttatatgataagctgtggtctgaggacaaattgtgtacttcagcaccatccacatgttcaactggtcctctttcttcctttccaaagccacgaccttatgcagggattggagataaacacaccacctgtgaccccaagtcactcagttctatctagggctacaaataaagagagggagggagggagggagagagagagagagagagagcgggtgcgggcgagcgcgagcgagcacaagcagagtctttttctggcagtgtgctcactcctgtgtgatacagcagaagctggtcatagtttttgaaaagctgtattaagaagtgaggactcatttgtcgtagatatatttggctgatttgttttattttctatgttgtaaaatccaaatttatagatgtgttcaatatgacataacataattgccrtcaacaaatttaaaccagatcagaagtattgagaatatttaatgtcagggaatactcatttccaaatatttacaggggaaagttgtcagttattgtatttacatgtaactttttgtattgacattttgctt

SEQ ID NO: 408445 - DNA, 541 bp, Homo sapiens
agtgaggactcatttgtcgtagatatatttggctgatttgttttattttctatgttgtaaaatccaaatttatagatgtgttcaatatgacataacataattgccatcaacaaatttaaaccagatcagaagtattgagaatatttaatgtcagggaatactcatttccaaatatttacaggggaaagttgtcagttattgtatttacatgtaactttttgtattgacattttgcttttcaatatagaggcaataaaaaataagtctagtgacaaaaagaatcaaacaataaataggtaaataaaggaaatgtcatagaatattggttaaaatcaccagcttwgaatctagacagaactgcatgtcacttctctgagctttaattttcctcatctgtaaaatacagataaaaattatacctgtttactagtcagggtttgttgttgcaagcttaggccaaaaaaaaaaaaaaaaaaaggaatgtattggaagaagaattcacaggatttgtgagaagtctggtgaattgggtttggaaaat

SEQ ID NO: 408446 - DNA, 559 bp, Homo sapiens
acatgtgatttattgtcaaagtattagaaatagcagatatcttggacactttacatttagtttgagtaccaaaaatatcgagaacgaatctttatatatcactgctgtccaaggacttaacaatttataagctaattcaattcagtaatttgggyagcatcttccaaagatggagaatgggctccttaagaaagctaaaatgaatgaacctgtgtctgagctcaaggtgccttcattttgtaatatctagcatgtaccaatttgagaagacataatttaattgtgaatatatgttacctgaatgtaagtagataggctaaaactgtgttttactgtattgaaaaagagctgagtgatattttattatttattttaaaaatatccatgtggtgttgttgagaacatctatttttaattatgcctatagatagaaacaaaacagtgtcatttatcattaactttctaagatggttatatgttttaaatgtaatttttctcgtctttttctcattctcttcagatagatgattgactgatagatgcatagacagatagatag

SEQ ID NO: 408447 - DNA, 594 bp, Homo sapiens
ttttatttttaatattgttaatttatgtcttctccttttttcttgattagtctagatagaggtttatcagttttcttgcttttttttcaaataactaggttttggtttcattgatttttttctattcaattttgatttctgctctaatttmttttattatttcttttattctgcttactttaggcttaatttcttctctgtccccagacagaaacttaagtcactgattttaggttttttctttatttatgatatatgcattcaatgctatacatttttctttaagtactgcttttactatgatctataaattttgataacttgtatcttaattttcatttagttcaaaacattccttcatttcacttgagttctactttggcccatggtttatttagaaatgtgtttatttttcaaatatttgaatattttccagctatcttttgactattgatttctagtttaattccatcttgtggtctgatagcatacattgtataatatatattcttctaaatttgtaaatgtgtgttttatggccctaaatttggtctattttggtgaatgtttcatgtgaactaggaaataatatgt

SEQ ID NO: 408448 - DNA, 662 bp, Homo sapiens
ctctcaactacctccagttagaactatgtacctaaccgattattattccttattttttcttgattgtgtcataggcatctcaaactgagcacttttgatgaaaactgaactcattatttacagttgcaatcctctttcaatgttctccatctcagatgctcatgctacaatccagaaagtcatccttaacagctcctgcattatatcctcattcaagaatgacctagtcctggtgaatttgatgaataaaattaatctcacatacatctcttctgttatttttttttctatgtctatygctacaaccagcttttgtctgcactgctatgatagtctcctaactggcttcccaacagctacttttacttccctcaaactcattcttcatactgcaactattatgactgtttaggaatacagatattaccgtgttactcacatgttgaaaaccttgcaataagccccctgcacacttagaatcaagtctaaaattatcgccatgacctaaaaggcccttttgagggtacactagacttatgtgtatttctcaaatctgtttttcatatgctgttcccactgcctggaagatagtcccctcaatatttccataatacttgataattctttacatttcaggacagaatcaatatatcactttttca

SEQ ID NO: 408449 - DNA, 559 bp, Homo sapiens
ggcgagccacatttcatggtcagtgaagtcaaaagttcatgtggctcaagagtgaatctttgaaaagtcaaatttctaataatttaatcacaaatgagaatacttaagcagaaatgtggtatctagtgttcacaatgtgaccacaaagaagtcctctgataaagtcatccagtagwagggcacctacagaaatggatggagggaggcattggccaagttgctggcaggagagcaaagtggacttatagaagaatgtcaggaagtccaaagtccagggtgaagtgtaagtttcaagcaacagttgaaactaccccaaagggcttattgctttctggagagtaagaacaataaatagataagttgatctataagtgctaccatagatatatgcccaaagtaacagcagaattatttagatcctgctttgattacattcttaccagcaagaaggatcatcttcaagatggacacgtagacaaggatcattaagaggaaatagatgcccaggttagatgagcaaacaaattgtaaagaaatatctattagctttatatgagta

SEQ ID NO: 408450 - DNA, 559 bp, Homo sapiens
ggcgagccacatttcatggtcagtgaagtcaaaagttcatgtggctcaagagtgaatctttgaaaagtcaaatttctaataatttaatcacaaatgagaatacttaagcagaaatgtggtatctagtgttcacaatgtgaccacaaagaagtcctctgataaagtcatccagtagtagrgcacctacagaaatggatggagggaggcattggccaagttgctggcaggagagcaaagtggacttatagaagaatgtcaggaagtccaaagtccagggtgaagtgtaagtttcaagcaacagttgaaactaccccaaagggcttattgctttctggagagtaagaacaataaatagataagttgatctataagtgctaccatagatatatgcccaaagtaacagcagaattatttagatcctgctttgattacattcttaccagcaagaaggatcatcttcaagatggacacgtagacaaggatcattaagaggaaatagatgcccaggttagatgagcaaacaaattgtaaagaaatatctattagctttatatgagta

SEQ ID NO: 408451 - DNA, 559 bp, Homo sapiens
ggcgagccacatttcatggtcagtgaagtcaaaagttcatgtggctcaagagtgaatctttgaaaagtcaaatttctaataatttaatcacaaatgagaatacttaagcagaaatgtggtatctagtgttcacaatgtgaccacaaagaagtcctctgataaagtcatccagtagtagggcacctacagaaatggatggagggaggcattggccaagttgctggcaggagagcaaagtggacttatagaagaatgtcaggaagtccaaagtccagggtgaagtgtaagtttcaagcaacagttgaaactaccccaaagggcttattgctttctggagagtaagaacaataaatagataagttgatctataagtgctaccatagatatatgcccaaagtaacagcagaattatttagatcctgctttgattacattcttaccagcaagaaggatcatcttcaagatggacasgtagacaaggatcattaagaggaaatagatgcccaggttagatgagcaaacaaattgtaaagaaatatctattagctttatatgagta

SEQ ID NO: 408452 - DNA, 446 bp, Homo sapiens
tggacactagtgtcaaagccgtaggtgctcaagaatgcagaaacttgtgaaccctcagtggaatgtaccacagaaggtggattgctggcgctttagtgctattcacttttttgactgagacagtagagcctttgtttgtttgaatcaatcttcgctgagaattatttctttatcactctctctgtctctctctttccccctctgccagtccttcctgwagctgatactgtagatgctcacccaaatgttctttagtgagctggtgcatctttcccctactagctgggagtgttggctgggtaaattcacagctgctgcttcctccagagagtcattctttgctaaaggaaacaacaccaaacagagatgcctgggaccttaagccccacttcaaggtgtgtcctgcagccaatgactgactcatttgtgggtacaaaaagctgacc

SEQ ID NO: 408453 - DNA, 565 bp, Homo sapiens
gccttaagtgtgccatattcattttaccacaaacatacatgcgcgcgcacacacacacacacacacacacacgcatacatacatgggtatttaccatttgctagtcattattcaaacagctttataaatattaatgtatttctcatgatagccccctaagttagatactagtaytgttatcctcattttacagatgaggaaactgaaactcagaataggtggcacacccaacattacatggctgtcaactggcagtgctggaatgttgagtggaggcattctggccctaaagtcaggccagctcttaactaaggcagaaagttcttggttgggaactcatggacatatcctcttctcagggtatgtaattcatggaccttctcgactttgtactgagtgtccatggtgatggtatttttaccatcaggtagtggtttgaacaatatatttacctcacatccactgtttttagaaaatggaaaatacactgaagacattgtcattggctcaggtgtgctcttgtcttttttatgatatggtgcataaaagaaaggaaacatacctg

SEQ ID NO: 408454 - DNA, 628 bp, Homo sapiens
tccatggtgatggtatttttaccatcaggtagtggtttgaacaatatatttacctcacatccactgtttttagaaaatggaaaatacactgaagacattgtcattggctcaggtgtgctcttgtcttttttatgatatggtgcataaaagaaaggaaacatacctggcatcagcttcaygtttttttctgactttaatgtttctccattgtgcccatgacaattcaggcttgtagcttcatcattggatgaagagtctgtcttattcatctttttatttttagtagttagaacagttcttggctcatagtggaagatcaataaatgttgatttgaagtattgaatgaaattaggtgaaaaccaaagaaaggttaccgttcttaaacctgtgcttctggtttctcacatgggatgaattaatatctctcaattatccatcagaaattaaattctataatgcatcaggaggcatatcatatcttgccaagttcctgtgccatttttctctgtccctggaattttcttgcttattgctgacattttacctattataatattctcaacgaagaaaacagaatagccaatctgctgttaatagcttttgaagtgaatcaatttattgtcatag

SEQ ID NO: 408455 - DNA, 568 bp, Homo sapiens
tcataaacaatctatttggcttcattgtcgcctgataaacatttcccgtcagttcttttgaagcacatactattgacatactttcagataataacagatagcataaataacattttcttagccctcttcttcaaggtctccctgtataataaaatgtaacttttaacatttatatagaatcctcctattattgggaattttattttagctgcaacttctagtaaataaagctgtgtattaagcaaattcaggtatttcaaatgttttcatagtaaccrttgcattttttgtcttctgccatgaaaagccgctgaacagattagtaaatctgtctgaaagccagttcagaagtaatattttatcaagtagaatttgtagagattgacttaactggtcaagttcacattagtgcccccagccccacctcaccagtagttatcagcaaactactgatctatatactcatagaatcctggatctccagactctgtcaatcaatttacctgctttgtattaactacaggctttgtggccagtgttgactatgccaggaattatttactgaatt

SEQ ID NO: 408456 - DNA, 618 bp, Homo sapiens
agtgggagggggagggaggtgaggaagcacaagctactcatgcttcattctgtccctaagaccctagaagacaaagaggattggaatgctcaaaaaagttttagaactgccaaaagtacataaagttagctatagaaatttaaacataagtgatgattgtttgttccagcaacaatgcaggggggatattttcaagttgcttagtaaaatagggggaataaagaagtatgagtttcctcttatayggggaccaatgatcacctccttccactaaccaattaagttagttgactcattattaattaaattatttatttttgaacccctatgatacatatacatcatctgctatgtgccaggttatgtttggtacttggctacattgtcaaatgaaaagaaacacaatgtctcctaacttacagcctagggaacttacagtcagccaccctatgcctctgctctgagttgaaacaaccataccatctttggagtgagtttctcttcattaaagaaactatgatggtcaacaatgggagatggctttttctaccaagaatatgaaacagacattaattaaagtatatgtccagtttgagatatcatttctgcaaaggaaag

SEQ ID NO: 408457 - DNA, 581 bp, Homo sapiens
acctgtacatcctgcacatgtgaccctaagcctaaaagtaaaaaatatataatgttgataatatgaaaatgctatcctgctacatttgctaygtaacttatacataaatataccatatctacacataatatatatgaatatgtacatattgatgggaacaaatatattaaaggtgcatataagtttaatttgttctgtatataacagaatctctcccttttctcttctgtattattttcttctgcattacagatgtattctcagcttcagttctcttcaacatcatgagcccaattttctgtgataccagttatccttactgcttctaatgctgttattagtaatgctattgaatctttagattccttggggacttcccttagtttttacacacctttccttaccttttttactccctctcagctcattctgttttctctaatattaatatattatttttatatattgttccataaactcatattttaattttgttaatgattcaaagcaggtgatttttgaatttttctttagactcctggggaaattattttctgaagttaatttttctcagcacctag

SEQ ID NO: 408458 - DNA, 567 bp, Homo sapiens
caggtttgttacgtgggtaaacttgtgtcatggggtttgttgtacagattgtttaatcacccagctattaagtctagtacccattagttattcttcctaatcttctccctccttctatcctccaccctctgaaaggtaccagtttgtgttgtccctatctctgtgtccatgtattttcattatttagcttctacttttaagtgagaatatgcagtatttgattgtctgttcctatgctrgtttgctaaggataatggtctccaactccatccatatcccctgaaaggacatgatcttattcttcttatggctgcatggtattccatggtgtctatgtactacattttctttatctagtctgtctttgctgggcatttaattacatgatgtttctactgtgaattctgctgcaatgaatagacacatgcatgtgtctttataatagatgaacagatataatgcataatatttttatttattttgggattcaactgtttataagagacgttggtcggaagttttctttcttactatatttttcattttgtaccagagtaatactggctt

SEQ ID NO: 408459 - DNA, 595 bp, Homo sapiens
gtttataagagacgttggtcggaagttttctttcttactatatttttcattttgtaccagagtaatactggcttcatgaaatgagttgggggtgttccctcttatttctgaaagagtttggatggaattgctactgtttcttccttaaatttttggtaaaattcaccwataaagccatctaggcctgaagtttcctttaagggaaggtttataagtataaattcaatttctttaaaatatactgtgctaaaaaggttatctatttcttccttagtgagctttcagtttattacaatgaatgagtcaatttcatctgagttgtccaatttattgacatcaagttcttcataatattatattattgttcttttactaactgtagaatttatcatatttattgttcttagaggactagcttttgatttcatggacttttctctattgtctttctgttttcaatttcgttagttttgctcttatcttcaatatttccttttgctttgagtttagctcttctcttactcatttattaaggtggatgtttagatcattgatttgggatctttcttctttcctgatataagtaatcaatgct

SEQ ID NO: 408460 - DNA, 578 bp, Homo sapiens
taatgttttcagatggcattatcaatggtataaaagacatccccccagaatatatatatatgtgacagcaaaatgtcccatgataatattttatatttgttctgaggaacatgttttggagaataagatataaagatattgctttacatgattcacatatatatctcgaaacaaccactrgtatcataataatgatgaaatactaacaaagtatggccattaatgtcaggaacaaaattgggattcctcactattaccattatttattattgttctctttagctgtaacgaacattattagtcaaaaagttaagaaccccagaaacttaaatgagcattacaaatgttggaaaggagaacatgactaacataatttacacccaacataagacttacattctttctttttttttttgcaacagtctcactctgttacctgggctagaggacagtgttacaatcatgactcactgtagcctcaacctcctgggctcaagcaatcctcccacctcagcctctcaagtagctgggactacaggcatgtcccaccatgctcaactaagttttttaaattttat

SEQ ID NO: 408461 - DNA, 492 bp, Homo sapiens
ggaattggtatttatgaaagacaatttgaatatatatatgcatatataaaatatactcttacccagcaattttttagacaaggatattaagaaaataattggacaagtgtccaacactgtatgtcaggatgttcatcacagcattattatataatagcagaaagataagagacaacataaatgtttaacaatagggaaattgtgaaatgcatagaatacaatatcattttgtcattagaaattatttataaatataytgtggagtgaaaatagcatgtattgtacagtcccatttatttttgaaaaatcatatgcatgtatgcattgaaaaatgttcagaaggtaagcaccaagattttaacatagttatctctatgtgacagaattttggatgatactcaccttcgtctttataattttccattttatattaagagtatttagaaaatacaaataccaacaaaaagatattttccaactattaagccagca

SEQ ID NO: 408462 - DNA, 597 bp, Homo sapiens
gattgtgaatgacgcattacttttcaagattttaaatttgcttaagcacacacatcaagcatacaatcaaaaatacagaacaaagctaaataaaaacacaattggctttcaatcttatgctgtggttcaactgcctttacttggccaatgtttctactttgatagaaatgagcattgcaatattagggccagagagggaatatatttagctgaggtctggagcatcacttaatgaagcagacagtggagggatcagaaagattttgttaytgctgtttgctttttgcctttggcaaacattctagtagtgataacagccatgccatttctccaaaagaaatttgtgactatggctcacattagtttgtattagcatctacagaggacaggtccctgcctgccagtgctgaatactcataaacacagtagcagctgagagaaaccttctaactatttgttactcagtgatactgcctcgggcagggtagaagcaagtctctctaggggaaattgcggatgttactgttttaatttgcaaaccacatttctttggatgatgatgagctttcaaataacctagacaaagcagatcacagt

SEQ ID NO: 408463 - DNA, 576 bp, Homo sapiens
  misc_feature (1)...(576): n = A,T,C or G
gaaaataaagacaacagaaacaaaacagaaacaactaaaacatgaatgaagatcttagccattaagatgaggaaatacgtccatttatgggggagtttagcctgcactatgaaaaggtcccatctccaacagttttcctgggatgtttcaatcctaatcncattcttacaaatacagtttcttgtcatttgtaatactgtgattgcactttacaatttgaatatcattattgctaaaacccacaaagcaaatcagaggttccttggggcattcttaagcaattgaaaacctaaccccaggarttaggcccatataatactgataagctatatttcctacactcatggaatctgcaatatggcaagaaatttcaaaatactaatatgaaggtattttagttaggagagacttgatgctctaaatgagcccagaacaacattttattttgtcttgccatctcacagattcagaactagtcactcggggggaaaaaaggcatgaggaggttatgtacctgaactgagttcatcccaatgtgtccttaaagaacaattaattccaagttgcttgcaacta

SEQ ID NO: 408464 - DNA, 553 bp, Homo sapiens
ggggaaaaaaggcatgaggaggttatgtacctgaactgagttcatcccaatgtgtccttaaagaacaattaattccaagttgcttgcaactagtattttaacttcaaacctgtatttcatcagcacctgcttatycaagccctgtgggtgatactctacttgttaattctaccccagggtgtcagttcttctctgaaatatatgtcacttcctatcttcaaaagtcgactctgtgcacagtcacattacccttcttttccaaaatgtgtcacagcacatgctgcgtctcaaatggttaaattaaaccctgtttcccgtgtcagacaggagaagataagacagtgctcactggggaaaaaaattaccctattgaaccacacatgcagcttctgttggtgtttgtgggggtatgcacaaacacaagagatgaatgtaagccatgccatttcatgagaaattagctttattctagtacaaaaattctacccagagtcaaatataacaatcaatttttcagtgtgtttttcctcaaaagaattttttcaaaataatg

SEQ ID NO: 408465 - DNA, 511 bp, Homo sapiens
tctgtgaatatttactagaaactagctcttttcttagctttaagaataggmaatatttagtagcataaaagacaatattgttttctgcagcattcctttggccttgtcataaaccaagtatccaaagatggattccataatgcatttgtagcatctcacattgctttccaaattactccaaagacagttgctttcaccaaacaaagtcatgccaggagcataagttagttcattcttttccattatctccaccttctatcacttaaaatacaaacaccacttgatcattttccaagtgttcctgttagtattctgctgcttgttaattagatttgtacatttttataggttaaaaaaacttctatgaatatacatggatatgttattagtttacattgatgcttaccactctaatccactagagagaagagtttgcttttcttatggctttggtttacaaatttaaagcataataaagcatatacatttataaattgaatactaaaaccaa

SEQ ID NO: 408466 - DNA, 567 bp, Homo sapiens
acctcagtaaatgttcatatttattataagctttgtatttcataatttttctttttagaaaattattttcaaaggaattgataccacaatctccatagcactaaaattccartatggagctcttattttgagaatgtcatataaactgtcacatggtatgatacctttcatgtctggcttcttttacttagcaaaataattttgatattcattcatattgttgcagtattagtaatttgttgctttttattgctgagtagtattctattgtatggctgttcataatattcaccatattttatccaaatatggaatattttatatgtgcccaaatattcatcatattttgtctaaatatgatggacatatgggttgtttccagtttgagactattgtgaaaatgcttctatgaatatttgcatagacatctttgtgtggacatacgttttcttttgtcagtagtaaacatctaggagtagaattattgggtcatatggtaagtaaatgtttaactttaaaagggatttttctgaagtagctgtatcatttgtattcccaccagcaata

SEQ ID NO: 408467 - DNA, 578 bp, Homo sapiens
tggggttctttactgacactttttccagaggataacagggagaatagtataacctctgtggctggatcccacatactttccgcctgtgggatcttcatgggctgccattttgcctttctaggcccagctgactctcctaaggccatgtttctctgaaattctaatccacaagagtctctgattactcctctctgttcttggggtttcycaaatagtcttctccatccagctgctgctgcagatgggcttctattaccttctattggtcagttgtagcagatctgcctatttttctggtctcagccatccctttcttgtttcaatgccaattaagccatgatactaagaaaagggagaatgggtatgactgtgtctatgtatgaaggtgcatacgtgtttagggagggagaatggaggcttgagataagtgagggagaggagtggcatagtagaagataccatttgagagacagtcagaaaaagactgggaggaggaaagagaggagaagagcctttgatagtatacagcagatcctcaacaaatgataaagcaaaacaataaaaagcaatagaaagaa

SEQ ID NO: 408468 - DNA, 503 bp, Homo sapiens
agttccccattgaaaagaaaatttgtctctaccttagattaggaggtacctaaaggattctgtcttattcactattttctcctagtgcctaggaaatacagtatttccttatgaatgaatggaaattgagatcctgacttttatagaagattgtccaagatttaatttcaaatatcaacaactttaattttatagtcaaacragaaaaggaaaactgtttctcaattttgaggagttctttaaattattgtaaatggaaataaattggtgacttttatatttttaattccaaactcaagataaccataaaaatggtagaaaaaataattagctcaaaatggtagaaaaacaattagttcaaaaggaattttttaaaatcccattataatgacattcttttagccttttttttttttaggatataagttcaccagatcagaccctggtttataagacctataaatgtacaggtaatatgatgcttaactttatgtctccatgac

SEQ ID NO: 408469 - DNA, 600 bp, Homo sapiens
ggaatctatacatacacatatacagtagatgtaattggtgttaatttcaatggtgggatttttaagttagacaacaaacaataaaacttttatttttagctaacagtttgtgggctaatttagtccttgaaatccttccaagcacgatagcttaaatttgccccagatggactttctcttctgttcaaattgctcgacagcaacataacagycatttataacaaagtctgcagaaatgggctggcacttctactcttccaaatacgtttgtctgttcgtaaggagggtgcccccataaatcactatgaattaaagaggaatgcacacgtcccaatcaaaacatcgggaagaaaccattacccaatagataagaacgcaaacaagtgcaaagcatcacttgagtttttatagaaggcccatatttttggaaggcaaccagtgctgtttcacatgctgtactttttctaatctgactgactcacagtcttgtgatagtgagataagctaggtaggcaaatttttatagagttgcaattactgaaattgtcattacgctgctcactgtaaaataaatatagatagaagtgaaattatgcacag

SEQ ID NO: 408470 - DNA, 426 bp, Homo sapiens
taagaagtgcacagaagtgccatctttagaaactaaagtctcattcaactttgaatatttaaaatagattttaaaagagtgacaaatgaaggaaaagactcaagtatttttctatatgtttttctacatggattgtacctcaaggtaactaaaaggaggatgagggaaattttcactttataagtcttcctagaacggaagaagaaatgatgaaataaaaagatcaccacttagcaactcctaacaggataccagagctgcacaatgattagagacctctaacatcacaaagagcaacatcccagtactatgtggctcctgatggaaggacacaccacaccctgtgaagcagcgtgrcttaaaacagaaattaaacctgaatccaatcacgtgtttatatctaattaccaaattacagcaagtata

SEQ ID NO: 408471 - DNA, 586 bp, Homo sapiens
tttcagagtaggccaaaaaaagctactttatcatccatcagaaacccctacaacttgggagaggttgtttccaaggacattatccctgggagggcaccggagggaagatacggattaggaacaagaataagccatatatcttggcagaaccctaagaggcccttcacaaatcaaggctatccaagcacatctaaaaaaaaataaaaaacaatcttccgaacactccactaagaatgtaccagtattcaaacatcattgatttatgaggtattttctttgttcctaacctagttccagagagaggataaaagagaagccctccattgttcagccagtggggaatgttcacttaaaacaattagactcatataagatgacaggttattaaaaggcaaatataagttacaggctatgaataaggagaccatgtcatatattgtacactctgggacacttttaagagacagaggtgaactagccagccaggagtccaagayagcaggcaaatcttgggctgtccaaaataaccaagacatatggtcactctagtgacaagggtataatcatcagagaaggcaggtcgatg

SEQ ID NO: 408472 - DNA, 560 bp, Homo sapiens
ttctcaattcatacaaaaccacattcagatcattaccaatcatcctatacracaaatgctacttttaacgaccccacggtaccatcctctgccccaagatctcccaacagcctaaattcctattccttgtaactcattataaaatttttttaaggtgtccatgcagtccctggtcacgctttaagcagtcccaagaaacatcgcccctacaccaataatccccagtaaaacttatattttctttatcttttattataactttatattttataaataaaaagacaggaatgtcagacctctgagccgaagctcagccattgtaacccctgtgacctgcacatatatgtccagatggcctgcgggagccaagaagtctggggcaacccaaaactacaagagaagtaaaacagccagctcctgtcttaattgactgaccaaccttacaacattccattatgacttgttcctgccctgccccaactgatcgatcaacttcgtgacattcttctgggcaatgagtcttatgatctccctaccatgaaccctgtgactccctcctc

SEQ ID NO: 408473 - DNA, 560 bp, Homo sapiens
ttctcaattcatacaaaaccacattcagatcattaccaatcatcctatacgacaaatgctacttttaacgaccccacggtaccatcctctgccccaagatctcccaacagcctaaattcctattccttgtaactcattataaaatttttttaaggtgtccatgcagtccctggtcacgcyttaagcagtcccaagaaacatcgcccctacaccaataatccccagtaaaacttatattttctttatcttttattataactttatattttataaataaaaagacaggaatgtcagacctctgagccgaagctcagccattgtaacccctgtgacctgcacatatatgtccagatggcctgcgggagccaagaagtctggggcaacccaaaactacaagagaagtaaaacagccagctcctgtcttaattgactgaccaaccttacaacattccattatgacttgttcctgccctgccccaactgatcgatcaacttcgtgacattcttctgggcaatgagtcttatgatctccctaccatgaaccctgtgactccctcctc

SEQ ID NO: 408474 - DNA, 650 bp, Homo sapiens
tgtccatgcagtccctggtcacgctttaagcagtcccaagaaacatcgcccctacaccaataatccccagtaaaacttatattttctttatcttttattataactttatattttataaataaaaagacaggaatgtcagacctctgagccgaagctcagccattgtaacccctgtgacctgcacatatatgtccagatggcctgcgggagccaagaagtctggggcaacccaaaactacaagagaagtaaaacagccagctcctgtcttaattgactgaccaaccttacaacattccattatgacttgttcctgccctgccccaactgatcgatcaacttcgtgacattcttctgggcaatgagtcttatgatctccctaccatgmaccctgtgactccctcctctgctgaaaattgataaccacctttaactgtaactttccactgcttactccagtcctataaaactgccccatccctatctctctttgctgactccttttttggactcagccctcctgcacccaggtgaaataaacagctttattgctcacacaaagcctgcttggtggactctcttcacatggatgtgcgtgacatagatcttccctctgacagagcctacccaaatgaaaaggaacaagaaaacc

SEQ ID NO: 408475 - DNA, 557 bp, Homo sapiens
cttaaagtttaatgctcggaagagacacaatttcaaggtgataaaaatattaattagaagacacataacatgcctcaagtatatcaacacttgactccataaacaaggcataaccatgaaaacaacattccctttattttgggctcccaaaatcaaaagtaagattagaactaatttaatctatcacagatatttagtatactcaataatgcacaatttatttaaaaaaacactaatattgtacaatgtttctgtgttttagtttttcccacagctgttgaaaatttcagcctttatttgaaacatgacctgcatgacagactataagttgtcaatagttatgtttctttggaaaagtacagttgtggcatttactcattttagcagatagctaaaagggaaaaataagaaaaaatatacactggacctgcagttaacttcttgacaatgccaaggataaaaaacagatgaaacaacatttgttgaagatgaaaakgtattgcattgatcttaatagatgttgcgatctctgggtgaggatgctgactgactagact

SEQ ID NO: 408476 - DNA, 587 bp, Homo sapiens
attgccagccactcacaatctgattttttaaatgcttatgatcacagggtcccacagtatgctgtctgcaagctgtggggcaaggaaaaccagtctgagtcccaaaactgaagaacttggagtctaatgttcaaagacaggaagcacccagcaccagagaaagatgtaggttgggaggctaggtcgtctctttctttgagactccttaattgacccatgtgcaatttaggygtgtggtgtttaatttattttttaatatttgttaaggtacgttttatatcctatgtggtttatgttggtgaatgttttatgtaagcttgagaataatttgcattgtttctgtggttagggatgaaacactctataaatgtcaatgagatcattgacattggtgataagttagatcattgatggtgctgttcaggtcaactgtactcttactgattttctgtctatgtgatctacctgtgagtaacagagggtcattgaaatctccaactgtaatagaaatatataattccattagtttcagcttcaagtagtttgacactctcttgttagctgcatacactttaacgattgttatg

SEQ ID NO: 408477 - DNA, 403 bp, Homo sapiens
actttggaactgagtaacaggcagatgttggaatagtttggtgggctcagaagacgacaagaaaacgtaggaaagtttggaacttcctagagacttgttgaatggcttggaccaagatgctgataaaaatatggacaatgaattccagcctaaggtggtctcagacggagatgaggaactatttgggaacaggagcaaaggtgacactcattacgttttagcagagactgctggcatgttgcccaaacactagagatatgtggaactttgaacttgagagagatgatttagggtgtctagcagaacaaatttcttagcagaaaagcacacaagaggtgacttargcagtgttaaaggttaaaggttaaaaacagagcatataaattgagaaaatttgcaacct

SEQ ID NO: 408478 - DNA, 516 bp, Homo sapiens
aaaaaattaaagcagatataatcaaatagagagatattccatgtccacaaatgagaagaatcaatattgttaagatgtcaatattacctgaagtcatctatagattaartgaaatcttcatcaaatttccaaagcaatttttgcagcagtacaaacaaccatcctaaaattcatataaaatctcaagggattccaaaatagctggaacaatctttaacaagaagaataaagttggaatactcttgcatcctgatttcaaaacttaccacaaaggtacagtaatgaaaccaatgtggtatggccataaatgacataaatagagcaataaaatagagtagaaataagccattgcacatatagacaaatgatttttaacaatggtcccaagacaatgcagtggtaagtaagcaccatttaacaaatgatgctggaaaactggatacataaatgtaaaagaaaaaatttgaatcttacattacaccacatacaaaaatgaactcaaaattgatcaaagac

SEQ ID NO: 408479 - DNA, 516 bp, Homo sapiens
aaaaaattaaagcagatataatcaaatagagagatattccatgtccacaaatgagaagaatcaatattgttaagatgtcaatattacctgaagtcatctatagattaaatgaaatcttcatcaaatttccaaagcaatttttgcagcagtacaaacaaccatcctaaaattcatataaaatctcaagggattccaaaatagctggaacaatctttaacaagaagaataaagttggaatactcttgcatcctgatttcaaaacttaccacaaaggtacagtaatsaaaccaatgtggtatggccataaatgacataaatagagcaataaaatagagtagaaataagccattgcacatatagacaaatgatttttaacaatggtcccaagacaatgcagtggtaagtaagcaccatttaacaaatgatgctggaaaactggatacataaatgtaaaagaaaaaatttgaatcttacattacaccacatacaaaaatgaactcaaaattgatcaaagac

SEQ ID NO: 408480 - DNA, 579 bp, Homo sapiens
gaggagtttgtaggaaatttaaccttactaattgctggctacacatagaaaatcaaagacaggcagttgaagatacagtaaaagacataacaaaactggcacatgtgtctgtataagtgtggcacagatttgcccctggggccatgtttgaaaggtacttcccagcactacgaagatttaaaaccctaataataagaattataataataataggaacctgcttactgcacccttgtctactacctatactaattcatgtaataaaaagctgctaccctagttcatcaaaatgcttcagcacaagtgtactatatgaatcactatcagtctatcatacargaagacataagtagtgaaaatgaaagtgagaactcacactaataaagtgagtgagagtctcaaaggggggaaatgagagaagagaaaaactctctcagattgttttatactcaatatgtcttgaaaaaaaaaaaaagaagtgaaacaaaaggcagggagcccagcgctgagaaccagacccaaaccaggcctgggcctgcctggtctaagcctagtagttaaaattcaacccctgaccta

SEQ ID NO: 408481 - DNA, 518 bp, Homo sapiens
ggggtacgtgacaggagctgcatgcaccagtagtcaaagtgaagcagaacagagcaggaagtttcacaatgtccttccatacaatgtctggaatctatagataacatcagtggctaggtcaggggttgaattttaactactaggcttgggccaggcagcccaggcctggtttgggtccagttctcagtgccaggctgcctgccttttgttttgcttccttttttttttaagacagatattgagtrtaaaacaatataaaactatctgagagcgtttttctcttctctcatttcccccctttgagactctcactcactttattagtacattgtctctttgttcccgttggtttcaaagaacttcttgatttctgccttaatttcaatatttaccaggagttattcaggagcaggttgttcaatttccatatagttgtgtggttttgtatgagtttcttaatcctaagtcctaatttgattgcactgttgtcagactgttataatttcagttattttgca

SEQ ID NO: 408482 - DNA, 590 bp, Homo sapiens
tgaaacctttgctcttccttaaatctactttcaagcataccctggaatttgctctgatcatatttgtttaaagaattcacgtggttatcaatgascttccaccttctatgccgttgtcctgacaaccaagcatttactagacagaatatggaaaacaggtaacaatgtgtctctacagtcagggttgtaggcaaaattcgacagtacagagacaatcaaatgactagggtctttgtgtttgaaatccttaaagggaaatacaaacatatatatgtatatatttacacacacacacacacatatatatacatgaataaaagagagtaaagattttacagagaaattaactgggcaaggagaagctgctatgcatgactcacttgtactttaatagcagctatgtttcaagagtcaggtcacaggtaatgttgcacataaggaagaaaggctaagtctgctgttactgttgttcagttacactaataagatgttaggttcttttcctagcctatgtttcaccaaagccagaaatatctcaaacatatgaagaaatggaatacgactatgttcttaaactttttttccaggac

SEQ ID NO: 408483 - DNA, 590 bp, Homo sapiens
tgaaacctttgctcttccttaaatctactttcaagcataccctggaatttgctctgatcatatttgtttaaagaattcacgtggttatcaatgaccttccaccttctatgccgttgtcctgacaaccaagcatttactagacagaatatggaaaacaggtaacaatgtgtctctacagtcagggttgtaggcaaaattcgacagtacagagacaatcaaatgactagggtctttgtgtttgaaatccttaaagggaaatacaaacatatatatgtatatatttacacacacacacayacatatatatacatgaataaaagagagtaaagattttacagagaaattaactgggcaaggagaagctgctatgcatgactcacttgtactttaatagcagctatgtttcaagagtcaggtcacaggtaatgttgcacataaggaagaaaggctaagtctgctgttactgttgttcagttacactaataagatgttaggttcttttcctagcctatgtttcaccaaagccagaaatatctcaaacatatgaagaaatggaatacgactatgttcttaaactttttttccaggac

SEQ ID NO: 408484 - DNA, 540 bp, Homo sapiens
gcataggcgatgaggcaagtggttacattcttgtgaggctttgattagtgctcaccaaatccacagtttacatgtgaaaagaggagtgggggaaagtcatttatgctcagtaaatctacattttacgtaagataaaggaagcatgtgaagttacagcaacccatttgagaacaaaaggatggcagttttttgattttttctttttttgtgtgtgtgtgtgtgactcagttcccaagcttaacttttctctttaacatagtgagtttggggtccaaagattttattttcctttcacacaactttgtccttatagtgaaaaagcagccyaagacaggccataaatgaatggacatggctgtgttctaatggaactttatttacaaaaactggcagcaggcacatttgggctacaggccagggtttcctagggacaatacatagaaaagtatggaagccagaaggggcctggcatactgaaataaagagaatggtaagacgtttggtatggctgaaaactggctgtaggagctatggctgtag

SEQ ID NO: 408485 - DNA, 556 bp, Homo sapiens
agtgtcttgtgggcttgacaaatttgtcttatcagttcagggagaattgatgaaactgaactcttggagcagtccacgtggaaccaaacatggtaccatggtggccgcttcactctgcggcccctaatcatcccctgcttccttcttcagttgcatgtattgggataattaatgcaaggaagtgcaacagaagaagtataattgtcattttataaagaaaatgaaagtggacataacactttataaataagcttaaacaaaaagtgttcaggattcccagtcaagaaactccactagagctagataaataaagcagagtaactatagcatatctatgagggaattaactttaatsggtcttacctgaaaacatgtatagtaaatcctcacttactattgtccataagtgcttggaaactgcaacttgaagcaaaatgatgtttaatgaaaccagggtggcgagaggctaattgacataaacaagagttaagtttctactgcatatttctggtcacaggaaacatcactacacttctaaataaagattccaagcact

SEQ ID NO: 408486 - DNA, 580 bp, Homo sapiens
ataattgtcattttataaagaaaatgaaagtggacataacactttataaataagcttaaacaaaaagtgttcaggattcccagtcaagaaactccactagagctagataaataaagcagagtaactatagcatatctatgagggaattaactttaatgggtcttacctgaaaacatgtatagtaaatcctcacttactattgtccataagtgcttggaaactgcaacttgaagcaaaatgatgtttaatgaaaccagggtggcgagaggctaattgacataaacaagagttaagtttctactgcatatttctggtcacaggaaacatcactacacttctaaataaagattccaagcacttatcatactaaacattgaaataaatgtgagctatacatacatttaagaaagatttatcaaaacaagtaayataattatttacctaatttttggtgaatcaggaatgaaggaagttgtagtggtgatggattaagtcaaggaataaatgtctgccaagcaaaattgtcagagcatccccttaccaccatgcagttcaaaaacaatcataaaaatggtgggct

SEQ ID NO: 408487 - DNA, 499 bp, Homo sapiens
tgctgagtcttccagccttcatctttctcccttgctggatgcttcctgccctcaaacatcagactccaagttcttcagcttttgaactcttagacttgcaccagtgagttgccaggggcctcaggcttcggccacagactgaaggctacactgtcagcttcccaacttttgaggtytggggacttggactggctaccttgctcctcagcttgcagacagcctattgtgggacttcaccttgtgatactgtgagtcaattctcctaattctcctaattcgtgttgtctctgatttctttcctaataaactccccctcatatatacgtacatcctattagttctgtccctttagagaaccttgactaacacacatgtgttcattatttgaatagcatggcaatgaacacatgactgcatgtgtctttttggtataattatctattttcctttgggtatatacccagtaatgggattgctgggtcaagttgtagctctgttt

SEQ ID NO: 408488 - DNA, 499 bp, Homo sapiens
tgctgagtcttccagccttcatctttctcccttgctggatgcttcctgccctcaaacatcagactccaagttcttcagcttttgaactcttagacttgcaccagtgagttgccaggggcctcaggcttcggccacagactgaaggctacactgtcagcttcccaacttttgaggtttggggacttggactggctaccttgctcctcagcttgcagacagcctattgtgggacttcaccttgtgatactgtgagtcaattctcctaattctcctaattygtgttgtctctgatttctttcctaataaactccccctcatatatacgtacatcctattagttctgtccctttagagaaccttgactaacacacatgtgttcattatttgaatagcatggcaatgaacacatgactgcatgtgtctttttggtataattatctattttcctttgggtatatacccagtaatgggattgctgggtcaagttgtagctctgttt

SEQ ID NO: 408489 - DNA, 568 bp, Homo sapiens
gatcttccctgtctggaacttgctgaaaaaaaattctctagaggactctttatctcataggtgttcactcttttttgagaatttgtatactattttattatattgatactttgtcaactgaaaatattattttcataagttataacaagttatcaaatatctgcaattattttgtgtgtaaaacttaaactgcagtacaaatgttgtctgcaaatcatatcctttttaaccttargttatatcaaataatcaggaatatctgcagctgaatcactttacggtagtgccacctgactaagaaaatattctataaacaatacaatcatctgtagtaggttatttcaaggtgaacatagcatatgttttaattcttacttttaagaatgttaatctataatgggtacaaaaatacacttagaaggaataagttctagtgttcaatagcacagtagggtaactgtagatagcaataattattttttttaaatagctggaagagaagaattgtaatgtccccaacacaaagaaaaggtaaatgtttgaaatgataaataacccaattaccctg

SEQ ID NO: 408490 - DNA, 527 bp, Homo sapiens
agcaaagcgaatccagaaaactaaacagaagatccatatgttcttattcattttacaataaatgttccactcttatctgctctacagtttgctttaagtaatatacaaatgacaatttccacytaagcttcattaagctttattaacatagagggttacatctatacttgaaaactagcaaactgagctgtttggaaagggtacttgtttgatttgttatgaatagtagaaggatgaggtgataaagacataaactaacatttcttgagcatctaccctatgctaagtgctacagtagccgtctgatataaagagagtctctaaactgttaaatttgagatctgctctctaatcatataaatatggcattattgtgatctgttaaaactgtacaaacactgattcttaatcatttgatgacacaaaaatctgtgtttaaaactttgctttattattgaatagtaacatgtcaagcctttcccatctccccagttaggcattattcagaaatatctaaaagtaggact

SEQ ID NO: 408491 - DNA, 608 bp, Homo sapiens
atctttatatttaaaatggtgctcttatatacagtttatagttgggacttgctttttttttcaaccccttcctctctgccttttaattagaatttttatacctttacatgtaatgtaatatacttatgcaattaaagcctaatatcttatgtgttttctatttgttctatttgttttttttcctttttcctatgttttttgcattgagaatttttaaattccatttatctccattaatgtcttatgaggcatgactttttgttgtgcttgtgtagttattgatctagtctttaaactatgcttgagaggtaatatgatttacctttggctactttttaaaatgtttacaatttttctctatcactgggtccaagcagtttgattattatatatcattgattgcagtgtggttctctccagtttattacctagaattatcctgatctgtctctccgtgcagcttcatcttggggtgttctcgcacagcaacctttgcctccctraacacctatctttgtttcctcagttcagtaagtctgctgaactcagttcaggttcccaatttttaaactgtggtgtcaaaactctaccagtaagccagggccaag

SEQ ID NO: 408492 - DNA, 449 bp, Homo sapiens
tgtgtgtttgaacaatatggaatccgggcatccaaaaggaaaaggatggctgcgattttcagggaacaagggagataactattgggcctgactgcctaaggggccgaacagaacagagtcatatttctcttcttacaaaagcraataggagaaatatcgctgaattctttttctcagcaaggaacagccctgagaaagagaatgcgttcctagggggaggtctctgaaatggccgctctgggagtgtctgtcttatatggttgtagataaggtatgaaataagcccgggtctcctgtagagtccccaggcttactaggattaggaaattcctgcctagtaaattttagtcagaccagttgtctgctctcaaaccctgtctcctgataagatgttatcaatgataacgcatgcccagtgggacatgaaacttcatcagcaattccaattt

SEQ ID NO: 408493 - DNA, 586 bp, Homo sapiens
atgattataaacatgcttcaaataaataaaaaaatataaaactttggccaagaaatagaacacataaggaaaaactaagtagaaattttagaattgaaaaaaatacccaaaatataaaaatcagtgggtgggctcaagagcagaatgtgagtgacagaaaagaacatgggagctacaagatagaaaaatagaaatcactcaatttgaataacagagaaaacagattagagaataaaaagagagagaaagaaagcctcagaaacctgtgtgtggtaagctgaataatggctcccaaagatattcagcagaatggctccaatccctggaagctgtgaatggaaaaaagagatytggtagatgtgattattctacaactcttcagataaggagaatggcctgcactatccaggtggctcctaaatgtaatcacagtgtccttaaaggagggaggcaaagagcagagataaatctggccgcagaaaagtaagtaggagatacgatgacagaggaaagaaattggagtgatccaaggaagggattgtagtcaaagaatacaggtgcctctagaagctaaagaaagcaaagt

SEQ ID NO: 408494 - DNA, 467 bp, Homo sapiens
actgctctctttttgttagcacttgcctggtataactttgtctattcctttgttttcaacttttatttaccattttgcggagcgtagctcttattaaacagcatagagctacttaatcagactgagaaattcagatcatttgatgtgttcaagtgtatagtgaatgaatttatttcttacatttatttttaaaatatattgtacttycatgttgcttcacgttgcctttccctatctatcattttgaaaactttgttattttccctctaatgattttaaagttatgcatcttatttgtaatcttctaataaatactcatacatttataacatattttttcaagtgtataacatttcatcaaagtctaatctacctctgtctcctccttcctataaaagcattactacacatttcctccatttccccatcttattcctctttactagatcccaactacgtgctaaagt

SEQ ID NO: 408495 - DNA, 487 bp, Homo sapiens
  misc_feature (1)...(487): n = A,T,C or G
acatttttatggagtctaataataatcagaagtagtcccctttatggacttcatttttaaagagtgataattgtccctaattttttgtaatacatgttgaatggagaagtactcaaaattttcattcattgttttgaaactattatattttctgatcagtcaactctaaatgttacttagtatatcgtcttccaatacttctcctaaacaataagtctagatggatttctgggcgtagattgtaacagtgatttataatccaggattttacacatgcttttggagttanactagaagctttagtatgcagcagactctaatggctttgcagcattcctgggagatttctgcaaaagaggtggagggctaaattgaacagcaatatatcaagrgcactttccttttgatcagcatactcatagcaggatttgttttaattagagatatatttaggtttgatgattattacatgtgtttcagaagtgca

SEQ ID NO: 408496 - DNA, 488 bp, Homo sapiens
tctaagaattttacagtttagttcttatgtcattctttgatccattttgagttaatttttgtatatggtttgaggtaagggtgccaattaattcatttgtatgtggcgatccagttatcccagcaccaattgttgaaaagaraccattggatggtcttagcatcttgccaaaaatcagttgaccatagatgtttgggtttatttctggactttcaattttattccattgaactatatgtctagcctcatgcagctacaacagtcttgattactgtggctttctagtaagttttgaaatttaaaaaattgtgaatctttctactttttttttttcaaaattctgtcagctattctcagtcctttgcaattccatatgagttttagaatcagtttgtcaatttctacaaagaagtcatctggtattctgatggtgattacactgaatctgtagatcagtttagggagtattaccatcttaaaatagtctt

SEQ ID NO: 408497 - DNA, 458 bp, Homo sapiens
gaagagctgatttgcagatctgggtaactgagaaaccaagtaaaatttaaacagtcctctaatagttaatattgaagttgggaaacatttatttaaattaaagttttacttataggttttaaaatttatttactttcatcaaaattttatatttatagattacaaactgcatattatgtattatataacatgttacatattatacaattgacatggtttggctttgtgtccccacccaaatctcatcttaaattgtaatcccgtgatccccatgtgtcctgggagggacctggtaggaagtcattgggtcatgggagcagtttcccccrtgctgttctcgggatagtgagttctcatgagatctgatggttttataagcttcttgaatttcctctgctggcactcattctctctcctgccaccctgtgaagaggtgccttctgccataatggtaagtt

SEQ ID NO: 408498 - DNA, 569 bp, Homo sapiens
ctgtggaactttgaacttgagagagataatttaaagtatctggtggaagaaatttctaagcagcaaagtgttcaagaggtgacagagcacaaaagtttggaaaatttgtagcctgacaatgcagtagaaaagaaaaactaattttgagggggataaattcaagcccactgcataaatttccataagtaatgaggagccaaatgttcattgtcaacacaatggggaaagtgtctccagggcatgtcagaggacttcacagtagctcctctcaccacaagcctagaggcctaggagagaaaaatgcttttgtgggctaggtccaggrcccccttctgtgtgcagccttagaacttggtgccttgcatcccagccactccagccatggctaaaaggagtgaaggtacagcttaggccattgcttcagagggtacaagccccgagtgttggcagcttccatgtggtgtttgtcctgcagatatgcaaaaagcaagaactgaggtttgtgaatccctgcctagatttcagaggctgtatgaaaatgtctggatgtccaggcagaagttaactgc

SEQ ID NO: 408499 - DNA, 333 bp, Homo sapiens
gtcataatacttcatctgaatggaacaatgggtttctagaatttttaaagcacttttgttgctgtttatgtgcttagtttaattaaaaccaaatcaatttaaatattktgatatagccactaattctctatcatcatatagtcataacccatgtttcaaaaatatacatgcctaggtttaaatgcatctaggatcactgattctcaacatgactttagaaagtcactccatttgtgctattcaaaatcacaattcaaaataattgtgagtaaaaaaagactcaagcatgtgatagagaaattgattcacattcttgaaagtcttgtttctata

SEQ ID NO: 408500 - DNA, 595 bp, Homo sapiens
atactagctttataaaatgaatagggatgtgttccctcttctattttctgaaagagattacataggattcatgttatttttttctttaaacttttggtagaattctccagtgaaatcacctgggctgggagatttcttctttagggcttttttgtttttagttacgggactcgatttctttaatatctatattagtgtgctagggctgacataaaataccacagactgggtggcttaaacaacagaaatgtatttcctcacagttctggaggttacaagtccaaggtcatggagttggcatatttggtttcttctgaggcctctctctttggcttgcrgatagctgagttctcactatgttttcacgtggtcttttcctcagtgctcaagcatccctggtgtctctctgtgtgtccaaatttcctctttttgtaagaacaccagtcagattggattaggccctaaacacaccctaacagctacattttaatttaaactcttttttatcttaatcactttctttaaaagtcctatctctaatagagtcacgttttgagttcctgggggctaggacttcaacatatgaatttgtggg

SEQ ID NO: 408501 - DNA, 593 bp, Homo sapiens
tgcttataatctactcactttactgctaaaactgtttttaactctactttaaattgctttttggctgaatgtgtgtgtgtgtgtgtgtgtgtgtgtgtgtgtgtgtgtgtgtgtgtctgcccaagaatacagaatatcttgatacatgtaaccatggattgtactgaataaatcagaaatatcaatggcaaatactggcaaataaatctgttcaatatagatgacttatccaaataattaaagaccagaaaacccctactacttattgcacattaattatctgaatagctgtctacttatttcargaaaatgtcaaaattttctttgatgttttctgaagaaaacctaatgtttttaaaaaataccaaagaaactgttacaaagtgaaaagcttagtcaaaacaattttatttatgaaaaatcagcttgactgatttaattttttcctgctgaaatgattctttacatatcaggtagatacagcccaaatctcttgtagaccatcaggaactatgttaacaagcacacattttaatttgaaagttaattcctacagcaaataccatataatttatttgatgttgagaagcctt

SEQ ID NO: 408502 - DNA, 609 bp, Homo sapiens
ttttatttatttatttatttatctaattgaaaaatggttttttaggatcagaatctggacattagaggtattaacattgttttgctcagtgtttctaggcccttcaattagtagaattcaggggaaaaataagatataaaatacattatgagtttttatatgcacatgcaaataatgcaaatttattcaatgcaatgcaaattcattgcattwgtaaatgcaaactcaaagtcaacctttgagttacttttctcctgaactgaatgcaagtctcaagttaactgggaataagaactagagcatcatgtaattttatttgttttatagtccaaaaatgtgtatagacgtacaacactatattgcactttgctttattgtgcttcactgatactgttttttacaaatcgaaggttcgcagcaaccctgtgtctagcaagtttgtcagtgccattttcccaacatcatgtgctcactttgtgtctctgtgtccattttgataattctcactataattcaaacttttcattattattttatagatcatggtgatctgagatcagtgatctttgatgttactactgtaattgttttgagatgcaaagaactgca

SEQ ID NO: 408503 - DNA, 609 bp, Homo sapiens
ttttatttatttatttatttatctaattgaaaaatggttttttaggatcagaatctggacattagaggtattaacattgttttgctcagtgtttctaggcccttcaattagtagaattcaggggaaaaataagatataaaatacattatgagtttttatatgcacatgcaaataatgcaaatttattcaatgcaatgcaaattcattgcatttgtaaatgcaaactcaaagtcaacctttgagttacttttctcctgaactgaatgcaagtctcaagttaactgggaataagaactagagcatcatgtaattttatttgttttatagtccaaaaatgtgtatagacgtacaacaytatattgcactttgctttattgtgcttcactgatactgttttttacaaatcgaaggttcgcagcaaccctgtgtctagcaagtttgtcagtgccattttcccaacatcatgtgctcactttgtgtctctgtgtccattttgataattctcactataattcaaacttttcattattattttatagatcatggtgatctgagatcagtgatctttgatgttactactgtaattgttttgagatgcaaagaactgca

SEQ ID NO: 408504 - DNA, 609 bp, Homo sapiens
ttttatttatttatttatttatctaattgaaaaatggttttttaggatcagaatctggacattagaggtattaacattgttttgctcagtgtttctaggcccttcaattagtagaattcaggggaaaaataagatataaaatacattatgagtttttatatgcacatgcaaataatgcaaatttattcaatgcaatgcaaattcattgcatttgtaaatgcaaactcaaagtcaacctttgagttacttttctcctgaactgaatgcaagtctcaagttaactgggaataagaactagagcatcatgtaattttatttgttttatagtccaaaaatgtgtatagacgtacaacactatattgcactttgctttattgtgcttcactgatactgttttttacaaatcgaaggttcgcrgcaaccctgtgtctagcaagtttgtcagtgccattttcccaacatcatgtgctcactttgtgtctctgtgtccattttgataattctcactataattcaaacttttcattattattttatagatcatggtgatctgagatcagtgatctttgatgttactactgtaattgttttgagatgcaaagaactgca

SEQ ID NO: 408505 - DNA, 559 bp, Homo sapiens
aaggctgcagtgagatatgatcatgtcactgtactccagcctgagagacagagcaagaccatgtctaaaaaaaacaaagaaattgccacagccacctaaccttcagcaatcaccactttgatcagtaagtaactatcaacatggaggcaagactccaaagcagcaaaaagatgatcacttgctgaatgctgaaataattgtcggtatctttttagcaatgaagtcttttaaaattaaggtatgtacatttttaagacataatgttataacacacaatataatatgatataattataacttttgtatgctctgggaaatcaaaacatttgcatgacttgctttattgcagtgctggagtagaccacacaatattgctgaggtatacctgtatataacaatttragaataccagtagtaggctgggtgcggtggctcatgcctgtaatcccagcactttgggaggtcgagacgagcgaatcacttgagatcaggagtttgagaccagtctggtcaacatggtaaaacactgtctctactaaaaatgaaaaaaatgagcctg

SEQ ID NO: 408506 - DNA, 563 bp, Homo sapiens
tggcaatggccgcgttctcagacaccgaactgccagtgatagaccgcatcagacccgcaatgcgtgctctygggaaagctgaccggcgacacacttcgtagcgggacagctgctcctcagacatggcagacagcagggttgtcatcctctgagcctcctctgcatccacggtgggcttcctctccttcttgcgtttcgtacgtcgtctccgtcttttggctgcaggaggagctgaggctgaggcctcactgtgaccttctgtgaggtccatgacatcctcactcctgagctcaccttcctgatccctgggttcttccaagttcccatctaggtcctcaggattccatccttcttgctgcccttcagacctcggggcatggcgagcatctcagcagacacgcctgtttgctgccggtctccatgggtgagattcaagtctgctccgtgacagcagctgtacaggcagaagttccggctggggtggtttgattatggatctgcgatgagaacctttcaaagattttagctgctgtgtttctgctgagccagtttcgccgtaaccg

SEQ ID NO: 408507 - DNA, 563 bp, Homo sapiens
tggcaatggccgcgttctcagacaccgaactgccagtgatagaccgcatcagacccgcaatgcgtgctcttgggaamgctgaccggcgacacacttcgtagcgggacagctgctcctcagacatggcagacagcagggttgtcatcctctgagcctcctctgcatccacggtgggcttcctctccttcttgcgtttcgtacgtcgtctccgtcttttggctgcaggaggagctgaggctgaggcctcactgtgaccttctgtgaggtccatgacatcctcactcctgagctcaccttcctgatccctgggttcttccaagttcccatctaggtcctcaggattccatccttcttgctgcccttcagacctcggggcatggcgagcatctcagcagacacgcctgtttgctgccggtctccatgggtgagattcaagtctgctccgtgacagcagctgtacaggcagaagttccggctggggtggtttgattatggatctgcgatgagaacctttcaaagattttagctgctgtgtttctgctgagccagtttcgccgtaaccg

SEQ ID NO: 408508 - DNA, 563 bp, Homo sapiens
tggcaatggccgcgttctcagacaccgaactgccagtgatagaccgcatcagacccgcaatgcgtgctcttgggaaagctgaccggcgacacacttcgtagcgggacagctgctcctcagacatggcagacagcagggttgtcatcctctgagcctcctctgcatccacggtgggcttcctctccttcttgcgtttcgtacgtcgtctccgtcttttggctgcaggaggagctgaggctgaggcctcactgtgaccttctgtgaggtccatgacatcctcactcctgagctcaccttcctgatccctgggtkcttccaagttcccatctaggtcctcaggattccatccttcttgctgcccttcagacctcggggcatggcgagcatctcagcagacacgcctgtttgctgccggtctccatgggtgagattcaagtctgctccgtgacagcagctgtacaggcagaagttccggctggggtggtttgattatggatctgcgatgagaacctttcaaagattttagctgctgtgtttctgctgagccagtttcgccgtaaccg

SEQ ID NO: 408509 - DNA, 563 bp, Homo sapiens
tggcaatggccgcgttctcagacaccgaactgccagtgatagaccgcatcagacccgcaatgcgtgctcttgggaaagctgaccggcgacacacttcgtagcgggacagctgctcctcagacatggcagacagcagggttgtcatcctctgagcctcctctgcatccacggtgggcttcctctccttcttgcgtttcgtacgtcgtctccgtcttttggctgcaggaggagctgaggctgaggcctcactgtgaccttctgtgaggtccatgacatcctcactcctgagctcaccttcctgatccctgggttcttccaagttcccrtctaggtcctcaggattccatccttcttgctgcccttcagacctcggggcatggcgagcatctcagcagacacgcctgtttgctgccggtctccatgggtgagattcaagtctgctccgtgacagcagctgtacaggcagaagttccggctggggtggtttgattatggatctgcgatgagaacctttcaaagattttagctgctgtgtttctgctgagccagtttcgccgtaaccg

SEQ ID NO: 408510 - DNA, 622 bp, Homo sapiens
ctaaactggctattttggctgtcagctcctgcattgttttatcatgattcttagcttttttccattgggttacaacattctcttttagctcagcaaagtttgtttttatccacgttccgaagcctgcttctgtcatgtcagacatctcatcctcagcccagttctgagcccttgctggggaggtgttgcagtcatttggaggaaaaggggcactcyggatttttgagtactcagcatttttcccttgattctttctcatcttcctgggcttatctacctcagatctttaaggttggtgacctttggatagggtttttgtaatttgttgttgttgttttctgtttgtttgtttttcttttaacagtctggccactgtcccatagggctgctggggtttgctgggggtctgttccagaccctagttgcctcagtttttcccatacctggaggtatcaccagtaaagtctgcaaaacagcaaagatggcagcctgccccttcctctggaagctctgtccccttgtcccaaggggtactgacctgtaactggtccaaatgtgcctgtaggaggtggctggagacctcagttggaaggtgtcacccagtcaggaggaacaggattag

SEQ ID NO: 408511 - DNA, 626 bp, Homo sapiens
gcctgggggtcatctttttgttgttgctgttgttttgagacaagatctcactctgtcacccaggctgtagtctggagtgcgatggcatgatctcagctcactgcaacctctgcttcttagattcaagcaattctcctgcctcagcctcctgagtacctgagattacaggtgtgcaccaccacgcccaggtaatttttgtatttttagtagagatggggtttcaccatgttggccaggctcatctcgaactcctgacctgaagtgatccacttgccttggcttcccaaagtgctgggattacaggtatgagccactgcacccagtcccctggggatcttaataaggygaagattctgattccatagtaggtctgaggtggagcctgaggttctgcatttctgacacatcctcacatgacaatgatgaagctgctggtctgtggacctcactgtgaacagtatggctgttatcttcgagtcaaagtagctaagaggcataattagaaaaaagagtgttagacagaccaagcaagggaggtgctgaccgctgggacaggaggagggaatgatggcaggaaaacgagaaccaattctccatgaaagaaggcttgtgagtaccagcgacac

SEQ ID NO: 408512 - DNA, 525 bp, Homo sapiens
atgcttgtaaagaaatctttcttgtatttaaatatggtatttaatattttggatatttttctgtaccgcaaagaatggattcatggatactttaygaaaaattagatacttataaaatgcttaaatttataaaatttaattttaattaaatgtaatgaatatacatccctaatatttgaataattgtacatagatgtttccttactgtattttcccttggaacatcaatgggaaagaacgaatttcacagtattcaataatattccgctatttaatacaaaccagaacccttttgccactattaaactttagaaaaatacaaacatctatgaaattatttttattatattaaagataatgcagtctataatttttattgctttacacactgatgtaatgatttccatgactatcagttgtgggatcccattcagaatcagcttatcaaatcaatgctaaaattaaccagaatgtgggctttaaatgaagagtataaattgaaactcagaatttgttttaaaatat

SEQ ID NO: 408513 - DNA, 577 bp, Homo sapiens
gctcctctgccctcctgtcatctccatccacccctcccaatctctggtatctatcattttattctccatatccataagataaaggttttagctcccacatgtgcagytgacaaattttatgttgcataaggtgataggcaacgaaatcaagcaaaagtcagtgaaggagctgagtttgttccaatcttccagtgctgaggatatgttaactagagttcaggacttatcaaagaagaatcctagaaatcaggtcaggcctgaaaacagggtagaatcagaggtggaagagatctataaaaaattgtgattcagttggttcatttcttgattagattaagatgatcttctccgactcaggcagtctaccagaatataaggtaaatgtatcgcccagagccacctcaatttttttgtatgatatctgtcattcagaaaaaaattacagatatgtcagagttaagagaaaaaaaagcctatccaaaattcccaggagttattttacatacactttaccataacagattatcatgttaaaaacaataaatgaaaaaatgaaatattccagtggagaactgaa

SEQ ID NO: 408514 - DNA, 552 bp, Homo sapiens
atttataagggtacatgcaatattttgatagattcatacagtgtgtaatgatcaaatcaggttaattagggtatccatcatctcagatgtttatccttttttttgtattgggaagataacaaatgttctagctattttaaaatatacactaagttattgttgactctagtcaccctactgtgcaaataaaaactaaaacgtattccttctatctkactgagtttttatgcccatgaatcaacttgtcttcatccctacctgcttcccagcccccggtaaccatcattctactgcctatctccatgaaatcaacttcttaatctctcatatatgaatgagaatatgtgatacttgtctttctgcccttggcctatttcacttaacataatgtcctccagttctatccatgttgctgcaaacagattttattttccaaaccttaagctttatagatgacttcactttttaaatggctgaataatatcctcttgtgcatgtatacctcattttctttgatttttctttctttctttttaaatagagatgagttct

SEQ ID NO: 408515 - DNA, 552 bp, Homo sapiens
atttataagggtacatgcaatattttgatagattcatacagtgtgtaatgatcaaatcaggttaattagggtatccatcatctcagatgtttatccttttttttgtattgggaagataacaaatgttctagctattttaaaatatacactaagttattgttgactctagtcaccctactgtgcaaataaaaactaaaacgtattccttctatctgrctgagtttttatgcccatgaatcaacttgtcttcatccctacctgcttcccagcccccggtaaccatcattctactgcctatctccatgaaatcaacttcttaatctctcatatatgaatgagaatatgtgatacttgtctttctgcccttggcctatttcacttaacataatgtcctccagttctatccatgttgctgcaaacagattttattttccaaaccttaagctttatagatgacttcactttttaaatggctgaataatatcctcttgtgcatgtatacctcattttctttgatttttctttctttctttttaaatagagatgagttct

SEQ ID NO: 408516 - DNA, 639 bp, Homo sapiens
tctaggatttctcagcatttcagcaaagtaaggcaatttctgtctaaaatatataggcaaagtttttattaaaaatacgagaaattaattaaataacagattatgaccacaatgcagatttaaaaactaaggtatgatgagtgccgttgaccggttcatccagacagttcagagaacagaacatccatgtagatccttcttgtattacagaatacaaaggagcggaaaattttgcctcagtaactgccaggtcattctaattaaagtacctatacattgtaatataattcctccattaaggtaacagccaatcaggtggtacagagtctgtgccattcagtcaagaaattcactcccttaacctagactgtgctggaarttcattgacaaattttgttctttggttctccatttttcttcagaattcatgcagaccacttgacttccttagcagtttcttttgtgggcgtacattaatgtctttggttaagcttcagcttccgtttgcatcaatcctgttgtaatcgtgcctcctgaggcatcttttttgcttcccttgcatcagtttccaaaatcctactttctgcttggtaaggggagtatccattttctttaaagcagtggttttcaaacttgcct

SEQ ID NO: 408517 - DNA, 639 bp, Homo sapiens
tctaggatttctcagcatttcagcaaagtaaggcaatttctgtctaaaatatataggcaaagtttttattaaaaatacgagaaattaattaaataacagattatgaccacaatgcagatttaaaaactaaggtatgatgagtgccgttgaccggttcatccagacagttcagagaacagaacatccatgtagatccttcttgtattacagaatacaaaggagcggaaaattttgcctcagtaactgccaggtcattctaattaaagtacctatacattgtaatataattcctccattaaggtaacagccaatcaggtggtacagagtctgtgccattcagtcaagaaattcactcccttaacctagactgtgctggaaattcattgacaaattttgttctttggttctccatttttcttcagaattcatgcagaccacttgacttccttagcaktttcttttgtgggcgtacattaatgtctttggttaagcttcagcttccgtttgcatcaatcctgttgtaatcgtgcctcctgaggcatcttttttgcttcccttgcatcagtttccaaaatcctactttctgcttggtaaggggagtatccattttctttaaagcagtggttttcaaacttgcct

SEQ ID NO: 408518 - DNA, 639 bp, Homo sapiens
tctaggatttctcagcatttcagcaaagtaaggcaatttctgtctaaaatatataggcaaagtttttattaaaaatacgagaaattaattaaataacagattatgaccacaatgcagatttaaaaactaaggtatgatgagtgccgttgaccggttcatccagacagttcagagaacagaacatccatgtagatccttcttgtattacagaatacaaaggagcggaaaattttgcctcagtaactgccaggtcattctaattaaagtacctatacattgtaatataattcctccattaaggtaacagccaatcaggtggtacagagtctgtgccattcagtcaagaaattcactcccttaacctagactgtgctggaaattcattgacaaattttgttctttggttctccatttttcttcagaattcatgcagaccacttgacttccttagcagtttcttttgtgggcgtayattaatgtctttggttaagcttcagcttccgtttgcatcaatcctgttgtaatcgtgcctcctgaggcatcttttttgcttcccttgcatcagtttccaaaatcctactttctgcttggtaaggggagtatccattttctttaaagcagtggttttcaaacttgcct

SEQ ID NO: 408519 - DNA, 525 bp, Homo sapiens
tttcctcctgctgaaagaaatgggcctttgagaattatgttcaattcagtaagaagaaaataaagttctatttttaaatatctaagtggtttggacttttattatgacaaattttaaagctgctatgcaaagtttccaagtttataacagcctttagtggatttttctatttccaatttatattaaataaaatataatatattaaataaaattatataattaattgtcattcatagcttttgatcaccatgagatagccaatgtttaacctttgaaattaaaaaataataaaaataacttacctaatttattacatatcctaaccactctacccatagaaaattgttgatgtttgaccatgtttgaactagaaaaatggcaatttcatacagtagaacttaatacmtaggcctctggggcactccaggttgaaacctccagaatagatgatgaaaaatgttgttagggtgtgtaggaagatgtgtttagcaagaaacatgtttaagatgaatgtaaaatagaaaa

SEQ ID NO: 408520 - DNA, 521 bp, Homo sapiens
taggactgtgtaaaattcatcagctgtcatggaatactcaacctaagtttaggaagatctctaagatccaaaagaattatatctgcaagtcatctagacagacctaaatgaaactgggggtcctggataggcctggactgaagaagaaacctcccatccagtatttattttcttaagctctaaattcatgaactaaatttctttggatacaggctgtggcttgaaaactttctcctcaggccttattaagtgaattgaatatcctagagagcagacaatttttccaggctagcacattctatcatactctagtagaatcatmaatatatttttccaggaaattgtccatcagcttccctttgatgagacagaccactgcttacctcattatttatcctgccccctgaatacacacacatcaactgtcctgagcacatcctctgttccctgcttttgtgcattgcatatcttatttttcctgcctggattacacttctcttgcatgtttttctggtgatcac

SEQ ID NO: 408521 - DNA, 598 bp, Homo sapiens
tttctttttaagtttctgtattgaccttttcacttggcttgaggcattaagcaaagtgcagaaagatgtactaaagattgcccagcttcccccttgtcatgcaagaacaaagtctaggacactcctctcatttatatcaaccctaagcggtgagttcaggctgatttgcatgccctcctcggttgaggtggtggtcccttaaacacttgatggtctcttatgaccaccactaaagtagacatccatgcttttgggagggaagcatgttaatgcctgccttccayatgaaattgaatcctgatcgtgcccctggaaagatagtgttgtttacaactgatggtgctcctcatgtagaatctacatgagtcttggggcacaggtttaaagtattttcaatgtagtctcttggctagactgtaggctttagggttccaagttcagtttgaataattaagtgtatgccttattttagaggaaccatcagttttcccacactacatgctgtgtggcatttctctgacccactgaatggctgggaaaacacccgctggtattttgggagttgcagccaaccaattctatttccgatagatatttt

SEQ ID NO: 408522 - DNA, 555 bp, Homo sapiens
gtttcaaaagccagaaagctgtagccagaatatactggaagaacaagtctgtaacataaagatctgttaacagtggtgaggcaacactgatagctctgagataaagttgaatctgcagaagtaggtgagaggaatatcctgtgcaatacgtcttaccataagacagccaattttttagcaagagtcagaaaggcatttgtagcttctgcatcatacatacagaatcttttactttgtgtgaaatctatgatagtgaatgcatttctatcatggtgaatgatcatggatgcaggcagaaattgtggcaatctggataatgcatcttgatcagcaatctgatttcagtcagacttgtcagataatgggcctttatcacaggaatctatctgagcaactcaggyaatttgataagtagctgctgtttgtttctacaaacttgtttgtagtcctcaagaatgatgtcattaatctaccagcttgtagttttcccaatggcagaacaaataggccacaaaaaaccacagagtcagtagaaatataaatataaattaagtg

SEQ ID NO: 408523 - DNA, 565 bp, Homo sapiens
gggacattaagagcaaaaaaagtgctagtttaagactagccttcaatttgagaactacctggaacaggaaaatgatactgtgagggatattgtttaagttcccaacagyaaagaatagaatagagcggtgagtatatagaacacagcactataactaggaagtaatatcagggaagaatggttcaatggtgtgtctgaaatcctcaccctgtctgtgctttaaaaacacagtcatcaatcattttgtcactttttgagtagaataacttttcttcctatggtttgagacactgtccacttattatttagtcatcacagaaggacataagccagcaaactctacttttctagaaatagcaagtgatcactgcatacctcatgaagtacaagaaaagatcaaattgcacgtatttttgagtaagtgtaattaatatgccaaatgaacaggcaactgttgtcagaggaaataggatatcctcatcagccattgaccatttcttatatgcacccaatttaaggagagtaggtggaggcagtcccactcaagccacaggaaatgagtttg

SEQ ID NO: 408524 - DNA, 549 bp, Homo sapiens
tagcattaggaaaaatatagtgcagctttaaaatatatatacagacaattcaagagcaaaaatgtgtaatgcccattcttgaggttgactttatctatggatccatctgtatcttcattctgtccataaaagtctcctagttaccacttcccacagttctactctaacactcaatccataggaagcacctgtccagccgacgacctcattgctcatcctctcctaaatggtcaaaatgacaacttccattaggcagaattcttcactttggtgttgaatgggtgtaatcgtaggcagattmatcaccaatctgccattttagaaaatgggattgcccagtttcatcttgagaaatcttaaatccataattatatttgaaaataacttcaaaacctaaaagattccagagattacttgactcaaaccatgaattttatgtttgtgtatttgcctttttctggacatccatgagtgagttcaattagtcaaactccttagctcatgacagagtctatttgtccatgaaggttcctcacatgtataatttta

SEQ ID NO: 408525 - DNA, 561 bp, Homo sapiens
tgtctgctgtaataaacgtgtgtaattattactcaastaagacaatttgaaggagaatatttacaaatgaacaatttttaaaagatgtggatagggcttagggaaaccacaaaggttattttgttacccagggttagaagcagcagagctccttggacctctaggttcaaaaaaataaatgcggatcatggttgctaaaacctaaaaaaaaagagccgtgccaaagtctacacctggagagcagtggcctcggtggaggagcataaccagcttaagctgctacctcaggtctctagggctctactcatttttcttcattcttgtttctttctattcttcagactagataatttcaattggcctatcttgaagtttgccaattctttcttctactagctcaaatctactgtcgagccctcttgtgaaattttcatttcagttatagtatatttcaactccagaatttttgtacatgtttttaaaaaataatttctatctctttattgaaactctttttttaacatataaaattttaatttgctaattattttacaataaaaa

SEQ ID NO: 408526 - DNA, 631 bp, Homo sapiens
gcatacaaatcctaagattttccctttttggaatgtctttttttcaaagattctaattttttacgggaataatcttataacaactttacttatccccattaccccatagtgatactgtgggtataagataatccaggtcagaaaagtagcagacataattgtagttccttctccagctctctacattcatgttctcactccaagtacaactttttgaaatttaacaattgtgctaaatgcttaagattgcttcataatgctttatactgattcaaaaacaaaatgtactggctttcattataagtaacaagaatamattaaaccatttatttacatcatcagaagtagatattttaacatgagccaaaaatgtttaatctttaaagaaatttagttaagtaatttgccttaggttaacctaaaagatatatttgatgacattactcatgacatataggttatatcaaattctcaaataaatttagcaattttattatttaattttatttttgtcaatgttcacttgtttgggattttcccctctctgattttaagagatttacttctggatgtttgttcaatttcctcatttctttttaattctcaggtccacttcagtcagataaactta

SEQ ID NO: 408527 - DNA, 600 bp, Homo sapiens
cctttattttaatgattaagtatcaccacttggcctctgacacagtgagatccaataattttcattgaattttagtttcccaatttaatggcagcagttcacactataatttctgagctgcaaagaagagtgatcatggaggttttcagtgaggctgaagttcccctaacaagtttatttctcatgtttgtggcaataagtatgtcctctggactcttcctatggtggrtgaggaggtcttgcatgataaattcacacttctattcctattttcccaaccctttggattcttttttctactgcacatgaaggcagttctggcatgttaactaattagtgtaggtcaccttttattcgtgtttcagctaaccaactaaacaaactgttagaggcttttctaaccccccaagatgcaatattaaatcaacaatctctgtttagttggcttaaatcaataaatttggcttgtttcaactttatgtattttctaccaatatcccacactcttaacattcattcccacacatattttccatatttctgtctggataaatttttaaatcatataattttgtttagagtgcagcacacctcctcatg

SEQ ID NO: 408528 - DNA, 576 bp, Homo sapiens
tggagtgcaatggctccatctcggctccccgcaacctcctcctcctgggttcaagtgattctcctacctcagcctcccgagtagctgggattacaggcatgcgccaccatgcccggctaattttgtatttttagtagagacagggtttctccatgtcagtcaggctggtctcgaacttccaacctcaggttatccgcctgcctcagtctcccagagtgctaggattacaggtgtgagccagtgcacccagcccagagtgatatcttatctctaaaaataaaaaataaaaagatttccatatttttgtcaatattctctttgttctccttttctaattttctccccactccaaaaaactgaatcaacaaatacactctgtggtattaaaaactgttgcaatcaaatcttttccattaatgttttaataaaatataattttgattcttgtgtagctataaaaagtaatgaaaacttaaaattctggcctgyataagattgctgagattattcaactacatatacatatggaaatttattattttagaaaacttaacatgccaaattaaaatattgcaa

SEQ ID NO: 408529 - DNA, 564 bp, Homo sapiens
tgttagtctgttaagcaaaccaaatgtcctgcataacacctaatgctagaatatgaactttcctcactgctggaattctaaaaacctaatgacctgtcatctcctctattggcagatgatagatggtcatgacagcaaaaaagtaaatgtccagttcctccgctcaaacattggaattgtttcccaggaaccagtgttgtttgcctgtagcataatggacaatatcaagtatggagacaacaccaaagaaattcccatgraaagagtcatagcagctgcaaaacaggctcagctgcatgattttgtcatgtcactcccagaggtgagtacgaagtcagagccattccctatgagagacaaggatggggagaagtagaatgaccagagtgtacaggttgagcatccctaatctgaaaatcccaaatccaaaatgttccaaaattcaaaaatttttgaatgccaacatgattccacaggtggaaaatttcacacttgacctcatgtgatgggtcacagtcaaaatgcagtcaaaactttgtttcatgtacaaaattattaaaaata

SEQ ID NO: 408530 - DNA, 523 bp, Homo sapiens
ggctctagaaggtcaaaggataygcaatttatttcacagtgcccctggactgtcttagttttttaagcaaaagaaatatccttcatcaacatactctttaattttggaaagtattgtattgcccaatgcaatggatgctatttttgttgaatttttttgtacattgagctttagtttagcatagtggggaaacacctgagatttggagctgacctgggcttgcatccaagctttgccacttagtagcttcatagctttgggacaattatcctttctgagattgtctatttcatctgcaaaatgcaagaaaataacgttaaaatgaagaaaacacacttaatagccacacaatgaaagcggccactggtattactgccatcatcattatttcattacttggcaatgtgtaccgtgggtggtgggtaagttacacctgccttactgtctcttactttgccaaacccaagtccagatttcgcgcaatattgactctgcatttttccatccaccaaaagtccctctt

SEQ ID NO: 408531 - DNA, 523 bp, Homo sapiens
ggctctagaaggtcaaaggatatgcaatttatttcacagtgcccctggactgtcttagttttttaagcaaaagaaatatccttcatcaacatactctttaattttggaaagtattgtattgcccaatgcaatggatgctatttttgttgaatttttttgtacattgagctttagtttagcatagtggggaaamacctgagatttggagctgacctgggcttgcatccaagctttgccacttagtagcttcatagctttgggacaattatcctttctgagattgtctatttcatctgcaaaatgcaagaaaataacgttaaaatgaagaaaacacacttaatagccacacaatgaaagcggccactggtattactgccatcatcattatttcattacttggcaatgtgtaccgtgggtggtgggtaagttacacctgccttactgtctcttactttgccaaacccaagtccagatttcgcgcaatattgactctgcatttttccatccaccaaaagtccctctt

SEQ ID NO: 408532 - DNA, 523 bp, Homo sapiens
ggctctagaaggtcaaaggatatgcaatttatttcacagtgcccctggactgtcttagttttttaagcaaaagaaatatccttcatcaacatactctttaattttggaaagtattgtattgcccaatgcaatggatgctatttttgttgaatttttttgtacattgagctttagtttagcatagtggggaaacacctgagatttggagctgacctgggcttgcatccaagctttgccacttagtagcttcatagctttgggacaattatcctttctgagattgtctatttcatctgcaaaatgcaagaaaataacgttaaaatgaagaaaacacacttaatagccacacaawgaaagcggccactggtattactgccatcatcattatttcattacttggcaatgtgtaccgtgggtggtgggtaagttacacctgccttactgtctcttactttgccaaacccaagtccagatttcgcgcaatattgactctgcatttttccatccaccaaaagtccctctt

SEQ ID NO: 408533 - DNA, 523 bp, Homo sapiens
ggctctagaaggtcaaaggatatgcaatttatttcacagtgcccctggactgtcttagttttttaagcaaaagaaatatccttcatcaacatactctttaattttggaaagtattgtattgcccaatgcaatggatgctatttttgttgaatttttttgtacattgagctttagtttagcatagtggggaaacacctgagatttggagctgacctgggcttgcatccaagctttgccacttagtagcttcatagctttgggacaattatcctttctgagattgtctatttcatctgcaaaatgcaagaaaataacgttaaaatgaagaaaacacacttaatagccacacaatgaaagcggccrctggtattactgccatcatcattatttcattacttggcaatgtgtaccgtgggtggtgggtaagttacacctgccttactgtctcttactttgccaaacccaagtccagatttcgcgcaatattgactctgcatttttccatccaccaaaagtccctctt

SEQ ID NO: 408534 - DNA, 577 bp, Homo sapiens
tactgtacgtaatttttaatctagcctaggcaacatagcaagacctcgtctctattaaaaataaaaattaaaaaaattaaccgagcatgatggtgcatgcctatggtcccagytactcaggaggctgaggttggaagatcgcttgagcccaggaggtggaggattcagtgagccatgattgcaccactgcactccatcctgggcaatggagtgagaccctgtctcaacaaatttttttttttttttaatcttttgtcacttttcattaagttgtgagaatgttctcatgtcactagataaaagacatgattttaatgtatgaataatgttctaccactatagatatggatttttaatcattttttaaaaccattagaaatagtattgagaaagcattcttgaacttaaatctttgttggtaacctttatttcttaaaagatagataaccgtaaaagtgactttgaaggtagagagttattttaagatattctggatatatatagccaaattattttctatgaagatttcagctacttgtaccctgacaaactatgtatttgagtggtttcattttat

SEQ ID NO: 408535 - DNA, 568 bp, Homo sapiens
aggttcactattatgtatcctccatagttcctggaagtgttgggcatacaatacaaacttaataaaaataaagttaattccacttaactttcttgattaccaaatatttaacctgtctcccccttgctaccttcacttgcttccatgctatagatgcaaaacatagctgtggtcactgagctaaatattgatgatagcagtgastttgatcaaaagccatgttacctcaaaacttatcctaaacacaagtaagaggttatagcaggaagtgtcaggttaaaagaatctgcaggctagaatatggctggaaacttatttactgcaatactaacaaccagttgtgccaatgagttgatcaccttttctaaagagaaaagagactgaggatgtggtttggggtgtgggctgtatcaggtacttttttatgacccagatatgataccagaagacagagcactactggatgagggggaggtgggtgcaaactctgctatgggagcccatgccacttcagtaaataaattaagctttgttctctcttgaggaatctcattcttcctgtttatcc

SEQ ID NO: 408536 - DNA, 519 bp, Homo sapiens
ttaatagttggcctgggttggagcatgaccttgaggaaggcacctgatttctctggttttgaaagtctgtctcctaaaaataaagtatggagatgtcatagtgaagagataagtctttgggggttgaataatgttctattagagtaagttcagtagaatttattgaaatattggtgagcactactgtaaaacagagaccagaagtgaagcagaggttcaagtccatactgtagcctggcctgttctgttgyccctggacccgtgtgtatatacatctggagccactgttggtcccacctagaccctgcatgtatgtgtggggtataagtcaaagaggatgcagtatttcaatgtcatttctgaaaaggtagctgatttatatggcagtcatcatagaatctaaatgaaagcattcattcttactgatttttacctcttgtaaatgaagaaacaaaagacagtgtaggccaactattaatacaatggctcaagcctgcaatcccagcactgtgggaggct

SEQ ID NO: 408537 - DNA, 551 bp, Homo sapiens
  misc_feature (1)...(551): n = A,T,C or G
gagggcaccctgtccactcgaacttaggttcagtcaaacagccctctgagtacttgttaaaaatcatccgctgggctgggcgtggtagctcacgcctgtaagcctagcactttgggaggccgaggcaggtggatcacaaggtcaggagatcaagaccatcctggctaacacagtgaaaccccgtctctagtaaaaacacaaaaaattagccaggcgcggtggcgggcacctgtagtcccagctactcaggaggctgaggcaggagaatggtgcgaacctgggaggcggagcttgcagtgagctgagatcgtgccactgcactccagcstgggcaacagagcgagactccatctcaaaaaaaanaaaaaaatcatcccttttgtcttcttactcaaattctttaatctgtaagtcagctcctctcacaactcttctgaaatggttctactgaaaaacacgagttctttcattttgcctctctgtagcattttacacaattgataattcattcatgtgtattcatccattcactcattcattccgggatgtct

SEQ ID NO: 408538 - DNA, 618 bp, Homo sapiens
gaactcatagtttcccattttattcaatgcattataatttattactagtattatctttatggcaaagttgccatagcatkttattattgctacaaaagacaatcaatcatattttccatgaaatatactcactgaatgatggttcaacacacgaggcaaagagcgatgtctttggagaaagcacttaaagtagaacattagcaaattttactgcttgactaaaacaagaatgagctaactcgatctggctgggggcctgttaggactgttccttctcactgtggcctgactaaaaaccagcggcattaagaaagcatcatatttcccacggcctgtgggtgccccagtgaggtggttctgctctcataagctcttttatgagaccagtttttccaagtactggttcagaaaatacgctcagagctggcagaatggttcagaaagcttcttgaaggccctttgtttctcggtctgactttcagtttgtaccagctactttaagcagtttcagcttcccaaggttactagcaacttctacttttcctaatatatttgattttccatggcattggttgtgatagtagtagcctcccaattaaccgcacctccacttcatac

SEQ ID NO: 408539 - DNA, 618 bp, Homo sapiens
gaactcatagtttcccattttattcaatgcattataatttattactagtattatctttatggcaaagttgccatagcatgttattattgctacaaaagacaatcaatcatattttccatgaaatatactcactgaatgatggttcaacacacgaggcaaagagsgatgtctttggagaaagcacttaaagtagaacattagcaaattttactgcttgactaaaacaagaatgagctaactcgatctggctgggggcctgttaggactgttccttctcactgtggcctgactaaaaaccagcggcattaagaaagcatcatatttcccacggcctgtgggtgccccagtgaggtggttctgctctcataagctcttttatgagaccagtttttccaagtactggttcagaaaatacgctcagagctggcagaatggttcagaaagcttcttgaaggccctttgtttctcggtctgactttcagtttgtaccagctactttaagcagtttcagcttcccaaggttactagcaacttctacttttcctaatatatttgattttccatggcattggttgtgatagtagtagcctcccaattaaccgcacctccacttcatac

SEQ ID NO: 408540 - DNA, 548 bp, Homo sapiens
agggattaaaagtcagtgcatgtcacttccttggtccagaaccttttttagcatattaaaaaatttttttaatttttaatttttgtgggtatatagtaggtgtatatatttacagggcagggtccagaatctttaaaaccactggaatattctgagatcgggttgcctatcaaaatatatatgcatcaccaatttcacacaggccaagacaattgcttggagaaggcattttaagttgtattagctatggtggcagtagaatggaaagaaaaaaaatgsaaaagggctagagaattaagcacaatgtctttacaagcttgtttctgactattttaatgagggaatgaaaatttcacatctcagtgtgagattagctctgctctctctactccccttgcatgtggtactttttcagcttgaaccgagataaagcacctccctttgagagatgagaagaaatcattctaagtggggtgtgccttgctgcctctgccttgggaaaacatccaggtcatttcatttctatttagcaggaatcctgaaaggat

SEQ ID NO: 408541 - DNA, 349 bp, Homo sapiens
cagccagatagtacatggtgtctccacaaaactaggcattctggagattgcccagaaagggatgtgaggggaccgttaagatctgtcttgcttatctcatgcactcacattccttcagcctcctggagttcctgataaaaggaagccagggtgtkgacattttttagctattgatttcccaatagcttgtggatcagttgtacacccacacttccttctctgcctaattccgtttttctggaaaaagtagtatgcccatgtatgtgtgtttttcttaacacaggtccatgaaagtttggcttcctggtttgatgtctgttgcgtggcctggaaaccagggagcagcaac

SEQ ID NO: 408542 - DNA, 565 bp, Homo sapiens
tcttggaatatattcagtaggcatttccattgagggttatgacagacaatgatgaaggcaaatctgtggccagcataattcaagatacrgtgaaggaggacatggggttttgaatgaggggtacctgccacctaaaatgcattcagtaaatacttgcagactgaataaataaataaatgggctgggtgcagtggctcatgcctgtaatcctagcattttgggaggccaagatgggaggattgcttgaggccaggagtttgagaccagcctgttcaacaaagcacaacccatctctattttcataaacaaatttttttaaataaatgaaagatagttaagggtttttaaaaattattatatctacattatgagaagaaggcctttattgtccttggaggtatgcatttccagaccccttacttaagagctcctggaatgtggttctgcttgacagagttctgtattagcacttggataccagaggcagcaccacaatcaagctgccaggccagagaatgtttcctttccaaactcagctgccctcttgcacttaatctaattgggt

SEQ ID NO: 408543 - DNA, 511 bp, Homo sapiens
cacacacaatattaaatgttttaaataatagcaaattaatgctcactgagttaattttttaaacttaaaatcaactataaaatgatgccaagcctataaatctgcttccatttattgtttctatatctaccagttggctaaaagaagcttctgttcattcaagttggaaggaaaaactgctcaggaaaatgtatacagatagtgagaagaataagccttgtcttactttattatgtagtagcataagtaaataggccagggatttgtatggctggcatagaaatagacttcatttatactactgtgctttttttctagataaccaattgcttcatgggaaaatgktctcttcctttaacataactatttcttatgagaggtcagccttatttcatgctagtttagttttttcttttttttttttttaagttagcacaatagtccctaaatatactttaaagtagcacaatagtccctaagtaatgagaaaaataatttcacaatttagact

SEQ ID NO: 408544 - DNA, 475 bp, Homo sapiens
aattacaagtaaatatgtgctccaaggatgagtaatctttttctcaaagttaaacaagttagtccatcactgaatttatgaagactttaaataccataaatcttcaaaagagaaatacactatgatmtgtttcccaaattgaagtgagcatggaattctcagtgcttgaacaacatctctcaagacaagcattcctcaggcaacaggaaaatctcgtttacagaggtaacaaacagaaaattcagaatcaacctagatcaagaaatatgtaggctctgtttgaaaaaaactgcaaagcttgtctgagacacatatttgatctggatatatgaagagatattttatgcttctaaatattataaaagatatgccaaacaaacgttggcagttaggaagttaatatgataaatgaaatatcaaatcaatgttcaagaggtagattattctctaaacagtgccgaaatccaaaataaat

SEQ ID NO: 408545 - DNA, 615 bp, Homo sapiens
tatatcccagagaaggcagtgctcagctcagtacctggcacaaaatagaaactcaataaaccctggttggtttgaaatgaaaggtatgtaagtatggtggtggtggtcatggtggagttgtgtgaatgataatgggtcggggggtctgttttcccctttttaatgctgagaaagctgaaggccctattctgtgtactgagcagaaagaagagctggttgtctctagctatccttggggattagagagaaattattcagccagtctttcrgaaatgaaaattttgacaaacgacaaacttcttcctcacatcctggttggggaggagcactcacagaataaaaaacaatagacaacctgaggctgccctaaaaacagcacattggtagggcaatcactcccctcagctgaagacccaaagagagcaagaatcttcactgaacagtctgataaagaccagtgtataaacccagtgaggaattcatcaacatggtaccaaatcagccctcttccatgaatcttcttaaatactgtcttcactaatttggtactgagaaaaccctaaaaatgagtaccagcactcaatcagctgaaattctgagatgctcaactcataa

SEQ ID NO: 408546 - DNA, 328 bp, Homo sapiens
ctcggcctcccaaagtgctaggattacaggcatgagccaccatgcccagctatgataggcattctctaagagaacgctgagtgaaaaagaagttaggtttaggtttggttgttaggttaagtgagacacacaggaaataacagaacacatgaaagcacaggaaccgtttattacttccagatagagagaacagggcagcattcccttccrgggcagctggaagggaaaattcatctgggacgattacaggcagccagctggaggtgagcaagagagagaaacagggagtgaccagagggccaaagcgtctactggggttcagcgcatg

SEQ ID NO: 408547 - DNA, 504 bp, Homo sapiens
ttttggggagtcctggtcagatattttgtagactgcccctctactggaaatttatttatttatttatttttgagatagagycttgctgtgtcacccaggctgtgtgttcagtagctcgatcttggctcactgcaaccccttcctcccgggttcaaatgattatcctgcctcagcctctcaagtagctggaataacaggtgtacaccaccacacccctgatgacttatgtatttttagtagagacagtgtttcaccatgttggccaggctggtctcgaacccctgacctcaagtgatctgcctgcctcagtctcccaaagtgctgggattacacgtgtgagccaccaccaccgggaatctattggaaattcagtgctgtttttctcatgattagactggagtttttgggttagcaagggaagaccacagaggtcatcattgttttcataatatggtatcaggagtgcatgctgtcatcatgactgatcgctgttgatgttgactt

SEQ ID NO: 408548 - DNA, 559 bp, Homo sapiens
ggaataatattaaagggtagtggggttctttttattctaaatgttctaaatttgttttaaatttgattctaactygattgttttgattactgcatagtgctgtgtatatactcaaaatcactaggtttaaatggctaattatatggtatgtgaatttaaatggttaattgtatgatgtgaaaatttaaatagttaattgtatgatatgtaaatttaagtggttaattgtatagcatgtgaatttaaatggttaattgtatggtatgtggatttaaatggttaattgcatgttatgtgaattatatgtcaataaagctattacaaaaaaaaaggaaagaaaaaaggccatgggcttagacaaatggaggggcaggcagagggagaaagcccagtgacagccttctgcagcctgcaggcacaaagaggattacttggttttccccccaaaatatgtgcaggcttcatgcagacttttccaagcccagccataaatgtattccccttcctctccaaacccctgtcatgctatcttctatcaactactacttgttaccgagct

SEQ ID NO: 408549 - DNA, 549 bp, Homo sapiens
gatgattcaattcctgagtgggacagactgggatggcttgagatttcatcatgctacttagaatggcatgcaatttaaaacttatgaattatttctggaagtttccatttaacgtatttggactgtggaaagcaagatggtggataaaggaggacacttgtaaatcaagttaaagataggcaaaacattgaacatacgctttctcaaaaaatatgcaattggaatgaaaagcatgaaaagatgctacacagcatttgccattaggaagtgcaaattaaaacaagttactactacatttatggcaatggctaagttccaaaaaaacgaccacaccatttgatgagaggatgcagagcaacagggactctcattcatttttggcaggaatgcaaaatggcacaaccacttcagaagacaatctggcagcctctcacaaagctaaacatagcattaccatatgatccagcaatcacactcctaggtatttagccaactgttttgaaaactgaagtccacacacacaktctgcacatgaatggtaacatatgc

SEQ ID NO: 408550 - DNA, 640 bp, Homo sapiens
tggccccaaatcctaacaatcactggtgagtgacaccaacaggctttggccataaactctagtctgcatgaatgcaagttgtagatacttccaaaattatatctgaatgcagatcataaggttccaaagggattgtgtgaaccaccatttttgcagttcatacatacctactattgtttggttcccaatttcaaatttttcctttctggggtaattttatgtataagagctagcaatattcttggattgcaacatgcatcatccaatatccaaacaacccaaccagatgttgtgcttattccttaattacagcaggtagacagtgacaagggtatcgtttggatgtttcacccctccaaacctcacrttgatatttgtttcccagtgttggaggtggggcctaatggcaggtgttcaggctatggagtggatccctcatgaataccgcaatgccctccctaggggtgagtgagttctcgctttattagttcccaggaaagctagttgttaaaaagagctggacatctcccctgaccaccccttggcttctctgttgccatgtaatctctgcacacgctggttccaatttgtcttccaccatgaatggaagcagcctcaagcccatacccagaagcaaatg

SEQ ID NO: 408551 - DNA, 608 bp, Homo sapiens
gctttttgtaataaatcttgctactgctcaccytttgggtccacagtgcttttatgagctgtaacactcaccacgaaggtctgccccttcactcctgaagccagcgagaccaggagcccagcaggaggaaggaacaactccagacgcgctgccttaagagctgtaacactcactgcgacggtctgcagcttcactcctgagccagcgagaccacgaacccaccagaaggaagaaactccaaacacatctgaacatcagaaggaacaaactccagatgcgccaccttaagagctgtaacactcaccgcgaggtcccctgctccattcttgaagtcagtgagaccaagaacccaccaattccgcacacactaggaggaatggtgtcccttcattgatcatcaaagaactaataagaaaaactagagggaaaaaagaatgggatttgaacagtagctaaccccggcattaaaacaggttgttggacccccaaccctgaccggctgaatgggaaaatccaaggatgaggcgcagcaatccatattcccaaggtcacctagtggttctgatgcattgtctagtgcattgaactaggctatgggtggatctaaa

SEQ ID NO: 408552 - DNA, 608 bp, Homo sapiens
gctttttgtaataaatcttgctactgctcaccttttgggtccacagtgcttttatgagctgtaacactcaccacgaaggtctgccccttcactcctgaagccagcgagaccaggagcccagcaggaggaaggaacaactccagacgcrctgccttaagagctgtaacactcactgcgacggtctgcagcttcactcctgagccagcgagaccacgaacccaccagaaggaagaaactccaaacacatctgaacatcagaaggaacaaactccagatgcgccaccttaagagctgtaacactcaccgcgaggtcccctgctccattcttgaagtcagtgagaccaagaacccaccaattccgcacacactaggaggaatggtgtcccttcattgatcatcaaagaactaataagaaaaactagagggaaaaaagaatgggatttgaacagtagctaaccccggcattaaaacaggttgttggacccccaaccctgaccggctgaatgggaaaatccaaggatgaggcgcagcaatccatattcccaaggtcacctagtggttctgatgcattgtctagtgcattgaactaggctatgggtggatctaaa

SEQ ID NO: 408553 - DNA, 531 bp, Homo sapiens
ttacacttcagtaataataaaatcagtgagtcaaaaacgtatatagcaatacataccctacattaaaatgtgtatgtaacagaccaggcatcgtggctcacgcctgtaatcccagcactttgggaggcggcagtgggtggataacctgaggttgggagttcccgaccagcctggcctgaacatgatgaaaccccgtctctactaaagatacaaaaaatagccgggcatagtggtgggcacctgtaatcctgctactcaggaggctgaggcaggagaattgcttgaaccccggkggcggaggttgcagtgagccgagatcacgccactgcactccagcctgggcaccaagagtgagacaatgtctcaaaaaaaaaaagtgtatgtaataaattacataggcaattctcaagcctaaatattagtaattcattttctccccagtcaggctaaagtggtttctctaattagcttatttaattttggaggatacatagtgtttattgtgttatttatgtttttctggaaaagtgc

SEQ ID NO: 408554 - DNA, 564 bp, Homo sapiens
aaacctcctttttattcaaggtacagctgagaatattggtgtaggtacaaagtatacagttttcactcttcactttctttgtgatagaacatcacagtggttaagagaaagctatggagagaaaattcttgtcttaaatgaagaatctttctaactcagacagtgtggtwtttgcacaaagatagagaaataaaccagttaaaaaaaaataaaagaagaaagctcacaaatatatacatgtatatatataagcaaatatttataagaaagatcaatgaaataaagattaattcttcaataaatattctagaaattttgtatttctataggagggtaaatagaatatggcctttgacttcatattacgcgtaaaatcaatgtcaggttgatcatagacctaactataaaaacaagtgaatagaatattcagaatgtaatttagaaaataatttcctgaccatgatgtaaggtaagatggcttaaaccaaacctagaaagtactttttgtataatataaaagatattctaatgtagttgatgtgagcaaggaaatggagacagatt

SEQ ID NO: 408555 - DNA, 542 bp, Homo sapiens
catgcaaagacaatcacattacractgtcttcccaccagtagtgtttgacactgttaattttcacatgaatctgtgtttgagataggtgggatgtatgcagtaacatcaatggaatgcactactttctcagcaattgctcattctcagtgtatagtcattgcagctcatttgctgtattctgctctatcattgaggaaacatgcttaaatattgtttctgactagctattagagacagtaaaattattagtgggctaccaaatatcataatttacctgaggagagttgcttttataaactgtgattcaagaagtccatggaatagggagatagaaatggcaaaaagttacttgaaagtatgcacaggggtgatagctttctaaaaactttcagaaagttatattttgcaaatttctgctctaatcttacaaatatgatcaatgttccctataagctgcatgccaaaatcaattcttaaatccataaaacttggttatattttcctattgttctttcacccttaatcatttggatatttatca

SEQ ID NO: 408556 - DNA, 542 bp, Homo sapiens
catgcaaagacaatcacattacaactgtcttcccaccagtagtgtttgacactgttaattttcacatgaatctgtgtttgagataggtgggatgtatgcagtaacatcaatggaatgcactactttctcwgcaattgctcattctcagtgtatagtcattgcagctcatttgctgtattctgctctatcattgaggaaacatgcttaaatattgtttctgactagctattagagacagtaaaattattagtgggctaccaaatatcataatttacctgaggagagttgcttttataaactgtgattcaagaagtccatggaatagggagatagaaatggcaaaaagttacttgaaagtatgcacaggggtgatagctttctaaaaactttcagaaagttatattttgcaaatttctgctctaatcttacaaatatgatcaatgttccctataagctgcatgccaaaatcaattcttaaatccataaaacttggttatattttcctattgttctttcacccttaatcatttggatatttatca

SEQ ID NO: 408557 - DNA, 594 bp, Homo sapiens
tagaatgctttgctctgcccacttgcaacactgacaaactctacttctgggcacttggagattggaacgggcttagctgttccctgatgaatatacttaagaagaaattcatatcgttcgtaatttaggatgttgactgaaattgcacctagagttgcaggcttcaggaaggctcaattaastttacagtgtgtcctgatctcaaatatatgacccatgaatccactgggaaccattctctattcaggctaccgtgggcagacagggtagtggggccttactacatgatatggtgtaagactttgggatgtttgcgatgacagatttcttagaatttgggtggtcaggccagcatctgtaaaatcaggtcagaggtacagcagtcggttgtgggaaatcatatattccaggctatcagagagtaatgtctggggacttggtgcccaacactgtgtcctgtgacatcaatgttagcacagtcttatgtctgtcacctgctctgtcttcatcctgagcactcactgaccagagctcattgaccctcatttgctaaatggagatgggtcttttcttgtccagttctacttgcagcct

SEQ ID NO: 408558 - DNA, 486 bp, Homo sapiens
taatgaaatacgtatttcattatggaatataagggtacctggttgtgatatggggaataaaagacaaattctgaaccttggtgaattaagaaatggaataaaaaaggaatctgagaaaaagatgaagttcaagttsttatgctcttgggaagatggccttacacagtggacaccaacagtacctcaggtagccctctttgctgaaagatgtaactggggtctggggtggtgccctcagtctgcacctcaagtaaccaaaagggcaagactcagggttaatgcacttggatgagcatgagatttgaccataccatgtggaagccgtgtataattgaattttctgtaaatgttaatatgaaatatccgggctcttaacagtgtagaacctctttctaggacacagctgctgaaggctaagtgagaggcaggaaaggggacccacttctgactttggtacttggaagggccttcatggagtatgagtac

SEQ ID NO: 408559 - DNA, 580 bp, Homo sapiens
ttctctttttttacaccaagacagcccacctgctaccaagactatacttttttgtggttttagggcttggtgctggttaatgtaatttcatgatgtggctgttaacagaatacgtggtcccaaataattcctcatggagtctctaaaatgaaaagagcttaattatcacaggatttttcaaaggcttgaaggtacagatgtgtttttaaatcttaaggaaggaaaatctgtaaccaaacaagaaaaaaaatatcttaagtgcctaaatatgatttattttccctattactcccgtttctccatattcacttctactgtccagagtcatgtcttccaaagagtctttggtgggattccgcagatacaggactagacgttgtctgaaatgggtctttctgtgaggcacaggcatctatctttaaagaagtggttactgacactcacacaggcaactgggtaatgaggagcrtgagggggaagaagaaaagagtaggagagccctggaacttgatgatgtctacctgaagaaggtgcccctggatttggaatgctgactagataaaggaagcagctttgcatt

SEQ ID NO: 408560 - DNA, 580 bp, Homo sapiens
ttctctttttttacaccaagacagcccacctgctaccaagactatacttttttgtggttttagggcttggtgctggttaatgtaatttcatgatgtggctgttaacagaatacgtggtcccaaataattcctcatggagtctctaaaatgaaaagagcttaattatcacaggatttttcaaaggcttgaaggtacagatgtgtttttaaatcttaaggaaggaaaatctgtaaccaaacaagaaaaaaaatatcttaagtgcctaaatatgatttattttccctattactcccgtttctccatattcacttctactgtccagagtcatgtcttccaaagagtctttggtgggattccgcagatacaggactagacgttgtctgaaatgggtctttctgtgaggcacaggcatctatctttaaagaagtggttactgacactcacacaggcaactgggtaatgaggagcatgakggggaagaagaaaagagtaggagagccctggaacttgatgatgtctacctgaagaaggtgcccctggatttggaatgctgactagataaaggaagcagctttgcatt

SEQ ID NO: 408561 - DNA, 513 bp, Homo sapiens
atgtcttccaaagagtctttggtgggattccgcagatacaggactagacgttgtctgaaatgggtctttctgtgaggcacaggcatctatctttaaagaagtggttactgacactcacacaggcaactgggtaatgaggagcatgagggggaagaagaaaagagtaggagagccctggaacttgatgatgtctacctgaagaaggtgcccctggatttggaatgctgactagataaaggaagcagctttgcattctttctatgtgcctgttcattcgcggagcccaagtttgtgtttgtgttcattctggtgtttgtttgcawgttcttttctatcacagtaatacctttaaaatagtattttcatttttataatgttagatttatagaaagctgcaaaaaggattcagtgagtttcatatgctcttcagcttcctgtaatgttaatatctgacatagccatagtatatttatgaaagctgagacactgatggtaaaaatagctattaactga

SEQ ID NO: 408562 - DNA, 555 bp, Homo sapiens
gtctatccctatataagtaccataatgtcttgattaccattattttcaagtaagtttcagaatccggaagtgtgagttgagtactccaacttttttttctagattgtcttggctgttctggatcccttatatttccatatgaatttaaaaatcagcttgtcaattaatgcaaagaaaagcagctggaatttgataaggattgcattgaattatgggtccatttggaaaatattgccatcttaactatattaagcctcctgatcaatgagcatgggatattttttttctattagctcttctttaattttttcaataatgttttgaagttttctgtgtacacatcttaggattattttgttaagtatattcctgtaatcccaacaatctgggaggccgaggcaggcagatcatgaggtcaagagattgagaccaccctggkcagcatagtgaaaacctgtttctactaaaaatacaaaaaattagctgggcatagtggcgtgcagctgtagttccagctacttgggaggctgaggcaggaggtggaggttgcagtga

SEQ ID NO: 408563 - DNA, 656 bp, Homo sapiens
taatacaaaccacttcagtgctcctctttcagcattcaattagaaataaacacagtacatttagttcttggattggcrtatattactgtaggagttgtcttaatcttgaaacattgaataacagagaagcaatttaaaaataatcatacctagaaatttcctaatttaacactagagaatttagattggaaaagtattacctatgatgattacaggtttggaagcatcataatgaaactcaaaatatcaaggacttttttctaaattatgacagtgaaacacattataaattaaaagatgggtaagagaacccagtggaaagataaattcaaattatgaatagaaagaactaaaaaaataatattttatgcctggctaaaatattattcaaaagtgaggacatttgcaaaggcatagctattaatactttcccacactgcccacctctaagaaatttattaaaggagttccttagggagaagaaaagtgaacaaaatagaaggtgagagatttatgcaacattaccaaacatgtgcattgataaatatgccagctaattgaattaatcattgttatttgaaataacctctatatgtttaaaataactcctttcccttcaccacgaaaaaataattgtcaccaggtagaatgtagtg

SEQ ID NO: 408564 - DNA, 575 bp, Homo sapiens
cttcgtagtaggtttatagaaatcaggcagtgtgagtgctccacctttattccttttcttcaacactgttttggctattcagggttccttgagatgccaaataagttttagaataagtttttctatttctgyaaaaaacagaacaaaacaaaaaagaaacaggcattttgatttttatagggattgcattttatctgtagatggcttagggtagatttgacattttaacaattttaattattccaatccattaacatgggatatgttttcatttacacatgctgatttaattttttcatttgtattttatagttttcatagtacaagcctttacctagttaagtttatgtctaagtattttatttgttctgctgtcactgtaaacgggattattttcttagttgtcttttcagacatttcattgttactgtatagaaagacaactgattttttatgtgttcatttcatattctactattttgctcaatttatttattggttctaagtttttctatggaatctttgagactttctgtatgtaagattatattatcttttaataaataatttgactt

SEQ ID NO: 408565 - DNA, 646 bp, Homo sapiens
tattggtttgtagttttcttgtaatatttttgtttagctttagtgtcagggtaatgttggtctcgtagaatgagttagaagtgttcattctttttcagttagtgaaaacagtgataaggattggtgttaattctttaaatatttggcaaaatttaccagtaaaaacatcaggtccaggggttttcttgtttggaaaacttttaattactgattcaatcttcttactgtatatatctattgagatttcctcttactttgtgatttcgtgttgtaattttgtgtgtctagacatttgtctgtttggtctagactatccaatttgtgacatacaaattgttcatagtattctcttataatctttttacratttaagtagaatagcttatttctcaattttcatttctgattttagtaatttgagtcattcttctttttccttacttaatctagctgaagctttgtcaattttgtagactttttttcttttcttgttatactttaagttctggggtccatgtgcagaatgtgcagttttgttacataggtatacacgtgccatggtggtttgctgcacccatcaacccgtcacctacattaggtatttctcctaatgctcttcctcccccaggctcccactcactgacag

SEQ ID NO: 408566 - DNA, 646 bp, Homo sapiens
tattggtttgtagttttcttgtaatatttttgtttagctttagtgtcagggtaatgttggtctcgtagaatgagttagaagtgttcattctttttcagttagtgaaaacagtgataaggattggtgttaattctttaaatatttggcaaaatttaccagtaaaaacatcaggtccaggggttttcttgtttggaaaacttttaattactgattcaatcttcttactgtatatatctattgagatttcctcttactttgtgatttcgtgttgtaattttgtgtgtctagacatttgtctgtttggtctagactatccaatttgtgacatacaaattgttcatagtattctcttataatctttttacaatttaagtagaatagcttayttctcaattttcatttctgattttagtaatttgagtcattcttctttttccttacttaatctagctgaagctttgtcaattttgtagactttttttcttttcttgttatactttaagttctggggtccatgtgcagaatgtgcagttttgttacataggtatacacgtgccatggtggtttgctgcacccatcaacccgtcacctacattaggtatttctcctaatgctcttcctcccccaggctcccactcactgacag

SEQ ID NO: 408567 - DNA, 574 bp, Homo sapiens
atacctctccccaaattaaaaaaggtaatatctataaaagcataaatacaattttcatatatctaccccataataaatgaatayatatataacaacagaatgttgatcagattcagttgtcccataataattaaattttaaactattaaattgagggctagaaaatctgataagcgattagaagattaaaatatacaggcagaggcatttggagtttttatgatgaaaaggatacatagaaagaaaactataaatggagaaatattttacataaattgaaataagctgtggagtagtgattttaagatttatgatataactgacaagtaataaggccaacaaaatattcaaaaattcatcttcctatcctgttttaataatatgacttttgattatattcattttgtaaaatcattacagaagataaacctggtttaaaacaacccaacctatgctatatattataaattgataaatcattacattaattcccaagaaaatacaactaaagtgaactctataaaaagaagtgtatttacttgtgaagaaaatataagcaaaaaaagagtatata

SEQ ID NO: 408568 - DNA, 444 bp, Homo sapiens
gaacaagatctcattctcttttatgttccatggtgtatatgtactacattttatttatttatttatttatttatttatttatttatttatttattttgagacagagtttcactcttgttgcccaagctggagtgcaatggtgcgatctcggctcatcacaacctctgcctctcgggttcaagtgattctcctgcctcagcctcccaagtagctgggattacaggcatgtgccaccatgcccagtgaattttgtattttaagtagagtatatgatagttctgctgatgttttgtttattgggcagacatatcttcaataagagtttttggaaaactcatcaaattcgatgaatayattttcttcataacccatttggaattattcctaataaaatgataaaatatgtaaaaaaaaaaaaaaaaaagtagagacagggtttctccg

SEQ ID NO: 408569 - DNA, 574 bp, Homo sapiens
tcacgctttttacatagattattcaagcactttaattgtctacattagttattcttgtaacatttcaattgaatttaccaccttccttctaaatgatgtatttcaaggttattaaccatgtgcttcacttggattcctgttattcttttaattttgacaaaattcttagggaaaatcagatttgtcatatagttactcaaaatctgttttggggggggatattctcagagtttcatattaccataagcgattcctgtcattgatttaagacacaaggtgaatgaaactctagaatggataatacatggtaaattcaatgaagaaatacaatgaaaaatgatgtttaagtgagaatagataactaaggaccaaggggcagttgggaacagatgaacaagtagatataggcagtggtattaattgcagcaccatttgtgctgccagtgatttggagacaagstgattttccatcactgaggtaaatgggatagatgagcactaagaagtattaggcaacagttagaagccataatagatataagagaacaataagaatgaattataaagatacagt

SEQ ID NO: 408570 - DNA, 610 bp, Homo sapiens
tctcacttatatgtggaatctatagcaatcaaactcataggagcaaagagtttaatggttttacagagactgagggaagggagagtcgggaattgatgatcaaagaatatrcaatctcagacaagaggaatacaggttttttgagatctatcccgcaatatggtaaatatagttaataatattgttttgtacatttcaaaattgctaatagagtaaatttaaaatgttctccccacaaaaataatatttacttgaagtaatatatatatgttaattaactggatttaattattccatatcatactaatggatcatagcatcactttgtaccccataaatatacaattataaagtgccaatttacaataaaattaaaaaatagtatctaaggctctcaaccctttccttttaaaagatcctagacttttaaaaggacaatcttaatcacccccacttcaaatatttgaagccagtagtaaatttaatatattgtagctcaataaatcctagaagtagctccaccaaagattagatgacaacatctcccagcatcagtaacctgatgaaaaaagttacttgtattttgggggataaatattattcacttcaa

SEQ ID NO: 408571 - DNA, 309 bp, Homo sapiens
ttggtttgaagagtacacagttcagaaactgggtgtttcatgggagtcaataacttaatgggttgttgacatcaggtatgaagagacgattctcttcagtccttagaaagggtggatgctattgacttatgtgatttggtagaaaagctattagtaaaaaaatgatgtccactatcagaagtccctatcagtccttttaaagaagcaacttagagagggcagacrgtaggatctcttctaggaagaaaatgaggaaaacaagcaaacaaaacaaaaaataatgtctagctttgattatattcagtttta

SEQ ID NO: 408572 - DNA, 627 bp, Homo sapiens
aattacaagttaatgttatataaatatcacctcaataaattatcatcaaacacacactagagaatttaaagctattttttcggtcctcattcagtgagtgtgggctccatgaataaatttttccttaaatcctctttcccgaggacatctataatatatatattttttcctttcaactttgatacaatttcaatttttagtattagctctctgaagaggataagaaaaagatagacaatatcagctgatgtatggaatttttcagagatttgtatggagagtcaactgaaagttacaaatgaacatattaatatatggatattgagcatatcttgattttaaaacgtttaatcaatcagggttaactattacagaaatttctggcttaaacatagtttaaactgaattatctgtatacttagttttcataactaaaatatagtgtctatattaaatatttatagcagtttggtcttaacaataaataaatcagtaacagatatgccttctgcttytgtcctaacaacttggaggaaaagagccagtaaaattgaggcattgctctgatgcatgagagcctgacatggtaagagaccataaaccatgctgcagtaggcatatcacatt

SEQ ID NO: 408573 - DNA, 524 bp, Homo sapiens
aaactaatattatgaactttctgatgagatataatagaaagcacacaaattacacattacattttcccaaatatgtttaatttcaatgttattagctaacaatcagggaaactcacatttgacacgttctatgagacaactgacttggggccttcaaaaatataaatgtgataaaaacaaaaaaggtagaatactcttctatattaaaggagattaaatatctagacaatgatatgttactggtcatatttgactgagtcttcagtcaaaaatgcatctaaaataccttttgrgatatttggataacttaaaattatggactttaaaataaattattgtcttgttaatgctaaatttctgggttgcaataatgatattgtggttaaagagataaagcaaatgaggcaaactattaaccaattataaaacaaagtgaagggtggatgtatgtttctagtactattttcagttgtaaaattttcaaaataaaacacaagaatcttttctagttttgtaaatgtttg

SEQ ID NO: 408574 - DNA, 556 bp, Homo sapiens
ctgattattaacaacttttatttctatttttttctcaacatttaaaatagtttttggtttaaaatagatgttcttccagaccttgtcttttgcaggaacatggatggagctggaggccattatccttagcaaactaactcagaaacagaaaactaaatactgcatgttttcaattaaaagtgggagctaaattatgagaacccacgaacacaaggaaggaaacaacagactctgaggtctacttgggggtggagggtgggaagaaggagagaagcaggaaaaagaactattgggtactgggattaatacctgggtgatgaaataatttgtacaaacccctgtgacatgaattcactgatgtagcaaaacttcacatgttcccctgaacctaaaagttgaaaaaaaaagatgttcttatactatctttaaaaattattgtaacaggagtaaatattttatattcccaaacaaaagaaaccttgctgcaaatacctcatttgcaacacttggtaataaagttattcatyttgttgaatttaaaaatttacaaaacatt

SEQ ID NO: 408575 - DNA, 622 bp, Homo sapiens
ccagtcagcacagactcccccattctaagacagctacccatttccagggcccctcttttagtcagagcttttctttcgtcagtcaataaatyttctatctgccttactcattctccagtgtctgtgtacctcttggtcacaggacaagaacccagaactcaccgagctgagagcagtgggaataaaagagctgtaaccctccttcccacttgctgaactacaggcatgtaaaagctgctggatgccactcccttctactggctgaattacgagagtgaaggagcaaaaagcctcctgggcgccacttcctcccgctcaccaaacttactggagtcacaattctagacagggggatatttaactatcttaaacataaggaagtataaagtcaaatcatgtgctgtagccatctttatggggataaatgacggtaaaatatcatgaaaattatatatacattaaatatgtacaataaatatataagtaatacaataaaatcaaacacacatacatgcggtgtttgcatgcttctcccttttggcaactctggcttcgtaaggcaatctaaaagtcagcttctttaccttgctactttcccaaagatagtcatgaaactgaagca

SEQ ID NO: 408576 - DNA, 500 bp, Homo sapiens
aagaaaagcacaaaaaactctttttttttgtatgcaactgttctttgactttaaacagtcatgcaatcttgcaattaagccctagatatacctgttgtggttagaagcacttccattcaactttagcgggactgacactataaacaatcagtgaaaattactcaagattcttaaagtttaacaccaaaatctttctkgttaactgggagcatactttggaggaatcaacaaagctgactcatactgaatagcaatactgccatctcaatgcagggaaacttcttttgacagcataaaacaaaattccttcatcagtacttttcatataaaattatctttcaaaaaagtcaataataatatgaaatgtacatgtcataaatgtgaacaatattaataactgccatatataaactggaagacatgtaagaacatttataatatgaaagaatgagtcagtggatgttaaaaagtttaacttgggtttttgagaatgtcaatgg

SEQ ID NO: 408577 - DNA, 500 bp, Homo sapiens
aagaaaagcacaaaaaactctttttttttgtatgcaactgttctttgactttaaacagtcatgcaatcttgcaattaagccctagatatacctgttgtggttagaagcacttccattcaactttagcgggactgacactataaacaatcagtgaaaattactcaagattcttaaagtttaacaccaaaatctttctggttaactgggagcatactttggaggaatcaacaaagctgactcatactgaatagcaatactgccatctcaatgcagggaaacttcttttgacagcataaaacaaaattccttcatcagtacttttcawataaaattatctttcaaaaaagtcaataataatatgaaatgtacatgtcataaatgtgaacaatattaataactgccatatataaactggaagacatgtaagaacatttataatatgaaagaatgagtcagtggatgttaaaaagtttaacttgggtttttgagaatgtcaatgg

SEQ ID NO: 408578 - DNA, 598 bp, Homo sapiens
atttctcattattaaatagcaatttttttaaattgagactttagggcacttaaaactgtaattttttatttcctatgttaaaagttttcttatatatgtagcacactcatcaaaatatattacaaaattaaataataaatttaaattattttaatatctttgataacatattgtcatcattacggtcatagtaaattgaaatctaagaaaatttttttggtgaattaatgtagtgtctacatakgcctactctgtgtctggcactctgctacattgtgtgggtaaatttaatccttaccagaatcttatgaaataggtctttttacagatggaaacactaacaaatgacttaaccaaggtttagagttaatatctgtgaatttccatgaggaaaattttttctaaacacagattctttcatattgcaaaaacacacacattactttgttaagttaaaaataactacgactgacttaaaatttcatagactattgcagatttttcttaaaatttatttttgaaaatttaccatctttatattatagaattttctatgaggactgtatctgctgttcaagaaaattccttcttgcttctt

SEQ ID NO: 408579 - DNA, 571 bp, Homo sapiens
gaaaattttttctaaacacagattctttcatattgcaaaaacacacacattactttgttaagttaaaaataactacgactgacttaaaatttcatagactattgyagatttttcttaaaatttatttttgaaaatttaccatctttatattatagaattttctatgaggactgtatctgctgttcaagaaaattccttcttgcttcttatgcctaattgtgactcgttaagggaagaaaaagaggtaacatcagaatctgtcttagtgacttgagggtgaggaggaaggttgaggaaatggaaaatttgagaaacaagggtatgttatttcctgttttcaaacttctatttagtatcataagttcaaaaataaaacaatttcaaagcatgaagatggaaaatatatttgtttcttcttgagatatatagaagcatgatttttcaacttgggataagaaggtaatatatattacctccatatatacatatatatatatatatatacacacacacacacacacacacgtatatatatatatatattttattttctctaaaaagtgttgagtaa

SEQ ID NO: 408580 - DNA, 448 bp, Homo sapiens
aaaaataaagcagcaaacatacaagaataactwttgtaaaaattgcaaattttattaacaaccctaagtctgaaacaatgggatacacattaggatttaaagataacaacacatttatacttagattttataacatacttctttgacttgttagaaaagtatctctatgtttattttggatattttccagagatctgacttaccaaaactttcacctgtatttatttatttttgttggttttttttccctttttaatcataatcttcaagagacactttatggatgtaattagaagagtagacctataaagagagaggattgctcacctcattctcctcacagccctttggcaatccagagagacaatagaaagtaacatatacaccatttttatacctaccacacacattctctggagagttcaagaagaaaagcaaaataagacct

SEQ ID NO: 408581 - DNA, 708 bp, Homo sapiens
gacactggagtatagctgcacatcatagctgccatccacagccttgcaaacaatgttcaattcctctgcctatctggcacaggtgcttacggctgccatagacaccaggcccaggccctcttgtggcactgttaatctccatccagctcagccacctgccaggttaggtcccacttagagactcacacccccagataatagccctgccaccaccacttcatgtatatcccttgttggtcacctcccctaactctgtagtctccctcctttagggtactgcratggccaagaagttcctgaatgtatggaaccaagtcaaaacctacagtgtcccagtccacatgtggaaagaagcttttgttatcccactgttgccagtggctgtatctttcttctggctccacattcattcactttgcccagccatttgacagagtgtgcacccaccacagtgggaaccaccacccaaaatggagggtatggtcaccaggcagaggctgcccatttacctcatatgccactgagcttcagagtctatggcctgagacagaggaatgatccatatgcagtcccagtggggtcagagtctactccctcaaagcagacatgggcctcagtttcacagagctgatgaccagccaaggctaacatattacagagctgtgccccattcccatgtgcagtgctgataactatcctccactccag

SEQ ID NO: 408582 - DNA, 553 bp, Homo sapiens
tatattctataggttttgacaaatatatgacatgtgtccaccattacaatatcatacagaatagttttaatgccctaaaagtcccctgtgctccacctattcatttctccttcttcccttccccattcaaccctgagagccactgatttttgtttcatgtcttcgtattttttcttttagagaatgtcatatagttaattagaattgtatggactgtaccctttccagattggcttctttcacttagcaatgtrcattttagtttcttctatgcctttttgtaacttgatagctcatatctttttattattgaataatattctactgtgtgtacatttctcagtttaccattaagctattgaagtacatcaaataaatgccttcctacgtatattataataaaattgctgaaaatcaagcataaagaaagaaatcttcaaagcagccagagaaaaatggcatttgaaataagataatgttttgaataaatgcagattcctgtgactgtaacaacagcttgaaagtgctgaaaaacagaaatgtctttctacaa

SEQ ID NO: 408583 - DNA, 378 bp, Homo sapiens
aatagcttgacatattcttattagtttatacctaataaaataatcatttaaatcaaaagtaacacaatgagaatgctcatttaagtacgtagmaatgaacagtgctaacagataatcactgctatctgttgatctcaagcaatggatgaataaaacaaataaatagtatgtgttaaacaaatgcattcaaaaatacaagaaatattgtgagcagcacaaaatatttatattaatttagatatttattactttttagtggcatgttctctattctccattatattttaaacatctcaaaactggttttgtcatgcaatttataaccaagtgtacctaattcactgaatttaggaaaactattctctttcttacctctaa

SEQ ID NO: 408584 - DNA, 526 bp, Homo sapiens
gctggaactacaggtgcaggacgacgcgcgcgactaatttttgtatttttagtagagacagggtttctctatgttggtcaggctggtctcgaactcctgacctcaggtgatctgcctgcctcagcatcccaaagtgctrggattacagtcataagccaccacgcccatcccaaaataagtattttttactgaagaattttcaataatacatgtagatatccctcatctaggagctggtttgaattccaacctcctgtctcttgaggatagacttgatttaagactctctttcaaagaatagattagacaaaggggaaaatagtaactttaccatggcaaactttggcaaacactgtattgtctaagtgatgaaggttaacatcattagtgatgtcatgtacataacatgtactttctgatataatgtgacaagaacattttacattgtatacgataacaggtactaatcaacatttaatgcatttctcctggctaattgcattgctatattcaccactacaagcca

SEQ ID NO: 408585 - DNA, 526 bp, Homo sapiens
gctggaactacaggtgcaggacgacgcgcgcgactaatttttgtatttttagtagagacagggtttctctatgttggtcaggctggtctcgaactcctgacctcaggtgatctgcctgcctcagcatcccaaagtgctaggattacagtcatragccaccacgcccatcccaaaataagtattttttactgaagaattttcaataatacatgtagatatccctcatctaggagctggtttgaattccaacctcctgtctcttgaggatagacttgatttaagactctctttcaaagaatagattagacaaaggggaaaatagtaactttaccatggcaaactttggcaaacactgtattgtctaagtgatgaaggttaacatcattagtgatgtcatgtacataacatgtactttctgatataatgtgacaagaacattttacattgtatacgataacaggtactaatcaacatttaatgcatttctcctggctaattgcattgctatattcaccactacaagcca

SEQ ID NO: 408586 - DNA, 370 bp, Homo sapiens
atatctttccaaaaagaaagatatttgattgagttagaacaaattgattataactcrattttcaactaataaaatcaatttatcagcactgctgctggctgatttacatgtatatgacgattagacattaaaaaaattattttaaagattttctattactttattagaagcaatatttagccataataaaactagaggtaattagaatattttctatgatccaaatatcttatagattcaaatattttatagcatatggacttacctctttatatatttacatccacatatgtaattattgctttatgaaatattccagcattaaactatgcatatgttgtttgccctctttcaatgttgtctgcttttg

SEQ ID NO: 408587 - DNA, 555 bp, Homo sapiens
tacatttcaagtgttgcaggaaggtaggaaattccatcaaaatcacctaagaagaaacgagcaagaatgacataatcattttyaagacataatttcaatggggaaataaataacagtgtcaatacaccccaaaggcaagactggatttcatagctttgcttgttgtggtcttttggaagaagcttgagtatatccatatgctgaaagcaataagcaactaaagagtgaaaagttgaaaatgaagagaaagaataatggcctgatgcatgatgaggatgagatccaaatttgcttttaacaaaattctacagtacttgaagaaatacagagaaagaaagggaagaaaacagagcaataacattaaaggcaaaattaaagggcattgtgcttggtgttctcaatgaaagacgagcatttgtggttagaataaagagcattgcaattcaagagttcagacatggaatatttctgagtgaggaaacattagagatggaagtttagagataatgttgcaatagctgtttggaaaaataaaaatgatgtcccttgtctatc

SEQ ID NO: 408588 - DNA, 462 bp, Homo sapiens
ttgggaacagttacatttcaagtgttgcaggaaggtaggaaattccatcaaaatcacctaagaagaaacgagcaagaatgacataatcatttttaagacataatttcaatggggaaataaataacagtgtcaatacaccccaaaggcaagactggatttcatagctttgcttgttgtggtcttttggaagaagcttgagtatatccatatgctgaaagcaataagcaactaaagagtgaaaagttgaaaatgaagagaaagaataatggcctgatgcatgatgaggatgagatccaaatttgcttttaacaaaattctacagtrcttgaagaaatacagagaaagaaagggaagaaaacagagcaataacattaaaggcaaaattaaagggcattgtgcttggtgttctcaatgaaagacgagcatttgtggttagaataaagagcattgcaattcaagagt

SEQ ID NO: 408589 - DNA, 555 bp, Homo sapiens
tacatttcaagtgttgcaggaaggtaggaaattccatcaaaatcacctaagaagaaacgagcaagaatgacataatcatttttaagacataatttcaatggggaaataaataacagtgtcaatacaccccaaaggcaagactggatttcatagctttgcttgttgtggtcttttggaagaagcttgagtatatccatatgctgaaagcaataagcaactaaagagtgaaaagttgaaaatgaagagaaagaataatggcctgatgcatgatgaggatgagatccaaatttgcttttaacaaaattctacagtacttgaagaaatacagagaaagaaagggaagaaaacagagcaataacattaaaggcaaaattaaagggcattgtgcttggtgttctcaatgaaagacgagcatttgtggttagaataaagagcaytgcaattcaagagttcagacatggaatatttctgagtgaggaaacattagagatggaagtttagagataatgttgcaatagctgtttggaaaaataaaaatgatgtcccttgtctatc

SEQ ID NO: 408590 - DNA, 564 bp, Homo sapiens
ccctgaaattgattaattttaaatgttaaagctttaagtttaaatgataagaaaacaagtataagttaataatccgttaattgctaacattagtcaacagttttgaatgatctgattgaattttgtcagattcacttttattgagcttacttaygtattactttaagtacactgaatgcagtaaatggaaaaaatataattatgtttggctttggatcctatgtagaggcatttctaagcaaatgttttaaaggaccttgctttgtgaatagatcaaacaatactattgggtgtgtgtatgtgtgtgtgtgcacatgagagagagaattaagaattgtgtttatcttctatatagacaatgacgataagggaaaagatagttaattgttcaagccactgtataatttgcaaaaagaaaatttacgagctctaacatgtgtaaatcaaagccctttgtctgttttctgtattttgccactaggaaaaaaggaacaagctgggatattaaaaatatttttctacactgaattgcaaattagtctatgaatacacatttagttgcaa

SEQ ID NO: 408591 - DNA, 533 bp, Homo sapiens
caatattttggagtagtcatactccatgagatgatccctaactggcatctgtactatattaaataattacagaatattaatgaaatgatgatgctggcattttggaaagattcccttggggcagcatggagaatgaattaaatgggtgcaaataataggtaatatttctctttatatattagatcttgtcagcccaatatttatctgcttagtcagaaaatgtcttgagcactaaaaagatatttttttcaagaatagatttaagtagcagagaggatataattaggtgcacttggcatttacaactgctaaattgccaaaaggtatattttaaatatctttaaatyagatttctgtgtattcccccgaagataacatttacattttcaaactgcaagaatggagaataaaaacagttccaatctccccggtttacctttatctgctgctctaaccagtaactgccaggtcattcatgataaatgcagccaaactagagagatatagatatttgtgtatcacaataatcataa

SEQ ID NO: 408592 - DNA, 533 bp, Homo sapiens
caatattttggagtagtcatactccatgagatgatccctaactggcatctgtactatattaaataattacagaatattaatgaaatgatgatgctggcattttggaaagattcccttggggcagcatggagaatgaattaaatgggtgcaaataataggtaatatttctctttatatattagatcttgtcagcccaatatttatctgcttagtcagaaaatgtcttgagcactaaaaagatatttttttcaagaatagatttaagtagcagagaggatataattaggtgcacttggcatttacaactgctaaattgccaaaaggtatattttaaatatctttaaatcagatttctgtgtattcccccgaagataacatttacattttcaaactgcaagaatggagaataaaaacagttccaatctccccggtttacctttatctgctgctctaaccagtaactgccagstcattcatgataaatgcagccaaactagagagatatagatatttgtgtatcacaataatcataa

SEQ ID NO: 408593 - DNA, 567 bp, Homo sapiens
aaggggaacatcacactctggggactgttgtggggtgggcagaggggggaaggatagcattgggagatatacctaatgctagatgacgagttagtggrtgcagcacaccagcatggcacatgtatacatatgtaactaacctgcacattgtgcacatgtaccctaaaacttaaagtataataataataaaaaaaaagaaaagaatcaacaccaaaaaaaatgagggtttaatctatataactcaataatataaaataattgtatataatatataataaatatataatgtatatatagatagaataaattctcagcttaacagatatgtcaaaagtaggatatagatagaaatagatatacatatatagagatagatacaaatagatatatatagttataaatagatatatatctatttatatatacatattaatatatatagcagcctctgccttgaatggaggatgagtataaatatgaacatttataaaataaagctaaatttaggaaaaatgttacatatattaataagtgattctcttttgtaaattaacaacatcaaatttg

SEQ ID NO: 408594 - DNA, 567 bp, Homo sapiens
aaggggaacatcacactctggggactgttgtggggtgggcagaggggggaaggatagcattgggagatatacctaatgctagatgacgagttagtggatgcagcacaccagcatggcacatgtatacatatgtaactaacctgcacattgtgcacatgtaccctaaaacttaaagtataataataataaaaaaaaagaaaagaatcaacaccaaaaaaaatgagggtttamtctatataactcaataatataaaataattgtatataatatataataaatatataatgtatatatagatagaataaattctcagcttaacagatatgtcaaaagtaggatatagatagaaatagatatacatatatagagatagatacaaatagatatatatagttataaatagatatatatctatttatatatacatattaatatatatagcagcctctgccttgaatggaggatgagtataaatatgaacatttataaaataaagctaaatttaggaaaaatgttacatatattaataagtgattctcttttgtaaattaacaacatcaaatttg

SEQ ID NO: 408595 - DNA, 567 bp, Homo sapiens
aaggggaacatcacactctggggactgttgtggggtgggcagaggggggaaggatagcattgggagatatacctaatgctagatgacgagttagtggatgcagcacaccagcatggcacatgtatacatatgtaactaacctgcacattgtgcacatgtaccctaaaacttaaagtataataataataaaaaaaaagaaaagaatcaacaccaaaaaaaatgagggtttaatctatataactcaataatataaaataattgtatataatatataataaatatataatgtatatatagatagaataaattctcagcttaacagatatgtcaaaagtaggatatagatagaaatagatatacatatatagagatagatacaaatagatatatatagttataaatagatatatatctatttatatatacatattaatatatatagcagsctctgccttgaatggaggatgagtataaatatgaacatttataaaataaagctaaatttaggaaaaatgttacatatattaataagtgattctcttttgtaaattaacaacatcaaatttg

SEQ ID NO: 408596 - DNA, 517 bp, Homo sapiens
gaaaaaattagatctctaccacgtgcatcagttttctttctctttatttctttcacacaaatgctgcaatacaagccacattggcccatcataggtttaatgtcaaattcagtacattatttgggtaatattagcttcagttttaccgccagccatacaaacatcctttctactttatgcagttagttagctaagtataattaattgaactaaagtgtcttgccaatgattggtttctccaaattctttcaccttaaagtataactgwtttaaacacacagctaccaatccctgatagaggcccttttatcttttccaaaaaaaaactctatgaaaacaaacaaaaaaacatacaaacaaaacaatatggaaaactgagacagtcatttaacttatttttaaaatatagagatattttccaataaccactggaactgatggcattagattgaaaaatacaatggttggcttaaattgttttaacctctgaaatggagcaatcttacccatctgaaag

SEQ ID NO: 408597 - DNA, 578 bp, Homo sapiens
ctatgataagactgtaattatgtccaaataaccagaaagttcaaatgtccaggttttatcactagtcatcagagaaatgcaactcaaaaccacaatgagagatcatctcgcccccagctaaaatggcttgtatcaaaaagacaggcaatracagataccggtgaggatgtggagaaaggggaaccctcattcaatgttattggaaatgtaaattaatatagccactatggagagcagtatggaagttcctcagaaaactaaaaacagaaatttatgtgatccagcaatttcactgtgtatatatccaaaataaaggaaatagatatatcaaagagatacctgcactctcataattattgcagcactattcactgttcactattcactattcacaatagctaaaataaaatcaacctaagtgctcatcaatggatgaatggataaagaaaacagggtatatatatacaatggagtaccatgcaaccatcaaaaaagaacgagattctatcatttacagcagcatagatggaactggaagccattatgttaagtgaaataagccaagcacagaatgacaa

SEQ ID NO: 408598 - DNA, 578 bp, Homo sapiens
ctatgataagactgtaattatgtccaaataaccagaaagttcaaatgtccaggttttatcactagtcatcagagaaatgcaactcaaaaccacaatgagagatcatctcgcccccagctaaaatggcttgtatcaaaaagacaggcaataacagataccggtgaggatgtggagaaaggggaaccctcatwcaatgttattggaaatgtaaattaatatagccactatggagagcagtatggaagttcctcagaaaactaaaaacagaaatttatgtgatccagcaatttcactgtgtatatatccaaaataaaggaaatagatatatcaaagagatacctgcactctcataattattgcagcactattcactgttcactattcactattcacaatagctaaaataaaatcaacctaagtgctcatcaatggatgaatggataaagaaaacagggtatatatatacaatggagtaccatgcaaccatcaaaaaagaacgagattctatcatttacagcagcatagatggaactggaagccattatgttaagtgaaataagccaagcacagaatgacaa

SEQ ID NO: 408599 - DNA, 578 bp, Homo sapiens
ctatgataagactgtaattatgtccaaataaccagaaagttcaaatgtccaggttttatcactagtcatcagagaaatgcaactcaaaaccacaatgagagatcatctcgcccccagctaaaatggcttgtatcaaaaagacaggcaataacagataccggtgaggatgtggagaaaggggaaccctcattcaatgttattggaaatgtaaattaatatagccactatggagagcagtatggaagttcctcagaaaactaaaaacagaaatttatgtgatccagcaatttcactgtgtatatatccaaaataaaggaaatagatatatcaaagagatacctgcactctcataattattgcagcactattcactgttcactattcactattcacaatagctaaaataaaatcaacctaagtgctcatcaatggatgaatggataaagaaaacagggtatatatatacaatggagtaccatgcaaccatcaaaaaagaaygagattctatcatttacagcagcatagatggaactggaagccattatgttaagtgaaataagccaagcacagaatgacaa

SEQ ID NO: 408600 - DNA, 339 bp, Homo sapiens
atgataatgataattcaaagggaacaaagggcttcataaaagcacattacccagatgtttctcttggccaatattttaactaaatacacagtggatatgaaaggtacagtatggcacttaaataaataagagcaaaaagaagaaaacatattgacagtccaatgcaataggtttttgaacctttggtatatgtctcaaataagtcaccgtaaacacacgttagccaatagtgtttagttgcaggtcttttaagccagtaattttgtatgtgtgtctgtatrtgtgtgtgtgtttcaaagagtaactgaaaaaataataaatcaggattgacatgggatg

SEQ ID NO: 408601 - DNA, 574 bp, Homo sapiens
cattctttagagtcaacaaggactgtctagcaacttccggaatctcttgggctccccaagtaaagccacagaatgccactccctatcactgcactttgtagatatctacaccctctttgctaataaggtgctgttgtgggtagccttgagcaccatctcttatttatcttaaggacagtgcaatgctaaatcagttgacagcaggctccaaatactgtgcaatgatggttaaatacaatagcacatcatcaagcaaacatttattaagtgtctactgcatatagggtgctgcayttgaagtccagaaaagggtattgtcaatctgtcagttggccaattattccacaagtgtttattgaacacctcctctctgccaggcattagggatcttgtgatgaaaaaaaaaaaaatcaggaatctactggcagtatagcttgtgcaatacaagaatacttatatgtcacatccatgtccaggctgcttgatccctctagctttaggaaagtctatatagatggaattaaatccaggacccatgtctcctaatcaaagtgactttctctggcaaccaatg

SEQ ID NO: 408602 - DNA, 619 bp, Homo sapiens
tctgctctttctgttatgatagtcttgtatttattctcacttcactcacgttagatacgtacaatagattctttttgaaagaagtttacctttctttcctcataattttttccctcacatcccactctggctttaattattttcttgactgacagctctgtgtaattatttcagtgaaggtctatgagtagaaaaccctttccttctttgtctcaaaaaagaatctttattttaccctccctcttgcatatagttgggtatataggcataggaaaataactgcaaggcagtgcttatatctgagttgagagactactggtagttttccttatttatgtgcatattctaatttttctatgctgaatattatttggataatttcttagaagttaaaagctgcacaacaaaatgtgataagaaatgaatactttgatcactggctcatcaaatcagtgccaaatactcatatattctgatyatgtttctgcaaaattttcttcaagagaaccatggaaggtgatgctgttgccatggcaccataaaagtagtccccttagaagttcaaatggaggagtcacatcgttctgggctcaggtttcagctgctctgggttgcattt

SEQ ID NO: 408603 - DNA, 604 bp, Homo sapiens
tgactgacagctctgtgtaattatttcagtgaaggtctatgagtagaaaaccctttccttctttgtctcaaaaaagaatctttattttaccctccctcttgcatatagttgggtatataggcataggaaaataactgcaaggcagtgcttatatctgagttgagagactactggtagttttccttatttatgtgcatattctaatttttctatgctgaatattatttggataatttcttagaagttaaaagctgcacaacaaaatgtgataagaaatgaatactttgatcactggctcatcaaatcagtgccaaatactcatatattctgattatgtttctgcaaaattttcttcaagagaaccatggaaggtgatgctgttgccatggcaccataaaagtagtccccttagaagttcaaatggaggagtcacatcgttctgggctcaggtttcagctgctctgggttgcatttatttgcactacttcaatgcaaatstgcctttaatcctgctttctctccttcccagtggtggaatgtagtatctgccttcatgtaagacttgaagctggagtgcgaaagaatcttagctggcacccactgt

SEQ ID NO: 408604 - DNA, 600 bp, Homo sapiens
aagaagtcggaatgttgcaaaagatatttctccatgaacatgtaacttgtagaacatgatgtattcaaatattttgagagatgattgaggcacagaggaaaatttggggtttgaagtagtgataagtccttagaaaaccaagcatacacacaaacagaaattttcataccagggagaacagaattttgcacaggaaagaaaagaattatggaatataacactgctaagttgtgaacactgtttatgtagctaccataatataaactctatctgttcaacaaattatattgtactgtagttattttaggaagatggtagaaccagaaagctgaggtatgtggtggggcatgtgctgatagagataaacactgaatccaattcttccatgtgggcaagtgagactgtgtctagtacttgatatatcttgtggggccatacctgtgtacacgtgcacagatcctatcrcatggatataggtttacactatacattcatctcatggtttaataccgtatgaaacaagtattggctgaagcattagatttgtgtcatggttcttggtttaaccgtttccttgctgcatgatttgagcaggtcatt

SEQ ID NO: 408605 - DNA, 557 bp, Homo sapiens
gtgccctgaggcatactacaagtgtgaatttgggagactgtggctagttcagtatgactgaaacttaggtgctcaaggaggagctgtaaaagatgaaactgaagagagaaacaagagccagtttatgtaaggccaaactgctaaagacatggaaagttttatattaatggtgaaccataaataggagaggaaggactggactttcaatgcaggwcaatcactctgcagcacaaagggtgcacaggagtgtcaatgggagcagggaggcctctggggaggcaaatgaattattcagggaagaaaggagaagtgacctgaatgagggcagtgacagagatgaagacaggcagttggatttgagagtgccacagaggtgcttagttcctgctaagatttctgcccaaattcccctgacaagaactggtctggagcttgtgagagcagggacagcctatctgcagcaccattttgtccaaagttgccctaattcatgccatagctcccttctgaggctacagcaggagaggaagcttgaggtcaatgaactggagccagcc

SEQ ID NO: 408606 - DNA, 544 bp, Homo sapiens
tttccattctcttcaaaccttcaacgattcaatgaacttccacttctgagacaggcctgtgaaaaggagttttagaaatgaggttaatggattaatccaagtcactcccgagagcttggaacatgttatctctagcagcgtttttttttttttttggagacaaggtgtcacccagtgtcacacaggctggagcgcagtgtcacaatcttggctcactgcagcctccacttcccaggcttaagcaatcctcccatcttagcctcccaagtggctggggccacaggtgtgtgccatcacacttggctaattttatttttgatttttttttttttgtagagacaaggtttcactatattgcccaagttgtctaatagcatcttttctaagacttctcttatcccttccttcctttcctgaatttctgcttccatactgtatacacactaactccaaggctttcctctgacttgtctagttttccacagttgcrtgctggtaagctggctctctgaaaaaaataaagccttcatttgtattgttggct

SEQ ID NO: 408607 - DNA, 614 bp, Homo sapiens
atcaggcaaccaggggagtccacgtacaattatgagcgcaagaaggaaccttgaatgtaagcttcagatcttagagaaggttcttttgggatgaataccaattcctcttaataatcttggcaccgggatggawccaacttttagctcttgtagcagtacactctgatgtggaagaagagcagaagggcacatgtgggaaaagaaatatattctcccagcttaacaattctgtcaagggcaggtcctaccgatgtgcatttcccctgcaatttcctcatctctttcatacagactagaaaggcactcagcaggaagccctgctatagcctgccttgctgggcctctggctggacagcaacaatgagagtgaagggaagggtgcctagacaccaggcgggcaggctcttctgcactgtagctgaatgctattcatgggaatagcactgacttcaaagaaatctctttgtgcaggtttaatgagcccccctgggaagctcctgatgtgaatgggaatcacgacttgatataaaagtgaaagattatgtgtcagcaggaatgatttgattcttaatgcagtgttaatttatttgctgtgatttcacacatctgctttg

SEQ ID NO: 408608 - DNA, 614 bp, Homo sapiens
atcaggcaaccaggggagtccacgtacaattatgagcgcaagaaggaaccttgaatgtaagcttcagatcttagagaaggttcttttgggatgaataccaattcctcttaataatcttggcaccgggatggaaccaacttttagctcttgtagcagtacactctgatgtggaagaagagcagaagggcacatgtgggaaaagaaatatattctcccagcttaacaattctgtcaagggcaggtcctaccgatgtgcatttcccctgcaatttcctcatctctttcatacagactagaaaggcamtcagcaggaagccctgctatagcctgccttgctgggcctctggctggacagcaacaatgagagtgaagggaagggtgcctagacaccaggcgggcaggctcttctgcactgtagctgaatgctattcatgggaatagcactgacttcaaagaaatctctttgtgcaggtttaatgagcccccctgggaagctcctgatgtgaatgggaatcacgacttgatataaaagtgaaagattatgtgtcagcaggaatgatttgattcttaatgcagtgttaatttatttgctgtgatttcacacatctgctttg

SEQ ID NO: 408609 - DNA, 543 bp, Homo sapiens
gttttttaaaaatgttaaagtatgcctatatgttctaacatattttaacatgttgagaatattttgaataaaaagtaggataargataaaattttgggggcaatatgcatttatatgtatattgatatgtttgaaaatctcaacactgaatggtgggattgtttgtgtgatctcttactctttatgcctttatatattgtctgacttatttttgacaataagcacatataactttacaataaaaaggatcaccagtaaagcttcttaaaattttcattcctattcttatatcactaagaagatgaaaagacaacagatgaaaactgttaagttttattctaaggcacatgacccccagtaagggacttttatttatgttgtttattcttactaataaagtacttgtaagttttgaaagtatgtcaccaaggcaagcaggacagaccacaagatttgtcttcctgtgatagatgaacaagagaagcaggcacaacaccaatttcaagactgtccaccctctgttcttggtgttatcttcaaggg

SEQ ID NO: 408610 - DNA, 506 bp, Homo sapiens
tgttaaattttctggcagaatctctaatataacctgcaaaatgctcttctccgtgacccaaaatatgcttctgtccctggaagggactgatacctccaaaggagtgttgtaatgtcactgagtctgatttttaaagagcaattgcaaaattgggctttctaacccacagtatctaactactgtttttccttctttttcctctcctccctggcayagctagagggtgcaatctgggaatgaatcactgggctgctctgtcccagtccagtgtaagcaggagatcaaacggtcaaaagattacgggagtggggctggccgccaggccataatctccataaggtcacagaagtgctgctttcacatcaaaaaattagacttccggcccctaaaattccctgagactgagtggatttccttttcctaattgagaggccggggtggtaatttattccagtccccagttccaccgtggagtggactggggagtggatttagcagaaagattc

SEQ ID NO: 408611 - DNA, 556 bp, Homo sapiens
gataggattagatgcaaagatgctgccctcacaggggtcctgaagccatttgggctctgaagattatctttatatgcacaaataacacacacacacacacacacacacacacacacacacacactcacatatcccccaaacagcacctgggaccagctgacaaagccaggtctgggatctgatggggctttgttccagaggaggatggaattgcctgccagaaatagcaagctgctgctttcagcaatggggctgaggtacaaaatccatgtgcactttgtgtgcagacagaaacctgaaagaaaaactaattcaaataaaggtatttgacaattaactaaagcaaggagaggcagacaggctcagtgcccagataatcaagaagcagtcatttctaaatccagctctgctgtyggtgaccttgaacaaatcatctcacctctctgtttctccatttctctaaggttaaatcaagaactataattctgaccagctaaccagccacacagagtttaattgggggaaaagagagagagagagagaaagagaaagttaa

SEQ ID NO: 408612 - DNA, 596 bp, Homo sapiens
gatatgaaaaaacaggcatcatgtaggaagtttaagagcarctctgccttaggcgaaatagtgaaattttcctaaagcctcttgaactctaggatgtacactttagtcgtcttttccagtgtcttccacaaaatgctggccatctcggacattctccctgtcactccagtcacagattgaaacttacctgttgtattagtccattctcacattgttaaaaagaaatacctgagactgggtattttataaagaaaagatacttgattggctcatggttctgcaggctgtaaaagaagcatagtagcttctgcttctgaggaggcctcaggaagcttccaatcatgacagaaggcaaagggggagtgaggcatctcacatggtgggagcaggagctaggggcagggagatgccacacacttttaaatgactagatctcatgagaactcagtcactaacgtgaggacagtaccaaggggatggtgccaaaccattcatgagaaattcacctccatgatcaaatcacctcccaccaggccctccaacattagggattacaattcaacataagatttggtggggacacagattcaaacctt

SEQ ID NO: 408613 - DNA, 596 bp, Homo sapiens
gatatgaaaaaacaggcatcatgtaggaagtttaagagcagctctgccttaggcgaaatagtgaaattttcctaaagcctcttgaactctaggatgtacactttagtcgtcttttccagtgtcttccacaaaatgctggccatctcggacattctccctgtcactccagtcacagattgaaacttacctgttgtattagtccattctcacattgttaaaaagaaatacctgagactgggtattttataaagaaaagatactkgattggctcatggttctgcaggctgtaaaagaagcatagtagcttctgcttctgaggaggcctcaggaagcttccaatcatgacagaaggcaaagggggagtgaggcatctcacatggtgggagcaggagctaggggcagggagatgccacacacttttaaatgactagatctcatgagaactcagtcactaacgtgaggacagtaccaaggggatggtgccaaaccattcatgagaaattcacctccatgatcaaatcacctcccaccaggccctccaacattagggattacaattcaacataagatttggtggggacacagattcaaacctt

SEQ ID NO: 408614 - DNA, 557 bp, Homo sapiens
aggtgtacttttgcaacctctccaggagctttgttttggatgtcttcctaccatgagtttagttaccatagcaacagccagagaagctctgcctggaagagagatttcttgtataatgagcctggaagaccttaaggtgaatagacaacttttgctgttttaggcctaaaagacctatattttttccctccctattagttcctggtatatatttatagcatttatatcatattaaccataaaatgaatctgacttattatttccttttaaaaatccagatagtctgatcatatagagatcactgggtccctgggtcctgaggccatactggaatatattatccaaaggctctctgtcttgctgcctagwtttgtttgcatgaagtcattgctcttctcaagtccttctcaggacctgtcaaatcaaaactcctgagctggaaggtgggagccatccaacaatcaattcttcccctacaagccaccagaattttttcctcctctagctcactgggtatggtgtttgcactattttgtcctcttcctttggagaatcac

SEQ ID NO: 408615 - DNA, 529 bp, Homo sapiens
gttttaagtaactacattatattgatataataatatcagtggataacaaaatattctcttcacattatctggaccttttcttctagataccagggtcccaatccatgtagacagaagttcatgttgtgctgtgctggayttcctttagcaaggcatttattttcactaccaagtaaagtttgattttattttagtaggtttaaaaatattatttttaataatcttcccaaagtaaatgagtgtatatttcaatagtaacagggcatttgttgcatcattttgtttttaatatactgtgaagataaacatttcagatgaataccatatttataaaatgtctaaagaaatgtaagcaaattgtttttgaaattgtttataaatattaggagttttaagcatatgtggtgctaagtaatattgacatgtctgggaaaatgtgcaaaatagaaggcaaataaggcagctactcactccccaaattcacttacccacaagcaaaataaattatttgagaaaaaaaatttgatga

SEQ ID NO: 408616 - DNA, 570 bp, Homo sapiens
tctgaagctgagaggagtttcacaccctctaataaggggtaagttaaaggagtttgcattaaagtctgaagggaccagagaagtctgggctccatgaactcccaaactaactcatcaaaacttactttgagggcaaagagtccaaatgaggagaaactgtagcaaggagwcgcccatttgagcagcacagagacaacagcattaaaggaaagggaaggtccagataaaagtaagggaaaacatatttccagaaaataagcttccaaattttttgaacattgcacaaatataacaaaacagagagctctagagccatgaggttagagaaactatcttgaacaacaactacttctaaaaattaagaaagctaatttcaagtgtaaatgaggaaacgaagtatcagatcttaaaattaacatcagacaacagatcaagaagccaagtaacattcctaaaataattaatgcacattagaaaaacattaccacaaaagagattaaaattataacctaaaaaataaaataaaaagctaaacaactatgaaaatgatacatgaaatgaaattaatca

SEQ ID NO: 408617 - DNA, 566 bp, Homo sapiens
ggtgttgttttgcagaaatattttttaaattctaaaatttgtatggaattcaacaaaccctgactagccaaaaaaacttgaaaaaataagaacaaaacaatagtgaaaaagatcaaagttgaaggacttcctgatttcaaaacgtactacaaagttacagtsatcacactaatgtctttaggttagtgtggtactagtctaaagacagacagaccaatggaatagaatagagagctcagaaacaagccctcgcatatatggtcaactgattttcaacaagggtgacaagaccattcaattaaaaggacagtcttttaaacaaacagtgctgagaaaacaatatccacatgcaaaaggatgaaattggattcttactgtatacaaaaaataaagtggatgaaagctctaaatgtaggtactaaaactataaaactcttataagaaaacatggaggaaaagcttcatgacattgggtttggcaatgaatctttggatatgacagtaaaaacacagcaataaaagaaaaaataaattggacactgatattaaaaacttttgtacatcag

SEQ ID NO: 408618 - DNA, 535 bp, Homo sapiens
gtaacatattatataaactgacaatatttacagtttaagtcatgtttgtctaactgggatccagttagatcactctctctttctctctctctctctctcacacacacacacacacacacacacacacacacacacacctctttaaaagaagtatcagcctctctgttacacaaggttaacaaggagagtcatgagggaaaaggacctggaagaaatggatgacctgggccaggatcagcaggtaccatctcacagggacctctctgctatgtgctggcttccaggcagcactctgattttcccaccgcctgaagccctgagatctgtatcactctccctcaacagcagagcattcgatggagatgaaaggcattcagtcacaggcaatcaaaraaaactgcagaggacagtcccatatcctgcaattcctacagtacacacacgcctgcaacaattaaaggcctcaatggaaacaggtaaattaatagaaagagagttaataaaccctattggagtcagttagggcaaaaagtct

SEQ ID NO: 408619 - DNA, 535 bp, Homo sapiens
gtaacatattatataaactgacaatatttacagtttaagtcatgtttgtctaactgggatccagttagatcactctctctttctctctctctctctctcacacacacacacacacacacacacacacacacacacacctctttaaaagaagtatcagcctctctgttacacaaggttaacaaggagagtcatgagggaaaaggacctggaagaaatggatgacctgggccaggatcagcaggtaccatctcacagggacctctctgctatgtgctggcttccaggcagcactctgattttcccaccgcctgaagccctgagatctgtatcactctccctcaacagcagagcattcgatggagatgaaaggcattcagtcacaggcaatcaaagaaaactgcagaggacagtcccatatcctgcarttcctacagtacacacacgcctgcaacaattaaaggcctcaatggaaacaggtaaattaatagaaagagagttaataaaccctattggagtcagttagggcaaaaagtct

SEQ ID NO: 408620 - DNA, 630 bp, Homo sapiens
tattgaacaagcaaatgaatgaatgatcattttgtttggacccttaatgccccctttggaattatacacaatcttattgtgaatgtatcttactaggagttgataccattatcctatgttaaagggtggggaggctattggaaaggaggcaaatgccacatagtactatgtgctggaggacattcgtaccaatactcaatataacagtaaatgaaatatgttgagccatagtattttctgaaaggtgactttgggatttcaaaataaaacacagattagaagactgtatgtatatagttttcaataaggtcagcaagtcatgaaacttatgaagttagtatatgttttatttgtttgaactactaaggtgctaatcagtacattttgttgatgattgccacttagaaccayaggatgtacttactaatgagtcaaagattctttgctttaaagtggataactatttctgcatgccctatgctgtaattagaacatttcttcttacttgacctttcaatggattccactgtcactagtgttggtatagttctgccattctagagacattctgttacttggtaaagagtaaccaggcaaagagaaaaagaactgtattcatgacaatagttt

SEQ ID NO: 408621 - DNA, 543 bp, Homo sapiens
gtagtttttttttttttttctccttccaccatggctcttcttcatctttattctggtaaatacatcctcttagatcarctccaatacctccatatctaggaacttcttggctcaggtcttaatgaggttgttagtgaaccatttagttataggtttaaggccaacatatagttgaataaaggtgtctttggactgctctccttctattgagcctttagtgaaatatcatttcagtaccatggatgtaccaggggatatggaagctaccctatactcttcttagggggaatgctcatcttccactcctcacatagctgggaacttcctctccccaggagggttcacagtatggcctgtcattctgattggcaaatgtgggagaaatgactgaacaagttcagctcagccctgtctctctcttaaaatgccgtctgtcttcaggcggcactttcccctttctctgccttgcagtaagtagcctgtgcttttacaggaggatctggatagtcacagctctttctgagcctagagaggtgggtttgt

SEQ ID NO: 408622 - DNA, 642 bp, Homo sapiens
ttctggttaatttgttttccatctaactgcaggacatgactgccctaggctttctgtcaccacattaacagtgatccatcctmatttttccagtttccaataatacattcattacttcctcctcagccctcaccagtcacgttgttaacatccatatttctactaacagttgattcaaggtattctagcatttttctatcatcctcaagatgacatccttaaaattcttccagcctcttcccacttatgaattccaaagccacttctgcatttttacgtatttgttatggcagcatttcacttccagatactaaaatctgtattagttttttttaaatcgttgttgtataaaaattgcctcaaatttagcagcttaaaacaacactcacttgctagctcagaattctgtaaaccagaagtctagcatggtgtggttgggctctctgcttatggtatcaccaggctgaaatcaaggtattgacaaaactgagttctcacctggagaaaaaatctgcttccaatcccattcataaaagtccagttctttatggctatgggcctgtaggctataggtcccatttccttgctggccatcagcccgggccaccctcatctccttgaggccaccacattccttgccat

SEQ ID NO: 408623 - DNA, 642 bp, Homo sapiens
ttctggttaatttgttttccatctaactgcaggacatgactgccctaggctttctgtcaccacattaacagtgatccatcctamtttttccagtttccaataatacattcattacttcctcctcagccctcaccagtcacgttgttaacatccatatttctactaacagttgattcaaggtattctagcatttttctatcatcctcaagatgacatccttaaaattcttccagcctcttcccacttatgaattccaaagccacttctgcatttttacgtatttgttatggcagcatttcacttccagatactaaaatctgtattagttttttttaaatcgttgttgtataaaaattgcctcaaatttagcagcttaaaacaacactcacttgctagctcagaattctgtaaaccagaagtctagcatggtgtggttgggctctctgcttatggtatcaccaggctgaaatcaaggtattgacaaaactgagttctcacctggagaaaaaatctgcttccaatcccattcataaaagtccagttctttatggctatgggcctgtaggctataggtcccatttccttgctggccatcagcccgggccaccctcatctccttgaggccaccacattccttgccat

SEQ ID NO: 408624 - DNA, 642 bp, Homo sapiens
ttctggttaatttgttttccatctaactgcaggacatgactgccctaggctttctgtcaccacattaacagtgatccatcctaatttttccagtttccaataatacattcattacttcctcctcagccctcaccagtcacgttgttaacatccatatttctactaacagttgattcaaggtattctagcatttttctatcatcctcaagatgacatccttaaaattcttccagcctcttcccacttatgaattccaaagccacttctgcatttttacgtatttgttatggcagcatttcacttccagatactaaaatctgtattagttttttttaaatcgttgttgtataaaaattgmctcaaatttagcagcttaaaacaacactcacttgctagctcagaattctgtaaaccagaagtctagcatggtgtggttgggctctctgcttatggtatcaccaggctgaaatcaaggtattgacaaaactgagttctcacctggagaaaaaatctgcttccaatcccattcataaaagtccagttctttatggctatgggcctgtaggctataggtcccatttccttgctggccatcagcccgggccaccctcatctccttgaggccaccacattccttgccat

SEQ ID NO: 408625 - DNA, 642 bp, Homo sapiens
ttctggttaatttgttttccatctaactgcaggacatgactgccctaggctttctgtcaccacattaacagtgatccatcctaatttttccagtttccaataatacattcattacttcctcctcagccctcaccagtcacgttgttaacatccatatttctactaacagttgattcaaggtattctagcatttttctatcatcctcaagatgacatccttaaaattcttccagcctcttcccacttatgaattccaaagccacttctgcatttttacgtatttgttatggcagcatttcacttccagatactaaaatctgtattagttttttttaaatcgttgttgtataaaaattgcctcaaatttagcagcttaaaacaacactcayttgctagctcagaattctgtaaaccagaagtctagcatggtgtggttgggctctctgcttatggtatcaccaggctgaaatcaaggtattgacaaaactgagttctcacctggagaaaaaatctgcttccaatcccattcataaaagtccagttctttatggctatgggcctgtaggctataggtcccatttccttgctggccatcagcccgggccaccctcatctccttgaggccaccacattccttgccat

SEQ ID NO: 408626 - DNA, 545 bp, Homo sapiens
gtcttctttttatgtgagtcttgctaaaatctccattttggaagtgaggctagaaccatccttgtaatggattctgtggaactctaaactaggcatcatgcagcaacaacatctcctaaacctcaataatgcagagaaatttttctgtgatttaagctasacaaagagccacatctagagaaagggtggtatgggaaccaatattatataaggtccatctagcaaggaaattttgtttcttacaatagctcccagggatcatttatagagaggtgttatcttttgattttatcatgacaacaatttcagaaatagagagatgctcctgaaaaacatcaatatcatctaacaacttaggaatcaaaactttctttgagtcttaaaactatgaaaactgtaactattatattcaacttgagttttaaagcatagaagaaaaagtgatttaaggagctgggcaactgcaagggtaaaattagcatcgaatacaaaccaaaatattattccagtaaattggtcataacagacaaattgctggaaagaag

SEQ ID NO: 408627 - DNA, 590 bp, Homo sapiens
cagagcagtcagagagagctgaagccwaaggacttgaggaaaactgggacccagtataggtctgcatagctggtggccgggcctttaacatttgtcatgggacctgtgctcacgggagctggaatcaagctacttaaaaatagcacaaagtcacataggacttgtccagatacaaaatagggactagatacaccataatcactctctgcaaaagttccagggagaccagagaagaaaagggtcaagtgcagaaccccagaccagtgctgtgcactagccctaaatctgatgcactctaggctcacggcatagtgtcccaagtctagaaactgataggaaaattgtttccaggccaaagggtaaaatgcatatgaccttcaacagagacacatgtaagagccacctgtagagatgctcttgctaccaggtcacagttcatgaagagaagcataattcataagaaacagtttaataaccttgattacttgagcgttttaaatttccatggcaatatagatactgcaggcaaaattaaaaggcaaatgaccaacgggtgaaaatacatgcaacccatataactacaaaaagaa

SEQ ID NO: 408628 - DNA, 422 bp, Homo sapiens
cctctcctgtgtagccatgccagttcctcaacccaaacttaattggcacaattaattgtrccgactcccattctcaatacttgagttatttaatttgcatggctttacctgtctttgtaaacccccagtaaatgaaactgtttccaaatctcttcatatgacatttaagttgacaccgcatgtaaacaagtgcctacgaatataatactttttgtggtcacgctaattcacagtgaagaaatgcttcgagggcccaagtagagggatatgcttttcaataactgtactttcataacagtaaataattggtaagttcccctattccagagatatatagctcacttacattatttgaaacgtgatcaatatttatgagttttggaggtacatgtaattattccctttaatcatcaactctcttg

SEQ ID NO: 408629 - DNA, 695 bp, Homo sapiens
tgcttttcaataactgtactttcataacagtaaataattrgtaagttcccctattccagagatatatagctcacttacattatttgaaacgtgatcaatatttatgagttttggaggtacatgtaattattccctttaatcatcaactctcttgatagggacttgataaaaccaccctatttacttccttagaagcagaaatcaaattcctttttgaattaaaataagcactgtgaagtatatcttcttagcagctgactttgtcaaatgatcatataacttctatgtatgttgttttccacaatgctgcctctacaccaatttgctgatttaaagtcacaaaacaaatcaataacaatgacaactgaagtacaataaaatgtggaaaaactggcttatagctttaaaatacatagttcctttacctctacatattcaacttggaacaacctctaggcatgagcttctttgacttagttggtcacatagtgcaaaacgtcaaccatgttcacaaaaatgaaaagtttgtccaccaatgaccatgaattaattaatcattcttggcactgcaagcagcttttccaaagaaaagattttttttacaccatatagatcaagtcaaaacaggtgtataggttaaagacatttccttttactctgctgatcacaaattaattgactttttgtgaattatt

SEQ ID NO: 408630 - DNA, 614 bp, Homo sapiens
aattaatcattcttggcactgcaagcagcttttccaaagaaaagattttttttacaccatatagatcaagtcaaaacaggtgtataggttaaagacatttccttttactctgctgatcacaaattaattgactttttgtgaattatttctacagagcttagccactccatttaaaaaatggttcatatatctgattaaatgtctaacaaaaatatttttatggcaaatttcataatttttgtggtgggaaaaaacataaatgcctaaataagtatctcayatatatatttaaaacaaaacaacccttaagtgtattctatcttccatggattatcaacaatcacttcttttggtgtatagttttaagattgtgcaacaaatgtttactcaaaagaggaatgatgaatttgtgttagtaaatgaaaaacaaaaccatctaataaacagccaagaagtaaactctaaagggcattttgactttccatgaattgcactgtctctagtataatatattctaccaacaaggatgtttttggcaattatttaccacattgccatcaaccaagacactatcccagcacagtaccctctcattttttgccacgtccctattt

SEQ ID NO: 408631 - DNA, 614 bp, Homo sapiens
aattaatcattcttggcactgcaagcagcttttccaaagaaaagattttttttacaccatatagatcaagtcaaaacaggtgtataggttaaagacatttccttttactctgctgatcacaaattaattgactttttgtgaattatttctacagagcttagccactccatttaaaaaatggttcatatatctgattaaatgtctaacaaaaatatttttatggcaaatttcataatttttgtggtgggaaaaaacataaatgcctaaataagtatctcacatatatatttaaaacaaaacaacccttaagtgtattctatcttccatggattatcaacaatcacttcttttggtgtatagttttaagattgtgcaacaaatgtttactcaaaagaggaatgatgaatttgtgttagtaaatgaaaaacaaaaccatctaataaacagccaagaagtaaactctaaagggcattttgactttccatgaattgcactgtctctagtataatatattctaccaacaaggatgtttttggcaattatttaccacattgccatcaaccaagacactatcccagcacagyaccctctcattttttgccacgtccctattt

SEQ ID NO: 408632 - DNA, 571 bp, Homo sapiens
actctgacttgattattacatgttttatgcttgtatcaaatatcccaggtaccccagaaatttgtacaatcacwatgtatcaattatttaaaaagatcccctttctacttttggcctggaatatgcaactccacacaaaaagtatgttttacatatacatagcattgttatatgtaaaaacataacaggatgtcttaatagaaaagcattctttttttactataatttttcccatgtacttcatttagatcaatgatggttcctgtaccccctaaaatcaccaccaattgaagtatgactcctctttctatatgatcaattttacaattatctatattttgccacatagtttttacaactttgtgtgaacttctgaatggtaaggagcatgccttatactatcatgtttatttgtatctagtattgcacctttcagatgagagatacaaggtatacatttgctaaactgatccaatgaaaaagaatatagaaagatagcattgcccaaaatacttttcttatatcagctcatatgaatccaaaaacatctggataggcaacttttcaaaca

SEQ ID NO: 408633 - DNA, 481 bp, Homo sapiens
cactgacatcctggtacagattggcatgaggcaagaacaaagaaaactcacagggtctctgcagaatcagaaaagatgaacccttgccagccccaaacagagaccattgttcagctcagagagcttcctggttcctttgtgaagctatwggaaccccatcttttaattgattaattagttaaattagtcaacatagagttacttaagcacctactatgtgtcaagcactgttctaggtgctcaggttataatagtggggggaaataaaacagaggaaagaagtccctactctgttgagtttacataatttgtggtctgttatgtataagcatgcctaaatgaacactgtagtaaaatcacaaaattgttcttaatagtttttgaatttattcataaacttccaaattacagagccccttttcagattgctacagaatcatggttctcaatcactgaaacttgtaaaatgacttgcaatgcc

SEQ ID NO: 408634 - DNA, 481 bp, Homo sapiens
cactgacatcctggtacagattggcatgaggcaagaacaaagaaaactcacagggtctctgcagaatcagaaaagatgaacccttgccagccccaaacagagaccattgttcagctcagagagcttcctggttcctttgtgaagctattggaaccccatcttttaattgattaattagttaaattagtcaacatagagttacttaagcacctactawgtgtcaagcactgttctaggtgctcaggttataatagtggggggaaataaaacagaggaaagaagtccctactctgttgagtttacataatttgtggtctgttatgtataagcatgcctaaatgaacactgtagtaaaatcacaaaattgttcttaatagtttttgaatttattcataaacttccaaattacagagccccttttcagattgctacagaatcatggttctcaatcactgaaacttgtaaaatgacttgcaatgcc

SEQ ID NO: 408635 - DNA, 481 bp, Homo sapiens
cactgacatcctggtacagattggcatgaggcaagaacaaagaaaactcacagggtctctgcagaatcagaaaagatgaacccttgccagccccaaacagagaccattgttcagctcagagagcttcctggttcctttgtgaagctattggaaccccatcttttaattgattaattagttaaattagtcaacatagagttacttaagcacctactatgtgtcaagcactgttctaggtgctcaggttataatagtggggggaaataaaacagaggaaagaagtccctactctgttgagtttacataatttgtggtctgttatgtataagcatgcctaaatgaacactgtagtaaaatcacaaaattgttcttaatagtttwtgaatttattcataaacttccaaattacagagccccttttcagattgctacagaatcatggttctcaatcactgaaacttgtaaaatgacttgcaatgcc

SEQ ID NO: 408636 - DNA, 604 bp, Homo sapiens
tcaacactgctccagaattatttattctctccccagctgcttgatgttctccttgaatttctacatcatggctaactctccctcttagtggagaacctcacctgctccactgaaaagagcattcatttcctcaatatgctttgccgcttccaaccttgtcaaaactcatcttcatccatcctttgctccttaaatctgggctcctaatcctataaatctagttgctgctaggatcttgctccagaagtgaacttctttctttcttaattcttcagtctctctctctctctaaccaaccaccttccatggttctctttcctctacgtacaaacttattcaaatggggtggagggatgtatctctcaactctggctcccttttcagacaccatctttttttctttcattctttttactggaaaatttcttaactgaggaagccatactttctgtctccagctcttcacttctmatttagtccaaaccatcctgcagtctggcctctgtccactccactctatggaaactactttccccaataacaccagtgactcaaaattgcaaactcagagccgtctttcagagctccttcaatgtgacctgtc

SEQ ID NO: 408637 - DNA, 628 bp, Homo sapiens
atacctctggtttatggaaggtgaagtatagttctcggatgaatggaataaagtattcttgaataaaagtcaaaaagaaaaagtacacaactactgccaattctttggtaattcttatctttgacatagatgagaaaaagaggaaactctataatgccttaactataggttaaatatgaagctgtctccaggcaaggcagactcagaccttttgatgaagctgcagaatccccagcccctgagagtaggatgcacagtgctgtgccragatggatgtatagtagcttattgcagaggatgaggcagccaaatgcaggtctgatgtggggaatctatcttcttggagtatccactcaacgttcaagaagaactggtcttgagtcaagcataccaactcctatacttctgctcattcactgggaaagcatgaaacaatgaaatccagaatgtatctcatccaccataaaaactcctctcagaatttgaagtcttgtgataagcaggtgaggtgatggatatattaattagcatgacttaatcatcccacaatgtatacatacagcataacaccacattgctctctataaatatatgtaattattgtttgtcaatttaaaaaggatttaaa

SEQ ID NO: 408638 - DNA, 610 bp, Homo sapiens
tcatgaagttttgcatgggacttcagattttactggaatgtccctagatgtcattagcctctgaatacaaatgaagttccccaagtttaggctctggctattcaacatgtagtttgtgaaccagcagcacaagtatcatctaggagcttgttagatatgcagtctcaggcttcaccccagaatcggcagtttaaagagattttcaggtgattcaggtttacattaaagtatgaaaagatgttatagactatgtccctgaatttttccattttagaaaattactgacagcaacaccattcatgggtttgagtcatgaatacaaacatctagatccatcracacctgcagctgtcatagtcactgtgttaaacataggtgcaagcaactggccaatgtgtctcctggtgatgtcacatccaaatatttacacattaaaatatatattattttatgctcagttattttatttttatttctcttttacattactgttcaggcattaattttattttcaagctgtgtaagtcagccaactatatttcctatggatttcattcggggagagtaaatgaaatattatagagtatttgttacaaaaagggagcattgg

SEQ ID NO: 408639 - DNA, 514 bp, Homo sapiens
aaacagagctgaaaagctattgtaaagttcaagaacatctcccctaaggaacaaaagcagaagacttctgttatgatgagggaaatcaaacaaaccttgattctgaaacagctttgttctcagaaagatgactttttaagggaggagaccaaaacaagagtgaaaaaccagaggcagggaccttgggaccagtagagattagttaagcataaarggatctgcttgaaaggtatgtataggcttgatagggagaacagaagagtgtcatggcagcaaggtatgaattaagaaaacatgtcttggtttataagagattttacttggttttattcatctgctctaaggtgtatgatactttaagcttggaaagtaattttcttatagttttaatgaagacattttgatattgcttttttaaattttaatttttatttatatatttttttgagacaaagtctcattctgttgcccaggctagagggtagtggcaccatctcggctcactgcaacctcc

SEQ ID NO: 408640 - DNA, 190 bp, Homo sapiens
acaatcactttcccactttgggcaaaattaattaacgtatgtatcttgaggaaagaagcttataagtttgctctgttttagcagaagggtcagaccatacataaggctctgagtgttatactgtggaagtgaayaggcagaaaggaatgcaatcagatgagaatggtgtctttggtttaatagaatgtca

SEQ ID NO: 408641 - DNA, 578 bp, Homo sapiens
tgtacctttaaaatataattaggactattataatagcttcctaatctcctaattaatmtgtcccctccctttccatttccactctgcctctccaatcagtttcccacacagtaggcagaccgatcattctaaaactcactttagatcatgtcactgctctgcagaaaacacgtcaatgacttcccattctactcagaatagaatctagaagtctagaagggacatacagggccctgtgtgatctacctctctgctctgctccgatacttcttaaatctcatatcctactcctcttcccatcgttgagctccagcccaagcaacctacttcctactccatgaacactcgagcatatgtcctctcagccttttgctcaggtttggagcactgctctcccagatgtctgcatgactcactcctgcacagcattcagggtcctgcacaaatgtcatcttagaaagaaagtccttgatggcccaacaaaaatggcatcctctttctctgtcactatctatttatcctgcttcattttttccttagcacttgtcactcccgacatctatttattgactatcttc

SEQ ID NO: 408642 - DNA, 578 bp, Homo sapiens
tgtacctttaaaatataattaggactattataatagcttcctaatctcctaattaatatgtcccctccctttccatttccactctgcctctccaatcagtttcccacacagtaggcagaccgatcattctaaaactcactttagatcatgtcactgctctgcagaaaacacgtcaatgacttcccattctactcagaatagaatctagaagtctagaagggacatacagggccctgtgtgatctacctctctgctctgctccgatacttcttaaatctcatatcctactcctcttcccatcgttgagctccagcccaagcaacctacttcctactccatgaacactcgagcatatgtcctctcagccttttgctcaggtttggarcactgctctcccagatgtctgcatgactcactcctgcacagcattcagggtcctgcacaaatgtcatcttagaaagaaagtccttgatggcccaacaaaaatggcatcctctttctctgtcactatctatttatcctgcttcattttttccttagcacttgtcactcccgacatctatttattgactatcttc

SEQ ID NO: 408643 - DNA, 578 bp, Homo sapiens
tgtacctttaaaatataattaggactattataatagcttcctaatctcctaattaatatgtcccctccctttccatttccactctgcctctccaatcagtttcccacacagtaggcagaccgatcattctaaaactcactttagatcatgtcactgctctgcagaaaacacgtcaatgacttcccattctactcagaatagaatctagaagtctagaagggacatacagggccctgtgtgatctacctctctgctctgctccgatacttcttaaatctcatatcctactcctcttcccatcgttgagctccagcccaagcaacctacttcctactccatgaacactcgagcatatgtcctctcagccttttgctcaggtttggagcactgctctcccagatgtctgcatgactmactcctgcacagcattcagggtcctgcacaaatgtcatcttagaaagaaagtccttgatggcccaacaaaaatggcatcctctttctctgtcactatctatttatcctgcttcattttttccttagcacttgtcactcccgacatctatttattgactatcttc

SEQ ID NO: 408644 - DNA, 460 bp, Homo sapiens
tacctgggaaataatgtgcatttcgtccagaaaatccttaggaatgcttagcatctatttgaaactccagattcaatctacaacctcagtgattasagtttgagataacagtcacatgggtcacaaaggaagcttcctagatacaagtgaatctcattgtatcaaatggttatgccttccaaaattatatgtgagtctgaggggcaattttcaaaataggctttatttattatagcgattttaggttcggagtgaaattaagcagaaagtatagagttccaggaaatttttttacagcgactaacttaggtaaatgtatcagggaagctcactatttagaggaaatttactatgatttatgttatgaaatgagagctctctcttctttatctttggtgaaaatcactaaggagctagctaaattagataactatgccagttatcaatgtaatgtctcaca

SEQ ID NO: 408645 - DNA, 595 bp, Homo sapiens
ttagctgtttgggaattcttatccacctacttgtttctgacccatggcctgtatccacttaggtcttggtttgtgtttgttaatctgggttctcattggtggcttcaccttctaaccacgagccctggctttgctatattctcagttctctcagtaacagattatactaaactctaaaatcctgagctacctgggaaataatgtgcatttcgtccagaaaatccttaggaatgcttagcatctatttgaaactccagattcaatctacaacctcagtgattagagtttgagataacagtcacatgggtcacaaaggaagcttcctagatacaagtgaatctcattgtatcaaatggttatgccttccaaaattatatgtgagtctgaggggcaattttcaaaataggctttatttattatagcgattttaggttcrgagtgaaattaagcagaaagtatagagttccaggaaatttttttacagcgactaacttaggtaaatgtatcagggaagctcactatttagaggaaatttactatgatttatgttatgaaatgagagctctctcttctttatctttggtgaaaatcacta

SEQ ID NO: 408646 - DNA, 591 bp, Homo sapiens
gctgtattcactagccggggcctctgtaaaaaagtactacaaatggatggcttacaacagaaatttgtctcatagttctcaggggtaggagtctgagatcaaggcatcttttcttctctggaccatgaggaagaatctgtttcatgcccacctgctagcttctggtggttgctggccatctttggtgttccaaagatggcttgtagaagcgtcaccctaatctctgccttcatgtcacatggcattctccctgtgtgttgtttgtgtccaaatttctcctttttataagggcatcagttwtattggattagaggcctaccctactctagcatgatctcatcttaactaattgtatctgcaacgactctcttttcaaataaggtcacactttgaggccctagaggctaagaatttaacatatgaattgtggggacatgtgtcaacaagtgccaaagccctgaatatcaataaagtctgctctctgccctcaaggagctctcacagaagaggaggagagagataatgtgttagtcgttttcacgctgctataaagaactacctgagactgggtaatttataaagaaaagaggt

SEQ ID NO: 408647 - DNA, 539 bp, Homo sapiens
gacagaggaagtgagggattttgctgtgtgagtggctggggaagactgttctaggcagaggggtagagaatgcagtgaccctaagacaggagcgtggcccttccattctatacatgttgaatttatacttttagagatcattttattcttgccaggcacagtggctcacctgtaatcccagcactttgggaggctgagacaggtggattgcttgagctcaagagttcaagacaaaccagagaagcatgatgaamtctccctctacaaaaaatacaaaaaaattagctgggtgtggtggcaggtgcctgtagccccagctactcaggaggctgaggtgggaagatcatttgagccagggaggttgaggctgcagtgagctatgatggcgccactgcactccagcctgagcgacagaacaaggccctgtctaaaaaaaaaaaaaaaaaatcattttattctcatttagttaggtaaaatgtcctgaacctggggagacagaagataaacccaagaggtagtctgacatcttgaacctaaag

SEQ ID NO: 408648 - DNA, 592 bp, Homo sapiens
gggcctggctctccagctggcttcggaagtggaggtatggttgccaggctctgtcctgctctccctgtgggacaccagtcaggaaacagcacagctgctgasccctgagccacccagtgatacaggctggttagcacaatcttcatcagtaacccaggaaactcccagaaggtgccagaaggccacaaaacagatgcctcggctaatagacatgaaccaagagccctcagagcaaagctctgaaaggcccctgcaggtttgcagttggaagcagaaggagaaatgacatataccagatcccatcttgagatagagtattaggaaagggtaaaaacttcagaagaaaacacattacctagttcagcctgtgaaaatcattttagtatcttcaaaaatggctctgtactgtaatgggaaagccagctcacaaatctgcattggcattcaatgtttgtaatgtgaataatgggacagacaaatcatgtccatgttcatggggagcctggcattttgaaaatatctggctctgatgcatttcatttaagctggggagaattttctgggaacctatctgccaaagtcagtgccactg

SEQ ID NO: 408649 - DNA, 499 bp, Homo sapiens
gaacctgtctctaaaatggagctaatatagtggtagagggaatggagagtgcatgggttctggaatcaacccgagagtcaggtttcacagtgcctggcacatactaggggctcgatattgtggggaaatgaataaatgaacaaatagttccaatctcagccccaccacttctcaatcgtctaatcattatataatttagcccacaatactgacataatacctcgtttttggtgtaaatgaaataatgtaagtgaaagggtgttccactgagccagcttatggtaaggtgagagggtgcacgctctcactccctgcccaccctgcacttgtgaaagcactttctaatctctcagtactcctaaasggagctgaggagaacacagtggagactgagcagaggctttgcttgaagatggaattgatcttgagatcttgccccatccttgggcatgttaatttcttctctgaataattttactcagtgtcctcagtttaagga

SEQ ID NO: 408650 - DNA, 580 bp, Homo sapiens
aaggtgagagggtgcacgctctcactccctgcccaccctgcacttgtgaaagcactttctaatctctcagtactcctaaagggagctgaggagaacacagtggagactgagcagaggytttgcttgaagatggaattgatcttgagatcttgccccatccttgggcatgttaatttcttctctgaataattttactcagtgtcctcagtttaaggattatatgagctgaggtatgtaaaatacttaatgcacatagtaggtggtgaacaaatattaggtcttttctcctttttcttgtccaggtggtgggagactatgctaactgcccaacacttattccccctcacttctttctgctaaaagagtcccaattttttgtcagcagatcccctttcccaaatagtcatccctcgttatctgtggggaattggttccaggacctctgtggatattaaaatctgtgtatgctcaagtcccttatatattataaaatggtggtagtaatatttgtacagtatagcccatatgcatcctccctatactttacattgtttctagcaacttataatactgaatacaa

SEQ ID NO: 408651 - DNA, 596 bp, Homo sapiens
ggatttgaccagtgagcagtgtttgctgattccccaacttcaaccattggtaatcatgaactrtgttgcttgcagccaaaagtatttctgatatgtggatataatatgggagcaacagatttaaagctgctacggattggagggatgggaaacaagcactggaaaaaaggggatgatcaagatggattgataactaataaaatcacatcaagtgagcccaaaatgcacaagcagcagagtgggaaggagacagcttgtgagaaagcctgggaaagcgctctagatttagggccagagtgcatgggttcaaggttcaagataaaagaaaacatggcttactattcaattggctttactccttggggacttatgaattaaacgaatgcttagaattcaaacatacagcatcacctgctccttgatgtctggaaagtttatgtggcaggtacttcaagtgcaaaaacagcctagaaattcagtctcatgtggtcttgaggcttttcccagaggacgtgaaagaaagaattatagagaggatggtggaagctaaatgacactttcactcactgcattttttcactcagtcatatgataaa

SEQ ID NO: 408652 - DNA, 596 bp, Homo sapiens
ggatttgaccagtgagcagtgtttgctgattccccaacttcaaccattggtaatcatgaactatgttgcttgcagccaaaagtatttctgataygtggatataatatgggagcaacagatttaaagctgctacggattggagggatgggaaacaagcactggaaaaaaggggatgatcaagatggattgataactaataaaatcacatcaagtgagcccaaaatgcacaagcagcagagtgggaaggagacagcttgtgagaaagcctgggaaagcgctctagatttagggccagagtgcatgggttcaaggttcaagataaaagaaaacatggcttactattcaattggctttactccttggggacttatgaattaaacgaatgcttagaattcaaacatacagcatcacctgctccttgatgtctggaaagtttatgtggcaggtacttcaagtgcaaaaacagcctagaaattcagtctcatgtggtcttgaggcttttcccagaggacgtgaaagaaagaattatagagaggatggtggaagctaaatgacactttcactcactgcattttttcactcagtcatatgataaa

SEQ ID NO: 408653 - DNA, 570 bp, Homo sapiens
gccatctattgatgataaccttaattccatcggcaaccttgatttccctttgccctgtaacctctcaggtcccagggattaggacatagatatctttggcaggacatcctgtctaccacattctctttaagtttttttctagtttcctggtttcttttaataacttctcaaattatgcccatgaagttggttaataatgtcccatctcaytggataaactgaagcactgagggatgcccaaggcctgcttagggctaaccgaggataccagtcagggtgaaatctacttactcacttccaacctgttgaagaatattttcagtggaaaacaacaaaatataagaaagcatgtatagtataattacaacctcatacaagcatatcctgtgtatagtcatgatggaaagactggaagaaaatagatgaaaaagctaataatgggagtattagggtgctgggcataagattacaaatagttctttcttctctctcttttttttaaaaaaataaaatcaagttttcagtgatatagattatatttctaaatagaaaacatgttaaaaattaact

SEQ ID NO: 408654 - DNA, 570 bp, Homo sapiens
gccatctattgatgataaccttaattccatcggcaaccttgatttccctttgccctgtaacctctcaggtcccagggattaggacatagatatctttggcaggacatcctgtctaccacattctctttaagtttttttctagtttcctggtttcttttaataacttctcaaattatgcccatgaagttggttaataatgtcccatctcactggataaactgaagcactgagggatgcccaaggcctgcttagggctaaccgaggataccagtcagggtgaaatctacttactcacttccaacctgttgaagaatattttcagtggaaaacaacaaaatataagaaagcatgtatagtataattacaacctcatacaagcatatcctgtrtatagtcatgatggaaagactggaagaaaatagatgaaaaagctaataatgggagtattagggtgctgggcataagattacaaatagttctttcttctctctcttttttttaaaaaaataaaatcaagttttcagtgatatagattatatttctaaatagaaaacatgttaaaaattaact

SEQ ID NO: 408655 - DNA, 627 bp, Homo sapiens
agttgcctgtagtcccagctactcgggaggctgaggtgggagggttgcttgagcccaggaggtggaggctgcagtgagctaagatcatgccactgcactccagcctgggtgacagagcaagaccctggctctaagaaaataaataaataatagaaatgtccatactactcaaagtaaactgcagattcaatgcaatctctatcaaaatatcaatgacattcttcacagaaatagaaaaaaaaatcctaaaatttatatgaaaccataaaagatggaatagccaaagcaattctgaggaaaaaagaacaaagctgcagacatcacattacctgacttcatattatactaaaaagctatggtaactgaaacagcatggtactgacataaaaacatacatgtagaccaaccgaatagagaacccagaaatacatccacacatttataaacaacttattttcagcaaaggtgccaagaacatacaytggggaaaccacatgctcttcaataaatggtgctgggaaaactggatatccatatgcagaggaatgaaactagacccctatatatcaccatatacaaaaatcaaatcaaaatggattaaagactatgaatctactagaaaaaaac

SEQ ID NO: 408656 - DNA, 518 bp, Homo sapiens
agcactgtgtagcctgggatgcttgggtctctttaacagtgacattgtgaygagcacagacaggagggaagagggtcaggaaacaaaaagacccctttgctggggatctaggaacctgctcaagcctggaaaagcaagctgcctgttagctgtcagctgaactaccctggcagtcttgtgggagtgcccactgctggcctatatgaagaagcacaacaggctacaagcccacttacctttttgatcttcctatgtggcactttcccctccccctctgacccctccacccccaaccaagttcaagtctcctgagaaagaaatagaggttctgttgtaaaataaaatagggtttattagggggaatcaagacagcgaatgagtgaatgcagaggctccaaacagaatttaatcaaaaccacaatgagataccacttcacacctactaagatggctattattaaaaaacaaaaacaaaaacagaaaataacaagtatttggtgaagatacggagaaattga

SEQ ID NO: 408657 - DNA, 601 bp, Homo sapiens
cttacattccagtggggaagatgaatattaaaacaaaaccaacctcaaaacacaaaactgtttttgaaaggaagactctaatattcaattagtgcctttctctcttgagaagtagattcttgcatgaattaatttatttcttctcagttttatttgaagatgttatacttttaaagaaagatttgaaaagaaaaagttcacccattattccattggcatcattcccttaatactacagttaatctgtttttcaatgttattttgtggtttccccgcccaggagcttctttgcaactttggttttcttctacttctactcaggttcagggaggtgtccactgtctctcaaatcaaccaccagactttagaggggcacaagattgttaacgcgcaaaggtggttgaggaattggaaaggttgactggggctgcaccttggaatttattttgtcttggataatatgtaacattaacagagagcagaagctgattaaagtatcttggtgccaaagggtagttctgtgagtatttctttccttaacatgactggcgcgaaaaaactctcactgaagacyttcactgctcttctcaactattttgaa

SEQ ID NO: 408658 - DNA, 595 bp, Homo sapiens
aggttagttacatatgtatacatgtgccatgctggtgcgctgcaccgagaaatgacttttaacataatcatgataccattattacacccaaaatttaaataattmtttaatataattgaatattcagtcagttttcaaagttcaaattgtcccataattattataattgttttggaatttgcaaaccaactgtttacaattggttgatatgacctttaaatctcattgaatttataagttcccttccatttcttttttttcccccttttagtgtatttgtaggaaattgggtcacttgtcttgttgagtttcaatctagactttgctgattgcgtcctcatagtgtagtttaacatgtttctctgtcttccacatgtcctgtaagttaacacttgggtctagaaacttgatcagattccggtttggtttggtttttccttttggcagtctataaattcagtgcaatttcaattttaaaaatccccaacagggtttttggcagaacatgattagctgatattaaaattcatatagaaaagccagaaatagttgtcatggtctgaatgtttgtgtcccccgaaaaattcacatgctg

SEQ ID NO: 408659 - DNA, 382 bp, Homo sapiens
ttgtcattttacagaggcatgaagtcaaatcattgatattgcaaggctgggagacagagactattactgagctagtgagtgagcctagccagcctcgcagcactcacacgtctcatattgtggtctataattcattataacatctgcaatagctcttgtgcagttacttttcaaacagaagaacattgatttctttayatatacatagatacatacacatgcatttttaatggccctaaaaaaaagctgactgctgggactcgtgatggaagtaagagaaagtgaagtggtctaacaatgtgatggttctctgccaaaaaaatagtttaataaatcactctaagcctttatttatagtctcattaagagtccaaagaactct

SEQ ID NO: 408660 - DNA, 644 bp, Homo sapiens
ccctactgccccagaggtccctggaggaagctggatcttgaactgcacacacttcaagacctcaaagaagccatcctggcatatggaaggcagcaggtaggcagaacgctcccttgggtttggggaaggtgctggtagcatgtctagaaacccagttgcagctttgggaataatttcttggacccggggaaggtatgaaactctcagaactctatttcttcatctctaaaatgagattgactgtactcttagccctatctgctgcacaccattgtcacaaagcttaaatgagataaygtatgtgaaagggatctgaaaaccataaagggctacattatcatcattttatgttttcctttcagttagagtaacacaaagtccttttcagcattcagacagattcaggccagcagacgtttcatcaggatccttgaaatcctgtctcatagccacaagcatcatcatcccacctctgatgttcttggctctgtggaaatgagagggagaacattttaaatatttaccttgagcccttcagcgtctgcaggataagttaatgactttttccatcctgaatacaatattaagggaaaacacctgtgttcatttttctgattcatacttcctaatgtcttgtgagatgt

SEQ ID NO: 408661 - DNA, 563 bp, Homo sapiens
tgtcactttataaaattctaggttagaaatggtgggtgactccctaatttaaaagtgtttactgacttttcattccccacaaaataaagtcattagcttcttctatcaggcctttcacacattggcttttctgctccatgtctagccacatttcccacctgttcctgtaccacttccatcatggacgccataaggccccacccatgtgattagctcatcattccccaacacctgtgccctttcatgactctccatttttgcacacacctctacagctggcaagctcccacccatccttcaaaacacaacttaaataccatcccctcactgaagccttcycccacttgcctaggcagagatagctcatgcctccctcctctgcaaacattcccataccgtcatgcactgaaatttatttctttgactgtcattcctgatggattaacatctcttccaatatggggaccatgtctaaatcatttccagaaagagtacccacaaatgtttgtggaattaatgacttggtcatgcatgatattttcaatgtttcttagatcatctcc

SEQ ID NO: 408662 - DNA, 588 bp, Homo sapiens
ctctggtaaatcatgtaatgacctgggtcaagcaatgaagtcatgtgttagtcatgaataacatgagaaaatctgcacaatgtttttcttttgttttgttttgagacagggtttcctctgttacccaggctggagtgcagtggcaccatcacagcacactgcggcctcaaactccygggctcaagtggtcctcccatctcagcctccccagtagctgagactactggctcatgccaccatgccgggccaattttttgtatttttgtagagatggggtctagctctgttgcccaagctggtctcgaactcctaggttcaagaaatccacccaccttggcctcccaaagtgctgggattacaggtgtgagccaccatgcctggcctggaatgtatttttttaaagcagattacaaaaatgtattcatataataaaaataccagtgttcattaactttttttgagtagttgtgttatttttgccactattctaagtgctttccaagtataattcatttatgctttctaataatcctgggcataagtactattattatccactttaaaggtgaggaaatagaagcacagaga

SEQ ID NO: 408663 - DNA, 596 bp, Homo sapiens
catgtccctatgcagcacagcaagccccattcacagacctgctccagaaagtggagctgtttcttgagctccagccttttccaaatctcacccaaatggcttaacttagccctccccatctctctgtatcatttctaatgcccatttcttaacaaaataacacaatcacataacagtagacatgctgttgtgaatctgcagctgtgaacagacaccagggcaatcatgtccaggagtgcaaagtagaaatacaggagggtgacactggatttatgccaggctctgtacaaaacactttccattcaccatatcttataagcctcgcaacaactctacaaggcagcagttattaccatgatcatgtcatgggtgatgaagttgaggctttaaagggtamgcaccttgctcaagcacccatagtattagaatagataatattcatcaaggatgtaccaaaagccagaaaccatttaaaattttgtgcatatattatctcatttaattctcataacaagttgtgagataattctaatgtgttacacattttacaaatgagaaaagtgagttacacaaagtgaattgaatttttccaaggt

SEQ ID NO: 408664 - DNA, 581 bp, Homo sapiens
aatataacatgctaatttaaatttttctggtcatttatagcacatgaatatctgtgatgcaagaccagatctgttttcttacctttgtcatccactcaagaggatcaatagtcaaaacaattcaggaaaagcaaytgttctattttacagtaactgtgcaaatatcaatatctactaaatttaataagataaacatctagcttaagtgccaagaagtatttggagtgcctttcgtactcaaaaaggacacttttataatctgtaagaatggtattattatagtatcgcattgctgaaaaacaaaagatgctagcttttgctttcaaaataatgtatttgtcagtgatttatggagtgtgtagaaaaaccaagagttactgatgtaagacttactcacctctctgatagataaattccatgcagctataacagaatgtttaaataagttatttttgaataagggcttttatgttcaatgcaattcagtgcctcaggctgcaagctcctataacttggcttgaaggatgtctagtttctgttgaaacaaaagtacgagacgaattgtgtcaagagaaaccctg

SEQ ID NO: 408665 - DNA, 566 bp, Homo sapiens
tgaagaagccaaataccaggtctgctctgcttattactcaacactcagtaggtagtaacttcagcccttcttaccacttactatttgtgttttcgattttgttcccttttattttgtgcttgcttcttgatgacacttttttttcttctcttcttatttatccctcaatgctgtgtgtttacagcatcagggatgctttgaagtgggaccacacagatccctcttgaytagaaagaactccttggattaggttctaaggtgtcacaaatcagctaggcagctaggctcagtgcaacatgaaatggggtgaaaagaaatgtcttaatatctatcgctaactccaacagaagaagacagtgcactgcccaaggcgactacacaaactcagaattattcaaggacacaccagtatcaaataaatttagtatctacagattaaccacagcagaaggggtctcagttaactgcaaactgtatttggcatcaggtcagagaccataatgtggtttggataatcatttcaaaccccaaatgacaaagcgttggggaaaggagaggaaatttca

SEQ ID NO: 408666 - DNA, 590 bp, Homo sapiens
ggaataaaaccaatgacctgtgcattgtcaggtctgctacccctagggaccactgccctagttgaaaactgaggcttaaagacttaaattacttttccaagctcatgcagccaaggaatggcagagctagattttgaagtgtgctacctcttaccatggcctaagtagttaaccagtgcccaggactgatgcttacagtctgacatggagcaattactcaatacattgttgtgtattctgtgagataatgtaaaatgcactttatagttctcccaaccaagggtgaggaaaatggaggctttatccactcagtctccacctatgattggccaatggctggattcctacaggctagggtcaggggtggtgagaggtaacatgtaccctcagagtatcacaagtgttaaatattaaaagccatagccatcgayttgaattggccgttttccattaactacccttctgtaagtggagaatatggtgggataatgacagcatcttctacacagaataaactcctaatcctatgagtaggagttagatgttgcccggatttgtatcctcagtacatggctgccagataggtactg

SEQ ID NO: 408667 - DNA, 632 bp, Homo sapiens
ttgtcaaactttagaagaatttgcagttacccatatcacattctagttctgcaatgtaggtgtagtttagatttatgaaataattgattctgttggcaatttgcacttggacgtgattggatacattcacatccaaagccatgggctctgcaatgaatttagtaccactttacatcaggcttaatatgttacatttctgccaatcagattaaaacaacaccggaacttgaataattgatttgttcattatcaaccctgtttctatcttttagaaaatccttaatattatttctgtaatgattgatgaatgagtgtaatgagtgacaaacatctcaaatagagaggacaatttttaataaaaagaaagacaaccaaagttacatataaaagtgattagcatattattttgagattgcctgtacgggaagcatttgttacccctatgctacatgtatatgctaatctgcttaagaatgcatactgtacagtaggtctggttcctgagagtattttttgaaacacagaagcatagaatcagaattataatgcgtgatggtgattgcaaaaatttaaaaaattcatagartatgatgaagaaaaaaataaagatagtaacttcatgcaatgcagaa

SEQ ID NO: 408668 - DNA, 575 bp, Homo sapiens
aaaaaaaataaaaatcaccaagtgcatatttcagttttataaaatgataacttaaggtgtaaaaaatactcaataatatagtcctgaatttccaatacttggaaattttatttccttttatcagtgtacataagcttttgcaggctactgtcattaatgtgcactaaaattgaggmtacatgatcttgttctgtttttatcttcatggtttatgaaataatattaaaagcttagaatctctgccactaccatttataaactcttcattgagcatatattgagttttcttaatgtgcttgatgacctttaatatcctgactatatattaacgggttctctggtccttcaatgaaaaattgcaagggctgtgagagggcacataacaaacaaaattattatgtccttttagtttggttattttaaacatctgaaatcattattgttattaattcaattctaaaagaaggacttgaacatctttaagagcctttctatctcaaaaatgtgattctgcagttcaatcactttaaattattttcttttggaggaaagcagaaacaggaatctcacaacac

SEQ ID NO: 408669 - DNA, 597 bp, Homo sapiens
gttttcgttcaagtcttaaacatataatgttttggatccagatcatgtgttttacacactggttattacctaatgaataaaaacaatgatgtctgattctaagatggtctctcccttattgatgacaagaaaaatcttctcagtaatcttatattgtccattgagataaatatgtagggtataatttcactggtcacacgaattatttaaagcatgacatgaattagtaaacgtgtattttgtcatcagcatcatcagcgccatcactttgtacaccgttattgtcataattaccactgttgtcattgccaagaagttttccttttcttttttctcatcttcctcctccagktcacaaaaatcatgctatcaagttttgccaaaaaaatccttaatatctactttaagaagcagttagtaacagaaaacattgttttataaattgatgtgttctgctgaaaaattttaaaagacatgttcccttaaatagctaatgcataaactctctgtactagttttctgttgctgttagtaccacaaactctgtggcttaaaacaacatatacctattgtctcacagtttctgtgaattaggag

SEQ ID NO: 408670 - DNA, 618 bp, Homo sapiens
gagggggatgtggcttaatgtggcgtgtggcctgtgaatcaagtagaaggctaataattcacacttcgtggttttaaacaaaatagaaatgtaacttgggactcctggaaatgatcgaaatcacaaacaaaaaaagtgatgtgttcttcacttttcatgtaagtcatacttgacataaaacacatgtattaaaaaatgaataattacctagaatagtgttttaccagccaatatctcaacatgtagcagtcagtgatgagtaatcctatgcatttatartgagaattatcctcactatcaaaaatacttcagggtccaacttaattatagaaacaaatttagttgagactcttagacaaatggatctatgatgtatttccctgtcacactgttcttctttatgtaccccaaactaaaaaagccatattatctgaacttttaaaagattgtagggtagcagttttttaaaggttattcataatcagcatttgaaaatagcacttcatctctcatattggcttaacatgccagctttagttgttatttattacctattaaatctgattgaaacaaagcaataagagagtaatatactgtagcacaatttgtttcttacct

SEQ ID NO: 408671 - DNA, 675 bp, Homo sapiens
tgcaacagctatttattaagcagagaaataattatagctagtaggtcatcagctttaatatttcttcttaaaaattcatcaatggtttccagtccctttagaatcaaatatcaacttgctactatggcttaacagaaaatactatgagctgaccttgattgatatctctattatcatctcatatcctcctttcctttgcttaccatttgtgaaaacacctttgccccagccttgtatgcctttttttttttcggttcttaaaacattgcaagctgtctcctggctcaagactgtatataagccagtctcccattctggtaaagctctacccctggtctttcttgccggcttcatccttgatatctcaacctgaatgacatctcctccaggacgctccttgaattttctgcctgccttgktctctgttgttaacttcttttacagaatcctgtttgtttattgcattcatctttactgattgtttaggaatgtttgctttttcaattttttcttccggggatcacagctgtctattaattattatactcctagtgcctaccatactgcctgacacaatatttggtgtcttttagacactaaaaaatatttgttgaatgaattaaccaacaatagagttacaatatctggtatataaactatagaatctgagttctg

SEQ ID NO: 408672 - DNA, 563 bp, Homo sapiens
tcatccgtctcccctctctcctttctgcaaggaaataaaatgtattccaagagatataattaaaactttcaacattgttctggtctcatggtcattcttttaaaatcagaagtaaccttcattttgaaattcctatgcatctttcccttcagaarttataaatttactaaatgtctatataaacaatcttaagattgaatattgtcttgaaacattttatagtttacttatgttagtatcattgtgtatatattttcctgcaactggtgtcttcattagcatgaaatttttagagatttatatatgacacatgtaaatgtatattattctccttacctgctttcaattatactatactactgtaataccgtttattcaggccaataattgccttttatgtttttcatttttcagtaatcctaagggttcagaacaacatgtgaaagagggcctgctttctctttcacttgcagcagggtttcccaggactgtgaattttgattgataggtctcagagaatgcacctctttattaacacaaaattgttctctaaaatgattgtt

SEQ ID NO: 408673 - DNA, 563 bp, Homo sapiens
tcatccgtctcccctctctcctttctgcaaggaaataaaatgtattccaagagatataattaaaactttcaacattgttctggtctcatggtcattcttttaaaatcagaagtaaccttcattttgaaattcctatgcatctttcccttcagaagttataaatttactaaatgtctatataaacaatcttaagattgaatattgtcttgaaacattttatagtttacttatgttagtatcattgtgtatrtattttcctgcaactggtgtcttcattagcatgaaatttttagagatttatatatgacacatgtaaatgtatattattctccttacctgctttcaattatactatactactgtaataccgtttattcaggccaataattgccttttatgtttttcatttttcagtaatcctaagggttcagaacaacatgtgaaagagggcctgctttctctttcacttgcagcagggtttcccaggactgtgaattttgattgataggtctcagagaatgcacctctttattaacacaaaattgttctctaaaatgattgtt

SEQ ID NO: 408674 - DNA, 554 bp, Homo sapiens
agtaggtagtatgtgaatgattgttaaatttaagaatatctcctttgctccattgattgggtcataaattgacatcagcttttttcttggctgataatcagccttatgcttccttttgctaattctatagagaaaagtactatgatgtattattgcacaacatacacagaaacacacatgtgaatttaattttatatatctatgttcagtggaaaggagatttaaagatgcagtggacgtgttcctcaatttcatttggttatattagaaataaatccacaacatatgaattatttctaaatataataggaactattttcaaagtgtgtttttttccacagtttagatttgcttgggggagaaaagttagtgaaataattgatggatacattcttaartagaaaagctttatgtcccttaccaactcagtttctcaaatattataaccactttatatttaccttcccactttcctccaaagtacttgctaacaaaatttttatttgcattagaaaaatccattagaacttaaaataagcataagttcaatcaat

SEQ ID NO: 408675 - DNA, 554 bp, Homo sapiens
agtaggtagtatgtgaatgattgttaaatttaagaatatctcctttgctccattgattgggtcataaattgacatcagcttttttcttggctgataatcagccttatgcttccttttgctaattctatagagaaaagtactatgatgtattattgcacaacatacacagaaacacacatgtgaatttaattttatatatctatgttcagtggaaaggagatttaaagatgcagtggacgtgttcctcaatttcatttggttatattagaaataaatccacaacatatgaattatttctaaatataataggaactattttcaaagtgtgtttttttccacagtttagatttgcttgggggagaaaagttagtgaaataattgatggatacattcttaagtagaaaagctttatgtcycttaccaactcagtttctcaaatattataaccactttatatttaccttcccactttcctccaaagtacttgctaacaaaatttttatttgcattagaaaaatccattagaacttaaaataagcataagttcaatcaat

SEQ ID NO: 408676 - DNA, 578 bp, Homo sapiens
accatctgcatatggtacattttggtgataatatctgaccttctgggagaagagatatgttacatatgttacatttgttacaagagaatgtcttaccccacccccacggacccagaaagggtccttctgggagaagagatatgttacrtatgttactttcgttacaagagaatgtcttaccccacccccacggacccagaaaggcgtgcacatgtggatggcaggagagtgactgcagatacttcctgtgttgctatcctttgctccaggtgggtactggtcacaggcacaggccagaaggctccccagagtctgatcctgtctcaaacccagctggctatcctgcaacccccaacccactggtctttgggagtggacaacagcccacgtctccaggtggccgggccccctgtgcaggcatgttatagcaagttgtgtttttctggtttgtctgtgcccaacatggtgtgaccatggaggggacactgaacagacctgggggtggtggtactgaggcagaggcaggcgcacagttgtttccaagggagaaaatgaattcatgatctaaaatgcaaaac

SEQ ID NO: 408677 - DNA, 562 bp, Homo sapiens
tttttaagacagggtcttgctatgttgcgcaggctggtctcaaattcctaggctcaagtgattctcctgcctcagcctcccaaagtgatgggattgcaggcatgagccagtacacctggctgaattttatctttcctaccagccttttcatatgagctgagcctgcaggctgtgcctaagcatagccctttgaacttgatagactgcgagcttggaaagactcctttgcagtctgagtcctctggcaaatacrctagcttggttaagtggacttttctttgattgatgttggctgcatctagaaagcaggattgccaccactccttgaagcaccctatgattagagtgtctgagtgctgcttctgctctgctgaggctgttgacaaattgcctgaaaagaccccctgtcagaggatgatgggctcgtctgcagcagggccacttgcagcccaattgcttccaagattaaacctttccaaagcggtctgcactgcccggtacacagttgggccactggtttaagattacagatgaaggtactgaattggatctcatttaaaaa

SEQ ID NO: 408678 - DNA, 479 bp, Homo sapiens
gagctgctgtgcagatgaaatgagataatgtaagtgaagtttctggcatgcagctggagctgagggatgttcttcttcttgtcctccttcatctgctcaaagggctgcgccaagagtctgctgtgtttcaggaaatttctctgagtgagtctctatttcttactagcagtgaaccacagcaggcctttcccagctcctgcccccagtactgttccctctaggtccttgtaggtggtccaggaaaggaggcaggggacaaggccaaagaacagcagcaaagcagggagaggcctattccgtcccccagtgaggagagatctcggtgacctccggcccacctggctggaacttagaaggctcaggaaatttatacttagaggggaacaggtgaaacagacatggagctcaggtttgtttgtttgtttgttttgkttttgagacagagtctcgctctgtcacccaggctgaaacagtcaaca

SEQ ID NO: 408679 - DNA, 546 bp, Homo sapiens
cttagagacgagagagcgcgccayggagagattttaagtgggacaggttttagcaggatcagacatattttagaaagataattttagcagatgcatggagggtggttttgtccagggagaaactggtggcacagggtcaagtttggaagatcttgaagaagtgagaccaagagatgaaaaacaaattaaggccgggaatggtggctcacacttgtaattccagcactttgggaggctgaggcaggtgaatcacttgaggtcaggagttcatgaccagcctggccaacatggtgaaactccgtcactactaaaaatacaaaaattagccaggtgtggtagtgggtgtctgtaatccccactactcgggaacttaaggcaggagaattgcttgaacctgggaggtggaggtgtcaataagcagagattgtgccactgtactccaggttgggtgacacagcgagaccctgtctcaaaaaataaaaaaaagagagaaaaaagaaaagagaaggaaaacacattaaaatgacagtagtaagagaggcgatg

SEQ ID NO: 408680 - DNA, 546 bp, Homo sapiens
cttagagacgagagagcgcgccacggagagattttaagtgggacaggttttagcaggatcagacatattttagaaagataattttagcagatgcatggagggtggttttgtccagggagaaactggtggcacagggtcaagtttggaagatcttgaagaagtgagaccaagagatgaaaaacaaattaaggccgggaatggtggctcacacttgtaattccagcactttgggaggctgaggcaggtgaatcacttgaggtcaggagttcatgaccagcctggccaacatggtgaaactccgtcactactaaaaatacaaaaattagccaggtgtggtagtgggtgtctgtwatccccactactcgggaacttaaggcaggagaattgcttgaacctgggaggtggaggtgtcaataagcagagattgtgccactgtactccaggttgggtgacacagcgagaccctgtctcaaaaaataaaaaaaagagagaaaaaagaaaagagaaggaaaacacattaaaatgacagtagtaagagaggcgatg

SEQ ID NO: 408681 - DNA, 546 bp, Homo sapiens
cttagagacgagagagcgcgccacggagagattttaagtgggacaggttttagcaggatcagacatattttagaaagataattttagcagatgcatggagggtggttttgtccagggagaaactggtggcacagggtcaagtttggaagatcttgaagaagtgagaccaagagatgaaaaacaaattaaggccgggaatggtggctcacacttgtaattccagcactttgggaggctgaggcaggtgaatcacttgaggtcaggagttcatgaccagcctggccaacatggtgaaactccgtcactactaaaaatacaaaaattagccaggtgtggtagtgggtgtctgtaakccccactactcgggaacttaaggcaggagaattgcttgaacctgggaggtggaggtgtcaataagcagagattgtgccactgtactccaggttgggtgacacagcgagaccctgtctcaaaaaataaaaaaaagagagaaaaaagaaaagagaaggaaaacacattaaaatgacagtagtaagagaggcgatg

SEQ ID NO: 408682 - DNA, 545 bp, Homo sapiens
tgtggctcatgtcagtaattccaacactttaggaggctgagttgggcaggttacctgtggtcaggagtttgagaccagccttgcaaaaccctgcctctactagaaatacaaaaattagctgggcatggtggtgggcacctgtagtcccagctactcaggaggctgaggcaggagaatcacttgaacccaggaggtggaggttgcaatgcaccaagattgcaccaccgcactcccatctgggcaacagagsgagactccgtcttaaaaaaacaaaacaaaatacagtttcaatgcctaaattttcagtaaataagatattatcttagttgagtcttttcaaaatatttgaagcactttctcagttacttcattttaaataaaatgctctgaatgagatcatacgcaagcacctatgggatgtcctggtgtttcaaaatgggcactggtggcttgggataaaatttattgtgactctgtcagacgtggattcaaaacaggctgtatgtcccactaacagtgcattaaaatggcagctagggccagct

SEQ ID NO: 408683 - DNA, 587 bp, Homo sapiens
tcccatgactggcaagtaattatatgaagaataaattacttctttcatgaaaaagaaaatcaacactagtgtattttcttcagccactaaaattctgcaggaacacagatatagtargaaactcaatcatcacatcaggccgggtatggtggctcatgcctgtcattccagcacattgaaaggccaaggcgggtgggtcacctgagttcaggagttcaagaccagcctgaccaacttggtgaaaccccatctctgctaaaaacacaaaaattagccaggtatggtggcgcatttctgtaatcccagctactcaggaggctgaggcaggagactcacctgaacccaggaggtggaggttgcagtgagtggagatcacaccactggactctagcctgggcagcgagagtaaaactctgcctcaaaaaaaaagaaaagaaaagaaactcaatcatcaatatttagtcactcttaagactgacccaggaataacagagcagataaaatccagcaaattagacttcattcaagtacttaggtgtactgtgagccaccatggtgcctctaaacaccatggaggcagtggtcac

SEQ ID NO: 408684 - DNA, 587 bp, Homo sapiens
tcccatgactggcaagtaattatatgaagaataaattacttctttcatgaaaaagaaaatcaacactagtgtattttcttcagccactaaaattctgcaggaacacagatatagtaggaaactcaatcatcacatcaggccgggtatggtggctcatgcctgtcattccagcacattgaaaggccaaggcgggtgggtcacctgagttcaggagttcaagaccagcctgaccaacttggtgaaaccccatctctgctaaaaacacaaaaattagccaggtatggtggcgcatttctgtaatcccagctactcaggaggctgaggcaggagactcacctgaacccaggaggtggaggttgcagtgagtggagatcacaccactggactctagcctgggcarcgagagtaaaactctgcctcaaaaaaaaagaaaagaaaagaaactcaatcatcaatatttagtcactcttaagactgacccaggaataacagagcagataaaatccagcaaattagacttcattcaagtacttaggtgtactgtgagccaccatggtgcctctaaacaccatggaggcagtggtcac

SEQ ID NO: 408685 - DNA, 207 bp, Homo sapiens
actccaaacagggagaattgggcagctcagctcgtgcttaaaacccagactccctgacggcttcccaatggcttgtgggcaagggyttttaaaggtggggaggatctgggcacggcactgacgcctataatcccagcactttgggaggccgacgagggtggatcacttgaggccaggagttcgaggcgagcctgggcgacatggtga

SEQ ID NO: 408686 - DNA, 307 bp, Homo sapiens
ctggtctgcacttgaagcttttgaactgtttactgcttgatgtccagaaatggccacattctcagtattggtgctttcgctattgtcactttgccacctcctcttcctcttggtcatcttggggacttgaacacaggacagaggagccaaggctgtcttcctggttcacacgctctccttgtcagggggcagtaggctgtgtatttgagttgctaaccgctaagaaggaatacagcratgacgggagggggtccctgaagacttagctaacacagtgaagctggcagggcgctgtggttcatgccta

SEQ ID NO: 408687 - DNA, 561 bp, Homo sapiens
atgggtcatagtttgtggtgtccccaaacaatggcaatagtaacatcaaagctccctgactgcacatcaacatatcakacataataatagtgaaaaattagaaatgttgtgggaattaccaacatatgacaaagagacatgaagtgagcacctgcagttggaaaaatgttgctgacacacttgtttgactcaaggttgccataaacttcaatttgtgaaaaagcacaatatctgtaaagcataataaagtaaagctcaatgcaacaaagtatccctgtataaaaatcagttgtctttctatatgtttgcaataaatgatctgaaagtgaaagtaaaaaaaaatccatttatagtagcatcaaaaagagaataaaatgcttaggaataaatttcgcaaaagaaacacaaaacttgtgcctaaaaaccataaaacactgctgaaagacactaaactaaacggaaggatgtccaatgttcatggagtggacgacttaatatttttaagatggcagtagtcacaaagtggatttacacattcaaggtaacgcctatcaaaattcc

SEQ ID NO: 408688 - DNA, 601 bp, Homo sapiens
agcttagctaggctggtctggaactcctgacctcgtgatccacctgcctcagcctcccaaactgctggtattacaggcatgagccactgcgcttggctgctttcttttttttttttttttagatggagtcttgctgtgttgcccaggctggagtgcagtggcatgatcttggctcastgcaaactctgcttcctgggttcaagtgattctcctgccttggcctcccgagtagctgggataacaggtgcccaccactatgctcagctaatttttttgtactttttttttttagtagagatggggtttcgccatgttggtcaggctgttattgaactcctgacctcaagtgatctccccatttcggcctcccaaagggttgggattacaagcatgagccaccatgcccagccagtatgaggtttctttctgagctgatgaaaatattctggaattagggtattggctgcacgacttggtgaatacactaatagtcatttaactgttaaaagaaaagcaaaaacaaagttgatagtgaaaagtaggtctttctcccgtccacatccacctgtcatccagctgcctagcctggaggtaaagatgg

SEQ ID NO: 408689 - DNA, 601 bp, Homo sapiens
agcttagctaggctggtctggaactcctgacctcgtgatccacctgcctcagcctcccaaactgctggtattacaggcatgagccactgcgcttggctgctttcttttttttttttttttagatggagtcttgctgtgttgcccaggctggagtgcagtggcatgatcttggctcactgcaaactctgcttcctgggttcaagtgattctcctgccttggcctcccgagtagctgggataacaggtgcccaccactatgctcagctaatttttttgtactttttttttttagtagagatggggtttcgccatgttggtcaggctgttattgaactcctgacctcaagtgatctccccayttcggcctcccaaagggttgggattacaagcatgagccaccatgcccagccagtatgaggtttctttctgagctgatgaaaatattctggaattagggtattggctgcacgacttggtgaatacactaatagtcatttaactgttaaaagaaaagcaaaaacaaagttgatagtgaaaagtaggtctttctcccgtccacatccacctgtcatccagctgcctagcctggaggtaaagatgg

SEQ ID NO: 408690 - DNA, 545 bp, Homo sapiens
cattcacattgttgtgtggccatcaccatgtggtgaattcttgacattcatagtctatgccctgaatggggctcaccatgtagtgaggaaatcctgacacaacgtggcaagtacagtgatgaaggtgccaccacaggggcccacactggagggggaagaaggaatgttcagcattttgacagtaggaaccgatgtcgtagaaagcacttgtagcctcagtctgaaagtaagctatgaagggaataggttgagatgccttaaagagtttaacaggttctagcatcgtcaggcctctgagaacaggatttatttaatccttatttagtctataatagtttattgggtggtcggaaaaagtgaatgcattttcaaaggtggacaatttacttctcacttatatttaggttccagttcwatatatatatatataaatgcattaatatatttccaatctctggagcagacattcagaacaggtaatacacacaattatggtaatgagctgactgagaacatgcgccacacaagtatgccaatttaaggtc

SEQ ID NO: 408691 - DNA, 571 bp, Homo sapiens
tcctttaaacaatctctccctatcccaccctcaccctctcagccttaataatcactattctactttctgcttctatgagaacaacttttttagcttgtgaaaatgggtaagaacatgtggagaacatgagtaagaacatgtgtttacctttcagtgcctggcttatttcacttaacattaagtcctccaagctcatcagtgttgttgcaaatgacaggatctcattctttttacggccaaatagtattccactgggtatatataacacattttctttatccattcatctgttaayggatacttttatcttggttattgtgaatagggctgcaataaacatgggagtacagatacctgttcaatatactgatttccttttttaaaaatttatacaccatagtgagattgctggatcatgtggtagttctagttataggttttagagggacctccatacttttttcaataatggctatggtaatttataagtccaacagtgtataagagttgtcttttctctgcatctttgccagaatttgattttttttgtctttttgttaatagccattct

SEQ ID NO: 408692 - DNA, 560 bp, Homo sapiens
tttcataattgtaggtcttacatttagatctttaattcattttgagtaatttttgtatgtggtataatgataaaactttattattttgcatgtggatattcagttttcccaacaccatatattgaagacattgtcctttccccattgagcggtcttggcacccttaaccatatatgtgagagtttatttctaggctttctactctrttccattggtctacctgtctctctttatgccagtaccatactgttttgattactatatctttgtaatattttttgaattcagggagtgtaagttcttcaactttgttcttttggaaagttgtttagctgtttggggtcccttgagatttcatataaattgtaggatgaatttttctatatctgcaagaaatatctttggaattttgatagagattgaaataaatgatctttgaggttctttgtgatattaaagtgatgtagtatatatgtatcacttaagtagcaattcagttctgggattattattaaattctttacctccagatgagaagaagggacatttattcagctcct

SEQ ID NO: 408693 - DNA, 570 bp, Homo sapiens
ttatttcattatcctcacaaccttatgtaggtaggcaaggtactaacctcatttttcaaataaagaaaccaaaattgagagaaattatgacttgcatggttccatgatctttccatctcatcacacaatctgatttgcttcagacacctaatggttttaaatactaattaaaaaacatatgaaatgctggttcttcagaattgtctttggaatgaagtactaattcacctgcttactgcatcttctgacctctccaaacctctcaccatccacattgtgttttctcaaygattcaacctaacagggttcttatattgctccttttgatcagttgtggcagtatcagaaacagggatatgaaggtcctgggtccatgagacttgccattaggggctgatctgtgtctcttgtttctctacaataacttgattgctgttgttggcagcacttacctatagaagagctcctaatgaaacaggctggctggcttcctgttgtgatctgctctagaggagaacagaagcccctactcaagccctagcttacctaactctcagcaaatcagtaaca

SEQ ID NO: 408694 - DNA, 596 bp, Homo sapiens
ttttctcattcaaacaagtttttttttkttttttttttgagacaggttttcactatgctgcccatcctgggctcaagtgataccccgcttcagcctcccaaagcgctgggattacaggcatgaaccacacgcctggccccctttgaaacaagttttaacatggcttttgataatatgagttgttttcatttcaggaagtacaacactgtgttatagcagagaagactgcatgactttaaacatcactacacaatgtaccctctattaaatataaagcattttgtcaataaggaaagctattgcaatatattttgagaattggagggctttagataattgacaactctgccatgcaaatttgccaaatctttacatcatctactatagactgtacactacttttgctttaagttctgcagaaaaacaagtcctgaaatccttctgggttcactatttgagtcccattactcttacagaggaagttttcccaactgctaatcaaaatttcacctattactactttacaagatcattcttgaaacaattgttggtagtaaaaggtgcaactttgtggaaaataccagtgctttctttca

SEQ ID NO: 408695 - DNA, 596 bp, Homo sapiens
ttttctcattcaaacaagttttttttttttttttttttgagacaggttttcactatgctgcccatcctgggctcaagtgataccccgcttcagcctcccaaagcgctgggattacaggcatgaaccacacrcctggccccctttgaaacaagttttaacatggcttttgataatatgagttgttttcatttcaggaagtacaacactgtgttatagcagagaagactgcatgactttaaacatcactacacaatgtaccctctattaaatataaagcattttgtcaataaggaaagctattgcaatatattttgagaattggagggctttagataattgacaactctgccatgcaaatttgccaaatctttacatcatctactatagactgtacactacttttgctttaagttctgcagaaaaacaagtcctgaaatccttctgggttcactatttgagtcccattactcttacagaggaagttttcccaactgctaatcaaaatttcacctattactactttacaagatcattcttgaaacaattgttggtagtaaaaggtgcaactttgtggaaaataccagtgctttctttca

SEQ ID NO: 408696 - DNA, 596 bp, Homo sapiens
ttttctcattcaaacaagttttttttttttttttttttgagacaggttttcactatgctgcccatcctgggctcaagtgataccccgcttcagcctcccaaagcgctgggattacaggcatgaaccacacgcctggccccctttgaaacaagttttaacatggcttttgataatatgagttgttttcatttcaggaagtacaacactgtgttatagcagagaagactgcatgactttaaacatcactacacaatgtaccctctattaaatataaagcattttgtcaataaggaaagctattgcaatatattttgagaattggagggctttagataattgacaactctgccatgcaaatttgccaaatctttacatcatctactatagactgtacactacttttgctttaagttctgcagaaaaacaagtcctgaaatccttctgggttcactatttgagtcccattactcttacagaggaagytttcccaactgctaatcaaaatttcacctattactactttacaagatcattcttgaaacaattgttggtagtaaaaggtgcaactttgtggaaaataccagtgctttctttca

SEQ ID NO: 408697 - DNA, 599 bp, Homo sapiens
ttgttttgggtctaaataaaggagttctttgaatcccaaagttcttccatattctgaatttgacttataaggacagtggtcatattcttaggactttgaaggagacagactccaagcaaagagtcagtgcatagggatacttataactggagtcgcttctgaactttttacgtaaagctgaggaagctaagtctgtgaagaaaaatgcatttcctctcatacaaaacttccttcaaattttattcttaagaatagattacctttaccattaccttctgccataggtagaacaggcaagaaggcacatccattagtttcttttctatctttagctgtgacttttaaaaatataaaaaaatagcccagaggttctgttcatagacttcctaccttgtaaagaggataaagttgctccatgatcttactgtgttggcaaaacctcttccacctaagcatgtgtaaatatttactctgggccagctgggyaattctctctgtgtaatactttaacaacaagaaaaataagcacttagagaaggaagattgaataaagtcttaagaacactaacgaggaaaatcagtctctggttgttttggaa

SEQ ID NO: 408698 - DNA, 621 bp, Homo sapiens
cgactctcacttgcaatcaaaagctaaatatgattaagcttagcaaggaaggcatgtcaaaagctggaataggccaaaagctaagcctctggtgcaaaacagccaagttgtgaaygcaaaggaaaagtttttgaaggaaattaaaagcgttactctaatgcatacaagaacgataagaaaggaaaatagccttattattgatatggaaaaagttttagtggtctggatagaagatcaaatcaaccacaaaattccctgaagcccaaggctaatccaaagcaaggtcctaactctctccaattccttgaaggatgagagaaaagtttgaaactagcagagactggttcatgagggttaaggaaagaagccatctccataacaaagaagtgtaaggtgaagtgtggtaaatgctgatgtagaagttgcagcaagttatccagaacatctagctaagataattgatagaggtggctacattaaacaatagattttcaatgtagacaaaccagtcttccactgaaagaagatgccatccggtatttttatagctagagaggagaagtcaatgcctggcttcaaatcttcaaaggacaggttgactcttttgttagagattaatgc

SEQ ID NO: 408699 - DNA, 621 bp, Homo sapiens
cgactctcacttgcaatcaaaagctaaatatgattaagcttagcaaggaaggcatgtcaaaagctggaataggccaaaagctaagcctctggtgcaaaacagccaagttgtgaacgcaaaggaaaagtttttgaaggaaattaaaagcgttactctaatgcatacaagaaygataagaaaggaaaatagccttattattgatatggaaaaagttttagtggtctggatagaagatcaaatcaaccacaaaattccctgaagcccaaggctaatccaaagcaaggtcctaactctctccaattccttgaaggatgagagaaaagtttgaaactagcagagactggttcatgagggttaaggaaagaagccatctccataacaaagaagtgtaaggtgaagtgtggtaaatgctgatgtagaagttgcagcaagttatccagaacatctagctaagataattgatagaggtggctacattaaacaatagattttcaatgtagacaaaccagtcttccactgaaagaagatgccatccggtatttttatagctagagaggagaagtcaatgcctggcttcaaatcttcaaaggacaggttgactcttttgttagagattaatgc

SEQ ID NO: 408700 - DNA, 621 bp, Homo sapiens
cgactctcacttgcaatcaaaagctaaatatgattaagcttagcaaggaaggcatgtcaaaagctggaataggccaaaagctaagcctctggtgcaaaacagccaagttgtgaacgcaaaggaaaagtttttgaaggaaattaaaagcgttactctaatgcatacaagaacgataagaaaggaaaatagccttattattgatatggaaaaagttttagtggtctggatagaagatcaaatcaaccacaaaattccctgaagcccaaggctaatccaaagcaaggtcctaactctctccaattccttgaaggatgagagaaaagtttgaaactagcagagactggttcatgagggttaaggaaagaagccatctccataacaaagaagtgtaaggtgaagtgtggtaaatgctgatgtagaagttgcagcaagttatccagaayatctagctaagataattgatagaggtggctacattaaacaatagattttcaatgtagacaaaccagtcttccactgaaagaagatgccatccggtatttttatagctagagaggagaagtcaatgcctggcttcaaatcttcaaaggacaggttgactcttttgttagagattaatgc

SEQ ID NO: 408701 - DNA, 621 bp, Homo sapiens
cgactctcacttgcaatcaaaagctaaatatgattaagcttagcaaggaaggcatgtcaaaagctggaataggccaaaagctaagcctctggtgcaaaacagccaagttgtgaacgcaaaggaaaagtttttgaaggaaattaaaagcgttactctaatgcatacaagaacgataagaaaggaaaatagccttattattgatatggaaaaagttttagtggtctggatagaagatcaaatcaaccacaaaattccctgaagcccaaggctaatccaaagcaaggtcctaactctctccaattccttgaaggatgagagaaaagtttgaaactagcagagactggttcatgagggttaaggaaagaagccatctccataacaaagaagtgtaaggtgaagtgtggtaaatgctgatgtagaagttgcagcaagttatccagaacatctagctaagataattgatagmggtggctacattaaacaatagattttcaatgtagacaaaccagtcttccactgaaagaagatgccatccggtatttttatagctagagaggagaagtcaatgcctggcttcaaatcttcaaaggacaggttgactcttttgttagagattaatgc

SEQ ID NO: 408702 - DNA, 639 bp, Homo sapiens
actgaattgctgcattctcgtgataaaacttaaacaratgaggaggtacttcttatggatgagctaagaaagaaagcggtttcttgagatggaatctactcctggtgaagatgctgtgaacattgttgaaatgacagctaaggatttagaatattacataaagcacagtttgagagaattaacttcagttttgaaaaagttttactgtaggtaaaatgctatcaaacagtattacatgccaaagagaaacttttcatgaaaagtagagtcaattaatgtggaaaactttattttgtcttattttaagaaattgccagagacccctggcccccaaccttcagcaaccaccaccctaatcggtcagcagccttccatatcaaggtaagaccctccaccagcaaaaagattacaactcactaaaggctcaaatgattattagcagtttttagtaaaaatatatattttttctttttttataacttaatattctttggtctgcaagtgaataatgtatatttaattaaggtatatgtacattgggtttttttaagacaaaatggtattacacacttaattggctacagtgtaatataaacataacttttatatgcactcagaaaccaaaaaatttgcatggaa

SEQ ID NO: 408703 - DNA, 639 bp, Homo sapiens
actgaattgctgcattctcgtgataaaacttaaacaaatgaggaggtacttcttatggatgagctaagaaagaaagcggtttcttgagatggaatctactcctggtgaagatgctgtgaacattgttgaaatgacagctaaggatttagaatattacataaagcacagtttgagagaattaacttcagttttgaaaaagttttactgtaggtaaaatgctatcaaacagtattacatgccaaagagaaacttttcatgaaaagtagagtcaattaatgtggaaaactttattttgtcttattttaagaaattgccagagacccctggcccccaaccttcagcaaccaccaccctaatcggtcagcagccttccatatcaaggtaagaccctccaccagcaaaaagattacaactcactaaaggctcaaatgattattagcagtttttagtaaaaatatatwttttttctttttttataacttaatattctttggtctgcaagtgaataatgtatatttaattaaggtatatgtacattgggtttttttaagacaaaatggtattacacacttaattggctacagtgtaatataaacataacttttatatgcactcagaaaccaaaaaatttgcatggaa

SEQ ID NO: 408704 - DNA, 639 bp, Homo sapiens
actgaattgctgcattctcgtgataaaacttaaacaaatgaggaggtacttcttatggatgagctaagaaagaaagcggtttcttgagatggaatctactcctggtgaagatgctgtgaacattgttgaaatgacagctaaggatttagaatattacataaagcacagtttgagagaattaacttcagttttgaaaaagttttactgtaggtaaaatgctatcaaacagtattacatgccaaagagaaacttttcatgaaaagtagagtcaattaatgtggaaaactttattttgtcttattttaagaaattgccagagacccctggcccccaaccttcagcaaccaccaccctaatcggtcagcagccttccatatcaaggtaagaccctccaccagcaaaaagattacaactcactaaaggctcaaatgattattagcagtttttagtaaaaatatatattttttctttttttrtaacttaatattctttggtctgcaagtgaataatgtatatttaattaaggtatatgtacattgggtttttttaagacaaaatggtattacacacttaattggctacagtgtaatataaacataacttttatatgcactcagaaaccaaaaaatttgcatggaa

SEQ ID NO: 408705 - DNA, 544 bp, Homo sapiens
aagcaaagttcactttgtatgtgtgggatcacaagggctttcaagaatcacttcatctccatttcaccctgaaagctgcaataccatgggggtgttggtgatcgtgacttgttgaaaaggctgctaagcagataagtgcattagtgaagatttattatatttgagagattcaraagggtgataggctaaagctaattgatgaacattgccctaccaaataaataaaccctacagtgaagtgtcttgtgggcccattggcccagtggctatgtacaatacgggaaccccaagcaaaaaacctcaaggccagggaaggtacacagttagctggaacttcagatctcaggtctgacttcttaagcaaggcctatgagacaagtcagataaatactcattgaagaggaatttatacatggctgaaatgtaagaacacagttaattttctaaaaattagccctgcactaacacaaatgataaaaaattaaggaatttttagattacttgaagtatgagctgtgttttcttccttaactggaaatggctt

SEQ ID NO: 408706 - DNA, 587 bp, Homo sapiens
caatacttcgggccttaccttggtttcagggaaactggtccccaccatggaagatagttcctgggtaaatatggcaaaaggaggtctgggcaccttgcagggcctgggcgctcaccactatgtccgtgagacrcctgctgagcacaaggtgaggtgttgtgctgaggttttttcttccttgattatcctgcctcccaaagccaccctctagataagacctggaatcaattaacatgatggagtaacacatgagggtttcttagggaagaggccttttaatcataataaaacacaaggtctgcttaagagcaagtcacaggcagagagtgccctaaagcagccctggaggccacactgagaaggaagaaatagagcatgagaagcccttctgttatcctggcctgagaactttacatccttacagagaaactcttagaagactccccttgacattgctatatgtaccttttttgcctcttttctgttttccaagcttcaaatgaaaaaaaaactcaaaacagaggtagaaaaacattggaaagagctgaacaataaagaaatattttatccctacaaacacctgcttg

SEQ ID NO: 408707 - DNA, 548 bp, Homo sapiens
ccccaccatggaagatagttcctgggtaaatatggcaaaaggaggtctgggcaccttgcagggcctgggcgctcaccactatgtccgtgagacacctgctgagcacaaggtgaggtgttgtgctgaggttttttcttccttgattatcctgcctcccaaagccaccctctagataagacctggaatcaattaacatgatggagtaacacatgagggtttcttagggaagaggccttttaatcataataaaacacaaggtctgcttaagagcaagtcacaggcagagagtgccctaaagcagccctggaggccacactgagaaggaagaaatagagcatgagaagcccttctgttaycctggcctgagaactttacatccttacagagaaactcttagaagactccccttgacattgctatatgtaccttttttgcctcttttctgttttccaagcttcaaatgaaaaaaaaactcaaaacagaggtagaaaaacattggaaagagctgaacaataaagaaatattttatccctacaaacacctgcttg

SEQ ID NO: 408708 - DNA, 592 bp, Homo sapiens
aattttcaaactaaaaacatatgaatcattgcaaaggtcatattatttcttacccaaacagataattattgccctcttccttctgccactcctccaaacataatattgaaggatcaactctctaggccacaaaaccattagagggagggtcttccacatgactgtggaaaaaatgaaaataaacaggaaataaagaaacattaaagtaactgaggcaatttggtcatctgatctttaaagtgtatctcctgtggcataagcatgtatttcagagacatgggactgagggaggaagacagcaaattatggcagaaagagaaggaatatgtatgcctatataaagggtttggacaatgggatgtggatgggaagagtggaaaaatgaccactaatatagatgatggcattaaagttggcatcttgacaatactattgcttttcatcagcttcagaacttaatccaattgccattgcctgaaagwcttataaaattcttctgtacaagaactttgggaaaggtcttttccaataaagtgaataaagcataacacattaagttgtttcttttttcctcaaaggcaagctcatttta

SEQ ID NO: 408709 - DNA, 592 bp, Homo sapiens
aattttcaaactaaaaacatatgaatcattgcaaaggtcatattatttcttacccaaacagataattattgccctcttccttctgccactcctccaaacataatattgaaggatcaactctctaggccacaaaaccattagagggagggtcttccacatgactgtggaaaaaatgaaaataaacaggaaataaagaaacattaaagtaactgaggcaatttggtcatctgatctttaaagtgtatctcctgtggcataagcatgtatttcagagacatgggactgagggaggaagacagcaaattatggcagaaagagaaggaatatgtatgcctatataaagggtttggacaatgggatgtggatgggaagagtggaaaaatgaccactaatatagatgatggcattaaagttggcatcttgacaatactattgcttttcatcagcttcagaacttaatccaattgccattgcctgaaagacttataaaattcttctgtacaagaactttgggaaaggtcttttccrataaagtgaataaagcataacacattaagttgtttcttttttcctcaaaggcaagctcatttta

SEQ ID NO: 408710 - DNA, 599 bp, Homo sapiens
ctgcaggcaggactggaaatggcaggaaataacagataagaagtaaaggatagcacttggtagacagcccagtggctccagggacacatgtgcttctcagaggccaaggaaggactggttcagtccttgctgctagcagcacctgccagcatgtggattgcagtcccatgtgccyggatgcagaccctgcaactttttagttttgatattcattgttacctctgggcaggaatgagcatggtgaactgaataatagagatgagactggattacgctggttttgatctgtttcaggacaggaattgtttgactttgtggttgctaaaagaaaggcaattctccaaactaagaccatactttattcctgagtttagaattaactgattaaaatcctgagacttatgtttattgtagcactattcacaacaaccaagatatagaatcaacctaataacccacaaatcagtcatttgcagcagcacggatgcaccaaggattttccaccaaaaaaaacaaggcattgataaatgtaaaattaatcaattttaattatttaaattaactaaattaattaaatataaataaataaattaaataaa

SEQ ID NO: 408711 - DNA, 599 bp, Homo sapiens
ctgcaggcaggactggaaatggcaggaaataacagataagaagtaaaggatagcacttggtagacagcccagtggctccagggacacatgtgcttctcagaggccaaggaaggactggttcagtccttgctgctagcagcacctgccagcatgtggattgcagtcccatgtgcctggatgcagaccctgcaactttttagttttgatattcattgttacctctgggcaggaatgagcatggtgaactgaataatagagatgagactggattacgctggttttgatctgtttcaggacaggaattgtttgactttgtggttgctaaaagaaaggcaattctccaaactaagaccatactttattcctgagtttagaattaactgattaaaatcctgagacttatgtttattgtagcactattcacaacaaccaagatatagaatcaacctaataacccacaaatcagtcatttgcagcagcacggatgcaccaaggattttccaccaaaaaaaacaaggcattgataaatgtaaaattaatcaattttaattatttaaattaamtaaattaattaaatataaataaataaattaaataaa

SEQ ID NO: 408712 - DNA, 513 bp, Homo sapiens
gccccatgcaagtcagaaattcaatagggcagtcattaaaccttaaagatccaaaattatctcctttgactccatgtctcacatccacgtcatgctgatgcaagggatgggctcccatagccttggactgctttgctcctgtggctttgcagggtacagcctccctcccagctgctttcacagactggcattgagtgtctgtggsttttccaggtgcacagtgcaagctgtcagtggatctaccattctggggtctggaggatggtggccctcttcttacagctccagtaggcagtgcccagtggggattccgtgtgggggctccaaccctacatttccctttgtactgctctagcagaggttctacatgagggctctactcctgcaacaaacttctgcctgcacatccaggtgtttccatacatcctctgaaatccagacagagtttcccaaacctaatttctggacttctgtgcacctacaggctcaacaccatgtggaagctgccaaggt

SEQ ID NO: 408713 - DNA, 513 bp, Homo sapiens
gccccatgcaagtcagaaattcaatagggcagtcattaaaccttaaagatccaaaattatctcctttgactccatgtctcacatccacgtcatgctgatgcaagggatgggctcccatagccttggactgctttgctcctgtggctttgcagggtacagcctccctcccagctgctttcacagactggcattgagtgtctgtgggttttccaggtgcacagtgcaagctgtcagtggatctaccattctggggtctggaggatggtggccctcttcttacagctccagtaggcagtgcccagtggggattccgtgtgggggctccaaccctacatttccctttgtactgctctagcagaggttctacatgagggctctactcctgcaacaaacttctgcctgcacatccaggtgtttccatacatcctctgaaatccagacagagtttcccaaacctmatttctggacttctgtgcacctacaggctcaacaccatgtggaagctgccaaggt

SEQ ID NO: 408714 - DNA, 632 bp, Homo sapiens
ttcatttactaacttagatacactggtgcccaggacatgcaggcacatgtgggacaatacatgtgtcagcgctgggcatgcagggctgagtaaagtagtcctacccagccaggggatctcacagcccatgcctttcaattctggatgcactgtcagcaccaccacatgggattggtgactttattcttcctcaaagtcacatgtgtttgcttgagctttcctaactagactataagtttcttaaaaccctaatcttgtcytccacttttggcccccaactcaagaagtgttccttataatgctgtgtacactaaaagtgcttaataaataaatgctcactaagcaatacaacaaataaataacaacttgatttgggatcaaactctaaaatgtttttattagatgtttatgacaggagttaaaatttaaatgtaagatgtgcctatattttatattcacagaaaatcaaggaatttcatcctacttttgatccactcattaataacacttggctcagcaggtccagggcacaaaaacggtttcaacaagtagcacgcaaggtaagtctcagcaccagctggaaatgttgatttgtttactcatcagcataaggaaatcaagcaatggtggtt

SEQ ID NO: 408715 - DNA, 504 bp, Homo sapiens
ttactgacccctggctctaagggatagcagaccacaaaaagatcgaaaaaaaaaaaaaaactagactatttagcaatatagtgtttaattttaaagccattgtgggctttctagttgtcttctttgctgttgatttctattctaattccattgtggagagagaacatattccgactaattttagtcttttgaaatctttcaggctttctttatagcccaagatatggtcaattttggtaaatgttccatgtgcactggaaaataatgtgaattctgtaacccccatttttaaaaattactttttattctctggttataaataactaycattatgcctaccattgtttgttggtggacagcaatttatcagccttatgcttcttttaatgtaaacaacaaaagtagatggaactaaagttgaataccacaagaattgcataactcctaaatgatcacaatatttcattcctatttttacactgggaaggaaaagcagtgcccact

SEQ ID NO: 408716 - DNA, 504 bp, Homo sapiens
ttactgacccctggctctaagggatagcagaccacaaaaagatcgaaaaaaaaaaaaaaactagactatttagcaatatagtgtttaattttaaagccattgtgggctttctagttgtcttctttgctgttgatttctattctaattccattgtggagagagaacatattccgactaattttagtcttttgaaatctttcaggctttctttatagcccaagatatggtcaattttggtaaatgttccatgtgcactggaaaataatgtgaattctgtaacccccatttttaaaaattactttttattctctggttataaataactaccattatgcctaccattgtttgttggtggacagcaatttatcagccttatgcttcttttaatgtaaacaacaaaagtagrtggaactaaagttgaataccacaagaattgcataactcctaaatgatcacaatatttcattcctatttttacactgggaaggaaaagcagtgcccact

SEQ ID NO: 408717 - DNA, 550 bp, Homo sapiens
gaaaattgtcaacataattatcattttattggctgcatagtatttcagcaagttgatatcccacagaccattttcaaaagtgatttggttcagaaactctcctcagctcacatcaagcctaatcctgtgctcagtttttccttctctgttcttactttttcctcttcctcacctccttctctccagccagaagccaacagagtcctccctgccagacacccagagcctggacagacagggacggaacaaaaagaacacatcagcagtgtcccatttccccctgaagactgttctttatttggtttctggcaaacatttattttcatggatgcaaagaatcatctgctctcactcaatggctgaaattcaccagagagattctctgctgcctggacagcggtcttggccctttcaagacccacaggggaatcacattccccayaaaatgttcaaggaactgtgagactgtgactttagttgctgacacatttttcagcactccttagatcaacacagtattactcaatcattagtatctctaaggggagac

SEQ ID NO: 408718 - DNA, 500 bp, Homo sapiens
ttaaagaattaagagaaggtaaccagttgattggccataaagcagcccctgagcagaatatgaaagagtcattgctggtcacactgattacctatgaacaacaaaattcagttagattgctgttatgcctcgccattagaaatgtgtttttctctccgcacatgattttaatctgattactggtataaacattgtctgctcctgccttcagttttggaccagggcactgaaatttcaaaaacgagacagatgaaggaggcactctttgaacagaaagtcagacaggacattcacgaagagatggaaaatcatcttaagtggtaaatattgagcaattgtttgtatcaagtgwcagtacagttatttttaggtgatgatcttttataaatgagagacagtaaaatgtaataaccttttaggtactttggagaatttaatgattgtttcactgccagtggtccttcagtaggaagtttctattaggaataaatatatgtgac

SEQ ID NO: 408719 - DNA, 542 bp, Homo sapiens
atgttgctgaagcctctataactaacttctctatcccatgtgtctcctccagcatctcagggttccttttcagttttggaatatagtgaaatattccatcctaaagttgactctggtattctgatgggttctggacacagttttttttttttctccccaggcaggtgcaccttggtaaagatcctatgtcttttaaacttaaaaaagagcttactgaagagtggcaaaaagcatgtgccaaatataaggtcagagttactgctaatttgctatcatttgtttcgctagatgtttttaaattcctactatatgcaagatgccaggtggaggaaaacccacagttaagttgggagtgggaaaggctgacgacaagtaaaytgtcaaccataaatcaagactggctataaatgtcaccagagacctatactaagttttgtggggattcagaagccagagaggagagagaattcatctgattggaatgcttcctggaagacattgtataattttttgaaaagtagcaaagaggacaaaggcattca

SEQ ID NO: 408720 - DNA, 557 bp, Homo sapiens
tgaaagcctttttcaagaagtgacatttgaactgagttaaaatatgtggaatttagaggagggaggcatattcctggcagtgggagcrctgaatactttagcttttccattaggctgtggtggaaggtactcaaaggtaagtagctagaggaaatgtcagaaaggtaggctggagccagattccagaagaccctggatgtcgctctgggagaagatttattcattgaccaggtacttgttttaatggttttaaagatttggagctgaaagtgaagggcaaaaataaactttatctctgagcaggttaattaactggatgggatttcattgctaacaggtgggaagcaatcaatatttttcatttcacgccagaaagttctcagctccttaatagatttattcttttaaacgaggttgttttcagatatatttcattacatacagggatgctgaggtcataagaattagaagaggaatagaggaatgaaaggcaccaaaaaatggtcttcagggagaaatattagaagacccagagattcagaagagatgcattatgg

SEQ ID NO: 408721 - DNA, 581 bp, Homo sapiens
gcaagccctggcatctcagtgtggaggtgacatcaaaatcctgggatgtcagacctggaaggaacctggaggttgtcggtttcacccctctcatttatagatgaggaactaactgtagagagagggagtaacttgtccaaggccatagaggtgattagtagccgatatggtttggctgtgtgttcccacccaagtctcatcttgaattgtaatccccrtgtatcaagaaagggacctataatccctacatgtcaagggagggaggtgattggatcatggaggcggtttcccccatgctgttcttgtgatagtgagtgaattctcacaagatctgtgtttggaagttcctccttcattcttctctctcctgctgccttgtgaagaaggtgcctccttccacttctgccatgattgtaagtttcctggggcctcccaagccatgtggaactgagtcaattaaatctctttcctttataaattacccagtatcagggaagtcctttatagcagtgtgaaaatggactaatatagtagctattctggtcttcagacctagatctgcttcctagtttctcgtactg

SEQ ID NO: 408722 - DNA, 570 bp, Homo sapiens
caccatgcctggctaatttttatatttttagtagagacggcgttttaccatgttggccaggctggtctcaaactcctgacctcaagggatttgcctgccttggcctcccaaagtgctgggattacaggcacaagccaccgttcctggcccaactggctcttttaagaaagatttctctgtagcatgtgatgctgtttgatagyatatcacccacagtagaacttctttcaaaacggagtcactcctcttaagccctgcagctgcttgatcaactaagtgtatggaatgttctaaatcctttgttgtcatttcaacaatgttcacagcatcttcaccaggagtagattccatctcaagaaattactttctttgctcatccataagaagcaactcctcattcatttaagttttatcataaaattacagcaactcagcagcatctttaggctgtaatttctaattatgattatcttgctatttccaccacatctgcagtgacctcctcccctgaagtcttgaaccccttaaagtcatccatgagggttgaaatcaacttcttccaaactcatg

SEQ ID NO: 408723 - DNA, 570 bp, Homo sapiens
caccatgcctggctaatttttatatttttagtagagacggcgttttaccatgttggccaggctggtctcaaactcctgacctcaagggatttgcctgccttggcctcccaaagtgctgggattacaggcacaagccaccgttcctggcccaactggctcttttaagaaagatttctctgtagcatgtgatgctgtttgatagtatatcacccacagtagaacttctttcaaaacggagtcactcctcttaagccctgcagctgcttgatcaactaagtgtatggaatgytctaaatcctttgttgtcatttcaacaatgttcacagcatcttcaccaggagtagattccatctcaagaaattactttctttgctcatccataagaagcaactcctcattcatttaagttttatcataaaattacagcaactcagcagcatctttaggctgtaatttctaattatgattatcttgctatttccaccacatctgcagtgacctcctcccctgaagtcttgaaccccttaaagtcatccatgagggttgaaatcaacttcttccaaactcatg

SEQ ID NO: 408724 - DNA, 699 bp, Homo sapiens
tttctgtttagaactatgtatgtatacacatacatctcagacacctataattccatatattgtcacatgtcacttgaacaagatgatatgtcaccaatgaggaatggtctgtggagggacttgtccccatgaagggtaaaagccctcatgtctgggaccacatgtagggtggacacatcagagaagccccgggaagcatgggctgagaccacacctcctttgtcccagcctcactctgagtaggcagctgccctctcagcacaattgaaaagcaggttccgtctatcatgtccactgcctctttgcaggcatattgaatatttaataatgccatttgccttcccagaaaaagagctcmaagaagcctgcacaggctggcggtaggcagcagggtggtgctgggggtgggtagcagggccggtgatgctacagagcaggctggccagttatttccccccaggagcatccccagactggaaaccccggcagatggctctgggctgggatgcgacaggcaaggaggccatctgtgtggtttcaggcactagtcaggagccttggagaagaagaggaagtgctgagctgatatcaagtgaccatgccatgcagtgagatggaaaccagagacttattttccactcacatataagagcttggctcaaattcaggctaccacggtgtattcatggaatagtgaag

SEQ ID NO: 408725 - DNA, 567 bp, Homo sapiens
tcacaagggattctgacctggttctgactgcttccataggtccccatttttaaagtcagacacccatggtagcttatttaatccaggaaaaacaataatagtagcagtaaggtggcacatgttggggggctgtatcatgggcaataccaggggtaatggagaacccctttgactgtggccagtggatcaaggtcttgcaytgtgctttgcctcatatcttccattctgaatcctggtgtcctgaagccctcataattggatcctgccccttcctaagcccttagatcagagttctgatcagagatctacctatttttcactttaggtcccttctttgtctccccagtgtaatctaaagaaatgttttaagagaacactctctgcatgtgtgtctgtgcatattgtctttctattttatcatttgataactgaacagattcacaaagagaattaagggaggcaaggtgtgtagtggattatgcctgtaatcccagcactttgggaggccgaagcaggtggatcacctgagatcaggagttccagaccagcctgggcaacatggacaaa

SEQ ID NO: 408726 - DNA, 567 bp, Homo sapiens
tcacaagggattctgacctggttctgactgcttccataggtccccatttttaaagtcagacacccatggtagcttatttaatccaggaaaaacaataatagtagcagtaaggtggcacatgttggggggctgtatcatgggcaataccaggggtaatggagaacccctttgactgtggccagtggatcaaggtcttgcattgtgctttgcctcatatcttccattctgaatcctggtgtcctgaagccctcataattggatcctgccccttcctaagcccttagatcagagttctgatcagagatctacctrtttttcactttaggtcccttctttgtctccccagtgtaatctaaagaaatgttttaagagaacactctctgcatgtgtgtctgtgcatattgtctttctattttatcatttgataactgaacagattcacaaagagaattaagggaggcaaggtgtgtagtggattatgcctgtaatcccagcactttgggaggccgaagcaggtggatcacctgagatcaggagttccagaccagcctgggcaacatggacaaa

SEQ ID NO: 408727 - DNA, 596 bp, Homo sapiens
taatgatgttgagcattttttggtgtgtttgttagctgcttggatgtcttctttcgagaaatgtctattcatgccctttgcccagtttttaatggagtttttcttgttgagttatttgagttccctgtaggttctggacattagtcatttgtcagaggcataatttgcaattattttctcccattctataggttgtctgtttgctctgttgattattttattttgctgtgcagaagcttttttggtttaactaagtcccatttgtctgtttttggttttgttgctttgcttttgggatcttcattgtaaattctctgcctagaccaatgtccagggagttttttcttggctttcttctaggatttttatagtttcaagtcttacrtttagtctttaatccaccttgagttaatttttgtgtatggtgagagagaggggtccagtttcattcttctgcaccttgttagccaattatcccagcaccattaactgaatagggtgtcctttccccattgtttatttttgtcaagtttgtgaaaggtcaatttgttgtaggtatgtggctttttttctgggttctctattctgttccattg

SEQ ID NO: 408728 - DNA, 606 bp, Homo sapiens
gaatagggtgtcctttccccattgtttatttttgtcaagtttgtgaaaggtcaatttgttgtaggtatgtggctttttttctgggttctctattctgttccattgatctatgttgataaaacaatttttaaattgaataaatttggttcctctatgtgacttccattgattttagaggcaaatggcatctaatttctcttttaagttgcattcctttgattattagtaaagttgaacatttctagttcattaaaacaggttttaaatggagtaaaattgattcttttactattttattcctagtgtgytactttcacaaattagaaaaaattactgatattaaattctaaagactaaacgttatggcttccctaggcctgattgtaaagctcccgtacctacttcacaggtcagttttgaaggagcaaatggcatgtaacatgaggtggcacttgaaactttactatcacatgtaagcaagtgtccctatcttcctctttctgtctctgacagctctccatctctttcaaccttgttcacaactattagacatgatccctagaaaaggaaagggtgtagagagatctgctttctcagaattgtgaa

SEQ ID NO: 408729 - DNA, 612 bp, Homo sapiens
tggcagagatttaaaagaatggtaattcacagaatcaaggagagtatggagaagcaagtattctattctctgctagtcggtgggaatgtgcattggtataaccctttctagaaaacagagagtaaaggctttaaaaatacacatattcttcaactcagcaagtctgctgctaggaatttgttgtaaggaagcaccgctcagttctgcagaaaaatttaactatcaggatgttcattatactatattctattatgatttaaaatcagagacaacctcaggagactatattcatacaatggaatacagtgaagttattaagaagaattttgttaaatttatattttactgacatgaaaatgccttcaagatgttgagtagaaaagtgcagcttacaaaacagcactttcaatgggactgtatttcgttttaaaataccatatatatgcatagaaatgtccgtaaaatgttaacaatggatttctctaagcgatgagattacatgtaacttttactttttatatctttatattttatatgacctttttagaatgagtgtgcattacygtttatactaagaaaaaattaagctgttttcttactgagatgggtaaa

SEQ ID NO: 408730 - DNA, 503 bp, Homo sapiens
catgcacctgacctcacagcaaaccaaaccacttaccctttcctgcatctggtctgaactctgctgtgtcctctatttgaacgtcctggtcctttcctcttcattaaattcctgctccatttgtggttcatcttaaatgccaccaactccagaaagcttcccgttaccaagactaaaatgagtatcttctcagtggctctgaaactcttctcagctctcttttatagcccctctcatcttgtagattctggctgtttgtgaccttctctccctactggaccatgaacttctggaggacaacgattgtgtgttcttcaaactctaatcttccagagtgcccagcagagctctggatatagcaggtgctcaatacattatttattaagcggaattttacagtcaagaaacctaggacacatgtcagagaatgagtaggcacatacctgcttgwggggcagctggaatatcaatagagaggcatctcttcctgctaggcatgattt

SEQ ID NO: 408731 - DNA, 536 bp, Homo sapiens
tgcctgtattagttttcattcatagctgtcataactgtggtgttttgcttttaggaaatagtgcctrtcttatcatgtatcccgcatagtcctctctgagttgttggctattgaaatacacccctatgtgtgattccttagcttcttcctactctaagtgttgctcagtccttctcatcatgcctgaaccagatactgtggtctccagctgtctttctcttagaataatgtcccagcatttacggtctggttggggacgggagcaaggggtgggcatgaatttcctgagcttccctggcatttgcagggagacagcaaggaaatacctctgtggtcacaacagagggagagccagctgagcttgcagcgatggaaacatttagtaggctccctccagccatcactgtctccactactgctgacgccaccatccataacaaagcttccaatttgcaggcttcagattcagcttctgtttcctgagtgcctccactataccagccattgggccaggcatccagaagccctaaggtaga

SEQ ID NO: 408732 - DNA, 536 bp, Homo sapiens
tgcctgtattagttttcattcatagctgtcataactgtggtgttttgcttttaggaaatagtgcctatcttatcatgtatcccgcatagtcctctctgagttgttggctattgaaatacacccctatgtgtgattccttagcttcttcctactctaagtgttgctcagtccttctcatcatgcctgaaccagatactgtggtctccagctgtctttctcttagaataatgtcccagcatttacggtctggttggggacgggagcaaggggtgggcatgaatttcctgagcttccctggcatttgcagggagacagcaaggraatacctctgtggtcacaacagagggagagccagctgagcttgcagcgatggaaacatttagtaggctccctccagccatcactgtctccactactgctgacgccaccatccataacaaagcttccaatttgcaggcttcagattcagcttctgtttcctgagtgcctccactataccagccattgggccaggcatccagaagccctaaggtaga

SEQ ID NO: 408733 - DNA, 577 bp, Homo sapiens
ttctggtcctgcagtccaggcatcttaaagacttccggcgttctgctagtgttacattcattcattccatcataactagcaagcttttagggcaaagaatgaggattcttcctttggtgaaactaggtttgccataactgtctactcactagcactccttaggtcacaagtcactacatctagacaagggaaaaattcaagtgactccttcatgtagttgtcattgaaagatgctaacaagagaccattttcccagggccattgacaataagatgttttgctgagcatgcagttgacatgaactccacacacagacaccttcggccaactgtcagcacatttgaaattcacaccttcctgcctgtcatccatcatttctcttcatggctcccagcaaagaygactccaggctttcttgaatttgtgcacaggttgctgtttaagcttcccccaatcactgagtgggtttgtattgcctcctcacctagatacctctcctaccattggagactgcgccatcatttacttcccaaaaaagaagactctggggacatgctaaatatatagcaggtattca

SEQ ID NO: 408734 - DNA, 626 bp, Homo sapiens
gcatgcaggcacatacatatgtataactcctgaactggggaaaagtatacaacttcacaggtgaaaggatcaggcacatgttcaatgaattggagtcctgattcccaacatcctgcacttaagctctgcagatgaaaggatgctcagtctggcttcaattcctgtctaaaaatagctaaaagcacaatacaaaacaccagatttttgtatcaggttattgctctgagccccacttactgagtggggaatctgatgtccagaaagcagggtaacttaggaaagtgttagagctgggggaggcacacctggagaggaattaaagtttaacctaaagtgactggagcatcacgtgtttaaccttctctatccacttgctcttaccatgagtacatttccatttttaggtctcttaaaaccatagattgatgaaacaaactcacaatacagactcactttgctgccccttagctttatattccctaagaacgtccacaaactctggactggatttagcctacttggaccaagagacacaggccatgatggtgtaamatgatgaagagctctctctgaagattgctgaatcacaggaaacacacaaaccaagcaggaaaaatgtgccttga

SEQ ID NO: 408735 - DNA, 508 bp, Homo sapiens
aaatggtttgaatttttagctattatcatgctactaaagaatttttaaaatggaaagttacaataaagcagttctcttttattttgatctattcaraaatgaaagtcccttgtacacatttcagttcctgaataactgggcatttactcttattgataactacttaaatatcaattttataaacagagaagtactgggaaaataatagaatttatagccggaaggtctgcgtttgagtcccaattctatcctgaatgaattctttgaccttgctagattaagaggctcagagagattatgtgacctgcttagtacagcagagcattgtaacgacctagaatctgtgctccagaaaaccaagcccatattccgagttcctcagacttctttgctttatcaactataattcccttgagttgttggctaacatcttgctaatgttaaaacagaaatccgggggtcctactgatcctcttcaggctatggtgacgcaaaagaatgtaactca

SEQ ID NO: 408736 - DNA, 607 bp, Homo sapiens
tttggactggacagcagtccttggagatctctgagcccggttactggctttcaggcacttaatttctaagccttcctctgccaactctaaatttcttcagggaatgacatggcatttgtgcattaccaagctttaggtactttatggggtgaaaaccatttggaggtgggagaaasgtaaaaaaaaaaaagaaagatccatcaaatccaaagctttacaacatagtataacagaaagagtgcagttgaaattttgagcatcttgggtttgaattcaactcttctattcttgccccttctcccatcccctgtctcccatcccccagcagtgagatcttgggaaaatattaactcttttggccttgtttgttttttcctctgtataatgaggacagtgttcaatgcctctcaaacttgcatgtatatatcaaccacttggggatcttgtttaaatgcagtttctgattcaagcagggctggagtggaactctagatcctacatttctcaaaagctcccagtagatgccaactctgtgggtccgaggaccatgctatgagtagtaaaggactaaatcagtggttctggctaaatcacataaagagcagtt

SEQ ID NO: 408737 - DNA, 607 bp, Homo sapiens
tttggactggacagcagtccttggagatctctgagcccggttactggctttcaggcacttaatttctaagccttcctctgccaactctaaatttcttcagggaatgacatggcatttgtgcattaccaagctttaggtactttatggggtgaaaaccatttggaggtgggagaaagrtaaaaaaaaaaaagaaagatccatcaaatccaaagctttacaacatagtataacagaaagagtgcagttgaaattttgagcatcttgggtttgaattcaactcttctattcttgccccttctcccatcccctgtctcccatcccccagcagtgagatcttgggaaaatattaactcttttggccttgtttgttttttcctctgtataatgaggacagtgttcaatgcctctcaaacttgcatgtatatatcaaccacttggggatcttgtttaaatgcagtttctgattcaagcagggctggagtggaactctagatcctacatttctcaaaagctcccagtagatgccaactctgtgggtccgaggaccatgctatgagtagtaaaggactaaatcagtggttctggctaaatcacataaagagcagtt

SEQ ID NO: 408738 - DNA, 607 bp, Homo sapiens
tttggactggacagcagtccttggagatctctgagcccggttactggctttcaggcacttaatttctaagccttcctctgccaactctaaatttcttcagggaatgacatggcatttgtgcattaccaagctttaggtactttatggggtgaaaaccatttggaggtgggagaaaggtaaaaaaaaaaaagaaagatccatcaaatccaaagctttacaacatagtataacagaaagagtgcagttgaaattttgagcatcttgggtttgaattcaactcttctattcttgccccttctcccatcccctgtctcccatcccccagcagtgagatcttgggaaaatattaactcttttggccttgtttgttttttcctctgtataatgaggacagtgttcaatgcctctcaaacttgcatgtatatatcaaccacttggggatcttgtttaaatgcagtttctgattcaagcagggctggagtggaactctagatcctacatttctcaaaagctcccagtrgatgccaactctgtgggtccgaggaccatgctatgagtagtaaaggactaaatcagtggttctggctaaatcacataaagagcagtt

SEQ ID NO: 408739 - DNA, 619 bp, Homo sapiens
tctttgagacatcttttacataagttgcttttcctaaagatactctaatccttaagccttagagaagccttactttagatcagtgactggatccttaatgcctaaagattttcactggtcattttgaactgttccttatctaytgcttcccaaccagaatcgtcgcctggcttctcctaaagaagtatcttcattgaccataagtacagttttcatgcacttgtcactgaacgttctcaccccttgacatgaatgtaatgtttaatatgaagaatatattttaacatcatagctctctgttgatatactcttgttctgacctcctttctaagctcttagaaaataaaatctctttaatagtactctgtaagggcaatgggaggtgggcaagggatgtaaactatctgccctccttatgtttctataaaaggggacctcttttatagaaagagtctgcctctcttcctataagacatctttctaagacatctgcctctcagtatttctgggatgaaagagtgcacccttttcccacagtcttccctccttcttttggcaggagagtgccacctttttggcctcttccatgtgcaaaccagtagggttagtttgccacaaa

SEQ ID NO: 408740 - DNA, 590 bp, Homo sapiens
aataatagcaatgtatgggcatgatgagcaactataatggggaaatttggtagggatatttgatatacgaaaaataataaaaattatstggatgaagagataatggaagagtatgatgtgagagggaacatggtgaataagattcagggcagagctaggttttaaaatttttggagtgagtcagggatgaaccaggccagtagtgtgggaggtaacgtgaaaagccaccttttcggtttctgtttacatatatcatgatcttgcattaattctccataatattaatagttgtcatgctaaattttactttaaaataggtacctattttggagaatgtattcaggggaccagttgtattggagaatgtattcaggggaccagttgtataatttaatacccccggctatggttctgagtaataggagctgaaaagccagtgtgggcagatctcaaagtgggataggattctgggagtaagtcagattggagtggtagaagggaccagattacacagggaatatcatattaggttaaggagatttatcccaggggaaattataggatagagatttttaattttaaggattata

SEQ ID NO: 408741 - DNA, 590 bp, Homo sapiens
aataatagcaatgtatgggcatgatgagcaactataatggggaaatttggtagggatatttgatatacgaaaaataataaaaattatctggatgaagagataatggaagagtatgatgtgagagggaacatggtgaataagattcagggcagagctaggttttaaaatttttggagtgagtcagggatgaaccaggccagtagtgtgggaggtaacgtgaaaagccaccttttcrgtttctgtttacatatatcatgatcttgcattaattctccataatattaatagttgtcatgctaaattttactttaaaataggtacctattttggagaatgtattcaggggaccagttgtattggagaatgtattcaggggaccagttgtataatttaatacccccggctatggttctgagtaataggagctgaaaagccagtgtgggcagatctcaaagtgggataggattctgggagtaagtcagattggagtggtagaagggaccagattacacagggaatatcatattaggttaaggagatttatcccaggggaaattataggatagagatttttaattttaaggattata

SEQ ID NO: 408742 - DNA, 596 bp, Homo sapiens
gatggctaagagtctgggtccagaatgacttgtctgtgacttatttggattgaggccccacttatgctttttaatctggctgtcctctgctttgggcttgattaggtccttagggatttttaataaaaataaaagaggacacaaatatgtagtggtcagttggaatctttttgatgctatcatcctcgtttctttcccctttcctgcctctccttgtgccttgctgartattagaacttcaaaggaaggaagggctttgtagtctgatgctgtcgttccacagaggtggaaactgacatcctgagatggaacacaactcacccgaggccatcctgctgctctcctttctgaggctacaaagctgtcctcttatatctcctctctccatcctttctaatttgatttttctttcacccaccttattttggcatggatgtttgtctttgggagtatggtgatttttctgaataatgactttttaagagtcaaaacagcaacgttcaacgcattggttctggtggtggcaagaatttctgtgtctgcatggtgttcccctgaattagatacacttgttgggattctttcatttaggtttc

SEQ ID NO: 408743 - DNA, 596 bp, Homo sapiens
gatggctaagagtctgggtccagaatgacttgtctgtgacttatttggattgaggccccacttatgctttttaatctggctgtcctctgctttgggcttgattaggtccttagggatttttaataaaaataaaagaggacacaaatatgtagtggtcagttggaatctttttgatgctatcatcctcgtttctttcccctttcctgcctctccttgtgccttgctgagtattagaacttcaaaggaaggaagggctttgtagtctgatgctgtcgttccacagaggtggaaactgacatcctgagatggaacacaactcacccgaggccatcctgctgctctcctttctgaggctacaaagctgtcctcttatatctcctctctccatcctttctaatttgatttttctttcacccaccttattttggcatggatgtttgtctttgggagtatggtgatttttctgaataatgactttttaagagtcaaaacagcaacgttcaaygcattggttctggtggtggcaagaatttctgtgtctgcatggtgttcccctgaattagatacacttgttgggattctttcatttaggtttc

SEQ ID NO: 408744 - DNA, 546 bp, Homo sapiens
atttctgacatccagtggtatttcatgtggggatcagggttcaggcttactcrcctgggccagccagctgtagaacaatcccaattagcaaattcaaatgctagcatcggatttcaaagatggctgctagagccagctgtggaaccaggctaggcagtagttctctaacttcctttaacagagtctccttacctcttgcctgtgctttctttccatttgtcttttcatgattgtctcattgaggtttaactgactgaaaagttcaaggcacagtgatctcaaaatctatgtgcatttttagtaaatgggatcttctaaggtccaaagaaatgaagctctaatggtaaaatcacaggcaccatgtttaaaatttttccaagatggattgagataggtattttaaataggtggtttccagcatgggatagcccctttcattcatcacctgagatagcatactctgctgttctgaccaggaaccactatgattcctctgtgagaaggaggtcttcaagctgtttcagacaggtgacacatttagatttg

SEQ ID NO: 408745 - DNA, 546 bp, Homo sapiens
atttctgacatccagtggtatttcatgtggggatcagggttcaggcttactcacctgggccagccagctgtagaacaatcccarttagcaaattcaaatgctagcatcggatttcaaagatggctgctagagccagctgtggaaccaggctaggcagtagttctctaacttcctttaacagagtctccttacctcttgcctgtgctttctttccatttgtcttttcatgattgtctcattgaggtttaactgactgaaaagttcaaggcacagtgatctcaaaatctatgtgcatttttagtaaatgggatcttctaaggtccaaagaaatgaagctctaatggtaaaatcacaggcaccatgtttaaaatttttccaagatggattgagataggtattttaaataggtggtttccagcatgggatagcccctttcattcatcacctgagatagcatactctgctgttctgaccaggaaccactatgattcctctgtgagaaggaggtcttcaagctgtttcagacaggtgacacatttagatttg

SEQ ID NO: 408746 - DNA, 546 bp, Homo sapiens
atttctgacatccagtggtatttcatgtggggatcagggttcaggcttactcacctgggccagccagctgtagaacaatcccaattagcaaattcaaatgctagcatyggatttcaaagatggctgctagagccagctgtggaaccaggctaggcagtagttctctaacttcctttaacagagtctccttacctcttgcctgtgctttctttccatttgtcttttcatgattgtctcattgaggtttaactgactgaaaagttcaaggcacagtgatctcaaaatctatgtgcatttttagtaaatgggatcttctaaggtccaaagaaatgaagctctaatggtaaaatcacaggcaccatgtttaaaatttttccaagatggattgagataggtattttaaataggtggtttccagcatgggatagcccctttcattcatcacctgagatagcatactctgctgttctgaccaggaaccactatgattcctctgtgagaaggaggtcttcaagctgtttcagacaggtgacacatttagatttg

SEQ ID NO: 408747 - DNA, 546 bp, Homo sapiens
atttctgacatccagtggtatttcatgtggggatcagggttcaggcttactcacctgggccagccagctgtagaacaatcccaattagcaaattcaaatgctagcatcggatttcaaagatggctgctagagccagctgtggaaccaggctaggcagtagttctctaacttcctttaacagagtctccttacctcttgcctgtgctttctttccatttgtcttttcatgattgtctcattgaggtttaactgactgaaaagttcaaggcacagtgatctcaaaatctatgtgcatttttagtaaatrggatcttctaaggtccaaagaaatgaagctctaatggtaaaatcacaggcaccatgtttaaaatttttccaagatggattgagataggtattttaaataggtggtttccagcatgggatagcccctttcattcatcacctgagatagcatactctgctgttctgaccaggaaccactatgattcctctgtgagaaggaggtcttcaagctgtttcagacaggtgacacatttagatttg

SEQ ID NO: 408748 - DNA, 567 bp, Homo sapiens
tgattcaaataacatgccacatacaggccagctactgctgcagacattttcatattctctcttttggtctttccaatagcattrtgaagggggtattattaactttcaagatgaggttcagagtggctgattagatatttcttttcacaccaaaggtctcagagcactttctacgtgtgtcagtgctttaaagacaagtaagtcacatctgctgttcttggaagtttctgttttaactcctaaaacaccttttgtctttctttgatattaagtggatatctcagctctacaaaaagcagcaatgtttaataaagtgatttgtgccagtggatgttgtgtgggtttcagaagatgtgaagaacagattcaagacatgaaaggtattgaaatcaagaggctgcccttctctaggttgaaagaaattttgtggcttctatttgttcttgcatgttgaaaagttaagagtagatagatgtagatttaaaaatatttgtcaaatgaatactaatttgctagattctttcacatacaatttgccatccagtccttgaaacgactctataagaa

SEQ ID NO: 408749 - DNA, 541 bp, Homo sapiens
agtttgccagctatatggagaatgcttgagattcaagtcagtgattcaaataacatgccacatacaggccagctactgctgcagacattttcatattctctcttttggtctttccaatagcattgtgaagggggtattattaactttcaagatgaggttcagagtggctgattagatatttcttttcacaccaaaggtctcagagcactttctacrtgtgtcagtgctttaaagacaagtaagtcacatctgctgttcttggaagtttctgttttaactcctaaaacaccttttgtctttctttgatattaagtggatatctcagctctacaaaaagcagcaatgtttaataaagtgatttgtgccagtggatgttgtgtgggtttcagaagatgtgaagaacagattcaagacatgaaaggtattgaaatcaagaggctgcccttctctaggttgaaagaaattttgtggcttctatttgttcttgcatgttgaaaagttaagagtagatagatgtagatttaaaaatatttgtcaaatg

SEQ ID NO: 408750 - DNA, 533 bp, Homo sapiens
tgcttgagattcaagtcagtgattcaaataacatgccacatacaggccagctactgctgcagacattttcatattctctcttttggtctttccaatagcattgtgaagggggtattattaactttcaagatgaggttcagagtggctgattagatatttcttttcacaccaaaggtctcagagcactttctacgtgtgtcagtgctttaaagacaagtaagtcacatctgctgttcttggaagtttctgttttaactcctaaaacaccttttgtctttctttgatattaagtggatatctcagctctacaaaaagcagcaatgtttaataaagtgatttgtgccagtggatgttgtgtgggwttcagaagatgtgaagaacagattcaagacatgaaaggtattgaaatcaagaggctgcccttctctaggttgaaagaaattttgtggcttctatttgttcttgcatgttgaaaagttaagagtagatagatgtagatttaaaaatatttgtcaaatgaatactaatttgct

SEQ ID NO: 408751 - DNA, 533 bp, Homo sapiens
tgcttgagattcaagtcagtgattcaaataacatgccacatacaggccagctactgctgcagacattttcatattctctcttttggtctttccaatagcattgtgaagggggtattattaactttcaagatgaggttcagagtggctgattagatatttcttttcacaccaaaggtctcagagcactttctacgtgtgtcagtgctttaaagacaagtaagtcacatctgctgttcttggaagtttctgttttaactcctaaaacaccttttgtctttctttgatattaagtggatatctcagctctacaaaaagcagcaatgtttaataaagtgatttgtgccagtggatgttgtgtgggtttcagaagatgtgaagaacasattcaagacatgaaaggtattgaaatcaagaggctgcccttctctaggttgaaagaaattttgtggcttctatttgttcttgcatgttgaaaagttaagagtagatagatgtagatttaaaaatatttgtcaaatgaatactaatttgct

SEQ ID NO: 408752 - DNA, 537 bp, Homo sapiens
gagtggttatcagagcctgggaggagagaggaaaaagggagctattgtttaatgggtagaaagtttcagatttrtaagataaagttccagagatctgttttacagctatgtatatatacttatcactactgaactgtatacttaaaaatggttaaaacactgaattttatgtcatacttttagcataataaaaaatcaattatatttctatatatcagccacatagaggatgatgcccagtgtatgtttccatttacataaagtataaaaataggcaaaagcaatctgaaattcttaagaatatatacctagtaaaagtataaagaaaagtaaaaacatcattatcataaaagtcagaatccaggttacctttagtgtggagagaggggttgtgatcaggaaaggacagaaaagtaccttctgtgtgctagcaatgctctattcatcagactttgtggtggtgacagagaagagaaggagacaggtacatttgcattatatcaatatgtgaagggtaaatctatgttttgtgcattt

SEQ ID NO: 408753 - DNA, 593 bp, Homo sapiens
tttacctcttttcttgtctgtatccttccatctrgtatattctaagcttcttaatcctaagcacaaggactgtgtcttatttttagtactatctccagcccctagctcaagcaccaacacttaaggagcactcaataccagttgaatgaattttgttagattgcagagggtctggaatctgtattgtctttgtgcaattgcagctgaaggtcatacactatacaaccaaaatgcaccagtagataatggagattttgcctagatcaattatcctggccaaaggtccaacttacagtaatactttcattctaattaaaaggctaatagctgctgcaatcaaacttacaaatattctacccaggtatgtgttgacaacttttcagtacacattttgcaatgtatgatttttttttttttttgaatgcaggaaatagctgaaaacagagtactttttatactgcagagctggattttcactcacctagactggctgtccacagtcatgctactaggcaattctaattgttgttctcatgtggaaccaatgaggatagaggcatcatgatagtgagtgccaggccaagtcacaaagc

SEQ ID NO: 408754 - DNA, 585 bp, Homo sapiens
ctaaggtctttcttgtctctttcttccagagcttgtcaatcagaaacactagaggtcaatctatggaagaaatctcaaactgcagctttgttttaaatgcatgagaaatatggaggcttccatagtttgcattccaaatcagctcagaagatccagagatgagaatctcttggatacataaggctcaaactaaacacagccccatttgactggagggagaatggaagaagagaactagggaagttgttttgcaaatcaagccagctggaaacaaagttgtgtacgtgtatctgcgtgtatgatatagctatgaaggaaagagaccatttccacrattcatacatggaaatatcacatgatagtcatatctcatacatatatacaaagttaagtagatttaaatatattagcatgtttttacatatgttatagatctctaggagttactaagcagaggcacaaaatgaaatgttagcctttgctatttgttcaggacaaaggaggtcatattctattttggaagcagaagcaaagactatatttactgcaagaatgagcctagtcagagtgaattgtgtagctaga

SEQ ID NO: 408755 - DNA, 427 bp, Homo sapiens
ttgtaacatttcctcaaaattactttccatcctgtctgtgartttttcatttttgttatacttttaatttctaagagctatttttttgtttttgattgctccttttaaaaatggaacaatacctttcttgttttatggaggcaacatattcttttatctctctaacagttaattataacattttttgaagttttcctcttcttcctcatagcccccaacctgcttttttgtttattgtagtctcttgtctttcatacagagcattcatcaaatatctgttaattcttgactgtctgcttatacttaagtgtgagggtgtagagaagactggaaactatgaacagatggagcttgtctgctctggcctctcagtatagggagatctggctgggctcccagatcttaacgtgggaagcctctgatacca

SEQ ID NO: 408756 - DNA, 614 bp, Homo sapiens
tggctctttcaggcttcttgttgttgttccatttttaatacatccctttcttttcaaagaaaaaaagtcttgtatttttgagggttcaattcagattagaatttttttggtatgtaagttacgagtattttttttttaatcctctactgsccacatcctcctaatgtctaagaggaactgaattggcagcaagtagcacatctatttgcttctccttttcctgagaaattcccagaagatcctttcagaaaaacaggcttgaattgtgcccactccttgttgctaatgctcactaggagagatggcaacactaatgcaagcagttattaacaatggcatttgggccatgagtggcttgcagaagttgagaatgcagtattttaaaatgggactgtgtggaaaagctgaattcaaattgagaagggggctgcacatgtgcttcatttaacttcagacaaatttttgactacttgtgtcatatgcaaatgtgtacaacaatgcttgaaattggatttccattttacttaattagattagtgcaagatctgcataataatcaacagttagcagtcctgctactcctggggttgagaatttcaaaatgattgctggtt

SEQ ID NO: 408757 - DNA, 531 bp, Homo sapiens
ccttgttgctaatgctcactaggagagatggcaacactaatgcaagcagttattaacaatggcatttgggccatgagtggcttgcagaagttgagaatgcagtattttaaaatgggactgtgtggaaaagctgaattcaaattgagaagggggctgcacatgtgcttcatttaacttcagacaaatttttgactacttgtgtcatatgcaaatgtgtacaacaatgcttgaaattggatttccattttacttaattagattagtgcaagatctgcataataatcaacagttagcagtcctgctactcctggggttgagaatttcaaaatgattgctggtkttgaagtttggtctgacccaggggaattaggtcaattggttgattttgggtatagctatggttggttatacttacatttgcgtggtctgactaaaagacctcaattttctttaactcagataggtagacataaaaatagaattgtgctttttttaaattccatagaagtaattaaggattttttttaaaga

SEQ ID NO: 408758 - DNA, 607 bp, Homo sapiens
taagaactcattcagaaatcaagaaaacccaaatagcatttatccaagcagagagcagctctgcagtgttctattaagcaaaaggaaggcagatgttccattttgtccctgttgggaaggttttcatttatagctgggtgatgtttttaaataagactttcctaagtaactgctttatggaaggaaatcaaatttctatgacaggctagaggagttttaggccactctggtgcgtctcagatgggcagttcaaactttgacttaaaggtagcatgtagaaatggaaaaagttcaagacttagagttaaggactccatgtctgcctttgccattaagtactctttttacctttcatgcctcagtttcttcatttgttaatcaggattataataacacactgtgtgaaattggcacaccttttaacttccctgggtctcaggatttttatctgtaaaatgagastattttatgactctagagaacatctaagcaagggtactttggtttttatgtaagcaaattctcaattacctccctatatctcatattctggccctgctgttcgtttttcatgtttcatggagtgtttatgatgattaaatgagac

SEQ ID NO: 408759 - DNA, 597 bp, Homo sapiens
ggagtgtttatgatgattaaatgagactacatacagataattgctttaaaagttatagagggtgacctagaaatcaaagtgagacttttattgttaagtcaacatcaggtcttgaaacaaattccaaatttttgccaaagtgtctataaatcatacatccagtccagcataggatcctaagggggaaatttccyaccccaaaattggtaagtggtggagacagaatttagaccaagtcagtgcaatcaaggtccatgttcctgatgatggtctgtattgtgcacatagtgggaatgaccaaaattcaaactgaatcgggaggaatactgatgaagaggttcataccttcttttcctttttcctctggattctttccatcagggggaaatgtccataactccttctttacttctcataataggcctctgtaatgtcaaaggagagatcgtctgaagcgttgcttttactgaggtgtcagatgagttcttacccctgtgattaggttattgatgaggaaaatacacattttccccttatctgttatatatgatccatgtaaattgagtttttagatttagccatgctggaagactaaac

SEQ ID NO: 408760 - DNA, 597 bp, Homo sapiens
ggagtgtttatgatgattaaatgagactacatacagataattgctttaaaagttatagagggtgacctagaaatcaaagtgagacttttattgttaagtcaacatcaggtcttgaaacaaattccaaatttttgccaaagtgtctataaatcatacatccagtccagcataggatcctaagggggaaatttcccaccccaaaattggtaagtggtggagacagaatttagaccaagtcagtgcaatcaaggtccatgttcctgatgatggtctgtattgtgcacatagtgggaatgaccaaaattcaaactgaatcgggaggaatactgatgaagaggttcataccttcttttcctttttcctytggattctttccatcagggggaaatgtccataactccttctttacttctcataataggcctctgtaatgtcaaaggagagatcgtctgaagcgttgcttttactgaggtgtcagatgagttcttacccctgtgattaggttattgatgaggaaaatacacattttccccttatctgttatatatgatccatgtaaattgagtttttagatttagccatgctggaagactaaac

SEQ ID NO: 408761 - DNA, 617 bp, Homo sapiens
tgctggcagaaatgtctgcatagttttgcccaggctgagctctgaaattagttttctccagcaatttttagtgtttgcaccacatggctcatgattcacattctaggaaaggatatccattttgtctaggttggccaaggggagatagggcccccaatttatattcccacacatcygatccattggggaggggtaattctctcaaaacaaaaaccaaaaaaatcaaagaccataaaatagaccatggtcagtgaaaaagcagccaatatctaaaaccaccgtaggttaaaaaaaaaaaagaaaccctggaagttaactgctgtgcccctgcgtgtggccaaggcagtttaatctctgtgcttcacattttatcttggacacctctagttccttgatgctttcttccatagtgtatcagagtgctggtagaaaattagctcactttttgttggtgtgttctgtgatgaaattgtggacagaaattagatggagctttatagtttccatctgataatctgtatctgtaggtgaatgaaaatagtattttaaataacttaggcagaatgttattaaacagcgattgagagctaccatttagtagttttaatgttgttacc

SEQ ID NO: 408762 - DNA, 617 bp, Homo sapiens
tgctggcagaaatgtctgcatagttttgcccaggctgagctctgaaattagttttctccagcaatttttagtgtttgcaccacatggctcatgattcacattctaggaaaggatatccattttgtctaggttggccaaggggagatagggcccccaatttatattcccacacatctgatccattggggaggggtaattctctcaaaacaaaaaccaaaaaaatcaaagaccataaaatagaccatggtcagtgaaaaagcagccaatatctaaaaccaccgtaggttaaaaaaaaaaaagaaaccctggaagttaactgctgtgcccctgcrtgtggccaaggcagtttaatctctgtgcttcacattttatcttggacacctctagttccttgatgctttcttccatagtgtatcagagtgctggtagaaaattagctcactttttgttggtgtgttctgtgatgaaattgtggacagaaattagatggagctttatagtttccatctgataatctgtatctgtaggtgaatgaaaatagtattttaaataacttaggcagaatgttattaaacagcgattgagagctaccatttagtagttttaatgttgttacc

SEQ ID NO: 408763 - DNA, 544 bp, Homo sapiens
accacatggctcatgattcacattctaggaaaggatatccattttgtctaggttggccaaggggagatagggcccccaatttatattcccacacatctgatccattggggaggggtaattctctcaaaacaaaaaccaaaaaaatcaaagaccataaaatagaccatggtcagtgaaaaagcagccaatatctaaaaccaccgtaggttaaaaaaaaaaaagaaaccctggaagttaactgctgtgcccctgcgtgtggccaaggcagtttaatctctgtgcttcacattttatcttggacacctctagttccttgatgctttcttccatagtgtatcagagtgctggtagaaaattagctcactttttgttggtgtgttctgtgatgaaattgtggacagaaattagatggagctttatagtttccatctgataatctgtatctgtaggtgaatgaaaatagtattttaaataacttaggcagaatgttattaaacagcgattgagagctaccattyagtagttttaatgttgttacctttct

SEQ ID NO: 408764 - DNA, 560 bp, Homo sapiens
tttgaatgttctttatgtattgtaaatagcagccttttcttagatatgtagcttgcacgtattttctcctacactgtaccttgtccattcattctctttccagtgtcttttatgagcaaatgttgtccattttgatgaaattcaatytattaacttttctaaaaatagcttttgcatttggtgttagatttaagaacttttgcttagcactagatcctgaacattttctcgtatgtttttactaaaagttttatagttgtacttttttcattaagcctgtgatccctttgaattaatttttatatataggatgaaacttagattaattttttttcttcttctagatgtccaattgctccagctccatttattgaaaaggatatatttcctcagctgaattgcttttgcacctttgtcaacaatcagttgaatatatttgtatgggtctgtctctgggttttctattttgctccattgatctatgtgtctaactctctgacaatacctcacagtcatgattactgtagctatataataaatcttgccggtaaatggattcc

SEQ ID NO: 408765 - DNA, 560 bp, Homo sapiens
tttgaatgttctttatgtattgtaaatagcagccttttcttagatatgtagcttgcacgtattttctcctacactgtaccttgtccattcattctctttccagtgtcttttatgagcaaatgttgtccattttgatgaaattcaatctattaacttttctaaaaatagcttttgcatttggtgttagatttaagaacttttgcttagcactagatcctgaacattttctcgtatgtttttactaaaagttttatagttktacttttttcattaagcctgtgatccctttgaattaatttttatatataggatgaaacttagattaattttttttcttcttctagatgtccaattgctccagctccatttattgaaaaggatatatttcctcagctgaattgcttttgcacctttgtcaacaatcagttgaatatatttgtatgggtctgtctctgggttttctattttgctccattgatctatgtgtctaactctctgacaatacctcacagtcatgattactgtagctatataataaatcttgccggtaaatggattcc

SEQ ID NO: 408766 - DNA, 471 bp, Homo sapiens
ttataggcccctgtgaaaccaaggacaagaattcagccacaaataaagaccctgcacaaagcctcggccttttggaaacatccagaaaggaagtcaactgacggtactcaaattacacgcacagttaaaggaacatcagcccacatggatgagaaagaaccagcmcaagaattctggcaactctaaaagttagtgcgtccttacctccaaaagaccacattatttcccaagccattgttcttaaccagaatgaaatggctgaaatgacagacagaattcaaaatctagatgataacaaaggtcattgaaattcaggagaaagtggaaacccattccaaaaaacctgaagaatccagtaaaatgattcaggaaatgaaagatgaaatagccattttaagaaagaaacaaactgagctgatagagctgaaaaactgactacaagaatctcataacacaataggaagtattaat

SEQ ID NO: 408767 - DNA, 502 bp, Homo sapiens
cataggtgccatctactggatcccaggccaaactttgacagcaaaaatagttcgctattataggcccctgtgaaaccaaggacaagaattcagccacaaataaagaccctgcacaaagcctcggccttttggaaacatccagaaaggaagtcaactgacggtactcaaattacacgcacagttaaaggaacatcagcccacatggatgagaaagaaccagcacaagaattctggcaactctaaaagttagtgcgtccttacctccaaaagaccacattatttcccaagccattgttcttaaccagaatgaaatggctgaaatgacagacagaattcaaaatctagatgataacaaaggtcattgaaattcaggagaaagtggaaacccattccaaaaaacctgaagaatccagtaaaatgattcaggaaatgaaagatgaaatagccattttaagaaagaamcaaactgagctgatagagctgaaaaactgactacaagaat

SEQ ID NO: 408768 - DNA, 502 bp, Homo sapiens
cataggtgccatctactggatcccaggccaaactttgacagcaaaaatagttcgctattataggcccctgtgaaaccaaggacaagaattcagccacaaataaagaccctgcacaaagcctcggccttttggaaacatccagaaaggaagtcaactgacggtactcaaattacacgcacagttaaaggaacatcagcccacatggatgagaaagaaccagcacaagaattctggcaactctaaaagttagtgcgtccttacctccaaaagaccacattatttcccaagccattgttcttaaccagaatgaaatggctgaaatgacagacagaattcaaaatctagatgataacaaaggtcattgaaattcaggagaaagtggaaacccattccaaaaaacctgaagaatccagtaaaatgattcaggaaatgaaagatgaaatagccattttaagaaagaaacaaactgagctgayagagctgaaaaactgactacaagaat

SEQ ID NO: 408769 - DNA, 613 bp, Homo sapiens
atagagctgaaaaactgactacaagaatctcataacacaataggaagtattaataacagaacagaccaagctgaggaaagaatggcagagattcaagaccagttctttgaattatsaggttgatgcaaaagtgattgtggcttttgtcatatttgatggcaaaaaccacagttacttttgcaccaacctgataactcagacaagaaaaaaaaaacttggaaaaatatagtattatgtaaagagtccaaatctatgactcattggcatatctgaaagggagagaaaacaagaaaattgggaaacgtatttgaggatattgttcacagaaatttccccaaccccacaagaggagtcagcatacaaattcaaaaaatttagaggacccctgtgaaatatagtacaagaggaccatctccaagacaaatagtcatcagattcttcaaggtcaatgtgaaagagaaaaaatattaaacgcagctcaagaggaggggcaggtcacctacaaagggaaccccatcaggctaacagcagacctttcagcagaaactacaagcccgaagagattgagggcctatattcaccaaccttaaagaaaagaaattccgaccaagaa

SEQ ID NO: 408770 - DNA, 516 bp, Homo sapiens
  misc_feature (1)...(516): n = A,T,C or G
nnnnnnnnnnnnnnnnnnnnnnnnnnnnnnnnnnntatcttatatttatattccatcattaatttttcagtatatttctatatctattatccttaccacaatcgcaagatatgagtrgattaagtatgactatatataattcacagagtagtctaagggcacatggatggtgaaagaagtgatacaaaaacccatctctaactcctaattttttattctcctcgcttattttttgttgttgttgttgttgttccatgtatttattcctattttggttcccaaattcttttttctcttctcttggatcctatattgctatttcctattttggttctcatattcctgtggcccagttcataccatttagggttaaagtacctaattcaatgcttgaattgaaagcactcagtaaatacaaatgagatttaattgaagtatttatacaatcagcaagattcactcacttttgctttttgtctgttgtgtttctacaagagtatctctaactattcctta

SEQ ID NO: 408771 - DNA, 591 bp, Homo sapiens
gatataaacagatgtgttgatgtagccgacacttatttgaaggaaagagaggtgagacactgttgtctctcttaaccttgaygctctgatcatttctttccagctcgtctcaagaattataaatccaacaagggaagagacagtagttaaagagaaatcacagcaaaaaagagatgtaaatggacagatgctattaatccagaacaccactgagagaacaatttccaaatttcaactatttttagtaagaaagaagcatttccctttgatacactggaatagagaatagggtgcactttacttttcctctgttgccacctgcatgtatggatacatctcaatggccacactcaggaggatagagtgtgtgcttatgggccctattcacagagtctgtaattctttaaaaagagaaatagttacttcacttagcacagtgtcttcaagtttcatccctgttgtcacatattgcaggatttcctttttatggctacataatacactgatatgtgtataagccacattttctttattcacttacccattgatggatatttatatcgtttctacatcttgcctattgtgaatatt

SEQ ID NO: 408772 - DNA, 591 bp, Homo sapiens
gatataaacagatgtgttgatgtagccgacacttatttgaaggaaagagaggtgagacactgttgtctctcttaaccttgacgctctgatcatttctttccagctcgtctcaagaattataaatccaacaagggaagaracagtagttaaagagaaatcacagcaaaaaagagatgtaaatggacagatgctattaatccagaacaccactgagagaacaatttccaaatttcaactatttttagtaagaaagaagcatttccctttgatacactggaatagagaatagggtgcactttacttttcctctgttgccacctgcatgtatggatacatctcaatggccacactcaggaggatagagtgtgtgcttatgggccctattcacagagtctgtaattctttaaaaagagaaatagttacttcacttagcacagtgtcttcaagtttcatccctgttgtcacatattgcaggatttcctttttatggctacataatacactgatatgtgtataagccacattttctttattcacttacccattgatggatatttatatcgtttctacatcttgcctattgtgaatatt

SEQ ID NO: 408773 - DNA, 591 bp, Homo sapiens
gatataaacagatgtgttgatgtagccgacacttatttgaaggaaagagaggtgagacactgttgtctctcttaaccttgacgctctgatcatttctttccagctcgtctcaagaattataaatccaacaagggaagagacagtagttaaagagaaatcacagcraaaaagagatgtaaatggacagatgctattaatccagaacaccactgagagaacaatttccaaatttcaactatttttagtaagaaagaagcatttccctttgatacactggaatagagaatagggtgcactttacttttcctctgttgccacctgcatgtatggatacatctcaatggccacactcaggaggatagagtgtgtgcttatgggccctattcacagagtctgtaattctttaaaaagagaaatagttacttcacttagcacagtgtcttcaagtttcatccctgttgtcacatattgcaggatttcctttttatggctacataatacactgatatgtgtataagccacattttctttattcacttacccattgatggatatttatatcgtttctacatcttgcctattgtgaatatt

SEQ ID NO: 408774 - DNA, 279 bp, Homo sapiens
ccaagacaattctaagcaaaaagaacaaagctggaggcatcacattgtctgactttagacttcaaactatactacagggctacaataaccaaaacagcatggtactggtgcaaaaacagacacatagaccaatggaacagaatagagagctcagaaatagggccttgcacctacaaccatctgatctttgacaaagctaacaaaaataagcaawgagaaaaagactcgatattcaacaaatggtgctgagataactggttcattatatgcagcaaattg

SEQ ID NO: 408775 - DNA, 356 bp, Homo sapiens
  misc_feature (1)...(356): n = A,T,C or G
taaaacaaaccaatgggataaaagtacttagcagaaacaaaggtaagagaggaaaaatcaaaacaataagctaayaactataaataatgtagtcaaaggaaagaaaaaacatcacatttatagaagaagaaaaggatgttattttaatttttttaaagaaacagtatgagaacaacaacaaatattaagtcatgctgacagaaatgaaagataaagctgaggaaattcccaagtaaagtgtagaagtagagcaaaaagagatgggaagattcctataaaacagcagtgctcaactagggagtgatttttacatcccaggagggggatcctctagagtcgaacnnnnnnnnnnnnnn

SEQ ID NO: 408776 - DNA, 558 bp, Homo sapiens
tttcttgatttagggaagttctaaccatggttggtatcagcctaccacttatttttaattttacaaataatatcctttaaatctcaaatacgctgttctttcctggagtttattttcatgtatggcattagcggtgtagatgtgtatagtttttttcaaatatgattattattaagtttgctatgctttatcctacagattgattctaaaaacaaaaattcaataagcaggttttacaatattataattatataagtgttgtttacttcaaaatctagtatgtttgggcttttaagaaaatgtaatctataaacactaacccatgccactcaagaggagatgttgctagtatcaaggacaaatggattctctrtgtccttttaaaaaaataatgcaactcctgctaaaaaaatcatacattttagtttgctttgtatgtagaccattaatttcttatagagctttttgtttttcttggcattttaaattatctctcatttgaaaatattactctggttatcagtatagaaaggaaggtcagtggtcaaagttaaaaca

SEQ ID NO: 408777 - DNA, 561 bp, Homo sapiens
aaaaggcggaagtctgtcatattcgcttttgcatggggcaagcaaacattgctgtcttcatgcaaaaaccaagggaataaacacagaagtatgttttgctcaggattatcttcaattgtttaatgagtcttcataaaagttcasgtgcattcccaattctcagctctgtccacagctgcatattttaattactctggagtatagagggagattttgttaatccctagctataacatgcttgagtgatttgaatacttcttccctaggccagtagcatgcatattctgtattgaggccacattaactatgcaagggccaaatgaagacctgtgagaatggttttcaaaacatggtcccagcatgagggatgtgttgttactaagtcaaaacaactccacaaagttccaatgaaacccacaggctactataacctcagaccaaatactcatgaataagtctctcaggatgtaaccatcactatgaataagttttaggatctatttttaatgaatttattctattaaaaataaaacaaattcatttactatagagtagagatgc

SEQ ID NO: 408778 - DNA, 561 bp, Homo sapiens
aaaaggcggaagtctgtcatattcgcttttgcatggggcaagcaaacattgctgtcttcatgcaaaaaccaagggaataaacacagaagtatgttttgctcaggattatcttcaattgtttaatgagtcttcataaaagttcaggtgcattcccaattctcagctctgtccacagctgcatattttaattactctggagtatagagggagattttgttaatccytagctataacatgcttgagtgatttgaatacttcttccctaggccagtagcatgcatattctgtattgaggccacattaactatgcaagggccaaatgaagacctgtgagaatggttttcaaaacatggtcccagcatgagggatgtgttgttactaagtcaaaacaactccacaaagttccaatgaaacccacaggctactataacctcagaccaaatactcatgaataagtctctcaggatgtaaccatcactatgaataagttttaggatctatttttaatgaatttattctattaaaaataaaacaaattcatttactatagagtagagatgc

SEQ ID NO: 408779 - DNA, 591 bp, Homo sapiens
taaaaaatacattctgtcattttccttatttactacattttacttcaaatgatgtttggctatttaaaaaaacttggaacataaaaaggatattgaagamaaatgagaaaatctgaataaactatgaactttagtcaataacaacgtttggttcattaatgtaacaaatgcatcatacaaatgtaagatattaatgatagaggaaattgggtatgagttatatggaaattctctgtactatttttgcaattattttgtaaatataaaactattccaaactaaaaaatattttaaaaaaaggacagacctcatgcttaagatatgttacctttttttgatacttcttattgactaagaaaagaaaagaaaaggaaatgaggaataaaatagtaaataacattttctgggcatctattatatttcagaatcttatatatgtatgcttatttaattctcacaataggcccatccagtagttatttcaattttgtaggataaaaaaaagatacaaaggttaaataaattggccaaggaaaaaatagctaatatgtggtaaatgtgagaattcaaacccatttttacctaggccct

SEQ ID NO: 408780 - DNA, 583 bp, Homo sapiens
taaggcaccttgtagtaaatataaagtgtatgcaagacttatatggagaagttattaacttyattgaaagacattctaaaagataaaactaatggaaatatttaccatgttaatatttagggagactcaatatcataaaagtatttattctcttcaaatttaatgtgattttaatcagaactcaccagaagtttttatgcaagttggtaagctaattttacaatccgtgaaaattgccaagaagcagaattcccatgacatccctggagagaaaaatgagttaaaagacacttgttctctcaggtattgcaacttttataaaaatatagttataaagactatggtattgatttaataattacttcagaaatatattgctaaataatcagagattatatacacgtgcatacacacttatatggatacaggttttattacagtgaaaaggaataaaaaatgcctaacaatgggtgtttggtgtgataaactatatttatgtgatttactgagatctcatttaaaaccaagatttagaaggaaaatttaaataacaggatattagtcaaaatatattgtttgaaga

SEQ ID NO: 408781 - DNA, 617 bp, Homo sapiens
tctattgttttttgactttttagtaatggccatacttgaaggagtaaagtgccatctcactgtacttttaatttgcattttcctgatgattaatgatgttgatcattttttcatatgattgttgactatttgtatagcttcttttgagagatgtctgttcatattctttgcctactttttcatgggattatttatttttttcttgctgatttgtctgagttccktgtagattttggatattagacctttgttggatgtgtagtttgcaaatagtttctcccattctgtgggatgtctgtttactctgctgattattctttttgctgggcagaagctttatagttgagttaggtcccatttatttagttttgttttcattgcatttgcttttggggtctaagtcatgaaatatttacataggccaatgtctagaggagttttttcaactttgtcttgtagaattttcctggttttgggtcgtatattaaagtctttgatccatcttgagttgatttttttataaggtgagagatagggatccgatttcattctcctatgtgaggcttgcccgattttcccagcaccatttattaaatagaatgcccattccccaattt

SEQ ID NO: 408782 - DNA, 617 bp, Homo sapiens
tctattgttttttgactttttagtaatggccatacttgaaggagtaaagtgccatctcactgtacttttaatttgcattttcctgatgattaatgatgttgatcattttttcatatgattgttgactatttgtatagcttcttttgagagatgtctgttcatattctttgcctactttttcatgggattatttatttttttcttgctgatttgtctgagttccttgtagattttggatattagacctttgttggatgtgtagtttgcaaatagtttctcccattctgtgggatgtctgtttactctgctgattattctttttgctgggcagaagctttatagttgagttaggtcccatttatttagttttgttttcattgcatttgcttttggggtctaagtcatgaaatatttacataggccaatgtctagaggagttttttcaactttgtcttgtagaattttcctggttttgggtcgtatattaaagtctttgatccatcttgagttgatttttktataaggtgagagatagggatccgatttcattctcctatgtgaggcttgcccgattttcccagcaccatttattaaatagaatgcccattccccaattt

SEQ ID NO: 408783 - DNA, 270 bp, Homo sapiens
gcagggagggtaacttcagagaaagcccttcctttatttgctattccyactttatttgaagtccaaagaggatgttttggggcatcatttttaagtctccactagggtttctgctttagtaagttttgattgtctctattttcctcttggtctctctaatttgggggacagggatttgtcttatgacctcatgtctctgatggatctaagacaatgtattcaagttttagtttgttcagctttttatttgttattaggatgaaatgataa

SEQ ID NO: 408784 - DNA, 270 bp, Homo sapiens
gcagggagggtaacttcagagaaagcccttcctttatttgctattcctactttatttgaagtccaaagaggatgttttggggcatcatttttaagtctccactagggtttctgctttagtaagttttgattgtctctattttcctcttggtctctctaatttgggggacagggatttgtcttatgacctcatgtctctgatggatctwagacaatgtattcaagttttagtttgttcagctttttatttgttattaggatgaaatgataa

SEQ ID NO: 408785 - DNA, 598 bp, Homo sapiens
aacagaaaataaattctgcttatcacctgctatgggatatttataaaaatttactaaggatcaattcacagagaagttcctaatgcattctaagaagaattctatcaaaatgtaaaagtaaacctaaaaacttcaactagataaaaacacatctaaataattattgaatttaatctgaaatcgtctcagtgatttacagaaggttgataatgttcaccaaatagtatgtagaagaataagcataaaagttttcctactaaaaggcaataaaaataaatgttaaaatattgaatcaaggcattatattcaaagacaaaataaaacctatttaaaataagacaaaaaagagaaacaagttttataaataaaaaatattattcaaaaacaaaacccaaaatcccatagcaaatttttagcagaaaaaagaagcacatactgaagctcatacatcaccaaatagcctgactaaaaaaaaaaaaagtaaaataaaataaataaataatgaagggtgggtgggtgtgtgtgtgaaaatacayaacaaattacaaattataactaaaaaggaattctaataacaaatactgatgaatttaataac

SEQ ID NO: 408786 - DNA, 570 bp, Homo sapiens
gttttgcaacattaaaataaaaatttccacatgaagaataaatatacaaagtaaatttaaaacatataacaatcctggaaaacatatttgctacatatttaatagagaattcatattttacactaatagttgcaataatttttcccctaatcctccccacatccttggagcagactttcctaatcagtgtactctgcagctctgttgtgtcatgatgagtttgccagtagactgtgatgttgatttcctaggacactgagcagggtctgaagtagcgaactgcaaacagtttcatattttaccctcgtagatcatattataatttctttgtgtgccattatrtgaaaaagagtaaggaatactgcaggattagaaaatactgctcacagcctgtcatttatagctctaagaaacatatgatttcatccccttgaccacagacgactgagtttgtgtcagcttctgaatcaagctgagccaaaatcatattctctttttgtggaaatttggaattgagaattagagattaagccaagcaaaaaacttcaaggactcacaagctgtaggacc

SEQ ID NO: 408787 - DNA, 542 bp, Homo sapiens
gtctttgctaactttccatggaggtaaaatttacaatgagtcaaagagaatttccatggcctagattatatgaatctcttaggtctagcctcacttctcaaccaacttgttttctttgctccacaagcaatcacgtgatgactaatattggcttctcagatactaacttgcttggagaaatgatactacaagaagaaaatatgagcattctgttccacaagaacaaattacccacctacccaccccatccccaaaatttaaagaataaaattaatcagggtgttctgttcactgctctcatggatcagaggacaatttttaataattctgtttggtcctaacttgctcaggtaatgaagcttttttttttcttcatccaactatccagctgacaagtggactgatggccagtgcatttcttccttcaaactttcattgtgggtcaaatgtggataaaagtgtttgaaattgactcatakcctccaattactccctccatcatgggactagatgagcaacctgagacaggtccatcctggtac

SEQ ID NO: 408788 - DNA, 583 bp, Homo sapiens
tatataatatagcttatataaataaagaagatctaggatgtgtgtgatcactaaatttttctttataataaagtgtttttttttgctttctaattttctattatactccactgawgtgaaagttggaaaagacagtgttccctctccatcactgtcctttatttgttttttcccttgtgatcaagatgtgtccatccttgtagctaaggccagcttaattgccagaggagttttgcctgctactgtggaatgcagaactggacaggatcttagagactgattaggttcctcccttcatgtttttttttttagaaagaccttaaaaaattgagggctttgctcatggccacttagattcctactttcagagctggaacatatacatagctctgatttccagtttgatactcattcaattacactgccattggtttccaagtgaaatttaagcttatttcagtcttttcaaaattcttgcagttgatcagccataattttgttctttcaatttgaagcagcttattgcttcatgtttgagaggaagccactatttcatcctgaagatggttcttttgtaatggca

SEQ ID NO: 408789 - DNA, 385 bp, Homo sapiens
aatgtgagaaggaacttggagtaagtgacccaggaggtcattccatgatttaattgtttttattggcctaattaatttaaaaagcttaattatgaaaccacatgagtgctgtgcaaagtctgcaaagtaccattcaatgacayccagatgcagaatacatcagtagctttttaacctaattcacaaaataaaccagacagatttatagtacatagtgtggaccctaagtaaaataacttcactcttcctaagttttcatttaaatggtaataagaaatgtaatttaaaaaattttagtcctaaattatcattggaaagttagcatctattccagttaactattggttcatttaaaaacacctccaaaattaatggttcaaaacag

SEQ ID NO: 408790 - DNA, 540 bp, Homo sapiens
gtaaccttaactatgaagttgactgttgcaaacgctattatactgggattctgttatatcagtggttttatttgcacattctctgctgtatattaaaagctacctttctcattgtgcttatctcttaatggtaaatactttcagaatatcctagctgttaatagcaaaagtttatcgaaaatcttcctctcccagggtgatgtggtaaaattagtttyattatcattagtttgctcatttaaaaaatgttggaacgcttgatggtggtagtagtaggtaggtatcagcttcaaatcttcccttagctgtgctgcacagaatttcaattgtataggcttcttatttgagaaatgtttcacttcctggcaaatttaaatagtcatttaatgctattcttattgaagaaggccacctggaaatcatgctcatttcatggttgaatgtctgtattgctgccactgctgctgctgtttagagtggaagggactgatgctatgaagctgtttaaaaacctaagctaaggatctgagtgtgtttgct

SEQ ID NO: 408791 - DNA, 502 bp, Homo sapiens
aaattaaggtaagagctgctcttctcccctgcagttttatatatgcttgatcccgttcttttttcctttccaaattttcctcctagaactggtaaatatataatttcctcagaaaattacttaatacttgatgtgtcatgaatatttgatttcattttctctgaaatccgttggaataaatagaatttaagtgtgtgtatatgtgtatgtttcagaacgcactctactcagtaataattctggctatccgtcgtctaaaaactcttatttagggctgtacaaatcagaaatagtccaactatggctcagaaatctttccagagggaaaatactttgtaattccaactatctgttacaactgattaaatatagttacatgttttacacaggaaaactattttttycataaataatattcccattcatgaaatatttactgaatacctaatatggatctagatctgtaatcattgcatggcatattatattgaacaataaatat

SEQ ID NO: 408792 - DNA, 519 bp, Homo sapiens
ctggagttggctgagctcagctagacacttttctctcagggtttttttgtgtttacagttagacagtgtaggggctggggtcatctgatggctctgtcattcacatgtctggcacctgggatgggaagactcaaagcaactggttaaactgaaacagtttggagcccctcagaaaccactttatactttggggttctttccatgtagccccttcagcagcttcagggtagctagacttttatttgatgactcaagggttcaaatgtttgtgtcccaataatgagggagcctggaagaagctgtaycacattttatgaccaatccttggatgccacacagagtagcttttgcctcattttatttgtagcaataatcacaaaatctcatccagattcattgttaggaataataaatgccattcttgttggaaattaccaagactgtaaatgcatacgatctggaataaattctacaaaccttttggtaaatacaatctattataccatcctaatggtggaa

SEQ ID NO: 408793 - DNA, 585 bp, Homo sapiens
ttaaactttttatgttgagatcattatttttctcatgcagttgtaaggaacactacagaaacatcctgtgaacgcctttctcagtttccctcaatggtaacrtcttgcaaatctctagtaaaaagtcaaaccaggatatttacattaatacagtcaaggttttattatttctaggaccctggtagtatctttttacaggcacacccacttatctcccccacccaggtcagctcccctggtagctacgaatatcttctccatttctaaactttcctcattacgagaatgttatatacatgaaactatacagtatataactatgtatattatatatagaatcatataaatccaatcgcatagaatccaaagccttttggatcggctttttttcaatcagcataattacctctacatttattcaagctattgaatgtactgatagttaattactttttattgctaacaagctattttccagaatggctgtaccattttataatttcactagcactgtattggtggctcaatttctctacatccacaccacattcgaggttagcactaattgttttttattttagccat

SEQ ID NO: 408794 - DNA, 585 bp, Homo sapiens
ttaaactttttatgttgagatcattatttttctcatgcagttgtaaggaacactacagaaacatcctgtgaacgcctttctcagtttccctcaatggtaacgtcttgcaaatctctagtaaaaagtcaaaccaggatatttacattaatacagtcaaggttttattatttctaggaccctggtagtatctttttacaggcacacccacttatctcccccacccaggtcagmtcccctggtagctacgaatatcttctccatttctaaactttcctcattacgagaatgttatatacatgaaactatacagtatataactatgtatattatatatagaatcatataaatccaatcgcatagaatccaaagccttttggatcggctttttttcaatcagcataattacctctacatttattcaagctattgaatgtactgatagttaattactttttattgctaacaagctattttccagaatggctgtaccattttataatttcactagcactgtattggtggctcaatttctctacatccacaccacattcgaggttagcactaattgttttttattttagccat

SEQ ID NO: 408795 - DNA, 555 bp, Homo sapiens
atacaaacattttagaaaggtctgtgggtcagggctagaattatttttctttgtgtgtgggtgttttgttttttgtctgtttggtttggtgtgtttttgtttgtttgtttgttttttgagatacagtctcactctgytgctcaggctggagtgcagtggtgcaatctcagctcactgcagcctcgacctcccaggcttaaagcaatcctaccactcagcctcctgagtggctgggactgcagatgtactccaccacacccagctaatgttttgtgttttttgtagagacagagttttgccatgttccccaagatggtctggaactccatggctcaatggagcctcctgcctcagcttcctgagtagttgggactatagggacatgccactacacctggctaattttttcatttttcgtagagatgaggttcaccatgttgcccaggctgatcttgaactcctgaactcaacgattctcctgcctcagcctccctaagtgctgggattacaggcatgatctaccactctcagcctaaaattcttagttacatattt

SEQ ID NO: 408796 - DNA, 555 bp, Homo sapiens
atacaaacattttagaaaggtctgtgggtcagggctagaattatttttctttgtgtgtgggtgttttgttttttgtctgtttggtttggtgtgtttttgtttgtttgtttgttttttgagatacagtctcactctgttgctcaggctggagtgcagtggtgcaatctcagctcactgcagcctcgacctcccaggcttaaagcaatcctaccactcagcctcctgagtggctgggactgcagatgtackccaccacacccagctaatgttttgtgttttttgtagagacagagttttgccatgttccccaagatggtctggaactccatggctcaatggagcctcctgcctcagcttcctgagtagttgggactatagggacatgccactacacctggctaattttttcatttttcgtagagatgaggttcaccatgttgcccaggctgatcttgaactcctgaactcaacgattctcctgcctcagcctccctaagtgctgggattacaggcatgatctaccactctcagcctaaaattcttagttacatattt

SEQ ID NO: 408797 - DNA, 463 bp, Homo sapiens
cctttcttgaaatcttcacatagacccttcttgttgattacaatgctcttatactatccaaccttaccacataccaaaattaaaccccatcgccacttccatataccaaaattaaacccctttgtcactcccattcatcaagtgaagtaaatgcatttttcaaatcttaagcctccaacattcaggaaacattcttctgatcatcctgactagatgargccttctcattataattatccaaagtacaccctatggccttcgtaagttactataattctagttaaaaatgtaattgcttagggttggctttgcaatttagattatgagctatataagagcatgaaagatgtcttccttttggctatagtgtcagtacaaagaatagcatctggaagacaagagacacacaatataaatttgtagaataaaaaaattaaaacccattggtttggaagatagccat

SEQ ID NO: 408798 - DNA, 547 bp, Homo sapiens
gaccaactgaactgaggttaattaatggatgttgttgtttaagccactaagtttatgctaattcgttaggcagagatagaaaactattacaaattctttttttttccaactctttggatggctgagccagtttcattccttaagttcctgaccatgcaattaaagagatatcttccatttactcactattttatcactctttttattttggtcatagtgcttatcacaatgtcaatctttaataagcttttttgttgatttatccccgagtrgattgtaaaatctctgtagaaagtatcttatttttcttgctatacccctccgcctagtagacctaatctttatttgctgaattgagtgaataaacattgctttcagtaacttgatatctacattaaataaataaccttctgaataatttgaagtatattgaagcatagattctactattctaaattgtgttgtaatggtcacttatacattttaaatgttttggcaattaagtagattccgaaaatcaatgattatctcccagatcttttcttga

SEQ ID NO: 408799 - DNA, 379 bp, Homo sapiens
ctatatatgcatgccttttgtttctttactatagatctcatttccatgtaaatgcacaggaactgttcaaacataaaataatttaaatattttattcctagaccacatcagagactctggtagcaggcttccaaaacatgacrcagcagattgtcctaaaaatgaattgatatatttcatgtgaagatcttagcatggtgcccagctataagacttattcaccattgacatcattattgtcattgtcatcatcattatattagtataaatttttggaaaaaacacctaaattcagtgttgtgctttttcacttacctagagaagtacaaatacaagagaaatttctaaaagaaagttattattttctgtgttttttttt

SEQ ID NO: 408800 - DNA, 555 bp, Homo sapiens
ccttatgcagccttttattttcaatgatcttgaagtagtcaccattaattttggagtttaggaaatgggcaaagtataaggccactgagttaaacatgaatgctcagacttaaaaaccatgtttagtcaagactgtgggctgtatttacttgaagatgggcccggccagaagtaattacactgagaactcaccaagttttgagaaaatatttctgaagattctccaagccaggcatataatatcttctcacggcctaattacccaaacaatcctaggcctccagacttccactaataggaattaawctgtaaagctttgcagcccccaggaagggcaactttgccaatacccaccttgttgagagcgtgagagaaaacggacagatgtacctctcagatggaagggcagaggccatggagggaaatggaaaacagaaccagagattgtcagatgggttaatcatagaatgtactccattgccaagaaaaggagttctcactattccttccaatcaggttgggttaattgctctggcacactgatggttgtatggt

SEQ ID NO: 408801 - DNA, 566 bp, Homo sapiens
gctgcagtgcctataccaccttccccacatcaccccccaccaccaccacttttatgctctgtcagtctagataataaagacctggagtgtggggatttgtatttctgacttcattttatctatgaatgtccgaagtcctttagaaacagaatatttaaatctcaaatgaccatttctgggttccatactcatgtggagggagaggttattttctcaagatctattcaagaattggaacaatcgtatccattttctgatgtgaattacataatatgtttctatagctctagtttgctaggacatctaggactgggcaggcctaatatgaatgatttcctagatgaccaatttcttgaagtgagagatcacgtacactattatttctcaacaaggtgctgctgacattttgaaccatagaattcattttgtatcattgcagaatgttgccagataattaataagcatctttagctcctaccsacaaaagccaagcaatgctttccctaccttattccccaaggtactatttccatacatttcctaccacctctgggtaggtgtgctgt

SEQ ID NO: 408802 - DNA, 576 bp, Homo sapiens
gattcttaaattttaaatackttttagtaaacgagtaaacacacatgtactttttctgaaaaaggctctagagtttttattttaccaccaccacattgctgtctcccctggaaatgacccccaaggatcattcttctagtggagccagccaaagccatggttggctattgttgatgaccctgtcaggcttaaggacagaaattctgctcttctggagcctaaagtatcagtccttgttgctcttgagcctactaaaagactctagaactatggccacaaatgctagttgtccccaacaatccatgcacagttccccactactgcagtgaaagctgtagcaaatagtaaaaggtttgtgttactgaccatttcaaacctacctctacaggactagggaacacttaccctcagtgctggacctcctcaggtctttgcaagctttacccttagcctcctcttccaaggactcagaatgaaaagaaaataaatgcaaaggtaagcctcatcggtgtcctcaggtaagttccttcagaacgtgagcagtaggggcaccctttccctccaggacaaaaagat

SEQ ID NO: 408803 - DNA, 576 bp, Homo sapiens
gattcttaaattttaaatactttttagtaaacgagtaaacacacatgtactttttctgaaaaaggctctagagtttttattttaccaccaccacattgctgtctcccctggaaatgacccccaaggatcattcttctagtggagccagccaaagccatggttggctattgttgatgaccctgtcaggcttaaggacagaaattctgctcttctggagcctaaagtatcagtccttgttgctcttgagcctactaaaagactctagaactatggccacaaatgctagttgtccccaacaatccatgcacagttccccactactgcagtgaaagctgtagcaaatagtaaaaggtttgtgttactgaccatttcaaacctacctctacaggactagggaacacttaccctcagtgctggacctcctcaggtctttgcaagctttwcccttagcctcctcttccaaggactcagaatgaaaagaaaataaatgcaaaggtaagcctcatcggtgtcctcaggtaagttccttcagaacgtgagcagtaggggcaccctttccctccaggacaaaaagat

SEQ ID NO: 408804 - DNA, 492 bp, Homo sapiens
aatctctctccacaacagtgagctttataatcttatgaatgaagctaggcctcttgtgctctcaggatctatagggactgatttataaattaacgagtaatgcattgatttttgcttattacttctttgacaaatctctttagtaagttatctgcatactcatcctggaaaggcacccttccatatctgaagtctggctcttttcatagtgcagcagtcaacatcattgtgaaatggattatgatagacttttctgtccttggaataaagaatcctaaaatctcttcatacatttgtctcattatttctaggctatcagtagatgatttcattggcatcagaaaataaagttttaaatcsattgtattcatctattaaaatatattttataatagattttggatctgaagaattgagatgtgtttaactaaccacatcatttcatttctgaagcaaactgtgtagtgacttattaaacagatttaaaactaa

SEQ ID NO: 408805 - DNA, 585 bp, Homo sapiens
aaatggaaaatccagaggaatagatgttcagatttaggttggatatgttccttgaagaagtatatttacactttatggcactactagaaaattctagaaaattcttctggaaatgaaccttttcttctttcttctctgggggagttaagggttttcttctttgtttttcttttcttttttattattattatttggctttgtgttaagatgctttgatctgatgttggaaatgaacgctagatacttctgttgacttccaccaaataagattggggaaataaagcagttcttgggaaagtcctttataataatggtaggatgttactttttaagctatcaatagtataaagacttattttctcttagtaagtaacttacctagttggaaagaggtcaattaaaagatttcttacattttttcctgtaaggcytaaattgtcattgttaaccaaggaaacagggtcaggcttgaaaaatcaaggaattcattatacctgctgaactgaagtcaaaattactagttgttcaacattaacttttcctaaactcaaatctatttttataaactaaataatgttcatatta

SEQ ID NO: 408806 - DNA, 585 bp, Homo sapiens
aaatggaaaatccagaggaatagatgttcagatttaggttggatatgttccttgaagaagtatatttacactttatggcactactagaaaattctagaaaattcttctggaaatgaaccttttcttctttcttctctgggggagttaagggttttcttctttgtttttcttttcttttttattattattatttggctttgtgttaagatgctttgatctgatgttggaaatgaacgctagatacttctgttgacttccaccaaataagattggggaaataaagcagttcttgggaaagtcctttataataatggtaggatgttactttttaagctatcaatagtataaagacttattttctcttagtaagtaacttacctagttggaaagaggtcaattaaaagatttcttacattttttcctgtaaggcctaaattgtcattgttaaccaaggaaacagggtcaggcttgaaaaatcaaggaattcattatacctgctgaactgaagtcaaaattactagttgttcaacattaacttttcytaaactcaaatctatttttataaactaaataatgttcatatta

SEQ ID NO: 408807 - DNA, 575 bp, Homo sapiens
ttgtagtggtcaattatcattattcctcacccttagacagggtgccaaggttggaataaaaaataagagcagaaatgcaatgcacttcctcagcacccattagagccccacatttccaatgcagtaaggagaaaacaagaaaaagagtgatgacagaaaataacatgctgcaaggaaccaaaaagaccattaatgacaacaaatgcaaacaggctacattcttttctaaatttgygaattcatctaaaatgtgcaattaaactacatggcatctacagaatgtattatgaagtaagagataaagatgggaagagaagtattaaataaaagctaaggtaaaaatattaatttcaaatagagttgagttcaaacaattttgccttacctcaaagaacgtgcatttacataacattattgcataattactagaggactatgagaggcatttgctcacatactagttggtaatgatgctagtgagaggagagttactgggataagcatgttggagttggagaatcaggaattcacttttgaacattacttttgagatgtctgctatgatctaaatgttt

SEQ ID NO: 408808 - DNA, 575 bp, Homo sapiens
ttgtagtggtcaattatcattattcctcacccttagacagggtgccaaggttggaataaaaaataagagcagaaatgcaatgcacttcctcagcacccattagagccccacatttccaatgcagtaaggagaaaacaagaaaaagagtgatgacagaaaataacatgctgcaaggaaccaaaaagaccattaatgacaacaaatgcaaacaggctacattcttttctaaatttgcgaattcatctaaaatgtgcaattaaactayatggcatctacagaatgtattatgaagtaagagataaagatgggaagagaagtattaaataaaagctaaggtaaaaatattaatttcaaatagagttgagttcaaacaattttgccttacctcaaagaacgtgcatttacataacattattgcataattactagaggactatgagaggcatttgctcacatactagttggtaatgatgctagtgagaggagagttactgggataagcatgttggagttggagaatcaggaattcacttttgaacattacttttgagatgtctgctatgatctaaatgttt

SEQ ID NO: 408809 - DNA, 575 bp, Homo sapiens
ttgtagtggtcaattatcattattcctcacccttagacagggtgccaaggttggaataaaaaataagagcagaaatgcaatgcacttcctcagcacccattagagccccacatttccaatgcagtaaggagaaaacaagaaaaagagtgatgacagaaaataacatgctgcaaggaaccaaaaagaccattaatgacaacaaatgcaaacaggctacattcttttctaaatttgcgaattcatctaaaatgtgcaattaaactacatggcatctacagaatgtattatgaagtaagagataaagatgggaagagaagtattaaataaaagctaaggtaaaaatattaatttcaaatagagttgagttcaaacaattttgccttacctcaaagaacgtgcatttacataacattattgcataattactagaggactatgagaggcatttgctcacatactagttggtaatgaygctagtgagaggagagttactgggataagcatgttggagttggagaatcaggaattcacttttgaacattacttttgagatgtctgctatgatctaaatgttt

SEQ ID NO: 408810 - DNA, 474 bp, Homo sapiens
ttctgttgattgcttcctttgctatgcagaagattttagtttaatgttcagtttgtctgtttttgttatttgtgtctttgaggtcatagatgtaaaatctaaaatctttgattagaccaatgttctgaagtattttccttctagtagttttgtattttcaggtcttacatttaagtcatcaattcatcttcagttgattttctaatatggtgagagatagccttgttttattcttctgcaaatgagtttccagttttcccaacaccttttattaaagaggatgtcctttccccagtgtatgttcctgattgttttgttgaagatcagttggctataaatatgtgaattcatttttgggttatcgaagctgttccattggtctatttgtctatttttataccaataccatgctgttttcattataatarcattgtaatgtattttgaagtcaggtcgtgggatacttgcaccttt

SEQ ID NO: 408811 - DNA, 596 bp, Homo sapiens
gattgtgttattttcttgccacagtgctacaaaataaattaattttcctaaataataacaggatgatctaaaaagaaatttatagtacttgacccctgtcttttaaagtaaccaattcctagtgctttaattgawaggatggctgtgttaaggacaaactctgctgttgagcaaaaatccagttagttattaagagcactttctgaggtagacttcagttagactttatctctaaagctgcttacagctgtgagagggagtcaataaagagtgaggctagagggaaggcgagaaaaggagaattcagtatgatacttcttatttgagaaaagagcattgtggacaagctctcttgaattagtcaaagacacatatctagactaataataatctcttctcgattcagccagaagggaattcagcataggaccaaagcaggcagatccaggctttaaaaccaggtgtgtggttggggggatactatgctgattggggctgtgtggtacacttagagggagtcatgcttgcatgccttctccaccaggtcttgggcacccctcatgccctgccctcagttctccctctgtggtagagag

SEQ ID NO: 408812 - DNA, 596 bp, Homo sapiens
gattgtgttattttcttgccacagtgctacaaaataaattaattttcctaaataataacaggatgatctaaaaagaaatttatagtacttgacccctgtcttttaaagtaaccaattcctagtgctttaattgataggatggctgtgttaaggacaaactctgctgttgagcaaaaatccagttagttattaagagcactttctgaggtagacttcagttagactttatctctaaagctgcttacagctgtgagagggagtcaataaagagtgaggctagagggaaggcgagaaaaggagaattcagtatgatacttcttatttgagaaaagagcattgtggacaagctctcttgaattagtcaaagacacatatctagactaataataatctcttctcgattcagccagaagggaattcagcataggaccaaagcaggcagatccaggctttaaaaccaggtgtgtggttggggggrtactatgctgattggggctgtgtggtacacttagagggagtcatgcttgcatgccttctccaccaggtcttgggcacccctcatgccctgccctcagttctccctctgtggtagagag

SEQ ID NO: 408813 - DNA, 561 bp, Homo sapiens
gaaatcatatatatttatagcttaagatcaggaacaaggccattatacctggatgatgagatacatattatagattaaaaaatatctgaatagcttcctttggcttttggcattttatcaacatgataataacaataatacaaataaaaatcatggctaatatttattgcatatatattataatattgtaagtgctctaaatacattatctcatttaaccctcacaataacctttagttatcctccctattttatagttgagttttaaagacattaagtaacttgtcaaagttcatatagatggtcagtggaattcacatcttcataactccagtggtgatatccttcagccaaataaaacaaaaatcttcactcaggaaaatttttttatagtagctattgataacaactctggtctgaactttatttttctgttagttcattatttttgtgctatttattgctggataaatctcagctgatgtttagcatctttgttttatccatggagactccttagytacctgcttctcttgagcatctggaaatcctgggtattat

SEQ ID NO: 408814 - DNA, 565 bp, Homo sapiens
gaggagtgtttgtttttctaactctaatcctcagaaatcagccatgaggttcccaaatatttcaatctgtgttaatgagctcgctttgcaattcagaatcccacttctcaatatctctttgaaatagttgagaagccctgtacatttttcaatttatttcctagtatggtaagaggatttgaagttatctgttaatgagcsctgttcccctctggtccttccctacagcaattctccatagcagggaggaggttgatacatggctctagatttggggaaggagggtggactaagcaagtttgagataatgttaagactgaaatagagggtcttttggtcacaagcatgctaccctcaattcagttctctaagggtaggttgatatttgatgttcaatgttagaaagaatataataatatgggcaagacagcccccatttacttagcactcacaatgtacaagccattgtttaccaatcacatcttatcattaaatccttacaataacaccatgaataagtattacagtaatcaccatttaaaggtgagcaaatggaagcttagag

SEQ ID NO: 408815 - DNA, 479 bp, Homo sapiens
ggggtgaagagggcactcaaggaaggagaaggagaatgtgataagttctacttcgttgtggagtaaacagtaaacaactgtttttctatggaggattatgaattatagtaattgaataaaagttagaataagaagaaagtagcattcatgcagtgcttgaaaagctgaataaagtatcagtgaagatgttttataagattgttcacttttccactgagaattttgtaataattttggatttcatgcctgttatttcaaccctgtgaaatggttagggcattttgtatagttgcatgattctaaagctcttccaaagcaagataagtaaaatgataagacccttttttwaaaaaaaaaaaaaaaatctgaagtcactaacattttagaatgaaacagaagctggtgaaaatgtaaacgtgtttagaagtaattttatgtgtgtatgataaagttgtttactgttcctcaaacaatatacc

SEQ ID NO: 408816 - DNA, 485 bp, Homo sapiens
tgaaaatgtaaacgtgtttagaagtaattttatgtgtgtatgataaagttgtttactgttcctcaaacaatataccatatacctaattcttaccatcttcccttgtatattagtctgttttcacactgctataaagaaatactacctaagactgacaatttataaagaaaagaggtttaattgactcagtttcgcatggtgggaggccttaggaaacataatcatggtggaaggggaaggaaggcatgtcttatgtggtggaaggagagagagaaggaaaactgccacttatcagatcttgtgagaactccctcactatcatgagaacagcatggggttctccccaccccgccatgatcaaatcacctcccacctggtcccttccctgaattgtgggtattacaattcgagatgagaattgggtggggacacagagtcaawccatatcacctaccttcttttaatcctcctattccagatatttg

SEQ ID NO: 408817 - DNA, 574 bp, Homo sapiens
tatgtgtgaaaatttctcctttgtagatgtatagttgggggaggggatttctgaaatgcaactttgcactgataatttgtagtatgaacttaatggtcattcttctccaaagttagcaaataattgagggtaatcttaagctagtaccacagaggttccaaaaaatatactaaatgtcaaggatttagtgattaagaaaagacaaatgccaggtcttcccttactaccattctcactagaagatggttttatcagctgatcttcccaggaggtgaaatcctttaactacacaagctatatttattcttgagaactgacctttttatttatggcaatttgaagaaataaargacttcaattcttcatcgtgtttaaggagagccacagtagagattctgtactagcagaggagagaacaaactggaaaatcagtcaggagctgaagtggaggagtaagtgtctgtgacagcacctgagaattaatgttgagagagaaaaatgaagatcttgcaaatctatacttgctgtcagattctgcaaatgaaatcatattaacactaaagcaaattgtgtg

SEQ ID NO: 408818 - DNA, 574 bp, Homo sapiens
tatgtgtgaaaatttctcctttgtagatgtatagttgggggaggggatttctgaaatgcaactttgcactgataatttgtagtatgaacttaatggtcattcttctccaaagttagcaaataattgagggtaatcttaagctagtaccacagaggttccaaaaaatatactaaatgtcaaggatttagtgattaagaaaagacaaatgccaggtcttcccttactaccattctcactagaagatggttttatcagctgatcttcccaggaggtgaaatcctttaactacacaagctatatttattcttgagaactgacctttttatttatggcaatttgaagaaataaaggacttcaattcttcatcgtgtttaaggagagccacartagagattctgtactagcagaggagagaacaaactggaaaatcagtcaggagctgaagtggaggagtaagtgtctgtgacagcacctgagaattaatgttgagagagaaaaatgaagatcttgcaaatctatacttgctgtcagattctgcaaatgaaatcatattaacactaaagcaaattgtgtg

SEQ ID NO: 408819 - DNA, 602 bp, Homo sapiens
gatctaccattctgggtctggatgayggtggccctcttctcacaactccactaggtggtgccccagtagggactctgtgtgggggatccaaccccacattttccttctgcactgccctagcagaggttctccatgagctccctgcccctgcagcaaacatccgcctgggcatccaggcatttccatacatctgaaatctaggtggaggttcccaaaccgcaattcttgacttctgtgcacttgcaggctcaacaccacatggaagctgccaaggtttggggcttgtactctttgaatccatggcccgagctctatgttggcccctttcagccatggctggagcagctgggacttagggcaccaagtccctaggctgcacacagcatgggtaccctgggcccggcccatgaaaccattttttcctcctaggcctccacgcctgtgatgagaagggctgctgtgaagatctctcacatgccctggagacattttccccattgtcttggggactaacatttggcttcttgttacttatgcaaatttctgcagccagcttaaatttctcctcagaaaatgggattttcatttctgtcacattgtca

SEQ ID NO: 408820 - DNA, 546 bp, Homo sapiens
gaagtcctagctaattcagtaagacaagaaaaggaaaaaatgttatgctaattgggaaggaaaacataaaactgtctcggtttaccagtgacatgattgtatatgtagaaaatcctaaagaattcatcagaaaaaaatctccgggaactaayaagcaattacagccaggttatgggatgcaaggttaatatacaaaagttaattgctttctaacatatcagcaatgaacaagtggaatttgaaatttaaaacatactattatttgcattggcatccccaaaagtgaaacacttaggcataaacataacaaaatatgtacagaatctgtataaagaaaactacaaaactctaatggaagaaatcaaagaactaaataaatagagagatatgtcatgctcatggatagaaaactcaatattgtcaaaatgttcattctccccaacttgatctacagattcaatgcaatcccaatcaaaattctaaaaaattattttgtagatattgtcaaactagttctaaagtttcttttgagattcaaaacaccaa

SEQ ID NO: 408821 - DNA, 608 bp, Homo sapiens
gctcaaggtatatcatgttcttagataagaatatttagtatcataaaattaaatctctataagttaaactacaaatataacacaatcccagtaaaaaataccaacaggatttttaattgcacaaactgttttatatatatataaaacagaaagcattaataaccagaaaaaaaatctatgaaaaaaagagtaataaaagagatggctgggcatagtggctcgcacctataatcccagcactttgggaggttgagggggacaggtcacaaggtcaggagatcgagaccatcctggctaacacagtgaaaccccatctctactaaaaatacaaaaaaattagccgggcatggtggcaggcacctgtagccccagctactcgagaggctgaggaaggagaatggcgtgaacccagaaggtggagcttgcagtgagccgagatcrcaccactgggcactccagcctgggcaacagagcgagaccctatcaaaaaaaaaaagtggtattctacattctctttatgtattaatatcaaatcctctttaagacaaaataactaaagcagtgtggtgattttgcatgaacaaaatttcaaaccaatagaagagaat

SEQ ID NO: 408822 - DNA, 608 bp, Homo sapiens
gctcaaggtatatcatgttcttagataagaatatttagtatcataaaattaaatctctataagttaaactacaaatataacacaatcccagtaaaaaataccaacaggatttttaattgcacaaactgttttatatatatataaaacagaaagcattaataaccagaaaaaaaatctatgaaaaaaagagtaataaaagagatggctgggcatagtggctcgcacctataatcccagcactttgggaggttgagggggacaggtcacaaggtcaggagatcgagaccatcctggctaacacagtgaaaccccatctctactaaaaatacaaaaaaattagccgggcatggtggcaggcacctgtagccccagctactcgagaggctgaggaaggagaatggcgtgaacccagaaggtggagcttgcagtgagccgagatcacaccactgggcactccagcctgggcaacagagcgagaccctatcraaaaaaaaaagtggtattctacattctctttatgtattaatatcaaatcctctttaagacaaaataactaaagcagtgtggtgattttgcatgaacaaaatttcaaaccaatagaagagaat

SEQ ID NO: 408823 - DNA, 592 bp, Homo sapiens
ttcttttcgtcttgtaaaactgaaaatttgtacccattaaacaataattccccattcctccctcgccactgccctggaaaccacaattctactttctgtctctataaatttgattactctaggtacctaaaaaaagtgtaatcctaaaatatttttctttttgtaactgtcctttttcacttactgtaattcaagtttcatccatattgcagcatgaccacaaagtttggaaaccagcccaaaatattaccaagccataggaaaaggaggatccacaaaatacagttgatttaaaaatgaatgcatttcatgtttgtgtctcaactaagtacagagtcttctcaacaaatcagttgctgctgatatttctcctgctgatacatttaatcctgtggaatatcagcagcaactggtttgttragcaaactggtctgtctgctgaagtccaaaattaacaaatacccagtcctttacagaaatattgccatgttcttctagaatttctttctttaaaaataaagaaccctttctttcctaatttgaaatgtctatttatagtttgaaaatcaggcaaatacctatgcagatgata

SEQ ID NO: 408824 - DNA, 636 bp, Homo sapiens
gttgcagtgagctgagatcacaccacttgcactccagcctgggggwcagaatgagactccgtctcagagaggcgggaaaaaaacctgattcagcagttcagttggcttgttttatttttcagtgtctttaacaccttacacgcacaaactttctaactttccccattacaagtgatgaaaagcattttgatgacttgtgcagcagtatcagcaatacaccatatttgaaattggaaaaaggaacttcttagagataaacttatttggactttactgaaatgcacagagagaggaaatcttccccaccctcctccctgaataaggtgatttcgttatgttgtttttaaacagacactttcctggagactcccatcattaattaggctaattttactgggtgatgacccttcaaacttgaatgggaagggaaagtcacaggctatttcctcatttttccaaaactcttttccgagtgttacgatttcagaaatcagaatgtgatttgttctgaggtgaaaattaactgagagttccttgtgcccattatctgcctagatgaacaaagaaagtccttctcttccttcaccatcaccatcactaccattaactaaataacaacttatagcaggcattgcc

SEQ ID NO: 408825 - DNA, 566 bp, Homo sapiens
aagtcatcaatgtaaaccatgtggttagaaccatcagtagaacaagatcaagtaggaggaaagtgttttaaattagatttaccataaatataaaggcctcagatgctaaagtttcttctttaaagagtggagagctattgggactttggggtagaggtgggaactgggggattgacaaagcaattccttttcagtgcagcaaggacttctagaaagcttctagtctatccctattcttttatacttaaaaaactgaggtccaggtaggtgactaatttattcacattcatgttaattagtggcctatgtctcctggttcccagtctcaagcccttatgactatacccatgtaggacaaaagacatttaaaaagtaatattatgactayagcaattgaggacctggtctgtacaggcattgttagatatggaaagaaagaaatttatttttaagactttatgaagagaggatatatatttatgcatggtaaataactaatgagggataagtatttcctgaagctgtaacttcatatatgtcatcctgtatatgacaaattatttgag

SEQ ID NO: 408826 - DNA, 619 bp, Homo sapiens
ttgtaggagttgcagttagaatctttacacgatatgtgattttaaaataattcaaagcacaattttactttgccaaaaggctattctatgaactccttccagataattatagattaatctgataacagccactaattagactatgaagaaaattartgaatcaattgtggttctcttggaacaacagtcttccagaagattgggtgggagggaggcttgcttaaaatttcttatttcagaaacagtttagagagtaaaaacagtaaaattaaatgagaagtctggatagagggaaacacatattaccagagcaaaagccaaactcgttagaactgcctgtaaatgtgacttatggaaaaagaatagattacaataaaaaaagatatttcattcaattaaatttatttaaagtatattattaaagttaatggcacaaaaatatgcatcaaactaaaatcttacatagtcaccgcaaaattccctaattttatgtctgatcaaatcttttcatcattcctccaagcatggcttggcctttcagatgttttcaaatttttcctctttcttactaaaacaagcttccactttacctaatctaatacaatgataaaaatattaa

SEQ ID NO: 408827 - DNA, 598 bp, Homo sapiens
gatacctatatgtctctcctgtagttattctctacgtgatttttccatcatataagactttacttattatgtctcgttcagaaggtcctcccactgatccatccatccacaagaatattaatatatcggtttaagagtcagctgacacctcaccttttttatgaacacttttctgattaacccaactctcacatactacatttgtcatcagttttatttcatttggtgctgcatcaggcgcactcttttgtcttgaagctgtttcatgcacataaatcttgtttgtgcgtatagcacacaaaattttatacagcagaaactgttgtttcttcttctttttcaatctttgtagcagtgctataaacagtgctatgaacatagcaagcacatcaaaaataaattaaattgtattttaactatgacttctccaattatggtagcttctaagaaatctttcttgaaaataaagagagaaayagaagtcactataaaaaaaagtaatacaatctgtcttgatgctctaaaattaagcagcgaaagcaggtttaacactatcatacactattttaattttattgttcttgaatttgactaaaag

SEQ ID NO: 408828 - DNA, 529 bp, Homo sapiens
tttgtcacacagcagtagcaaaataacatatcaaggaagtaactcctccttctttcatagggttatgmaaatctgtgggtgttcctcagaccaacagaaataaggaaaggacatttacaatcagggtgggtggagcagatgctgtaggtacctactcacacctcttggaccttatcactcaatgacttccaatggccagaatctgactgtctttgcctaaaggctttctcagaagtccaggaaggctactttgcctgggcatggcagatctaaagggccaaggaattaacagtggcaggaaacaaccaatggctgacaatagctggtatataaatgcctcatttccttcacttttggtgagacaaccccaggatgtgatccccatgcaattaagctctgattgcccatagtggtagctggcttgagggcacaatctgtattggctgccttcccctctctatttcccttccctacttccctactgtgcttcccaaataaaccacttgcattccgtactttgtcttagggc

SEQ ID NO: 408829 - DNA, 533 bp, Homo sapiens
aaactgtgatgacgtcagtaccaacatggaacatattcctcatttctacatggaacaaagtgcagggctccaggaacacagcrtcagcctggcaccagtggggtacagcagcactgagcaagaggagcagtgttgcctggcagatgtgaacatgcccagtgggagacagtggtacccaaatgaagtggctcctctgtgagtgcatccaggcagatcaattaacagcagacacctgagcagcaggcctcacagagcaagaagaattgggtttccaatcattatgatagttatttttaaataatggtgacttttacctcagattcgtgataagttgttgaatttttattacaacatgtaaagtatggcattaccctttaatttgtctacttgttcacctggttttatatcagcattataaaatgatccattttttactgttttaagttatagttcataaaaaggaaaaaggaaaattgaggtgttttacaatgacccatttgcctctccccatcatgttgtgctattattgagtg

SEQ ID NO: 408830 - DNA, 533 bp, Homo sapiens
aaactgtgatgacgtcagtaccaacatggaacatattcctcatttctacatggaacaaagtgcagggctccaggaacacagcatcagcctggcaccagtggggtamagcagcactgagcaagaggagcagtgttgcctggcagatgtgaacatgcccagtgggagacagtggtacccaaatgaagtggctcctctgtgagtgcatccaggcagatcaattaacagcagacacctgagcagcaggcctcacagagcaagaagaattgggtttccaatcattatgatagttatttttaaataatggtgacttttacctcagattcgtgataagttgttgaatttttattacaacatgtaaagtatggcattaccctttaatttgtctacttgttcacctggttttatatcagcattataaaatgatccattttttactgttttaagttatagttcataaaaaggaaaaaggaaaattgaggtgttttacaatgacccatttgcctctccccatcatgttgtgctattattgagtg

SEQ ID NO: 408831 - DNA, 533 bp, Homo sapiens
aaactgtgatgacgtcagtaccaacatggaacatattcctcatttctacatggaacaaagtgcagggctccaggaacacagcatcagcctggcaccagtggggtacagcagcactgagcaagaggagcagtgttgcctggcagatgtgaacatgcccagtgggagacagtggtacccaaatgaagtggctcctctgtgagtgcatccaggcagatcaattaacagcagacacctgagcagcaggcctcacagagcaagaagaattgrgtttccaatcattatgatagttatttttaaataatggtgacttttacctcagattcgtgataagttgttgaatttttattacaacatgtaaagtatggcattaccctttaatttgtctacttgttcacctggttttatatcagcattataaaatgatccattttttactgttttaagttatagttcataaaaaggaaaaaggaaaattgaggtgttttacaatgacccatttgcctctccccatcatgttgtgctattattgagtg

SEQ ID NO: 408832 - DNA, 587 bp, Homo sapiens
  misc_feature (1)...(587): n = A,T,C or G
agagaggaacacttttcatatggagtcagaagtgctggtcatttgtttctactactccctattatacaaatcatctctaaaaaatatattctacatgtggacagcaggcacttgcttaaaaaccagtgacacagaagccaccatttttaagacaatacmttttttgactcttctaaaaagtctagtaaaagttctgccttatatttagctgaactttacttccctgaaacatccacctatctgtccttgttctgcccttgggagcagcagagttaggctngcgggtggaaaagaaccaccccgtggcgatgaatagaaatagattctgatgaataaaaactcctccccagcagggtaaaccttatgcagcatgtggtgagggcagtattgcagacatcatcattacacagttgtctctgaatttcttcctctgggggactgcaccacccatgtgacttgggtgaaaatgtcacagaatcttacctccccaaccacagaagcaggaatatgatctgagctgactaatcaaaatattctgacccctggagtgcaagttctttttagatacacacactgggagggaaaga

SEQ ID NO: 408833 - DNA, 510 bp, Homo sapiens
aatgcttttaactttcccctattcggtatgatgttggctgtgggtttgccatagaaggttcttaatattttgagktgtcttccttccatgcctagtttcttgagggtttttatcatgaagggatgttggattttattgagtgctttttctgcatctgttgagataagatgattatatggtttttgtttttaattctgtttatgtggtgttgattcaattttctacatctgaaacctgagactcataaattttctctcacatcacacttaatcaattcccaaattgtgttgacccagcctccaaaataatctgtccacttgtctccatttcttatgctatgacccaagtccaagccacatttttcctcttttagattctgcaatgtcttttagacgctgcagatgtttctctgcacctgttccgagctccctccatttcattctccaccacgcagtgatcttttaaaaatgcaaatctaattatatcagtttttttgtttaaaacgtttcc

SEQ ID NO: 408834 - DNA, 510 bp, Homo sapiens
aatgcttttaactttcccctattcggtatgatgttggctgtgggtttgccatagaaggttcttaatattttgaggtgtcttccttccatgcctagtttcttgagggtttttatcatgaagggatgttggattttattgagtgctttttctgcatctgttgagataagatgattatatggtttttgtttttaattctgtttatgtggtgttgattcaattttctacatctgaaacctgagactcataaattttctctcacatcacacttaatcarttcccaaattgtgttgacccagcctccaaaataatctgtccacttgtctccatttcttatgctatgacccaagtccaagccacatttttcctcttttagattctgcaatgtcttttagacgctgcagatgtttctctgcacctgttccgagctccctccatttcattctccaccacgcagtgatcttttaaaaatgcaaatctaattatatcagtttttttgtttaaaacgtttcc

SEQ ID NO: 408835 - DNA, 516 bp, Homo sapiens
agtttacacacaacaattacagtgtaatactattctctgttttttggtgtgcttactattaccagtgagtcttcagatgatttctactgggtcattaacatacttttctttcagattgaagaactccytttagcatttcttgtagaacggatttggtgatgatacccctcaacttttttctgggaaggtctttatttttcctttaagtttgaaggatattttcaccaaatatactatcctagagcaaaagttttttccttcagctctttaaatatgtcatgccactctccctggacctgtaaggtttccactgaaaagtctgccaggtgtattggagctccactgtatgttatttgtttcttttctcgtgctgattttaggctgctttcaggctgctttctttatcctcgacctttgggagtttgattattagatgccttgaggtagtgttctttgggataaatcttcttggtgttatataagcttcttgtaattaaatgttgatatctttctcta

SEQ ID NO: 408836 - DNA, 551 bp, Homo sapiens
ttcctcggtctggaggtggtgtttcacctgggacgtgtccccttccacccagagcctatctatctcctcccactgttcatggctgcccaggctgtttgtgccaaggggagcctacaggccagcaatgagctgcccttagcaccacctcagcttccctcctgtgccccttggcatccaaagtccaaagggggctgaggtggcagagggctggtgtgtcagtgctggcycgagcatgtgcccacccagctgggctgctgtagtgcctgagcttgggcccaaccttcctccatgagctgagtgggcactgggagtggggatgggccaggcagtggaagcaggcaattctgaacctgcagggggcaatggggccttcccaggccctcaagagcacagggatgcccagtctgcagccaggcttgggtggctgcagatgcatccagggaacaccctccccaccaactcggaaggggcggagctcctgcttgtccccagctcccactggcttcatggagcatgcaactctggccacacctccaagactggagcaggtg

SEQ ID NO: 408837 - DNA, 551 bp, Homo sapiens
ttcctcggtctggaggtggtgtttcacctgggacgtgtccccttccacccagagcctatctatctcctcccactgttcatggctgcccaggctgtttgtgccaaggggagcctacaggccagcaatgagctgcccttagcaccacctcagcttccctcctgtgccccttggcatccaaagtccaaagggggctgaggtggcagagggctggtgtgtcagtgctggcccgagcatgtgcccacccagctgggctgctgtagtgcctgagcttgggcccaaccttcctccatgagctgagtgggcactgggagtggggatgggccaggcagtggaagcaggcaattctgaacctgcagggggcaatggggccttcccaggccctcaagagcacagggatgcccagtctgcagccaggcttgggtggctgcagatgcatccagggaacaccctccccaccaactyggaaggggcggagctcctgcttgtccccagctcccactggcttcatggagcatgcaactctggccacacctccaagactggagcaggtg

SEQ ID NO: 408838 - DNA, 551 bp, Homo sapiens
ttcctcggtctggaggtggtgtttcacctgggacgtgtccccttccacccagagcctatctatctcctcccactgttcatggctgcccaggctgtttgtgccaaggggagcctacaggccagcaatgagctgcccttagcaccacctcagcttccctcctgtgccccttggcatccaaagtccaaagggggctgaggtggcagagggctggtgtgtcagtgctggcccgagcatgtgcccacccagctgggctgctgtagtgcctgagcttgggcccaaccttcctccatgagctgagtgggcactgggagtggggatgggccaggcagtggaagcaggcaattctgaacctgcagggggcaatggggccttcccaggccctcaagagcacagggatgcccagtctgcagccaggcttgggtggctgcagatgcatccagggaacaccctccccaccaactcggaaggggcggagctcctgcttgtccccagctcccrctggcttcatggagcatgcaactctggccacacctccaagactggagcaggtg

SEQ ID NO: 408839 - DNA, 576 bp, Homo sapiens
tgggtggcatataaacaacattgtatttctcacatttctatgggttggaagtctgagatcagggggtcaggatgcctatatggtccattctgggttctggwgagggttcttttccaggttgctgattgcctcctcattgtagcctcagaaggcaagagagccctctgaggttcctttaagaagggcattaatccaatttgtgagggctccaccctcatgaactagtaacctgccaaatgcccatgtgggggtccacaaacatttagtcagtgtacctccaaaatattttttctattctcataatttccacctatttcgctctcatttccttttggaatatttttcacctgccaatttgttcatgattcattgtcttattgggagtgtaggtgactctaagaatccaaattcaagggctgaaagttctcagggaccagggcaaggccttgaatcagagctaagcaggcaaaccagagtcctgttttcatttcagagtagaggtcagcgcctactgtgtgtgagaaaccacttggactaacaaaacccaggaaaatacagcagctagacatcatacaa

SEQ ID NO: 408840 - DNA, 576 bp, Homo sapiens
tgggtggcatataaacaacattgtatttctcacatttctatgggttggaagtctgagatcagggggtcaggatgcctatatggtccattctgggttctggtgagggttcttttccaggttgctgattgcctcctcattgtagcctcagaaggcaagagagccctctgaggttcctttaagaagggcattaatccaatttgtgagggctccaccctcatgaactagtaacctgccaaatgcccatgtgggggtccacaaacatttagtcagtgtacctccaaaatattttttctattctcataatttccacctatttcgctctcatttccttttggartatttttcacctgccaatttgttcatgattcattgtcttattgggagtgtaggtgactctaagaatccaaattcaagggctgaaagttctcagggaccagggcaaggccttgaatcagagctaagcaggcaaaccagagtcctgttttcatttcagagtagaggtcagcgcctactgtgtgtgagaaaccacttggactaacaaaacccaggaaaatacagcagctagacatcatacaa

SEQ ID NO: 408841 - DNA, 576 bp, Homo sapiens
tgggtggcatataaacaacattgtatttctcacatttctatgggttggaagtctgagatcagggggtcaggatgcctatatggtccattctgggttctggtgagggttcttttccaggttgctgattgcctcctcattgtagcctcagaaggcaagagagccctctgaggttcctttaagaagggcattaatccaatttgtgagggctccaccctcatgaactagtaacctgccaaatgcccatgtgggggtccacaaacatttagtcagtgtacctccaaaatattttttctattctcataatttccacctatttcgctctcatttccttttggaatatttttcacctgccaatttgttyatgattcattgtcttattgggagtgtaggtgactctaagaatccaaattcaagggctgaaagttctcagggaccagggcaaggccttgaatcagagctaagcaggcaaaccagagtcctgttttcatttcagagtagaggtcagcgcctactgtgtgtgagaaaccacttggactaacaaaacccaggaaaatacagcagctagacatcatacaa

SEQ ID NO: 408842 - DNA, 607 bp, Homo sapiens
cacacaattaggaacacagataactgataaatatatgaaaggatctttattcccattgattaaagcaatacaaattaaaacaatgcaatagcttttgtaactatcacattgtcaatgattaaaatattgataataccagtgtgccaaaatgtggagagacaattactcttttaygcattattacttagtggcagcttatattggtgcaatactttaaagtgacaatttagcaatatgtattaaaatataacacatctacatccaggaattcctttaaaagaaatatccctacatgtatgcaaagatatgtaaatatagaacattattcattgcaatattgtttataatggcaaaaaacttgcaggctttttgctattacaaacaatattggaatgaatattgtaatatttttatgttacaatgggggactagttaaattcaaaataagctgaagaattaatagtaatgatttctacaggaggagttggaggatcatgggagaattccagtttttttttctttttatgtgccttatttcaatctttcccatactaaagtagcacttttacaataagaaaaataattaagatataaaacattactttta

SEQ ID NO: 408843 - DNA, 607 bp, Homo sapiens
cacacaattaggaacacagataactgataaatatatgaaaggatctttattcccattgattaaagcaatacaaattaaaacaatgcaatagcttttgtaactatcacattgtcaatgattaaaatattgataataccagtgtgccaaaatgtggagagacaattactcttttatgcattattacttagtggcagcttatattggtgcaatactttaaagtgacaatttagcaatatktattaaaatataacacatctacatccaggaattcctttaaaagaaatatccctacatgtatgcaaagatatgtaaatatagaacattattcattgcaatattgtttataatggcaaaaaacttgcaggctttttgctattacaaacaatattggaatgaatattgtaatatttttatgttacaatgggggactagttaaattcaaaataagctgaagaattaatagtaatgatttctacaggaggagttggaggatcatgggagaattccagtttttttttctttttatgtgccttatttcaatctttcccatactaaagtagcacttttacaataagaaaaataattaagatataaaacattactttta

SEQ ID NO: 408844 - DNA, 607 bp, Homo sapiens
cacacaattaggaacacagataactgataaatatatgaaaggatctttattcccattgattaaagcaatacaaattaaaacaatgcaatagcttttgtaactatcacattgtcaatgattaaaatattgataataccagtgtgccaaaatgtggagagacaattactcttttatgcattattacttagtggcagcttatattggtgcaatactttaaagtgacaatttagcaatatgtattaaaatataacacatctacatccaggaattcctttaaaagaaatatccctacatgtatgcaaagatatgtaaatatagaacattattcattgcaatattgtttataatggcaaaaaacttgcaggctttttgctattacaaacaatattggaatgaatattgtaatatttttatgttacaatgggggactagttaaattcaaaataagctgaagaattaatagtaatgatttctacaggaggagttggaggatcatgggagaattccagtttttttttctttttatgtgccttatttcaatctttmccatactaaagtagcacttttacaataagaaaaataattaagatataaaacattactttta

SEQ ID NO: 408845 - DNA, 520 bp, Homo sapiens
gtgttccgcccgcctcagcctcccaaagttctgggattatggggtgagccamctcgcctagccgctatgcactattttaagctgagcttttctcctattcctagatcaactgcattatccgtcgtaactcttagtcattttagtaaaatgcatagtacatttaagaattcaaaaaatatgtattgagttatttttgagttagatattgaagataagtagaaaacaaaacagataaacccccttcccttatgaggtgtttatctactgaaataactgttggtatatctcaaagaaaatgatgtcaacactagcaaaatcactgaagtattaattttgccatttcctacccaatatcaagtaatacctatttttaaattataagttactgtcgaaaaaattattaaaaatttttatgaaagtcaacatttctaaatgtaatcatcttctgttttttttttctttaatagaagctctgtaggaaatcccaagtcaaagtatcattggccaaatattacttatt

SEQ ID NO: 408846 - DNA, 520 bp, Homo sapiens
gtgttccgcccgcctcagcctcccaaagttctgggattatggggtgagccaactcgcctagccgctatgcactattttaagctgagcttttctcctwttcctagatcaactgcattatccgtcgtaactcttagtcattttagtaaaatgcatagtacatttaagaattcaaaaaatatgtattgagttatttttgagttagatattgaagataagtagaaaacaaaacagataaacccccttcccttatgaggtgtttatctactgaaataactgttggtatatctcaaagaaaatgatgtcaacactagcaaaatcactgaagtattaattttgccatttcctacccaatatcaagtaatacctatttttaaattataagttactgtcgaaaaaattattaaaaatttttatgaaagtcaacatttctaaatgtaatcatcttctgttttttttttctttaatagaagctctgtaggaaatcccaagtcaaagtatcattggccaaatattacttatt

SEQ ID NO: 408847 - DNA, 520 bp, Homo sapiens
gtgttccgcccgcctcagcctcccaaagttctgggattatggggtgagccaactcgcctagccgctatgcactattttaagctgagcttttctcctattcctagatcaactgcattatccgtcgtaactcttagtcattttagtaaaatgcatagtacatttaagaattcaaaaaatatgtattgagttatttttgagttagatattgaagataagtagaaaacaaaacagataaacccccttcccttatgaggtgtttatctactgaaataactgttggtatatctcaaagaaaatgatgtcaacactagcaaaatcactgaagtattaattttgccatttcctacccaatatcaagtaatacctatttttaaattataakttactgtcgaaaaaattattaaaaatttttatgaaagtcaacatttctaaatgtaatcatcttctgttttttttttctttaatagaagctctgtaggaaatcccaagtcaaagtatcattggccaaatattacttatt

SEQ ID NO: 408848 - DNA, 520 bp, Homo sapiens
gtgttccgcccgcctcagcctcccaaagttctgggattatggggtgagccaactcgcctagccgctatgcactattttaagctgagcttttctcctattcctagatcaactgcattatccgtcgtaactcttagtcattttagtaaaatgcatagtacatttaagaattcaaaaaatatgtattgagttatttttgagttagatattgaagataagtagaaaacaaaacagataaacccccttcccttatgaggtgtttatctactgaaataactgttggtatatctcaaagaaaatgatgtcaacactagcaaaatcactgaagtattaattttgccatttcctacccaatatcaagtaatacctatttttaaattataagttactgtcgaaaaaattattaaaaatttttatgaaagtcaacatttctaaatgtaatcatcttctgttttttttttctttaatagaarctctgtaggaaatcccaagtcaaagtatcattggccaaatattacttatt

SEQ ID NO: 408849 - DNA, 641 bp, Homo sapiens
tacacttcaagtaaagacctacttagataatacaataatattcattttatttttaatgtcatgtgtcatgtggagggaaaaaacttttcacattttttcaaataatgcctaggcactctgctgtatgaagacacttatttgataattttatctgttgtcatactccaggtagggacacagatgaacatacatgtacacccacatatgcatttttttttgcttttctcaagtataattttatgttgtgacctttatttatttttttatttttgagttggactatcactttgtcagcaggttggagtgcagtggtgcgatcttggctcactgcaacctccgcctcccaggttcaagtgattcttatgcctcagctttccaagtagctgggattacaggcatgcaccaacatgcctggtttatttttgtatttttagtagagacagggtttcgccrtgtttgcctggttggtctcgaactcctgacctcaagtgatcgcccgccttagtctcccaaagtgctgggattacaggggtaagccacctcacccagccttttacgacttttaattaactcattttcttgtcaagttgtttaaataaatctcatattcgtaaaagatttttcagcttgtagagagaaga

SEQ ID NO: 408850 - DNA, 580 bp, Homo sapiens
aacaagactgtaatcaagaatattatttctatggaattcggaaaataagcctttgtctgaactgtatttaaggcaattaagaaaaattacacattatgcacatttttttcttaatgatctacaatccctgaaaaagaaaacaagtgggctagaaatgaacaaataaatagacactttaaaagttttatgatcggtaatcaaaagagtttcagaatcatttgccagtaaagtgattcatgccaatttataacttatccacctcctccaaattttgctagcttaaaattccatctgatwttttaaagcatatgtaataggtaagactattcaatgtataccttcatttgctttatctgtatatattttcaaagggcatactataattatttagggaaaataagtttcaagaatattgttttttacaatattgaagactgctacttcaaactaagggtaaactattataacacaaccatgtgaaaaattcaaatatcccttccaattaatctacacatactcagggtaactaatgtccattaagtagaactacttttttggaatggattatgctgttagcact

SEQ ID NO: 408851 - DNA, 559 bp, Homo sapiens
gtcataaaatctaaataaggagaaaattttaataataaatcctgatagtctgatgcatgaatattctcagtagamatattcctgcctgcagaatgaggtaagccatatatctcatatatcttcacatctggctacagaaaactgacagtgacattatttgtttctccaacctcattttttctctctctctctttgtattactgactagttcttttaactgatctattttggaagagtatctgggagtattaataaaactatccttataaactttataaaattaactattaaccaggaaagaaggaagggggagaaaccaaaataaaccaagcttgtagcacattcagcaaattgatcattaggtcagcttactttctaactcagtctctcatagttagtcgttcagtgcctattgcctcagaatcatgcagaccctatcataagagtatagttcttcttaactgttctgtagataacaatgtgaactttatgaaacattaagtttcccctttgagagattctttcacgtcctgcataccagtgaaactgcggatgtcag

SEQ ID NO: 408852 - DNA, 479 bp, Homo sapiens
ggcccagaaatccttggtgaaatgaatctgaaggtctcttcccatctcttccctargtgtcctgcaatcattaaactctttctctgctgcagatccttctgtctcagtgtattggtgtgtcactgcatagcaggcatatatatgacctattggtcctacagcgttaatatgcagttttatcccaagaacttggaggtaagttaacctgtaaaaataataaatcaggcaaacctgatgccacagaaatagttagcaatctgaaaatacagcaataatttatcagtgtatgctaggtagcttgggaagcctggaattaaaaatgatagttttctagcagtaacttgatgaaaatttattcagggagtatgtcacagttacattttgttagctaaaatttgaccttttctttcttgtttttttacttttatttctttaagagattgtatgttcacagcattggattaaaatcctggttcaca

SEQ ID NO: 408853 - DNA, 479 bp, Homo sapiens
ggcccagaaatccttggtgaaatgaatctgaaggtctcttcccatctcttccctaggtgtcctgcaatcattaaactctttctctgctgcagatccttctgtctcagtgtattggtgtgtcactgcatagcaggcatatatatgacctattggtcctacagcgttaatatgcagttttatcccaagaacttggaggtaagttaacctgtaaaaataataaatcargcaaacctgatgccacagaaatagttagcaatctgaaaatacagcaataatttatcagtgtatgctaggtagcttgggaagcctggaattaaaaatgatagttttctagcagtaacttgatgaaaatttattcagggagtatgtcacagttacattttgttagctaaaatttgaccttttctttcttgtttttttacttttatttctttaagagattgtatgttcacagcattggattaaaatcctggttcaca

SEQ ID NO: 408854 - DNA, 479 bp, Homo sapiens
ggcccagaaatccttggtgaaatgaatctgaaggtctcttcccatctcttccctaggtgtcctgcaatcattaaactctttctctgctgcagatccttctgtctcagtgtattggtgtgtcactgcatagcaggcatatatatgacctattggtcctacagcgttaatatgcagttttatcccaagaacttggaggtaagttaacctgtaaaaataataaatcaggcaaacctgatgccacagaaatagttagcaatctgaaaatacagcaataatttatcagtgtatgctargtagcttgggaagcctggaattaaaaatgatagttttctagcagtaacttgatgaaaatttattcagggagtatgtcacagttacattttgttagctaaaatttgaccttttctttcttgtttttttacttttatttctttaagagattgtatgttcacagcattggattaaaatcctggttcaca

SEQ ID NO: 408855 - DNA, 479 bp, Homo sapiens
ggcccagaaatccttggtgaaatgaatctgaaggtctcttcccatctcttccctaggtgtcctgcaatcattaaactctttctctgctgcagatccttctgtctcagtgtattggtgtgtcactgcatagcaggcatatatatgacctattggtcctacagcgttaatatgcagttttatcccaagaacttggaggtaagttaacctgtaaaaataataaatcaggcaaacctgatgccacagaaatagttagcaatctgaaaatacagcaataatttatcagtgtatgctaggtagcttgggaagcctggaattaaaaatgatagttttctagcagtaacttgatgaaaatttattcagggagtatgtcacarttacattttgttagctaaaatttgaccttttctttcttgtttttttacttttatttctttaagagattgtatgttcacagcattggattaaaatcctggttcaca

SEQ ID NO: 408856 - DNA, 596 bp, Homo sapiens
tgatgttacaaattttctgtgtgtctgattgtaattcatatacattagtgagtggaaacagccattattaaatcttctacagttgaaatcattcatttaagttattgtggtttaaaaattcaccagtattaggcctgatttgtggataaataaagaggaggccctattcctgaatagctcaaagtactgtgaaagagaagaataagtagaagatgaaaatgctctctgaactcgtacgcatgtacaaagtaacagcccagcacaggaagaaatgctcaatttcaatcctccgtgctcgtggctatcaaggttataagtgatcaggcttataagtgatcaggttataagtgatcaagagatatagcttttgtttatccttccagcttcattatgttacacacactcacagaattctagcctttgttattctatgaattactagaattactaggattgttccctctactcaaaacttttgyacttgttattcctttatacttaaagaaattatttctggttgtttttataagtaactccttatttccctccaggtctcactgttgctgtcaatcctttaggactgttttctccacctc

SEQ ID NO: 408857 - DNA, 452 bp, Homo sapiens
atattataaatctatgtttaaattgtttgaaaactgtcaaactattttccaaattggttgtaatagttcacattccactagcaatggatgattgttccaatgtagtcacattatcaccaccacttgttatattctgtcttctgatttttactatctaattttatatgtagtagcattgtattgtggttttaatttttattccatgaatgactaatgataatgtgcatcttctcatgtgcttgctggcctttggcatattttctttggagaaatattggaataaaattatttgtycatttttaaaatcagcctgtgtttttatcattgagtcattagtttcctttatatagtctagatctaagccccttataagacatatgacttgaaaatatttatcccaaatattggtggtcattttacttttttgatattacttacagcacaaaaatttt

SEQ ID NO: 408858 - DNA, 571 bp, Homo sapiens
aggaaagctagagggtattataaaagtatgtgttaggttatcaaagctccttggtgtggggattagggagtrtttccatcaagaaaggccctgaagtatgagtttgagttgatatcagatatcaaaggctaatcaaaatctcaagactaaaagtaatatggggaaggtagttcaaagaaaatagctaaacttatttaggttattggatatatatacctaaagactttattatatagtaataaaaccatattatatagttttgttttattagcctacatatgtagacacaggctgaaccaataagtttacatttaaatgaattataatcaaagaatatatcaattgccagtatgtactcaaaagatgttgaatgtctaaaagatttattattcagaaaaaacacagttaaagtccaacatgtttgctaatatgagaaataaaacagaatttctaacattatcactcttatgtaagtttattataaaaattataaccaatgaaataatgaagattataatttaatgacaacaataactttcctaacagaagcaataaaatttccttcataatc

SEQ ID NO: 408859 - DNA, 571 bp, Homo sapiens
aggaaagctagagggtattataaaagtatgtgttaggttatcaaagctccttggtgtggggattagggagtatttccatcaagaaaggccctgaagtatgagtttgagttgatatcagatatcaaaggctaatcaaaatctcaagactaaaagtaatatggggaaggtagttcaaagaaaatagctaaacttatttaggttattggatatatatacctaaagactttattatatagtaataaaaccatattatatagttttgttttattagcctacatatgtagacacaggctgaaccaataagtttacatttaaatgaattataatcaaagaatatatcaattgccartatgtactcaaaagatgttgaatgtctaaaagatttattattcagaaaaaacacagttaaagtccaacatgtttgctaatatgagaaataaaacagaatttctaacattatcactcttatgtaagtttattataaaaattataaccaatgaaataatgaagattataatttaatgacaacaataactttcctaacagaagcaataaaatttccttcataatc

SEQ ID NO: 408860 - DNA, 481 bp, Homo sapiens
gcagggctgtgaggacaagcaggggagatgagatgaggtagcatgaatctcttcttttttgtactttatgtaaaaatttatttgaccaaaatgtttaaaaagtgatactattacatatgatactacccaggaggtagcatgaatcttaacagcaacaggaggtcacctctgctcacaggtagcaatgtgactcgaaccacagacatggagagagctgcctccatcctctaatgaaatgaagagaaaaattcagtctgttattgtacttcaaattagacaggaatgggaattttagatgaatgccattcattttcaagtgttagaaatcatattatcataaggaggaatcaggataaatcaagtatatttatcttcacataatttcctgattgctcctcattacatggagaagatctggacttygttaaattcattatttcaaatttcctgggaaatcaagagttgttgaggtgaaaaaaga

SEQ ID NO: 408861 - DNA, 556 bp, Homo sapiens
ggaacaacatacactggggcctgtcggggtggggggagagagagaatcatgaagaacagctaatggacactgggcttaatacctgggtaatgagttgatctgtgcagcaaaccaccatcgcacatatttacctatgtaacaaactgcacatgtatgccggaagttgaaatacaagttaaaggaaaagaacaacaacaaagaaaaatagaagcaaataacctcattaaaaattaggcacaagacatgaacagagatttttcaaaagaagacatacaagggccaacaaacatatgaaaaaatgttcaacattactaagcaccagagaaattcaagttaacaccscaatgggaaactgtcttacaccaatcagaatggctatcattaaaatgtcaaaaaacaacagatgttggtaaggatgtagagaaaagggaatgcttatacacattagctggaatgtaaattagtacaatctctatagaaaatattacgggactgtgcgcggtggctcacacctgtaatcccagcactttgggaggccgaggcaggtggattacct

SEQ ID NO: 408862 - DNA, 568 bp, Homo sapiens
cacagtacataatacttaataatgattataaatgactgtgttactggttttatgtatttcctatgctacacttttatttttattttagagtgtactccttctacttaaaaaaatgtaaaacagcctcaggcaagtccttcaggaggtattttagaaaaggcattgttatcrtaggcaatgacagctccatgtgtgttattgcccctgaagacctgccagtgggaaaatatgtacaggtggaagacagtgatattgatgacccttaccctgcatagagctgggctaaaatgtgtttgtgtctcacttttaaaccaggaattatagaatgtgaaaataaacacaaaaatagataaagtttgtagaaggatataaagaaaaatattaatatttgtacagttgtacaaggtttgtctttaagctgtgttatcacaaaaaagtcaaaaagttaaaaaatttgtttataagaaggaaagttacaataagttaaatttaagttgcaaccaaagaaagactttttaaaataaatttactataacttaagtgtacagtgtttataaaatctgcagct

SEQ ID NO: 408863 - DNA, 568 bp, Homo sapiens
cacagtacataatacttaataatgattataaatgactgtgttactggttttatgtatttcctatgctacacttttatttttattttagagtgtactccttctacttaaaaaaatgtaaaacagcctcaggcaagtccttcaggaggtattttagaaaaggcattgttatcataggcaatgacagctccatgtgtgttattgcccctgaagacctgccagtgggaaaatatgtacaggtggaagacagtgatattgatgacccttaccctgcatagagctgggctaaaatgtgtttgtgtctcacttttaaaccaggaattatagaatgtgaaaataaacacaaaaatagataaagtttgtagaaggatataaagaaaaatattaatatttgtacagttgtacaaggtttgtctttaagctgtgttatcacaaaaaagtcaaaaagttaaaaaawttgtttataagaaggaaagttacaataagttaaatttaagttgcaaccaaagaaagactttttaaaataaatttactataacttaagtgtacagtgtttataaaatctgcagct

SEQ ID NO: 408864 - DNA, 684 bp, Homo sapiens
attcagaggagggttttccatatcttcaaactttaccttttgtcacttaattctctgaaactattaaatgcttgattttcagcatagcttcaccctgccaagtcaagtgttaaggccttcttatatgttgtcttggacattctacttcctcaagtcttctgggcagttgacaaaaacaatccaactcaacaatgtaaaaattgccattgtacccatatcttttgaragccagaactttcaaataatccatttcttactcttctacttgcacctaatctgaatccaccatgggcaagggttttacagacttttattttatagtgccccatgactattacatctttatttacactaaacaggttctagtttttaattgcatcaagtgatccagtttgagatttctaacacgaggttatgctttctaagaccactgtcagataattgcctaagtaattgttctctcaaaagtggaatgtggggcaatactggagtatgggaagtaggtagttgatttgaagaaggtcctaggaaacagtgtgtgaaagcagagaggtgagaccagaaagactaaggaccgtaaagagtgacttggcaaatgaatcactgccaaagacaactggagctcgtgcttgttaatgagccttagaataattttatgcaggctttattgcttgaagcttgtca

SEQ ID NO: 408865 - DNA, 609 bp, Homo sapiens
gcattagatcattctagaatacttgaatttttagcaaagtagttggcaatttttatacatcttagattttatattaaataagcgtaataaaatacaaagatgacttttaaaagaacataagtagcattaataaatttcaagccagcaaatgaaraaatggtttgaaaaaataaaattaaccaaaactaacttaaacagaaatttttgacaaccatttactttatagagcaagtgctgaaaatcaatctaaaaatgaaacactggaccataccgctatgcctacatagccaatttatgccaaacatttcatgaatagttatttctaatattacaaaccttttgtattctggagaatacacaatatattaatttcctaatgcattgtgtgagtcttcagatgaaaacaagacaagaaaagataataattgcaggtcattgtcattcataaaagcagatttaaagaactgaaacaaatttttaatgaaaagtgaaatacaaagacacataagaatgcaaaggcataaaggtggacattccctagcagatatcagttttaattttgaaactgtagtaattaagagcatgtggtaatgacacagaattagacaa

SEQ ID NO: 408866 - DNA, 626 bp, Homo sapiens
agataataattgcaggtcattgtcattcataaaagcagatttaaagaactgaaacaaatttttaatgaaaagtgaaatacaaagacacataagaatgcaaaggcataaaggtggacattccctagcagatatcagttttaattttgaaactgtagtaattaagagcatgtggtaatgacacagaattagacaaatcaaccactataaaagagcaagtactcagaagcagactttgttccatagcagaatgctaataaatgaccatgtaacatgataaagcaatgggaaagaaaggagctattgattaaagaaatattaaaaatatgtaaaaagaaaaacaaaagcattttcagtctcaactatatacaaaaattaaactagttcaataatttaaatatcaaaatcaagacattaacatttcagaggaaatatagatgaatatacatctgtctttgaaggagaaagacaacgcaaaaacatagcacagattatttatttaaaaaataaactaaaacacatgttaaatttaagtattcacttgttaaccaaamgatatctataaaaccatgaaaatgtcaattaccaattgaaagaagatatttgcaacatataaaattgacaaataa

SEQ ID NO: 408867 - DNA, 611 bp, Homo sapiens
attatcacatgttctcactctttagtgggagctaaaaaaaaaattgaattcaatgagagagaatggcatgttagttaccagaagctagaaagagcagtgaggagtagaggataaagtgaggatggttaacaggcacaaaaatatagttagctacaatgaaaaagrtctactccttggtagcacaatatgacaactataattaacaataatacattgtgtattttaaaataaccaaaagattgaaattggactgtttctaatcttcctaacacacagaaaaatggtaaatgtttgaggtgattgatatcccaattacacttattttatcattatacaatgatgcctacatcacaatatcacatttactccataaatatatacaactattatgtatccataatgatattttaaatttttaaaaaataaatcaagatatttatctttaaaatttaggcattgtcaatgctaaaagggaatgtaaagaatagttaatatttacattatgaatgcatattaagtttcattataataacatcaaaatacaaattttaatgaaaattaaaacttataatgtacataattttacaaaagatacataaaatttacaaaaa

SEQ ID NO: 408868 - DNA, 632 bp, Homo sapiens
aacctcccccattatcaacatctcccaccagaatgatacatttcctacaattaatgaacatacattgacacatcattatcacagakccacagcttacattagggttcactcttggtgttgtatattttatgaatttggacagatatataatgacatggtaagaaaaattcattttaaacatgtaaatagatttatttttctatttataataaagttactttcttgcttactatctttccaagactttttcaattcctgataaagaggaacaaaggtcacagatcaatggtgtgtgcctactttttgtagcaatgggctgtgtatctcttttcacccaatttctacaggtaagaaatgttatttttcagtaagtgatttagttatttttccttttttctcattaaaatttctctaacatctccctcttcatgttttagggatatgcctttgctaaatctggggagctcctaacaaaaaggctacgtaaatttggtttcagggcaatgctggggcaagatattgcctggtttgatgacctcagaaatagccctggagcattgacaacaagacttgctacagatgcttcccaagttcaaggggtgagctatgggaggggaaatagaagtatatta

SEQ ID NO: 408869 - DNA, 632 bp, Homo sapiens
aacctcccccattatcaacatctcccaccagaatgatacatttcctacaattaatgaacatacattgacacatcattatcacagagccacagcttacattagggttcactcttggtgttgtatattttatgaatttggacagatatataatgacatggtaagaaaaattcattttaaacatgtaaatagatttatttttctatttataataaagttactttcttgyttactatctttccaagactttttcaattcctgataaagaggaacaaaggtcacagatcaatggtgtgtgcctactttttgtagcaatgggctgtgtatctcttttcacccaatttctacaggtaagaaatgttatttttcagtaagtgatttagttatttttccttttttctcattaaaatttctctaacatctccctcttcatgttttagggatatgcctttgctaaatctggggagctcctaacaaaaaggctacgtaaatttggtttcagggcaatgctggggcaagatattgcctggtttgatgacctcagaaatagccctggagcattgacaacaagacttgctacagatgcttcccaagttcaaggggtgagctatgggaggggaaatagaagtatatta

SEQ ID NO: 408870 - DNA, 556 bp, Homo sapiens
gaatttccaagctgaaagagttcacccaatactgaatataataaataaaaatcctatttgggcacagtatgaaattttagaaaatgagggraaaggagaatattttccaggagagaaggaggaatgtgtgacatataatcgataaagaattataatcatgtgactgggcacagtggctcatgcctgtaatcccagcactttaggaggccgaggcaagaggattgcttgagcccaggagtacaagaccagcctgggcaacctggcgaaaccccatttctaacaaaaaaagaaaagcaaaaattagccaggcatggtggcatgagccactcgggaagctgaagtggggtgattgcttgagttcaggtggttgaggctgcagtgacccaacatcgcgccactgccctccagcctgggcaacagagaaagaccttgtctcaaaaaaaaacaaaaccaaaaaaccaaaaaacaaaacaaaaaacacacacacacaaaagaactataatgacataggacctcttgacaatgaaactaaaattcataaagatttgccttcaaa

SEQ ID NO: 408871 - DNA, 556 bp, Homo sapiens
gaatttccaagctgaaagagttcacccaatactgaatataataaataaaaatcctatttgggcacagtatgaaattttagaaaatgaggggaaaggagaatattttccaggagagaaggaggaatgtgtgacatataatcgataaagaattataatcatgtgactgggcacagtggctcatgcctgtaatcccagcactttaggaggccgaggcaagaggattgcttgagcccaggagtacaagaccagcctgggcaacctggcgaaaccccatttctaacaaaaaaagaaaagcaaaaattagccaggcatggtggcatgagccactcgggaagctgaagtggggtgattgcttgagttcaggtggttgaggctgcagtgacccaacatcgcgccactgccctccagcctgggcaacagagmaagaccttgtctcaaaaaaaaacaaaaccaaaaaaccaaaaaacaaaacaaaaaacacacacacacaaaagaactataatgacataggacctcttgacaatgaaactaaaattcataaagatttgccttcaaa

SEQ ID NO: 408872 - DNA, 556 bp, Homo sapiens
gaatttccaagctgaaagagttcacccaatactgaatataataaataaaaatcctatttgggcacagtatgaaattttagaaaatgaggggaaaggagaatattttccaggagagaaggaggaatgtgtgacatataatcgataaagaattataatcatgtgactgggcacagtggctcatgcctgtaatcccagcactttaggaggccgaggcaagaggattgcttgagcccaggagtacaagaccagcctgggcaacctggcgaaaccccatttctaacaaaaaaagaaaagcaaaaattagccaggcatggtggcatgagccactcgggaagctgaagtggggtgattgcttgagttcaggtggttgaggctgcagtgacccaacatcgcgccactgccctccagcctgggcaacagagaaagaccttgtctcaaaaaaaaacaaaaccaaaaaaccaaaaaacaaaacaaaamacacacacacacaaaagaactataatgacataggacctcttgacaatgaaactaaaattcataaagatttgccttcaaa

SEQ ID NO: 408873 - DNA, 546 bp, Homo sapiens
ccctgctacagctctttgaagtacccccctccattagtcttcttagctacttttctctagaaatgatcatgacctatacatctatacactttttcttggattaccaaaggacccaacagagttgcctattgagcagtactattaactttcttcaaagtagagttaatatattgtatagctgtgttcatttttatagatgacttaaaaagtactgtgtagagaaattgtgtaaagcagtggctctcaaaytttaatattcatccaactcccctgaagggcttgttaaaacacagatttcagggactcctagtctttgattcactaaaaatagagtggggtctgagactttgtatttctaagttcccagataatggtgatgttgctgggtggagaacctctcacttttgagaagcataagtctagacactgactcttacgagtaccacacaggacagagatagatcagacctcaagaagcttgtggtctagtagggaagatatgatatttacataaatcacataccattgtgtccttagaggtgaaca

SEQ ID NO: 408874 - DNA, 546 bp, Homo sapiens
ccctgctacagctctttgaagtacccccctccattagtcttcttagctacttttctctagaaatgatcatgacctatacatctatacactttttcttggattaccaaaggacccaacagagttgcctattgagcagtactattaactttcttcaaagtagagttaatatattgtatagctgtgttcatttttatagatgacttaaaaagtactgtgtagagaaattgtgtaaagcagtggctctcaaactttaatattcatccaactcccctgaagggcttgttaaaacacagatttcagggactcctartctttgattcactaaaaatagagtggggtctgagactttgtatttctaagttcccagataatggtgatgttgctgggtggagaacctctcacttttgagaagcataagtctagacactgactcttacgagtaccacacaggacagagatagatcagacctcaagaagcttgtggtctagtagggaagatatgatatttacataaatcacataccattgtgtccttagaggtgaaca

SEQ ID NO: 408875 - DNA, 560 bp, Homo sapiens
tgctttatgaggtttaaggaaaaaagcgtctccacaatgtaaaagtgcaaggtgaagcagcagtgctaatgtagaagctgccacaagttctccagaagatctagctaaggtcattgataaaggtggctacaccaaataacatattttccgtgttgaccaaacagctttctattggaggaagatgccatctaggactttcatatctagagaggagaagtcaatgcctgacttcaaacttacgaaaaataggctgactctcttgttaggggatgatgcagctgatgactttaagttgaagcttaccattccaaaaattctaggcccctaagaggcatgctaaatctcctctgcctatgttctataaatagaataataaaggctggatgacagcacatctgttgaaaacacagttttttgaatattttaagccactgttgacacctactgttcaggaaaaaatacagctttcaaaaatattagtgctcattgacaaygcacctagtcacccaggtgctctgacggagatgtacaaggagatgaatgttgttgtgcttgttaac

SEQ ID NO: 408876 - DNA, 584 bp, Homo sapiens
ttgtgctgtccaattcagtagccactagacacacatggctattgaaatgtaaattaaaagtaaatgaaggttaaaaatgcatttccggcagggcttggtggctcacgcctgtaatcccagcactytgggaggctgaggcgggcgggtcacgaggtcaggagatcgagaccatcctggctaacacggagaaaccctgtctttattaaaaatacaaaaaaattagccaggtgtggtggcaggtgcctatagtcccagctactccggaggctgaggcaggagaatggcatgaacccaggaggcagagcttgcagtgaaccgagatcgcgccactgcactccagcctgggcaacagagcgagactccgtctcaaaaaaaaaaaaaatgcacttcctcagttgcatcagctacatttcaagagctcaataaacatctgtggccagtggctactatattggacagcacagatagagaacatctccatcactgtaaaagttcaattgaagagtgctggaatatacagttttaaaatacttaagaaaagaatctcatttttagaaccaagtcacttgactttttcttaaacc

SEQ ID NO: 408877 - DNA, 584 bp, Homo sapiens
ttgtgctgtccaattcagtagccactagacacacatggctattgaaatgtaaattaaaagtaaatgaaggttaaaaatgcatttccggcagggcttggtggctcacgcctgtaatcccagcactctgggaggctgaggcgggcgggtcacgaggtcaggagatcgagaccatcctggctaacacggagaaaccctgtctytattaaaaatacaaaaaaattagccaggtgtggtggcaggtgcctatagtcccagctactccggaggctgaggcaggagaatggcatgaacccaggaggcagagcttgcagtgaaccgagatcgcgccactgcactccagcctgggcaacagagcgagactccgtctcaaaaaaaaaaaaaatgcacttcctcagttgcatcagctacatttcaagagctcaataaacatctgtggccagtggctactatattggacagcacagatagagaacatctccatcactgtaaaagttcaattgaagagtgctggaatatacagttttaaaatacttaagaaaagaatctcatttttagaaccaagtcacttgactttttcttaaacc

SEQ ID NO: 408878 - DNA, 546 bp, Homo sapiens
tgctttaagttgtttttaccactttttgtaagaaagtcattgcaggatgtatgctaaggcctagctgcagaaaacaaccatttggtgtcagaatttgcccaggcataaggaaaggctaaggcaagtattttgagacaatgaagccagtcaataaatatctcrtcgcacttaaaaatagatttctctgctctaggaatatgtcccagttgatggagaggagagaaaaagagtgctggttaacagccagctgggagagaccatcacccttgatgaactcagatgctctggaaccccaggagatctctaccattcagtgggggtggcttcaggtactgttaaaaagaagttacatgacctacttaaagagggttttatgaaaattaaaatgtgttgagagcccaagtctactaggggttcaatgtctggaacgattgctgctgacctgcaaagctctgcatgatctgactccggcagcctctccgatttcccttcctgccaggcaccacttggctgattctactcctattcagtggccaactgccatcc

SEQ ID NO: 408879 - DNA, 564 bp, Homo sapiens
acaaggaaggaaacctagaactgtcaacttgtacaaggtgatggggccaggactagggcccaggtttaccgaatcctagtctatagaatttgccaacatatcacattgtcagagcttaktaaatgataaaagcttacattttagttccctactccatttctttctctcacatcacctctcctgaccgtaaaaatgaccccacaagcatgagttgtacagaaaaacctggataatccacaaacaaaatcaagtccatcgtgtaaggagggccccagccaccactgtagttttcgcattgcccccttgtggtaagtgaagaaatcacattaatttcagaaaggtagagaatcggaaacactcaactttgattaactgaatttctagttatatggtgccataaacttttatgctgaaaatctttgaaataatttatatttcttgatttcctagtaggtacaatatccaaatataaaatgaatcatcttttattccctcgacagatctgtattgattgtcttccccagacatggtgctgtggactggggaatgcatatcggttatgat

SEQ ID NO: 408880 - DNA, 628 bp, Homo sapiens
gaataaaagagaacttcctcaaactggtaaagatttttttaattaaaaaataattcttaatgatgaaatgttgagatgaaggtggagataaagatacccactttaacaatttcttttctacttagaagtgaagaatgaatcaatgttatgaagtaagagaatgaaataagaattataaagacaaaagggaaaaatcattatttgcagacatcacattgtatatgtagaaaatctgaaggaatttacaggcatattgcaactaacaaacaaattaacaaaggttctaargtacgaaaagatgtaaaagtaagtgtatcctcgtataccaaaaacacacaaaaggaatgtatattttggaaattaaaaatacgacaatatccataaataaatctaacaaaagatatcatataagatctctgcattattatgttaatctaaatagaggtatatgtcatgtttgcatatcagaagacttaataaagacttacattctttcaaaaataatctttagagtccacactctaaatacagggtctcaaaccaattcccagaaaagctgtgtgttatagtaattaaggttgtgtgctgtgggcagtagcagagacaaataaaccaaaagaactaaaca

SEQ ID NO: 408881 - DNA, 573 bp, Homo sapiens
acacccttgagggatgccacctgttgctaaaagatacatgtagttatttctatatatatttagaactaatatttatttacttattgtatgccatatacatattttgatatgtatgtttataaaattaggaggcattttgtctttaatggcaaatagttacaatgtcaattgctttacaaatattctttgtttctaatggtttatgcctaggttaaaattctgaagaatcctgatattttggcagactcctggtatttaaaagaaactttatctcatgcagaaattcttagcacagtatttctaaaaacagagtctttttacakctggccaaaatgtttccattatacttttttcaagacttcctgtctaataactagatggctctagttgtgtaaatttctgaatttaaaacagtttgttaaaattcatttaaaattttgatctacatgtggtaattttgctcttagaaggtactcaagactgagctcagtggctcacccctgtagtcccaggcaggcagatcaccttgagctcaagagtttgagaacagcctgggcaatatggcgagacccg

SEQ ID NO: 408882 - DNA, 592 bp, Homo sapiens
gatgtatggattggatgtagtgtgcaagagagagagaaatagaataagctttggctgagcaactgaaaagatggagttgccttttaattgagatgaagaagacagtgggtgaattaggtttgtgggtttgactttttctgtttgaaatgtatataaaacaaggaagtagagatatgaagtaggcagttgggctgacaatttaggaattcagggttgagatctgaggtggagataaaaatttggaagatggtaccatgttgcagaaatttaaaatccatgtgagagaatgagattatctaagaagcgagccagagaaagaagagatagaaagcagaagtaacataaaagctgtaatactatttaagcctttttctctgtttttatgatgtttcttttataaggattatttttaaaatttctttgccacattattctaatgagtccactstctagttttacgaaaacacataataatgttcctcaatatctatatttcactatgccactcgacctacccagcatttaaaggtgcacttgagtgtttatgaaacgttcttttaatctcctgctatataaaaaggaaaaagtcaaa

SEQ ID NO: 408883 - DNA, 592 bp, Homo sapiens
gatgtatggattggatgtagtgtgcaagagagagagaaatagaataagctttggctgagcaactgaaaagatggagttgccttttaattgagatgaagaagacagtgggtgaattaggtttgtgggtttgactttttctgtttgaaatgtatataaaacaaggaagtagagatatgaagtaggcagttgggctgacaatttaggaattcagggttgagatctgaggtggagataaaaatttggaagatggtaccatgttgcagaaatttaaaatccatgtgagagaatgagattatctaagaagcgagccagagaaagaagagatagaaagcagaagtaacataaaagctgtaatactatttaagcctttttctctgtttttatgatgtttcttttataaggattatttttaaaatttctttgccacattattctaatgagtccactgtctagttttacgaaaacacataataatgttcctcaatatctatatttcactatgccactcgacctacccagcatttaaaggtrcacttgagtgtttatgaaacgttcttttaatctcctgctatataaaaaggaaaaagtcaaa

SEQ ID NO: 408884 - DNA, 568 bp, Homo sapiens
ttgttgcatttataagtgagtgtcctttttctctcaaaggctgacaaggacctctgaagacacatttacttactcaatagcttccattcagcttaccattaccagcaatgagtagtttatacattcacaatagtcccgataaaacagcatagcctaagatcattgtttctggagagattttgaaagactccagtgagaagcactgtcttcattgtaagtaagtagatctgttgcgacacttccaaggcgaagatagccagcttcaaaacctatgtcatacttatatttttgatagaaggtgtgtctgtataatagcacctcaaggaacataagaaagcattttcattctatcatatgaaatataccctacatatttatcattgcttttttgggaggaattaatgaaatctgtgacatgtacccaacaaaagttgagggtgaatggagtcactgctggtaccagccacagggtrctctgttgctgctgggtttagagggggttgcttcaatttcttgcttttttttttttttttttttacctgtttttgtgtctttccttctcattttc

SEQ ID NO: 408885 - DNA, 592 bp, Homo sapiens
ggtgacttgggtgttgttaaaggcattcagttttataagagaagcggagcataaaagttaggaaaatttgcagcctgactatgtgatagaaaagaaaaactcattttctagggagaaattcaagctggttgcagaaatttgcataagtagcaagaagcctaatgttaatcccaagaccatggggagaatgtctccaggccatgtcagagaccttcacagcaacccctcccatcacaggccttaaggcccaggaggaaaaagtggtttcatgggctgagcccagggtccccatgcttgtgtgtagcctagggacttggtgmcctatgtcctagcctctccagccatggctgaaaggggtcaacatacagctcagcctgtggcttcagagggtggaaactccaagccttggcagcttccacgtgatgttgagcctgtggatgcacagaagtcaagaactgaggtttgggagcctccacctagatttcaaaagatgtatggaaacacgtgaatacctaggtaaaagtttgctgtaggggcgggaccctcatggatagcctctgctagggcagtgtagaagggaaatatgagttgg

SEQ ID NO: 408886 - DNA, 643 bp, Homo sapiens
catatgtattttgtccttcattttattgatatgacatatcacattgattaatttgcatatgttgaaccatccttgcatcccagggataaatcccacttggtcacrttggatgatctttttaatatattattgaattctgtttgctagtattttgttgaggatttttgcatcaatattcatcaaagatattggcctctggctttcttttattgatgtttgtctggttttagtttcagagtaatattggccttgtagaatgaatttggaagtaccctctcctctattttttggaatagtttgagtaggattggtattacttcttctttaaatgttgggtaagattcagcagcaaagccattcaggttccagtgatttattactgggagactttattacagcttcaatttcattacttgttattggtttgttcaggttttggatttttttcctggttcaatcttctgggttatatgtgtctaggaattcgtccatttcttctagatttcccaatgtattggcatatagttgctcaaattaaccactaatgatcctttgaatttctatggtatcagttttaatatctcctttttcatttctgtttttatttatttgcttattctctctttttaaattagttagtctg

SEQ ID NO: 408887 - DNA, 574 bp, Homo sapiens
agctattcttaagtgtcattcggattcaccattcttgcattttaaaagtcctttatggtatcactaagctatgctatttctcccagaagtacagtattgcttttgatttaccagtttgtctagaggyggaacaggcaggtccaacagctccacttggccctttctaccatggtagtctttactccagactgcaggggatcgacgtgggagtaataccagttctaaatgcatttattccaattatacctgcagaaaccatggacataccacaaaatagatctggcagtctacagggccactgtgagacaaatttagatatactctttattgagcatcttcccataaatcctcactgtaaccattcaaccattgtgttcttaggataagtgtcaattcagagctaacacctaagaaccccctgaaggtctgggcatctctcattcacatagtcagtctttaaatagacgcaggttactctgggaaagaactggggagatttacagcacatacttgaggtcaagtttcaggatactatcccaatagttccttgactctctcctcactcaaggggctc

SEQ ID NO: 408888 - DNA, 574 bp, Homo sapiens
agctattcttaagtgtcattcggattcaccattcttgcattttaaaagtcctttatggtatcactaagctatgctatttctcccagaagtacagtattgcttttgatttaccagtttgtctagaggtggaacaggcaggtccaacagctccacttggccctttctaccatggtagtctttactccagactgcaggggatcgacgtgggagtaataccagttctaaatgcatttattccaattatacctgcagaaaccatggacataccayaaaatagatctggcagtctacagggccactgtgagacaaatttagatatactctttattgagcatcttcccataaatcctcactgtaaccattcaaccattgtgttcttaggataagtgtcaattcagagctaacacctaagaaccccctgaaggtctgggcatctctcattcacatagtcagtctttaaatagacgcaggttactctgggaaagaactggggagatttacagcacatacttgaggtcaagtttcaggatactatcccaatagttccttgactctctcctcactcaaggggctc

SEQ ID NO: 408889 - DNA, 574 bp, Homo sapiens
agctattcttaagtgtcattcggattcaccattcttgcattttaaaagtcctttatggtatcactaagctatgctatttctcccagaagtacagtattgcttttgatttaccagtttgtctagaggtggaacaggcaggtccaacagctccacttggccctttctaccatggtagtctttactccagactgcaggggatcgacgtgggagtaataccagttctaaatgcatttattccaattatacctgcagaaaccatggacataccacaaaatagatctggcagtctacagggccactgtgagacaaatttagatatactctttattgagcatcttcccataaatcctcactgtaaccattcaaccattgtgttcttaggataagtgtcaattcagagctaacacctaagaaccccctgaaggtctgggcatctctcattcacatagtcagtctttaaatagaygcaggttactctgggaaagaactggggagatttacagcacatacttgaggtcaagtttcaggatactatcccaatagttccttgactctctcctcactcaaggggctc

SEQ ID NO: 408890 - DNA, 574 bp, Homo sapiens
agctattcttaagtgtcattcggattcaccattcttgcattttaaaagtcctttatggtatcactaagctatgctatttctcccagaagtacagtattgcttttgatttaccagtttgtctagaggtggaacaggcaggtccaacagctccacttggccctttctaccatggtagtctttactccagactgcaggggatcgacgtgggagtaataccagttctaaatgcatttattccaattatacctgcagaaaccatggacataccacaaaatagatctggcagtctacagggccactgtgagacaaatttagatatactctttattgagcatcttcccataaatcctcactgtaaccattcaaccattgtgttcttaggataagtgtcaattcagagctaacacctaagaaccccctgaaggtctgggcatctctcattcacatagtcagtctttaaatagacgcaggttactctgggaaagaactggggagatttacagcacatacttgaggtcaagtttcaggatactatcccaatagttcctygactctctcctcactcaaggggctc

SEQ ID NO: 408891 - DNA, 561 bp, Homo sapiens
gaaatatattttcagaaattgcatcaccttttaatttttcagtggcaaaacactttctattgacaacattccmtatcttaaaggagaattactagttaagaacaaccagattggtcttgttaataaaaaattaatgctagccatcttggctaattatatatggatacctgtgtgtgtatatgtatgtgtgcaaacatggctgtgcatacacacgtacacacacactcctttgccctcccatcaacatgaagcatttcatctgtgaaatgggattacagatgattttgctaattcccatcttcataaatttctacatttctaaattttccacaattaacgtgattaacgtgtattatgtttgcaattttaaaaaataaaaaaataaagtagaaaaaagaaaggaaaaacagaaggaagaagtagggagggaagaatgagagagaggtggagcagagacagagagaggaacagatagaaagagggaaggaggaaaagagagagagcacactcagcgaactgctagctcaagcctacactagtcagaacgggaagttagtcacc

SEQ ID NO: 408892 - DNA, 561 bp, Homo sapiens
gaaatatattttcagaaattgcatcaccttttaatttttcagtggcaaaacactttctattgacaacattccatatcttaaaggagaattactagttaagaacaaccagattggtcttgttaataaaaaattaatgctagccatcttggctaattatatatggatacctgtgtgtgtatrtgtatgtgtgcaaacatggctgtgcatacacacgtacacacacactcctttgccctcccatcaacatgaagcatttcatctgtgaaatgggattacagatgattttgctaattcccatcttcataaatttctacatttctaaattttccacaattaacgtgattaacgtgtattatgtttgcaattttaaaaaataaaaaaataaagtagaaaaaagaaaggaaaaacagaaggaagaagtagggagggaagaatgagagagaggtggagcagagacagagagaggaacagatagaaagagggaaggaggaaaagagagagagcacactcagcgaactgctagctcaagcctacactagtcagaacgggaagttagtcacc

SEQ ID NO: 408893 - DNA, 612 bp, Homo sapiens
ttctcatttccatctgagacctcatcagcctgaacttcacagtcaacatcactatcagcatttcagttactaccatgtaacagtctctaaggatttccaaactttccctcatcttcctgtcttctgagctctccaaactcttccaacctctatctgttacccagttgtaaagctgcttccacattgtcaggtatctttataataatggagggatgacctaacacaaaaattggtatcagaagtgagttattgctgaaaagaatcagatcttgtgaaaactcattatcctgaagatagcacaaagccataaagggtctacccacatgatgcaaacacatcccactaggtcccccmctccaacactggggattacatctcaacatgagatttgaaggagacatccaaactatatcaagcagtaagcatttactttttcttatgaatctatgtgtcacctgggctgtccttacagcatttctcatgtatttgtggacagctggtatgctggctgaaattgcgaggtttaggacagcctcccacacatgcctggcagttgtctgctgggggcaatggtagtggctgagagattgcatgcctttcatcatccaacag

SEQ ID NO: 408894 - DNA, 591 bp, Homo sapiens
ctttcctgcctaactataccccacaattaccaatatctgactttaagtttgatttgtagatcacattctacccattaactcttttggatttgcctttttggtggttcaggattactctctactcagtttgtgttggtttactctataaagttcttctatctccaaaggaaagataaaaaagtccacttcttcttttgccactgaagatgcctagatctttgctggaaacaagccagtccccatcactggaatctatcagcatgctggaatgaatacrcagcaaggcagacttgacatgaagcagagagagttaacatattgctcgatcaccactgttttctaaatcagaatgtggccttgtccatatgcacgtggcccgcaggcctagtcattatccttccttgccctctgtgtaggacagacaggcacagttggtctcaactttcagactttgacctacttcattcaaatattcctataaaatggttcctgacttcataattttcatcagtttctttgcctccagaaatgaatgacttctgttagaagcaatgatatgttaaaaattaactaattgccaaataacacttg

SEQ ID NO: 408895 - DNA, 536 bp, Homo sapiens
tattagtgactccttggcatctataaatccaatataggaaatttcaataatttaagctgtttttttgcaaaactgtcaagttgtgctacatcaagtttagaagccttaattccctttccaaaagaaaagaaatatatttttcttgcaatctacttactacrgtgaagaaaagaataaaacttcccaattccccacctccattacctgtcattcactctagcaattagaaataacacaaatgttcagttatttctgtcaaccattcccacctcttgagatgagcttgcacacaattctctcttaaatcaatttactttacattacagagctgtttttcttggcactgtaaaattcatggtggaagtttcccaaatagcatgtcttctcacaaatccctttggccgcgtttatcataaccttactaaacccaatgggtgaaaaataacctctactaaactccacattaacatatgtgcatgctgggtaaccatattgatgtatggctcatatgtaacacttcagaaaaataatgcagc

SEQ ID NO: 408896 - DNA, 379 bp, Homo sapiens
ttaaagagtagaagaaaactgtgagaagtggttagcaaggaccccttatgtattaatacaaatattaaatataaatatgaacataaacatgtcttcctaaacatccaacgctgctaggtacttatgttctttcccactgtctgattacactgtgggttgggacctgatgtcctgtagcagcaaagtcgaaagcagtgcagctttggtctcctactaaaccagctacttctctactgagggcttcaccataattcccccagcactaaacagtgccagggcccagaaaccactttcttcctycttctgtggacaaagccacagagagcaagcgggttagagacacagtgaaagtaatttcttccacccacagctggtgcat

SEQ ID NO: 408897 - DNA, 583 bp, Homo sapiens
ttagcttccttgaagcaaccattcatatggaaatggtcaaacacaaggaaattgagaatcaatactgaataatttaagttacttattaactttattacattagcrgtagtacattcatttcaattattgatctagcttactaatgagacttggcaaagcttcttgtattgtctataacctaaatgtgagaggagaaaaggcagggaaaggaaaatattcttttgatctgcctggccttcttcaggcttaggaattaagaatttcatttcttggagccatcaggagctccaccaggttttcagattcaagctatcagcactgcttctcttatttggagagtagcccacggtcactgtgcttcctacattcagattgttcataagcagaatagtaagagacccaggctataaaatgctgacgctgactaaacaaggggcatcttatagaaaagccaggggtgagagctgaaagtagagaatctgctcacattccgcctaaagtatttgggtggcctaaattatctgcccctctctcacccacagaccaagatgctgtcctttcccaggttgtctagagcagggca

SEQ ID NO: 408898 - DNA, 567 bp, Homo sapiens
atgaagtgtacaccagtgggcctctcatccttaggatcacaaaaataaatctcaaaattcagaggtataaagcctggaaaaaaaagtatctttcagtttaggcttattaaatgatatgcctaagtattatcaccagttgatatcaactatatttcaaaattaaaattgtgattaattgggtagttcaaattcactctaattttttaaaatratgtttattttccttcagtaagtctttgtgaggccccgagcctcacagatctgcactgtggcatctcaactaaatctgttcttatatccttccactgggaaccacttaatagataaactggtctctttaagaaagaaaggttgatggaaagaggttcaagaaagttgtaaaagctgatgaaatatcaaacaacacaatttttaaattactcttcaaacatagtgatgaattgaacaagggatgagacactaactagactaagtaagctagaaacatgtacaacagcaatctggcttctggggtgtccctaactaacttaaaggagaacaatatcaaagatacaagccaacagtcat

SEQ ID NO: 408899 - DNA, 581 bp, Homo sapiens
tatgcatcaaaattacctggagcttttttttaacacagattcctgtgcctaaccccaacagtttctcattcaacaggcctaagacaaaactgagaccttgtattcctaatcagttcccatccaggtgaagctgmtgctgctagatcagggaccaccatttgagaaccagtgatggagaagaatggtcaccaaccttacttggtatcacagaacgagtgttctggtcttaacacttctgtgtgacccaaagcacaatatttaatttctccagattagtttcccaatggtgaaatgaggagtttgcacaagacaagcttcgagattttttttcaacaccaatgaaccatgaacgctaagctttctctgtgccttgtagcctctgaaaggcaccagactgatttaggtgctgctcctccatcatgcacagggattctgtccttgatttggtctccatcaatgatttgcaaaggttgtcaaaagcagcaagggcagttaaatagatggcatcctatttctaaaaagtaaaatgtttacaacttgttagctcttcctcccatgtgtagtagagagaatacatcatc

SEQ ID NO: 408900 - DNA, 581 bp, Homo sapiens
tatgcatcaaaattacctggagcttttttttaacacagattcctgtgcctaaccccaacagtttctcattcaacaggcctaagacaaaactgagaccttgtattcctaatcagttcccatccaggtgaagctgctgctgctagatcagggaccaccatttgagaaccagtgatggagaagaatggtcaccaaccttacttggtatcacagaacgagtgttctggtcttaacacttctgtgtgacccaaagcacaatatttaatttctccagattagtttcccaatggtgaaatgaggagtttgcacaagacaagcttcgagattttttttcaacaccaatgaaccatgaacgctaagctttctctgtgccttgtagcctctgaaaggcaccagactgattyaggtgctgctcctccatcatgcacagggattctgtccttgatttggtctccatcaatgatttgcaaaggttgtcaaaagcagcaagggcagttaaatagatggcatcctatttctaaaaagtaaaatgtttacaacttgttagctcttcctcccatgtgtagtagagagaatacatcatc

SEQ ID NO: 408901 - DNA, 584 bp, Homo sapiens
acatttcacaaattttatgtgatagtttcattttcattcagttctatgtattttaaaaattttctgagaaattgagaactttctttttgacccatggattacttataattgtgttgtatagttttaaagtgtttgaagatttttcatatgtctttctgttattgatttctagtttgattccattatggtatgaaaatatactctgtatgatttcaattttaattttgttgagatttgctttatggccctggatatggtctatcttgataaatgttttgtggacatttgaaaagataatgtgtgctgtctgatgtcactggggcaatgttctacaaatctcaattatattcttttcattgacactgtttttgtgttcttctaaatscttgctgattttctgcctagttgttcttttttattatcactttttatttctttatttggtggttttgcctagttgttctatcagttgttgagagagagtgttgaaatttccaactataatgtgatttctctctttctccttttggttctatcagtttttgctttacatattttgcagctctgttatttgatgcatgtac

SEQ ID NO: 408902 - DNA, 554 bp, Homo sapiens
tttcaatgttttcaagatttcttcctttagtttcagaattgtgattataatrtgtcttagcacggattcttttgagtttgggatttggaatttgctcagctactcgaatctgtagctttttgtcaaatttgtcatttttcaaccattgtttctttgaatactttttaagccccatactctttctcctctttttcttggtttttgatcatgcaaatgctagaccttataaaaatagtcccatggatccctgaagctctttccccctgccttagtatatattctttttctggctcagattgggtaccttctatttttctatattcaagtccattgattcttttctctatcctcttgtttctgttcttcagccatattgctaaaatatttattctgtttattgtatttttttcaattctaaaatttctatgtggttcttttcaatatcttttttgctgagacgtttttattctttcatttgtttcaagcattttcataattgctcactgaagcttttctattttagcgagtgttctttgacattgtgttggcagagg

SEQ ID NO: 408903 - DNA, 554 bp, Homo sapiens
tttcaatgttttcaagatttcttcctttagtttcagaattgtgattataatatgtcttagcacrgattcttttgagtttgggatttggaatttgctcagctactcgaatctgtagctttttgtcaaatttgtcatttttcaaccattgtttctttgaatactttttaagccccatactctttctcctctttttcttggtttttgatcatgcaaatgctagaccttataaaaatagtcccatggatccctgaagctctttccccctgccttagtatatattctttttctggctcagattgggtaccttctatttttctatattcaagtccattgattcttttctctatcctcttgtttctgttcttcagccatattgctaaaatatttattctgtttattgtatttttttcaattctaaaatttctatgtggttcttttcaatatcttttttgctgagacgtttttattctttcatttgtttcaagcattttcataattgctcactgaagcttttctattttagcgagtgttctttgacattgtgttggcagagg

SEQ ID NO: 408904 - DNA, 554 bp, Homo sapiens
tttcaatgttttcaagatttcttcctttagtttcagaattgtgattataatatgtcttagcacggattcttttgagtttgggatttggaatttgctcagctactcgaatctgtagctttttgtcaaatttgtcatttttcaaccattgtttctttgaatactttttaagccccatactctttctcctctttttcttggtttttgatcatgcaaatgctagaccttataaaaatagtcccatggatccctgaagctctttccccctgccttagtatatattctttttctggctcagattgggtaccttctatttttctatattcaagtccattgattcttttctctatcctcttgtttctgttcttcagccatattgctaaaatatttattytgtttattgtatttttttcaattctaaaatttctatgtggttcttttcaatatcttttttgctgagacgtttttattctttcatttgtttcaagcattttcataattgctcactgaagcttttctattttagcgagtgttctttgacattgtgttggcagagg

SEQ ID NO: 408905 - DNA, 566 bp, Homo sapiens
tatgtgataacttcatgtacacttcttttctcttttatttgttcactattatacctaaaagttatgagaatagagaataacattaataacgttctgacaatccttggaattctaagagaatataagacatccctctcttattttaagaaagcatggaatactgatcagcaaaaaaagaaacgacttgggtggatatcaagggaattattctgagtaaaaaaatctttgagggttatatgctgcatgattccatttatrtagcattattgaagtgacaaatttatggaggtcgagaacagatttgtagctgccagtttagggaagagggtagggagagggatggctgtggctatgaaagaaatagcatgaggattccttgtactgtgttatctgtggtggtggtggtcatacaaatctacacataataaaactgcatagacacacacacatactggagtgcatgtaaaagtggtgaaatatcaatagacgaaaggattgtatcaatggcaattttgtggttgaggccagacactacccagagacttcagtgaccctcccctgctggt

SEQ ID NO: 408906 - DNA, 566 bp, Homo sapiens
tatgtgataacttcatgtacacttcttttctcttttatttgttcactattatacctaaaagttatgagaatagagaataacattaataacgttctgacaatccttggaattctaagagaatataagacatccctctcttattttaagaaagcatggaatactgatcagcaaaaaaagaaacgacttgggtggatatcaagggaattattctgagtaaaaaaatctttgagggttatatgctgcatgattccatttatgtagcattattgaagtgacaaatttatggaggtcgagaacagatttgtagctkccagtttagggaagagggtagggagagggatggctgtggctatgaaagaaatagcatgaggattccttgtactgtgttatctgtggtggtggtggtcatacaaatctacacataataaaactgcatagacacacacacatactggagtgcatgtaaaagtggtgaaatatcaatagacgaaaggattgtatcaatggcaattttgtggttgaggccagacactacccagagacttcagtgaccctcccctgctggt

SEQ ID NO: 408907 - DNA, 535 bp, Homo sapiens
ggaggctgaggcaggaggatcgcttgaacccagaaagttgagcctgcagtgagctggagtgagctatggtcatgtcactgayaccagcctgggcaacagagggagactctgcttcaatcaatcaataacttattttaagatttcatgtaataatgtaccatatgaaataggaataaatctttttagctatgagaaaaaaatgtagattaaggtggttgttataatgtgaccaagaaagcaacacatagattaattcagttaatcaaattccaattacacaaagcctttgcttttccaaaggtgtaaagaagagttagtatgtctgcttctcaaatgtgttcataaactcttcctggtgccaagtccttttaacttacatttaatcactgctttctcctaagagtctgctggactgggaatgcaggcagtactggacccggttcagggtggagtataggaagtgtggttgaaagtcagcttcattagggttgtgatgggtgctttggggcagtcaacctccctccctgagccacag

SEQ ID NO: 408908 - DNA, 535 bp, Homo sapiens
ggaggctgaggcaggaggatcgcttgaacccagaaagttgagcctgcagtgagctggagtgagctatggtcatgtcactgacrccagcctgggcaacagagggagactctgcttcaatcaatcaataacttattttaagatttcatgtaataatgtaccatatgaaataggaataaatctttttagctatgagaaaaaaatgtagattaaggtggttgttataatgtgaccaagaaagcaacacatagattaattcagttaatcaaattccaattacacaaagcctttgcttttccaaaggtgtaaagaagagttagtatgtctgcttctcaaatgtgttcataaactcttcctggtgccaagtccttttaacttacatttaatcactgctttctcctaagagtctgctggactgggaatgcaggcagtactggacccggttcagggtggagtataggaagtgtggttgaaagtcagcttcattagggttgtgatgggtgctttggggcagtcaacctccctccctgagccacag

SEQ ID NO: 408909 - DNA, 535 bp, Homo sapiens
ggaggctgaggcaggaggatcgcttgaacccagaaagttgagcctgcagtgagctggagtgagctatggtcatgtcactgacaccagcctgggcaacagagggagactctgcttcaatcaatcaataacttattttaagatttcatrtaataatgtaccatatgaaataggaataaatctttttagctatgagaaaaaaatgtagattaaggtggttgttataatgtgaccaagaaagcaacacatagattaattcagttaatcaaattccaattacacaaagcctttgcttttccaaaggtgtaaagaagagttagtatgtctgcttctcaaatgtgttcataaactcttcctggtgccaagtccttttaacttacatttaatcactgctttctcctaagagtctgctggactgggaatgcaggcagtactggacccggttcagggtggagtataggaagtgtggttgaaagtcagcttcattagggttgtgatgggtgctttggggcagtcaacctccctccctgagccacag

SEQ ID NO: 408910 - DNA, 564 bp, Homo sapiens
gtcagcaccaacatttgatgcaggtgtctgatcagtgggtctccttgcctgaagcctgaaggtcctgactgccccaagcagcccctactgcccattccagcttccctttcacccaaagacataagatagaggatgttgggcaggcaagtccatccttatccacaggtaagagttaaggacacagctgtagaggctttttatttaaattttttttctgcagcttgtgaygtaatgagaagcaaccaatctatttcagagaggggggaacccgggcagcccttggaagcaggaaaaggccaccacttgggaacctttgtacactagcgtggatatctgtggggtgctcgtgggcgctgagaggcagccagcccagttacaccgtccagagtggccacctctcccacctcacctctgcttctttcccctggtggctggaggtagcatgcgctaaggatacagaggggatcagattctgtgtcctcccccacagcttaattggggtgatcctcacacagtgagacattcccccccaatttgatcagcatgaggatgggagaccacaga

SEQ ID NO: 408911 - DNA, 564 bp, Homo sapiens
gtcagcaccaacatttgatgcaggtgtctgatcagtgggtctccttgcctgaagcctgaaggtcctgactgccccaagcagcccctactgcccattccagcttccctttcacccaaagacataagatagaggatgttgggcaggcaagtccatccttatccacaggtaagagttaaggacacagctgtagaggctttttatttaaattttttttctgcagcttgtgacgtaatgagaagcaaccaatctatttcagagaggggggaacccgggcagcccttggaagcaggaaaaggccaccacttgggaacctttgtacactagcgtggatatctgtggggtgctcgtgggygctgagaggcagccagcccagttacaccgtccagagtggccacctctcccacctcacctctgcttctttcccctggtggctggaggtagcatgcgctaaggatacagaggggatcagattctgtgtcctcccccacagcttaattggggtgatcctcacacagtgagacattcccccccaatttgatcagcatgaggatgggagaccacaga

SEQ ID NO: 408912 - DNA, 569 bp, Homo sapiens
ttccctttgaaaatgactatgcaaagacaatatttaaaattatgaaattccttaatacactgtaatgtaaattgagtatcccttttccaaaatgcttctgaagagaggtgttttggattctggatttttttagattttggaatatctgcattacacctactggctttctttttttttttttttttttggagacgaagtctcactttgccaccggggctggagtgcagtggcgctctctcggctcactgcaaactccacctcctgggttcacccattctcctgcctcagccccccgagtagctgggactacaggtgcccaccaccacgcccagctaattttttttgtatttttagtagagatggggtttcaacgtgttagccaggatggtctcgatctcctgacctcgtgatccgccsgcctcggcctcccaaagtgctgggattacaggcgtgagccactgcgcccagcctcggctgagcattcttaatccaaaaatcccaaatccaaaatgctgtaatgaacatttcctctgagcatcatgttggtgctcaaaacgttttcgatttca

SEQ ID NO: 408913 - DNA, 631 bp, Homo sapiens
ttagggttcactgtgggttaatatttaacacaatttttcaaaattcttagcttctgtctcttcaaatattgcttctaactcattttttctctcctcttattctcttattccaaccccatgcatgtttatttttttttcacggtttccacatgtctcttgtactcttctctgtatttcctaaccattcttccctctgtgcttcagtttgtttactttctacttgtcttccagcagataagtgtcttccagttcacttcaaataatccartactgagatcttcatttcagttactatatttttcagttctagaatttccatttaactcttttttattgaccccaggtttctggtgaaattccctatcattccttctattttcctggaaacattagacatagttattttaagttccagtatgataactccaatatctgaatcacacataagtctgtttctattatctgtttttttattattattatgtttcgtaatttttgattcaacactgaatcctgtagactaaaaattgcgggggctctgggtatgttttctttctcctatgaaggttacattttcttctgtcaggtggggagaaagcacacagatcaccttagttctgctctaggctaa

SEQ ID NO: 408914 - DNA, 631 bp, Homo sapiens
ttagggttcactgtgggttaatatttaacacaatttttcaaaattcttagcttctgtctcttcaaatattgcttctaactcattttttctctcctcttattctcttattccaaccccatgcatgtttatttttttttcacggtttccacatgtctcttgtactcttctctgtatttcctaaccattcttccctctgtgcttcagtttgtttactttctacttgtcttccagcagataagtgtcttccagttcacttcaaataatccagtactgagatcttcatttcagttactatatttttcagttctagaatttccatttaactcttttttattgaccccaggtttctggtgaaattccctatcattccttctattttcctggaaacattagacatagttattttaagttccagtatgataactccaatatctgaatcacacataagtctgtttctattatctgtttttttattattattatgtttcrtaatttttgattcaacactgaatcctgtagactaaaaattgcgggggctctgggtatgttttctttctcctatgaaggttacattttcttctgtcaggtggggagaaagcacacagatcaccttagttctgctctaggctaa

SEQ ID NO: 408915 - DNA, 631 bp, Homo sapiens
ttagggttcactgtgggttaatatttaacacaatttttcaaaattcttagcttctgtctcttcaaatattgcttctaactcattttttctctcctcttattctcttattccaaccccatgcatgtttatttttttttcacggtttccacatgtctcttgtactcttctctgtatttcctaaccattcttccctctgtgcttcagtttgtttactttctacttgtcttccagcagataagtgtcttccagttcacttcaaataatccagtactgagatcttcatttcagttactatatttttcagttctagaatttccatttaactcttttttattgaccccaggtttctggtgaaattccctatcattccttctattttcctggaaacattagacatagttattttaagttccagtatgataactccaatatctgaatcacacataagtctgtttctattatctgtttttttattattattatgtttcgtaatttttgattcaacactgaatcctgtagactaaaaattgygggggctctgggtatgttttctttctcctatgaaggttacattttcttctgtcaggtggggagaaagcacacagatcaccttagttctgctctaggctaa

SEQ ID NO: 408916 - DNA, 585 bp, Homo sapiens
aataatggcattctgggcctacttagttatattggaacttggtttttaatgatgttacttaacactgtgtgttttctggtttgggggaattatcctctgrctaaatatatttttccattcagctttttagcaaattatttttatcattaaaggttatttctcttagacactgagtctcagatgctcagctgtgaacttactatattcacttaaagagctgtttaaaactagattctggatctcaccccagaaattctgattcaatagatgaggcatggaattaaaggatctgtatttttaagataccaaggcaaatttctgccaggttagaaaactactggcttggcttaactccaaatctgggtctgaaagatatgataatactgaaaaggtgtatgtattactaatttgcctaaagtgaataaattggtctgatcctttaagaacattattaagcattattttctgcattacccctttaggctcttttaaaatagcaataacaagagaaatttaaaaatgaactccaatgcctagataactgcatatggactctgtaacctcttgcaagctttatcacatagg

SEQ ID NO: 408917 - DNA, 585 bp, Homo sapiens
aataatggcattctgggcctacttagttatattggaacttggtttttaatgatgttacttaacactgtgtgttttctggtttgggggaattatcctctgactaaatatatttttccattcagctttttagcaaattatttttatcattaaaggttatttctcttagacactgagtctcagatgctcagctgtgaacttactatattcacttaaagagctgtttaaaactagattctggatctcaccccagaaattctgattcaatagatgagrcatggaattaaaggatctgtatttttaagataccaaggcaaatttctgccaggttagaaaactactggcttggcttaactccaaatctgggtctgaaagatatgataatactgaaaaggtgtatgtattactaatttgcctaaagtgaataaattggtctgatcctttaagaacattattaagcattattttctgcattacccctttaggctcttttaaaatagcaataacaagagaaatttaaaaatgaactccaatgcctagataactgcatatggactctgtaacctcttgcaagctttatcacatagg

SEQ ID NO: 408918 - DNA, 585 bp, Homo sapiens
aataatggcattctgggcctacttagttatattggaacttggtttttaatgatgttacttaacactgtgtgttttctggtttgggggaattatcctctgactaaatatatttttccattcagctttttagcaaattatttttatcattaaaggttatttctcttagacactgagtctcagatgctcagctgtgaacttactatattcacttaaagagctgtttaaaactagattctggatctcaccccagaaattctgattcaatagatgaggcatggaattaaaggatctgtatttttaagataccaaggcaaatttctgccaggttagaaaactactggcttggcttarctccaaatctgggtctgaaagatatgataatactgaaaaggtgtatgtattactaatttgcctaaagtgaataaattggtctgatcctttaagaacattattaagcattattttctgcattacccctttaggctcttttaaaatagcaataacaagagaaatttaaaaatgaactccaatgcctagataactgcatatggactctgtaacctcttgcaagctttatcacatagg

SEQ ID NO: 408919 - DNA, 604 bp, Homo sapiens
ttcactaacggctcacatgcagacttctacaaagaggcattgccaggagggaggcaaaaataagatgggagagaggaagggagtgctcccctcctctcctagtcaggggagacaaaagggaggaatgggaacccttaaaggaagacagccccccaaggggcactcctgtcaacataaagcccaagctttttggatttttgagagctttcaaattttatatggtttcctttcttaaatttccaaaagcaaatgggaaactaaaaggaaggacactaggaaccttaccacactattcagtgagttacttgaactacaggacaaatttcaccagaattggtataggtttttggatccatacctgatccattgcgatgtatgcaggcaacatctctgrggtctcctgggtaacacattcatagagtactgaagaaaagagatccagaatttcctgtttctgcagaaaatcagaagttttgtagcacaaagtatattccaaaatcaattcaaaaacgaattgtatagcactactatggcccattcttaagttttataatgaatgacataaaagtaacactacaatcttttaaaaaagccacagcacatg

SEQ ID NO: 408920 - DNA, 604 bp, Homo sapiens
ttcactaacggctcacatgcagacttctacaaagaggcattgccaggagggaggcaaaaataagatgggagagaggaagggagtgctcccctcctctcctagtcaggggagacaaaagggaggaatgggaacccttaaaggaagacagccccccaaggggcactcctgtcaacataaagcccaagctttttggatttttgagagctttcaaattttatatggtttcctttcttaaatttccaaaagcaaatgggaaactaaaaggaaggacactaggaaccttaccacactattcagtgagttacttgaactacaggacaaatttcaccagaattggtataggtttttggatccatacctgatccattgcgatgtatgcaggcaacatctctggggtctcctgggtaacacattcatagagtactgaagaaaagagatccagaatttcctgtttctgcagaaaatcagaagttttgtagcacaaagtatattccaaaatcaattcaaaaacraattgtatagcactactatggcccattcttaagttttataatgaatgacataaaagtaacactacaatcttttaaaaaagccacagcacatg

SEQ ID NO: 408921 - DNA, 258 bp, Homo sapiens
gaaaacagctaatatacagtctggaaaaawtcacattgggaccaaactataaaaacttttacatgcttgttaaacttccttgaaatttaaaggcttaactgacatgctactttaggtataaatgtatcaacactctaaaataactgcacgtgattatttccacccaaaataaactggctgagtagtatatattatctacaataatcttaaatttaggagaactttctagcaaaagaatggtaaagagatgcaacaaaa

SEQ ID NO: 408922 - DNA, 539 bp, Homo sapiens
ccgtgccaatgcagccaaacccctgcacagtgtgggagcaactcctggggttggtgggaggcctggctgatgcatgatgggtctgaaaaccgctcaggctttgccaggtatgtgtcaggcactgatggcggcgatcggaccggcctaggttggcttagcgcgccctctagtgggagaaggtctaaagagcaaaatgygagcatccttgccacagggcagaaatgatgctgaacgtgcacgccacatcaaaggacatacgtgcttaagggacttgtgcttaacaattactgtgattagtccgttctcacgctgctctaaggacacacccgagactgggtaatttataaaggtgttttaatagactcacaattccacatggctggggagccctcacaatcatggctgaaggcgaagaagcaaaggcacgtcttatatggtgtgtgcaggggaactgccctttatgaaaccatccgatctcgtgagacttattcactatcacgagaacagcacgggaaaaacccacccccatggttcaatta

SEQ ID NO: 408923 - DNA, 539 bp, Homo sapiens
ccgtgccaatgcagccaaacccctgcacagtgtgggagcaactcctggggttggtgggaggcctggctgatgcatgatgggtctgaaaaccgctcaggctttgccaggtatgtgtcaggcactgatggcggcgatcggaccggcctaggttggcttagcgcgccctctagtgggagaaggtctaaagagcaaaatgcgagcatccttgccacagggcagaaatgatgctgaacgtgcacgccacatcaaaggacatacgtgcttaagggacttgtgcttaacaattactgtgattagtccgttctcacgctgctctaaggacacacccgagactgggtaatttataaaggtgttttaatagactcacaattccacatggctggggagccctcacaatcatggctgaaggcgaagaagcaaaggcacgtcttatatggtgtgtgcaggggaactgccctttatraaaccatccgatctcgtgagacttattcactatcacgagaacagcacgggaaaaacccacccccatggttcaatta

SEQ ID NO: 408924 - DNA, 546 bp, Homo sapiens
atacaaaaccacccacgtctcatttatctctaattttaaaataactcattcccttgctggatatgcaagtgagtggtggagaaagcggtctatctgcaaggctggcgggggttaaggatttcattgcttccaaaagacgtgagcaagagaactttattactcactgaaggggattcttccttctcagccaagatggtcccatttaaatcacttttgaatttcctttcaagcttcaattgtgcaaattctagttgtggttgaggatcgtccccaacagctttttgagttattccttggactcttcctttttctactatgttttcatgaataattctagaatccatatttatatccagcccaaggcttctttcctatagaggtgtcgtygagttgtgacagcttcaaagatctgatcatactgtttaaaagcaataggcttgggagtccagatgtcagcttctcagatccattttcacagtctgatgctgtctgctagcaattatcagtgcctgacccagaagcggtctattgcacctcagcttggag

SEQ ID NO: 408925 - DNA, 546 bp, Homo sapiens
atacaaaaccacccacgtctcatttatctctaattttaaaataactcattcccttgctggatatgcaagtgagtggtggagaaagcggtctatctgcaaggctggcgggggttaaggatttcattgcttccaaaagacgtgagcaagagaactttattactcactgaaggggattcttccttctcagccaagatggtcccatttaaatcacttttgaatttcctttcaagcttcaattgtgcaaattctagttgtggttgaggatcgtccccaacagctttttgagttattccttggactcttcctttttctactatgttttcatgaataattctagaatccatatttatatccagcccaaggcttctttcctatagaggtgtcgtcgagttgtgacagcttcaaagatctgatcatactgtttaaaagcaataggcttgggagtccagatgtcagcttctcagatccattttcacagtctgatgstgtctgctagcaattatcagtgcctgacccagaagcggtctattgcacctcagcttggag

SEQ ID NO: 408926 - DNA, 579 bp, Homo sapiens
cgctggggtaacctcagtagaatttacactggtctcccttcattctctcacgcacacgacaaaccattctgtaccctgaagctggtatggtttttgaaaagctcaaatttgrttgtgtctttaatgagttcccattgctctgaggtcagtgtggcatctttcatggggaaggtcatggccagcccccttccccttcccttcctatgttccagccaccatgacctactgtccagtggtcatgagctgagtccctcatacccaaggcttttccagatgctttttctctgctggaacactgttcttgccttgcattgctagcaaagatccccatgttcattaagtgcctcttaaatgtgacctctccagggaagcctcctccactcccattgcccattgccctggctcagtcagaccactctgtgtcttccttgttggtgctctctcctcttgtcattaaatcgctccatgtttaatgtctgtatcctccacttgactgtatgctctacaagggcagggtctaggctggcttggatgttatgctgctgaatctacagggcgaagcataggaggtgctcaata

SEQ ID NO: 408927 - DNA, 579 bp, Homo sapiens
cgctggggtaacctcagtagaatttacactggtctcccttcattctctcacgcacacgacaaaccattctgtaccctgaagctggtatggtttttgaaaagctcaaatttggttgtgtctttaatgagttcccattgctctgaggtcagtgtggcatctttcatggggaaggtcatggccagcccccttccccttcycttcctatgttccagccaccatgacctactgtccagtggtcatgagctgagtccctcatacccaaggcttttccagatgctttttctctgctggaacactgttcttgccttgcattgctagcaaagatccccatgttcattaagtgcctcttaaatgtgacctctccagggaagcctcctccactcccattgcccattgccctggctcagtcagaccactctgtgtcttccttgttggtgctctctcctcttgtcattaaatcgctccatgtttaatgtctgtatcctccacttgactgtatgctctacaagggcagggtctaggctggcttggatgttatgctgctgaatctacagggcgaagcataggaggtgctcaata

SEQ ID NO: 408928 - DNA, 579 bp, Homo sapiens
cgctggggtaacctcagtagaatttacactggtctcccttcattctctcacgcacacgacaaaccattctgtaccctgaagctggtatggtttttgaaaagctcaaatttggttgtgtctttaatgagttcccattgctctgaggtcagtgtggcatctttcatggggaaggtcatggccagcccccttccccttcccttcctatgttccagccaccatgacctactgtccagtggtcatgagctgagtccctcatacccaaggcttttccagatgctttttctctgctggaacactgttcttgccttgcrttgctagcaaagatccccatgttcattaagtgcctcttaaatgtgacctctccagggaagcctcctccactcccattgcccattgccctggctcagtcagaccactctgtgtcttccttgttggtgctctctcctcttgtcattaaatcgctccatgtttaatgtctgtatcctccacttgactgtatgctctacaagggcagggtctaggctggcttggatgttatgctgctgaatctacagggcgaagcataggaggtgctcaata

SEQ ID NO: 408929 - DNA, 579 bp, Homo sapiens
cgctggggtaacctcagtagaatttacactggtctcccttcattctctcacgcacacgacaaaccattctgtaccctgaagctggtatggtttttgaaaagctcaaatttggttgtgtctttaatgagttcccattgctctgaggtcagtgtggcatctttcatggggaaggtcatggccagcccccttccccttcccttcctatgttccagccaccatgacctactgtccagtggtcatgagctgagtccctcatacccaaggcttttccagatgctttttctctgctggaacactgttcttgccttgcattgctagcaaagatccccatgttcattaagygcctcttaaatgtgacctctccagggaagcctcctccactcccattgcccattgccctggctcagtcagaccactctgtgtcttccttgttggtgctctctcctcttgtcattaaatcgctccatgtttaatgtctgtatcctccacttgactgtatgctctacaagggcagggtctaggctggcttggatgttatgctgctgaatctacagggcgaagcataggaggtgctcaata

SEQ ID NO: 408930 - DNA, 605 bp, Homo sapiens
actctgtcacccaggctggagtgcagtggcacgatctcagctcactgcaagctcagcctcctgggttcaagcaattctgcctcagccacctgagtagctgggattacaagtatgcaccaccacacccagttaatttttgtatttttagtagagacagggtttcacaatgttggccaggctggtctcgaactcctaggctcaagtgatctaccagcttcagcctcccaaagtgctgggattacaggcatgaaccaccacgtccagcctatgatcactttaatmtcattaatatcctctactgaaactgaggtggccttaatacatatctctatatatttttacatatattaataactgatcacattaaaaggaaactttaaacaaaatgccatatatttcccaagactttcagcaacatttttctttgaatataataatatatataacaaaccttatattagtaatcgtttctgtccacaaatggtcaatacacagttcaggaacaattggctccgtttctggtgcaagaaaggagccattagaattactatttggagaatgagaaatactatgtctctttggagactgattatggcttgaaatgt

SEQ ID NO: 408931 - DNA, 605 bp, Homo sapiens
actctgtcacccaggctggagtgcagtggcacgatctcagctcactgcaagctcagcctcctgggttcaagcaattctgcctcagccacctgagtagctgggattacaagtatgcaccaccacacccagttaatttttgtatttttagtagagacagggtttcacaatgttggccaggctggtctcgaactcctaggctcaagtgatctaccagcttcagcctcccaaagtgctgggattacaggcatgaaccaccacgtccagcctatgatcactttaatatcattaatatcctctactgaaactgaggtggccttaatacatatctctatatatttttacatatattaataactgatcacattaaaaggaaactttaaacaaaatgccatatatttcccaagactttcagcaacatttttctttgaatataataatatatataacaaaccttatattagtaatcgtttctgtccacaaatggtcaatacacagttcaggaacaattggctccgtttctggtgcaagaaagragccattagaattactatttggagaatgagaaatactatgtctctttggagactgattatggcttgaaatgt

SEQ ID NO: 408932 - DNA, 605 bp, Homo sapiens
actctgtcacccaggctggagtgcagtggcacgatctcagctcactgcaagctcagcctcctgggttcaagcaattctgcctcagccacctgagtagctgggattacaagtatgcaccaccacacccagttaatttttgtatttttagtagagacagggtttcacaatgttggccaggctggtctcgaactcctaggctcaagtgatctaccagcttcagcctcccaaagtgctgggattacaggcatgaaccaccacgtccagcctatgatcactttaatatcattaatatcctctactgaaactgaggtggccttaatacatatctctatatatttttacatatattaataactgatcacattaaaaggaaactttaaacaaaatgccatatatttcccaagactttcagcaacatttttctttgaatataataatatatataacaaaccttatattagtaatcgtttctgtccacaaatggtcaatacacagttcaggaacaattggctccgtttctggtgcaagaaaggagccattagamttactatttggagaatgagaaatactatgtctctttggagactgattatggcttgaaatgt

SEQ ID NO: 408933 - DNA, 616 bp, Homo sapiens
acttgacttctattggaagtgctgttatccaacacagtaaacactgtgatgtgtttagtttagtgtctctcagggaccaaaacaatctactctgagttttaagtgcaggccactgstagacactgctggtaaagcaggataaacagcatactcatagctgattaaaaccacaggtacctcattaaatgtgaccactggaattcagtaatgagctagcaaataaacatggaggttaataacctgcagttacattagccttggataacattacttagagttttgttgttttttttaattagtactagatcattctttgctcataaaagctaccattgtctttccttaatttttataattttactatcacttttaattgggttaatgtggagtggagagtacatgcctatgaagattcagcactattaatcccatacctatctcagccaacaggacttctgcagtatgtctgtgagctgtcccttgatatacaaggccaatgccaaccactgcagccacttggacattgtgaggaacatccagctctgtggacgttgggggtaagagagcaggaatgtgaatgctaagaagccgagtaatagacatatccatggtgcct

SEQ ID NO: 408934 - DNA, 616 bp, Homo sapiens
acttgacttctattggaagtgctgttatccaacacagtaaacactgtgatgtgtttagtttagtgtctctcagggaccaaaacaatctactctgagttttaagtgcaggccactggtagacactgctggtaaagcmggataaacagcatactcatagctgattaaaaccacaggtacctcattaaatgtgaccactggaattcagtaatgagctagcaaataaacatggaggttaataacctgcagttacattagccttggataacattacttagagttttgttgttttttttaattagtactagatcattctttgctcataaaagctaccattgtctttccttaatttttataattttactatcacttttaattgggttaatgtggagtggagagtacatgcctatgaagattcagcactattaatcccatacctatctcagccaacaggacttctgcagtatgtctgtgagctgtcccttgatatacaaggccaatgccaaccactgcagccacttggacattgtgaggaacatccagctctgtggacgttgggggtaagagagcaggaatgtgaatgctaagaagccgagtaatagacatatccatggtgcct

SEQ ID NO: 408935 - DNA, 616 bp, Homo sapiens
acttgacttctattggaagtgctgttatccaacacagtaaacactgtgatgtgtttagtttagtgtctctcagggaccaaaacaatctactctgagttttaagtgcaggccactggtagacactgctggtaaagcaggataaacagcatactcatagctgattaaaaccacaggtacctcattaaatgtgaccactggaattcagtaatgagctagcaaataaacatggaggttaataacctgcagttacattagccttggataacattacttagagttttgttgttttttttaattagtactagatcattctttgctcataaaagctaccattgtctttccttaatttttataattttactatcacttttaattgggttaatgtggagtggagagtacatgcctatgaagattcagcactattaatcccatacctatctcagccaacaggacttctgcagtatgtctgtgagctgtcccttgatatacaaggccaatgccaaccactgcagccacttggacattgtgaggaacatccagctctgtggacgttgggggtaagagagcaggaatgygaatgctaagaagccgagtaatagacatatccatggtgcct

SEQ ID NO: 408936 - DNA, 507 bp, Homo sapiens
caatgaacatagtaatgttgcatctctttcctctgaggaaatgaataaatttctattccacatttaatgattacatctgrggcaggcacagtagaaaaaaagatagaaaatagctatgtgtcatgtaccatactaagcaacaaataatgtttttaaaggctaggtttagatgtgatttaagtcacattttcatacttcctataggacagcctttagcttcagggcaccatcttaactgtgttgctggctgggacattcagtcttgccaaggaaatagagaaataatcacatactgttgtttctgtctcacaatacttgcaatcagtcatgaaagtaaaagttctctatgtttcaataaattttcctttttacttgtcctaagtaactgcttcaagctgctagagtttctgagagtcttctctacaaatgcgaatcaataacccctcaaactaaaattcatgaaatcaattctttgaaatgaacacaatttttggaaaagataatttc

SEQ ID NO: 408937 - DNA, 492 bp, Homo sapiens
ggaggtcttcactagcaatcttgctagtccttaatttctatccatgtattaacttaaaacatcagaaaccaaagtacccagaacctattatctcagcatctttcagacatgctataatggagacagttaactctatttaacaatcttttgatgatttttctttctggcaggttccatactggacatggtaaacacattttgttacacagcagtcacaagccctttcttcacgtggtatggggtctagacaaatggccaaaatacaggtatagagagagtaattataagtaaaataagcattaccaggtcaaattatatgacactagagagtatgtgatgagggcaagtaacctatctgrgactgggagtaaggaggaagcagaaaattttaggccgagaaaacatgggtggtgtcatttcagaacaattgggctgttggcataggtaatatacttcaagtttacaaagccttcaaggttttagagagggaaa

SEQ ID NO: 408938 - DNA, 401 bp, Homo sapiens
ataaacccatatttggataattcatcattttttaataaccggagtcactagctcattgattatcaatgtctcattcatgataatggagaaacagagagaaacagtaggaagcacaaagaatttcatacatgaaagtaaatttaagagtggattcaaatgaaattaatgctctaggcctctgttaacagactgtgacctaaatctcatactgatcgcacaactaaaattctgaagtccaaggaaaatgatgagacacagrgatttttctccttaattttaatttattcttttttaaagaaagcatgggggatatactattaaagttaatatcaccttccttattaagacataaaaaatgtcttacttgtaatcactaaaagtaaaaaaaaaatccttaaatc

SEQ ID NO: 408939 - DNA, 506 bp, Homo sapiens
cccaaatactactaaatttgtttaaaataatcaatctacagattcaaaaagtttagtaaacctccaataggatgaaaaaaacacccataggcacatcataggaaagctgtaaagaatcaaaaatgaaaaaaaagtaaactcagctagaaaacaaaacaaaatacattcataaacgtataataatgtaactgctaaatttttaacagaagcactgaaggtatatatatgtttcaatatagcactctgagttcacaggaygccttcctatctttcagcactttaaatatgctattcatatatatatatatattttaatattggggacgatataaagcatattcaagtaagctctaagtgaatttttttttttgttttttgacatgaggcacaaaactatagggaatattaaagaaagtccctcaggcctaagaaaagtaatactcaatgtaaactcagatgtaactgaaggaattaaggacaatagaactgggaaatatgtgtgaact

SEQ ID NO: 408940 - DNA, 540 bp, Homo sapiens
atcacaatgttgccaatgaggtaaataattttcagcttgaaccaagggaagaagtgacacttatcacacatgcacccacacacgcaaagctcttccagttgcaaaattaaaaccctcacagaggctaagggaggtagttcactgaagagttgcagctctgagataaaggtcaatgctagagacagaccaattcatttaaaaagaggtcacaatggaagaatgacaaggcttacacagaagttaattgaaaaatacatgctaattagagtcccttaagtaattgtgtaaacaaaaattcataagaactttattgataattatgaagtccctgaagcaaacaaacattttgtgcagacattatggccataagagatgatacctggaaccaaaagtaacagttataaactataacagattattattttggtaagtttaattaaataycatgtttcattccatattgacaaataaatagacactatggaccaatctgtatatacttcatacttttatcaagaactcggcccatctgtatgtact

SEQ ID NO: 408941 - DNA, 610 bp, Homo sapiens
taatcaataatgatgttttaaatgcatggcttagatttagttacaagagtggaaatgatggtaatatatttttaagtgttgaattcaaaacgtctaacgtattcaaggtgttcagtcataaggcaatattttaggcatttttacactttattctactttttaaatgtttaattttatakttaactatttcctcatctatggattatatattgaagaacagcttaaactagaaagaattctaacttttgatagttggtagaatgtcattgtataaaacaaactgatttccccaggacctttgagtccacagcctataaataaaaataaaacataactcatggtattcattaatctaaaatcaaatttagttaaattttaaaagaacgcataaagataaattattcaaaaataactgaactgttccctttggggattatttgatattgcttaggaagcaaataataaatccgtcttccatgaatattctactccaacatgcctaataacattctttggtctctgaatattacctagaattcctctcattttgaaagaagtcatctgaaatatgatccaggaatcatatgtgctatattcaaggggacggatg

SEQ ID NO: 408942 - DNA, 610 bp, Homo sapiens
cctattactatgctttcttagcacaaaacacaaaggacttttcacatggaatgagtctactaaaatatgtgtcacatagcattaaatgtctttggtggctactattctccttcctccattggtttattctaattcattttgcttcgtctttagagtggtggctttgcaaagagcaaaagaataccagatggtcattgctgtggttcactgagtttatatcctagcaggaagttagatgattgcttttcaaggttcttatcatgcattgaacagtctatttcaccacaggggattctgaagctgtcaatatattcttggctaagcatgccccatcattttctctttaagacatgggcctatataatcatatgaatgctttgtggacgcaaagataatataacttgtctttccttctacatattgtggaatgtagatttgtgttagaaatgagtatttacttaatgtttataaaattctgttttaattttgggaacaacatcgttaaactatttgttatagcttcttcaaaaatstaaactttccctaaacaatctggattttgcatttagaaaatttactttaaaattcttatttgtcaaaacaagtaaac

SEQ ID NO: 408943 - DNA, 539 bp, Homo sapiens
ggtctctgcatctgcatctttcagattcattgtcttccctcattatttttttacttactaatacagatatactatgcaatcacttattttctacttataaaattgcactgcttgtggaaaaattcaaaatctctgctcaagatattgttaatcaaattcaagaccttctttttgagatacaatgcattattttggtttccttgacatgtatgcaattccccacatttccaaagctttgagatattttttcagagaaattacttaaaaataaatctcaaagtctgactgtgcaatgtcaaccagacccaagtcttgtgattgtacatggtgtaatcccaaaatttacttttagctagtgaatgaaaaatggtatatttctctaaaatataatttaactatttataagggaggaaactcctttggwaataacttgagttttcacatatgctatccctcaaaggttcctagaatctccaaggtgtaacagctgtgaagccatctgtgagctgaatcaagttccaatagcaaatgcatgccat

SEQ ID NO: 408944 - DNA, 567 bp, Homo sapiens
ccttttgctgtgcaaaagctctgtagtttatttaggtcccagctatttatatttgtttttattgcatttgcttttgggttcttggtcatgaaatccttgcstaagccaatgtctgcaagagtttttcgaatgttatcttctagaatttttatagtttcagatcttagatttacgtccttaatccatcttgagttgattttttataaggtgaaagatgaggatccagtttcattcttctacatatggctagccaattatctcagcaccatttgctgaaaatggtgtcctttccccactttatgtttttgtttgctttgtcaaagatcagttggctgtaagtatttgggtttatttctgggttctctattctgttccattggtctatgtgcccatttttatgttagcaccacactcttttggtgactacggccttatagtgcagtttgaaatcaggtaatgtgatgcctccagatttgttccttttgcttagtcttgctttggttatgcaggctcttttttggttccatatgaattttagaattgtttttttctaattctgtgaagagt

SEQ ID NO: 408945 - DNA, 595 bp, Homo sapiens
agaaatacttcaaaggagtatcatctagtctttttcagagtgccccctggaggcctaatcaagtaattgtagttccttctcacttgcaagtaaacaaagacaatagaacctcattcagtttttaaaagaggctcttcagtcactggcagcagcagccaggcaacagtaatttgcaagccctgccctttattaaaattcattgttgctttcagagttagagaactataatttgagagatccaagcaagactaagaagaaataacattttatataatcacttccaagagctgctatataattaaacacatgtgcaattaattttaagcaaaaactgcagccattrtgcagtgaaagttgctttatgctagccctggtttatagcaatagaatgaatatgaagtcaagtgttacgatttggcatgcttccagtaaatttacaattttgtgaaagcgccatcaatagagtattgtttttgctttactttacttttctccagctttgtggctctgttttagtaacagaacatgtggcatactagctgtggcagtttgggttatagctatagggtgtgtaataccaaaacatctatgttga

SEQ ID NO: 408946 - DNA, 602 bp, Homo sapiens
actccattgaatgaatgagtaaataatgaagtagtcagtatgacttggctccttcctaaagtttctcatatatgtttctgggttttctctagactagaattctgcttttatgagaagtcagctgaatgctatggaaaggagtatagagagtggcttaaaagtttcaggcaagttcacaccaaaacttgcattctaacctccctgaacctgtggtctagaagggacctatcagcaagatgataaccaaaaatgtctagaatctgagattgttctaaaaaacctaagatattacctgaaataatctcttatctaatagaagagtggcctctttataaatgattccagagatgtgttttaaccgccttccatatccttgagcccaggacccactcaggggacccattctgttcttcagcatgtctaattaaagtcttaacaaaamagtttctatcttattataaaatccagtcagtttctctgcattagtcacagttctttgcaggtgaggtgcatatctccttcccagttggctgaaatctgcttccatatgtcttccacatattggcttgaactttggcttttgtagcagcccaaagagcatt

SEQ ID NO: 408947 - DNA, 536 bp, Homo sapiens
ggtcttgagttatggaggcagcagacagtgggcttatatccactcatttattatttatgtgtgcttctccttcctctatttaagtgtctatttagtaaaacaggggtcaraaaccatgggatgcccttgggagtgaattctgcgtcccatgtggctagtggcacttttatttattgctttaattatgcttattgtatccagcccacaagaccaagcaaagggcatgtgtccatgaaaagtgagtttattatggaaattgttagtgactttttatgaacataacagtctagagctagcttaatcctaggcagaacagtcatgaaatatgacaacagttttgtcagaattttcaggtccattcagttttttatacatctgtggatttgagaataacttgggttttattcattgattcattcaacaaatggatattgaactgtatcaggtactacgtgaagtgctaaagatagagcaatgaaaaagacaaagcccttaaccactcacatggagattacatcctagtgtgggagacataa

SEQ ID NO: 408948 - DNA, 599 bp, Homo sapiens
tatatatatatatgccacatgttctttatccacttgttgattgatgggaatttgagctggttccatatttttgcaattgcaaattgtgctgctataaacatgcatgtgtaagttctttttttttttttttttttttttttgataatgacttactttcctctgagtagatacccagtagtgggactgctagatcaaatggtagttctacttttagttctttaaggaatctctacactgttttccatagtggttgtactattttacattcccaccaacagtataaaagtgttcccttttcactgcatccacaccaacatctattatttcttgattttttaattatggccattcttgcaggagtgagatgatatcacactgtggttttgatttgtatttccctgatacttagtgatattgggcatttttccataagcctgttggccatttgtatatcttctgagaattgtctactcatatcctttgctcactttttgatgarattgtttgattttttcttgctgatttgttgtagttgcttgtagattctggatattagtcctttgtcggatgtatagattatgaagattttttcccactct

SEQ ID NO: 408949 - DNA, 598 bp, Homo sapiens
gctaaacagttgcgactcttgcttttttatctccccaagctcccttttcataagcctttcatttctcaagtgaaactgagcaaactctgttctaaaacaaaaggctaagcagaacatctacactggaagttatggtgatttgggatagggggagaaaagagtaattagaggaaataatggagaaagtgaatttaaagttgacaccacatatggcattctgtctttgagtgagtttctttggtttttattttggggaagacatagtaggtgtatataattatgggggacatgagattttttgataaagacatgcaatatgtaataatcacatcagggtaagtggagtattgagtgagtttttttggctcaatgagaacaagggtataagaatgtatttagtgyctagtgtgtgttgggcacttcacatagtttattgcatttaatttagtcttgttaacaagattatgaggtacattgattgtctcttccatacaaaaaagcttcatagaggttgaacgacttgaccttggctctccataaaaggaatttcaattctagttggtatccatgcaaagacattagaccctgatgcttctta

SEQ ID NO: 408950 - DNA, 418 bp, Homo sapiens
tgtaagcttcctgaggcatctccagccatgtggaacagtgagtgaatcaaacctcttttctttttaaattacccagtcttggacagttctttayagcagaatgaaaacaaactaatacaagagtgacagttgattggctaaaaagtataggctcagaaaatgaaacaacttgcccaaagccacacagtgagcttctgccagattcatggcaagaataccaggaaatgaaggggaaggtagaaggaggttcccagaagagcaaagggcttaactggcacacagacttgggatagcataggaacatctaagcccggttgcccattggctggctgtgtgactcacaggctgcttgctgtcttcctttaggcctctgtcgcccctttcacctatatggaacttgtttcagtaacaggcacaa

SEQ ID NO: 408951 - DNA, 418 bp, Homo sapiens
tgtaagcttcctgaggcatctccagccatgtggaacagtgagtgaatcaaacctcttttctttttaaattacccagtcttggacagttctttacagcagaatgaaaacaaactaatacaagagtgacagttgattggctaaaaagtataggctcagaaaatgaaacaacttgcccaaagccacacagtgagcttctgccagattcatggcaagaataccaggaaatgaaggggaaggtagaaggaggttcccagaagagcaaagggcttaactggcacacagacttgggatagcataggaacatctaagcccggttgcccattggctggctgtgtgactcacaggctgcttgctgtcttcctttaggcctctktcgcccctttcacctatatggaacttgtttcagtaacaggcacaa

SEQ ID NO: 408952 - DNA, 530 bp, Homo sapiens
atttaaatccctaatggttctgcgaagcaggcattctccttcccctttgaaaggctgaaggtcagagatgttatatgaactgtccaactcatgcactatcagaggctgagattcaaagacttgcttctttgattgcaaactcgtgcttggaatccagaaatccaatagggaatcagagcaggagagaagcgagagttcccacaccctcccgtgctggggagcaaagcagtgcatgggtcacatggggctaaagcaagtggcctgcctggtttccaggcccaaccctggggcagytgctagggatagggctgcctgcccttagtgaggctccttcaggctgccctggaaggcagattccccaaagcttgattttgtttgtcagcatttcttgttctgcccacgcaacatttctttagaatctggagtaaaaccagcactgtttttcacaatcaagtttctcccattacccaggaatagccaaaccgactgggctgtttcatctgctattttttggagagcttttgtgctcc

SEQ ID NO: 408953 - DNA, 579 bp, Homo sapiens
tcagctaccactggacttgcaagctttcgttttaaaggcaaaaaattgaaagttgtttttggaatatattttctgtcaaggggcagtttctgtggacagaaaagtgattgtcaaatgcattcttggagcagatttgcatactaagcatgagttcgaaccaggtagccatgtcaggcaattactgcatcagcagaacaatgttttatagcttaatgtgatggtcacaggatctgagtctcagagacttgttggcttacaaaacgttagtggggaattgaaagctccaaaaagcatcccaaygatctttacaaatcagttcgggaattagttcaacaatcagacctttttgtaagcaatgttcctttatttaactgattgtagtccctttcttcagactcctctcctctgcaacagagcagcacgcattcaagggcaagctgtctgtgtcttggctggctttactccaggcatctgtgtagcgatggggcagaagggtgtgggtggaggcactggatgacatcttggccctgtttactaagtgggttggattttggtcaatctggcagcctgttcaccccc

SEQ ID NO: 408954 - DNA, 576 bp, Homo sapiens
agcacctgcagcatccttctctatagcacagctcctcatccactccacctgtggtacatgaagccctgaaygaaacggaccagttttcactccagtgctgtggccatctctctgtgtgacttcacctgtgtgagcgtctctgtcaacaaagtgagactctaattcatgtatcacttgggcaaaaagtgaagtaccacacactaacatccctaagtaaactctaaaaggtctcaaaatggaaagtgcaagaaatagaaaagcatattctactgctacttctcaaaatctgatattaatatgtcctgataatggtaatatgttagtggctgaatatcaattttctcattaactttatcctgctttgaacagaaagaaaaaaataaacatagcttgcaaacattttatttcttcctgaattgactctcatgcataaactattattcagcagtggcctaaattatataatattttcacagaactgtaggtttatttctttcaagcatatctcgaggctttcctcattcagaaggcaagaacgtttcataattagcacacaaacatgcgtttcaacagaaa

SEQ ID NO: 408955 - DNA, 568 bp, Homo sapiens
gtttattctaggcagcgctaagaccagaacccagttcttcttgtctttagcctaaggtttctcaaccgtggcactattgacattgggggctggataaatctttgctgtagaggataggggagttatcttgtgcattgtaragtgtttggcagtatccttggcctcgactcactagatgccagtagctctctccagttgtggcaaccaaacgtgtctccaagcatcaccaaatgcttgtctcctggttcagaaccactgctctggtctaaaggaacttctatgctaagttacttgtgaatgcattttcacttttatcaccaatgacacaattgtaaaagaagcaactttttaaaatatcaattatcttttaactgaagacaaacaaggaagagattcttggggcttatgacaaaggaagaggcacgtagagtatggggaatatatgccggggagttctcatgggtgcaagcctgggagacaaattcatagcataccaacaggttgattaattaacttcattataatagctcctctttattgaatgtgctgagctagacacttggcaagt

SEQ ID NO: 408956 - DNA, 576 bp, Homo sapiens
agcacctgcagcatccttctctatagcacagctcctcatccactccacctgtggtacatgaagccctgaatgaaacggaccagttttcactccagtgctgtggccatctctctgtgtgacttcacctgtgtgagcgtctctgtcaacaaagtgagactctaattcakgtatcacttgggcaaaaagtgaagtaccacacactaacatccctaagtaaactctaaaaggtctcaaaatggaaagtgcaagaaatagaaaagcatattctactgctacttctcaaaatctgatattaatatgtcctgataatggtaatatgttagtggctgaatatcaattttctcattaactttatcctgctttgaacagaaagaaaaaaataaacatagcttgcaaacattttatttcttcctgaattgactctcatgcataaactattattcagcagtggcctaaattatataatattttcacagaactgtaggtttatttctttcaagcatatctcgaggctttcctcattcagaaggcaagaacgtttcataattagcacacaaacatgcgtttcaacagaaa

SEQ ID NO: 408957 - DNA, 575 bp, Homo sapiens
gagcaagtcacatcttatgtggatggcaggaggcaaagagagagcttgtgcagggcaattcccatttttaaaactattggatctcatgagacccattcactatcacaacaacagcacaggatgcctccaatattcagtcatctcccaccaggcccctcycacaacatgtgggaattatgggagctacaagatgagattttggtggggacacacagccaaaccatatcacttggaaaaattattttatatgtatcaaatatgttgaatagattatagaaaagaaaaagcaagataggaataaaatactagaaaataatagcatgttaagccagaggcaggttatcagaactgaggtgtttttaggttccttgcaatgttctgaatgagtgtggaaatattgataatttggggctttaagctagataggcatgttaaaattttaagggtaacaaggagaggaaaaaaacagtaaagaactttcaaatcagaagaaaattaggggaaagaagcataaaaagaaagaaaaaattaaaaacaccaagtaaaaggtaaaaataaaactaaatacatcagca

SEQ ID NO: 408958 - DNA, 575 bp, Homo sapiens
gagcaagtcacatcttatgtggatggcaggaggcaaagagagagcttgtgcagggcaattcccatttttaaaactattggatctcatgagacccattcactatcacaacaacagcacaggatgcctccaatattcagtcatctcccaccaggcccctcccacaacatgtgggaattatgggagctacaagatgagattttggtggggacacacagccaaaccatatcacttggaaaaattattttatatgtatcaaatatgttgaatagattatagaaaagaaaaagcaagataggaataaaatactagaaaataatagcatgttaagccagaggcaggttatcagaactgaggtgtttttaggttccttgcaatgttctgaatgagtgtggaaatattgataatttggggctttaagctagataggcatgttaaaattttaagggtaacaaggagaggaaaaaaacagtaaagaactttcaaatcagaagaaaattaggggaaagaagcataaaaagaragaaaaaattaaaaacaccaagtaaaaggtaaaaataaaactaaatacatcagca

SEQ ID NO: 408959 - DNA, 550 bp, Homo sapiens
atgcaacacacttaaaagaacacagaaaggtaacaagtacagaaaactatatatcaggaaaataccaaatgaaggaaagttggttttatgatatcagaaaaatacttcaagtccaaaagcattattagacttgaaaaggatcactatatagtggcaattttttaaagtttacttcaaaaatgtaacaattataaactacttcaatataataacatagtttcaaaatataccagggtaaaaatctatgatagacaactaagctgcctcccatctaacctccagagaaatgtgatttcaatcctagacccatttacttggaatctgtctccctccccaacttcaccccaccactccccaccctgtgctgtgcaggctgtgtttctgaggttcccatgtcagccagattttcactgtgtttgcccaatgggaagccatttttctctttccatacctaatgttgcatctctagcaacagsagcatctccacactggttccaaataatgcctattaatcctccccttggttccagtcatccaaactccccctttt

SEQ ID NO: 408960 - DNA, 550 bp, Homo sapiens
atgcaacacacttaaaagaacacagaaaggtaacaagtacagaaaactatatatcaggaaaataccaaatgaaggaaagttggttttatgatatcagaaaaatacttcaagtccaaaagcattattagacttgaaaaggatcactatatagtggcaattttttaaagtttacttcaaaaatgtaacaattataaactacttcaatataataacatagtttcaaaatataccagggtaaaaatctatgatagacaactaagctgcctcccatctaacctccagagaaatgtgatttcaatcctagacccatttacttggaatctgtctccctccccaacttcaccccaccactccccaccctgtgctgtgcaggctgtgtttctgaggttcccatgtcagccagattttcactgtgtttgcccaatgggaagccatttttctctttccatacctaatgttgcatctctagcaacagcrgcatctccacactggttccaaataatgcctattaatcctccccttggttccagtcatccaaactccccctttt

SEQ ID NO: 408961 - DNA, 537 bp, Homo sapiens
ccctcaagtccaatattcactactaattcaggaataacaaatagcaactcttcattcaagaaaatatctagggtcactttttgtcaatggggctgttaccctttgaagggggtggtgaactggccatctctgtgatgtgcatgtctagtgaatatccatctttgtccatataacaaacattaactaagagtctagttaacggacctgtgcctaccaagccctgggtactcaggatgggtccattcctggcccacaagatccaatcagtggcagtacctggaaggaagaagttccaacctaggaatgcatatctcagggactggatatcctggcyttatgtgtgacaggaggagaagccaaggaggaagaagatggcaggtcttgagagggtgcagttccagcagttgtcctgggtggatttttgccacagccttatgggttgtccttgacatagtcactggtatcacagcccctccacccaggtgcgttacttcttgtctgtgttccagattgtaatgctaaaaataatgctcatac

SEQ ID NO: 408962 - DNA, 623 bp, Homo sapiens
atttattctgtcaactttaagctgagaaaccctccccctgaggaggtttcataaatattcacatctattttcttctagaatttctaacagtttaggtttttaaatatttaactctttaaaccatctggaatttattttgatgttctgagtgaggttaaaagatgttcaaaaygcttttaaaaaataataaaacacttagcacctcatatttttagctgatttggcataaaccttaaagtccaagtggaacccccattaaacgctacaaatttcttaatagtgtttattattttctttctaatagcacaggatacaaaatacacctacttgccagtcactgctccaagtgagtttatcagcaagccacacacccaacacatggtctctcttttattattaagaaaagtaggtaatacataagaagcggggctcccaccaatcattagcaaatcctccaaagaaaatccagcacatatcggatgaagtcttttccctagtggacttgtgaaatttctctgactgaatcatttaagcaaagaaaactttcctcccttccaatcatggtctctccttcatagtatgtggtgctcattcaaaagagtacatgcagaagaaaccagaat

SEQ ID NO: 408963 - DNA, 543 bp, Homo sapiens
cgttgtttccctttaaaacataaaacagcagtattaatgccagtttttccrtattgtctgtttacctccactttgtaaacaagtgtattttgagaatgagctggttgaaggtcaccaggttgaaagtgacacaaccaagatctttgctaaggttttcagaaggactcaaagccagttcttttgactcctagactcctgtagcaatgtgggcatgggacacagagactagaagtgaggcattctgggttcccctcccaattttagccacagcagcacagttctgatgttgaatatctattggggttctataatatcttattgccaaaagtgtaccattgctgaaatagaactttggaaaccatagcactacactaggctaggaagatgagagtaacaaattctacctctccagaaagttatgatcaagagaaagcaattgtcattatcatcatcaaaatcggaatatatttgagctcttcctcttttagggcattatatttttccagctgctagagacaaaacggctttaagacatggcctcat

SEQ ID NO: 408964 - DNA, 618 bp, Homo sapiens
gtgtaaggcactgagaactttggaattcttctcacactagattatgcctatctccatttatctagtttattctaaccagtaaaatttttagcattgttctgayattaaatattctacaaaatcactcaaatggctaaattatacatcataatgtgcaagtggcataatttattcagccaattttttagtgttgcatatttatttccattttataagtttttataaacaatatggtaagaaatatattttagttaaatttttgctcatatttatgttattaagctgcaatcataaattgaggaaagtcgttgttcaaaagatacacaaaaccatcagttttcttatgtatagcgtcaaatcaccctcaaaaagactgttgacagcatcatcaatggcataaagaatacatgatttctctgtttggtataaatattctatttacctacctaccctacttttgccaaatttaaaggtgaaaatggtgccttatttttttaattgtaattccatgagtcaaatattttttcatagttgtataagttatttgtatttcttctcttgtgaattgtgttttcattattttctcattgatttcctaatatcatttattgaataata

SEQ ID NO: 408965 - DNA, 588 bp, Homo sapiens
ccctgtgctattccaggtgtgatctctgggctggcrgcatcagttcacctgggagcctgttaaaaatgcacattttcaggccccaccaagacttaactgaaccagaatctcttggcatagggccccataatctgtgttttaacaagctccccagttgatgtttaggtccaataaagttgaagatttggctggatcccacataatattttaaacatttttgcatatgggtctgatttttaaaaattaggtctttcataataatgcaactttccagcttctttttaaaaattccaccatctggaaataattttccagacttcacctccctcctggaatcaagcctgtcaatatctcccagtgataatctccgcatggtgatccagtgtcagctgccattttccatatgcaggcattattgtttttcctggagtggaaggaaggtgaatgtaaattacgtcttgtacgtagattactatccaaagtggtcaaatgaaagacccagagggccatgggattcagtgaaaaggaaaaagatttctgagcggaagtgatgtggcttgctttaatcctctcccttgttttcctagc

SEQ ID NO: 408966 - DNA, 506 bp, Homo sapiens
acaattccaactatcttacatttattgaggctcattttgtggtctattacatggtctatcttggggaaaattccatgtgccattgaatagaatgtatattctgcagttgtttgatggaatgttctgtatatatctgttaagtccatttgtcccagggtatagtttaaatctattgtttctttgttgactttctgtcttgatgacctgtccagtgctgtcagtggagtatttaagtccccattattactatgttgctgtctatctcatttctcaagtctattagcaattgttttataaatttgagagcttcagtgtagatgcaaatatgtttaggattgtgatattttcctgttggacaaggccttttaccaataatgtccctctttgtctttttaaactggtgttgctttacastttgttttgtctgatataaaaatagctattcctgctcacttttggtgttcacttgcatgaaatgtctttttccacccctttaccttaggttt

SEQ ID NO: 408967 - DNA, 520 bp, Homo sapiens
cttaagcaccatgggtggatataaacatgagtaaagtacacatcggtcactaactgcaatatggagaatgayaaaatccctgcaagtgacaaataaaagataagtcataccctgagggcaaggattgtgtctttcttgcttactgtctatccttagtacttagcatggtgcctggacatagcagactctcagtaagtatttaataaatgaataaaaataattaacatttattatgcacttactatgagccacgcaccctgccaaacctcctgtgaggtacttacaatgattaatctccactgtgtatcctacctaggatcacatgtgagtaaggggcatacaaaaccatgcagactgtactttactgggggtgagagcttcagcttgaggtcggcaaccagacagcatgctggctatagcaatctgggctccacatctgtaccccttggctttcataagaagaaaaggcatcttgttcaatggctctgttaagagaaaagaaattgctttcccagaattt

SEQ ID NO: 408968 - DNA, 548 bp, Homo sapiens
gggcaggaaccatgtctcttgttcactcctgtacctaccacagtgtctgacacatctcaagggtttaataaatatctgttgaatgaatataacatccagaatataaagctgcctaaaaactgcacacactattttttccattgtatcttttcttcaacaaggaaataatatggctcataggaatgaagaagaaacctaagctttattccagacagcttttcayggctttgattgctggaaagaggcaaaaccccaagtcacatgattttgtatttagaatattaattttccctaggtcatgcagaaacagcgatactttccttaatgaaatgctcttgtactagtttctatttgtatgcaaaacacatcattggtttaacatattgagacaatctcccctacccatgcacacccatatctgcctagccgaagaaggggaaaggcttctgatttattacacataaacaaaatgaataagataacattttattagttagaaaccattataaaaacagcaataaaatggggcagtacaagtggaagacgcc

SEQ ID NO: 408969 - DNA, 546 bp, Homo sapiens
tgggttttcttcccttgactgagaatcttcattttgtcttagaaaatccttatgacacattgcaaatactttttatacaaagacatcacaaggaaacacagaaacctcagagctttttcatttcccagagagctgtagtcagtttttagaaagtaaattgtgtcctctaccctcccctcaactccctccaggtcaatgtttcccctcccccatcctggtcagtttaatatgagtcactgcctgggctttgttgtatggaataaaataacatattctcctgggagtcagttcatgcaaaacactccctgctgagagtggaaatttacccataagacattcttccagcagcaagcccctggaggaaacctgaccagaatgtttaaagacttgaggagctcggtctccttaactccctcaaaatttctcagagaaaaaaamaaacacacacacacacatatttaaggtttataacacctggtgacaaaagacacagtgagatatgatgttatttagaaagaaaactgaaaatgagtagattatttccaa

SEQ ID NO: 408970 - DNA, 546 bp, Homo sapiens
tgggttttcttcccttgactgagaatcttcattttgtcttagaaaatccttatgacacattgcaaatactttttatacaaagacatcacaaggaaacacagaaacctcagagctttttcatttcccagagagctgtagtcagtttttagaaagtaaattgtgtcctctaccctcccctcaactccctccaggtcaatgtttcccctcccccatcctggtcagtttaatatgagtcactgcctgggctttgttgtatggaataaaataacatattctcctgggagtcagttcatgcaaaacactccctgctgagagtggaaatttacccataagacattcttccagcagcaagcccctggaggaaacctgaccagaatgtttaaagacttgaggagctcggtctccttaactccctcaaaatttctcagagaaaaaaaaamacacacacacacacatatttaaggtttataacacctggtgacaaaagacacagtgagatatgatgttatttagaaagaaaactgaaaatgagtagattatttccaa

SEQ ID NO: 408971 - DNA, 522 bp, Homo sapiens
ttagtcaggaacctgtcttcttcgcagatgtcaatattgccagagagtttccaagaatccacaaatcactattcacaaaccaatccccaccagctttgacaaatactgacattccttaacaaaccagagggagctgtgtggtgcttttcagtggatgaacgacaagtggggaggagttgattgtccacaggagaagcagtccgggccataaagcctaaccagtcattaatctccaggaaatgcccacagccaacgttgttattgctattataaaccaaaaattaaaagaaaaagagaaagcatgtcgctgttttttatgggtgatacagtttcaattggcacatattgagcatttctagacatttaattaagcaatcagattgcttgagtggtctcaacattcagtgccktttatagagttctttaatggctatgcatagaattattctggatacttcatggagcatagcaagtgaagttttatgtcttcccaagaatagagtgaacttttccactgctact

SEQ ID NO: 408972 - DNA, 522 bp, Homo sapiens
ttagtcaggaacctgtcttcttcgcagatgtcaatattgccagagagtttccaagaatccacaaatcactattcacaaaccaatccccaccagctttgacaaatactgacattccttaacaaaccagagggagctgtgtggtgcttttcagtggatgaacgacaagtggggaggagttgattgtccacaggagaagcagtccgggccataaagcctaaccagtcattaatctccaggaaatgcccacagccaacgttgttattgctattataaaccaaaaattaaaagaaaaagagaaagcatgtcgctgttttttatgggtgatacagtttcaattggcacatattgagcatttctagacatttaattaagcaatcagattgcttgagtggtctcaacattcagtgccgtttatagagttctttaatggctatgcatagaattattctgkatacttcatggagcatagcaagtgaagttttatgtcttcccaagaatagagtgaacttttccactgctact

SEQ ID NO: 408973 - DNA, 613 bp, Homo sapiens
atggttttcctggttggctgtaacctgatccctaaaaaccatatcttatttcatttttacaggcataagaggcaaaatcacataaaatttcatttttatgtataaagaaggactaattagtaactgtgagttatgaagggttacaaaaatttgtttttcataaactagaaatggcaacatttttagtttactgaaaacttgaactcattattccaccayaccgtctgggtacaaaatttaaagttttttcagtgaaagagtttatgtcaataattgaaatgtttgtgatttggaaggagcaaatttcttcatccatggggatcagcattgtgctaaactggttatagtttataggtgctggtatgattgactgttaaaataataaattactgtaagtttagggattctaatttagtttgttgaggactctttggtaaatcccagattgtgtagtgatatacatttctatcaagaatattcttggactatagctttccaggaattatgtattggcacatagtaaatgctcaaatatttgttgatgtgttgaataaatgtgctaagtgctttctgcatattgtcacattcaatcaaaaaacatttttaaatgagc

SEQ ID NO: 408974 - DNA, 593 bp, Homo sapiens
tgatgctgataagactttttgatgtggaatttagaaaacaaaagaatggagaataatctcaaagttgtaaggccagacctgccactttccttggaggagaagactggtagtagaagcaggtcagggaaggaggtggaatcaggggtttcagagatatgaagttggagattccaggtaggtatacaagtgaagagtttggattttatatgattcaggagtttgagggatgaatctgggtagagatataatttttagaatggttgcatgtagaaagtattgaaagctagaggatcaaatgagattacctaaggaatgtatgtagatacagatgagatgtggtccaaggactgaattcaatgcgagacgtgtcagcatgattatatttttctcttgatgtgttccaytatgtatgtgaaagctcaaaataggcagagcattggatgtagccagcattgggaatttgccaggtataacacaataaagggacagaagtaaggaaattgagggtatatgcaaggagatgaatgtaatggtggaccgtactatctagttagggagaactacgtatgtggataaagagaatgaaaaggaga

SEQ ID NO: 408975 - DNA, 688 bp, Homo sapiens
ggaaagcaaacaactgcagctctccccttccactggaagataacttatttgtcatgtccaccatctgccccacacagcagtaccttctttttccattttcaaaaatttttaaataatggccaagctcttaaaaacacggctatgtctgattattcagtggtgggatggagaaagagattatactgatcactgaggtcatcttttcctctcatgtgaccacagtgcttaatatgttcctctagggatgacttaaattatttccatctttgtaaatcctttgccatgctgtcttagcacattcaacacaatctggcrtcttgtagactctcttgctcatatgtctttttcctttcactggaatgtaatttctttaggaataggggccacattttattattttattcatctgtgcatccctccagctcaggagttcttcaatggagttacaattcttggggctgggaatttgaataggaagagaatacatctttattttcactaacctctaacagaaatttaacatgtccttcaatcatgatataggcaacaagccacagtagaatgagcagtgcctgtaactttgcaacaatagaaatcccagatgtttctatatcacattacaggttgttgcagacctcttaaagtatctaaagcttatcactgctctgacacgatggtagtcattaga

SEQ ID NO: 408976 - DNA, 583 bp, Homo sapiens
aggaggcagttgctaatgagactcagtgcacggtacttctagagaggtttagagtttgatggaggaggcaggcagtgacaccacagtgtggtcattgcagtcaatagtgattggagatgtgggagagtttaggatggaacaagggcaaactttaaaaagtaggagtcagaagggagagataatgtgggataggttagcactcagcaagtgagaattctacctctgaacccccccaggggagactggtacttgggggaagccccacataggcacaaaagttaagacttacagtctgataggtccgggtttgmatgttggcttactgcttggctactaatttgtgatgtgacttcagacacttactcaacctctttgagctgtaagtcctcacttgtaaacaagataaatacaaccttcctgcagagctgttgtaaagagcaggttaaggatgcccaggaagggcccagtcttcatggggccacatgtattcataggtgactttcctcactctggagtagcttgctgctcatttgcaaggggctctgatctgactggggtcttcattttctcctcctcaccatgg

SEQ ID NO: 408977 - DNA, 534 bp, Homo sapiens
atcggccaaattcctaggttccattatcggatagaaaaaacgaacactgaatttggagaaaaatgatctggagttgatcctagctttatcacttgcccattacgtttcttcgggaatgtacacctcctgagatttgattgcctccttggaactaatgattcttctgtgcttcataagattatcacgggtatgaagtgattttacgaagtcgagagtcattttaaaactttgatggattacacaagcaatagttgttactatataagaaatttccactcaaatctgtaactcctacctgacyttttcttttcaacaatggttatacattttttaaacatgcaatatagttattatccttctagcaacaaaatcagtgagggccagcatgtgaagttctaataaatcctgaactcagtgtgttctaatatgcactgaattagtttttgacacaccctctcccaataccgtgtgatgtaagggttgtgatcagtcttataaattttcatatcatacgcctaagtggtgacagaaatt

SEQ ID NO: 408978 - DNA, 613 bp, Homo sapiens
gcaggttggtttctcctgaagcctctcttcttagcttgcagatggccgacttcttgccatgtcctcagatggcctttcttctgtgcttatatccctggagtctattcrtcctcctctaaggatacgagtcttagtatattagggatctcaccctaatagcctcatcttaacctaatcatctctttaaataccttctctccaaaaatagtcacattctgaggcactgagagttggagggggcttcaacatatgaatgtgaaggaagaggttacaattcagcctgtaacaattctcaacatgtagttgacttcctggttaccatgcctggggtgagagctcctttaggggcctccccaaggtcctccctgcacccagctgtgctcctgtgcttctctttttattctcctggattcacgtcattgggccatgattgaattgctttgactatctgttcattttgttaggaacctatggtgagtgcagaagaagaccgggcatggagagttctgattcaacagatttgttttctgttatgaatccactttgagcacactctaaggaccaggcataaggttgttgtgctaggctctgggccaccactttaagagggtag

SEQ ID NO: 408979 - DNA, 613 bp, Homo sapiens
gcaggttggtttctcctgaagcctctcttcttagcttgcagatggccgacttcttgccatgtcctcagatggcctttcttctgtgcttatatccctggagtctattcatcctcctctaaggatacgagtcttagtatattagggatctcaccctaatagcctcatcttaacctaatcatctctttaaataccttctctccaaaaatagtcacattctgaggcactgagagttggagggggcttcaacatatgaatgtgaaggaagaggttacaattcagcctgtaacaattctcaacatgtagttgacttcctggttaccatgcctggggtgagagctcctttaggggcctccccaaggtcctccctgcacccagctgtgctcctgtgcttctctttttattctcctggattcacgtcattgggccatgattgaattgctttgactatctgttcattttgttaggaacctatggtgagtgcagaagaagaccgggcatggasagttctgattcaacagatttgttttctgttatgaatccactttgagcacactctaaggaccaggcataaggttgttgtgctaggctctgggccaccactttaagagggtag

SEQ ID NO: 408980 - DNA, 613 bp, Homo sapiens
gcaggttggtttctcctgaagcctctcttcttagcttgcagatggccgacttcttgccatgtcctcagatggcctttcttctgtgcttatatccctggagtctattcatcctcctctaaggatacgagtcttagtatattagggatctcaccctaatagcctcatcttaacctaatcatctctttaaataccttctctccaaaaatagtcacattctgaggcactgagagttggagggggcttcaacatatgaatgtgaaggaagaggttacaattcagcctgtaacaattctcaacatgtagttgacttcctggttaccatgcctggggtgagagctcctttaggggcctccccaaggtcctccctgcacccagctgtgctcctgtgcttctctttttattctcctggattcacgtcattgggccatgattgaattgctttgactatctgttcattttgttaggaacctatggtgagtgcagaagaagaccgggcatggagagytctgattcaacagatttgttttctgttatgaatccactttgagcacactctaaggaccaggcataaggttgttgtgctaggctctgggccaccactttaagagggtag

SEQ ID NO: 408981 - DNA, 562 bp, Homo sapiens
aattcctgggctcaagcgatcctgcctcggcctcccaaagttctgggattacaggcttgagccacaacacccggccacctgctccatcttgattttcccctgacccacatggatcccatgaatctaccataacaactacttctccctaggtggactgacctctctgaactttggcactcacattttacatagattacaaagcacctgcttagtctcctcctgtctagtcaaattaccaagaacaattttcaggttttggattttttttttaatcgagtttgtgagacccaatacaaataaattaacatgtacatcaggcactagagcaacagacagacacagaggagagaatgaatatatctgagtgtaggaccccaaagagggctgaactgatcctgacaccagcagggacccaggaaccttytaagccaacttttcccgaggaatattcctcagttacttcctttgtatccacatagcacttatgttagtggcatttagaccaagtcagaggattcctacaaattcagagggctttttttttccttttcttttgttggta

SEQ ID NO: 408982 - DNA, 598 bp, Homo sapiens
gaatataccagttatgttatctggttctsggatcttctttgttggcaattttttttaattgctaattcaatcattttacctgttataagtctattcagattttaatttattttccagtcagtttcagtagtgatgtctttctagaaagctgtccatttcatctaaattatggaatttgctggcctacagttcataatattctgtcacccaggctggagtgcagtggtgtggctaattttttgcattttcagtagagacagggtttcaccgtgttagccaggatggtctcgatctcctgacctcgtgatccacccacctcggcctcccaaagtgctgggcttacagacgtgagccactgcacccagcccatagtattctttttataatctttatttgtgtcgggttgatggtaatgtcctctctttcattcttgattgtagtaatttgagtcttcctgtttccaagttagtctgtgaaaggtttgccaactttgttgatcattcaaataataactttgttttcttgatttttctctactgtttttctatttatcttatttattttataactcttatttcctctcttatgcttgttttgg

SEQ ID NO: 408983 - DNA, 493 bp, Homo sapiens
atccattccctgaagtctaaatgggaggagggtattgttgcttgtgttaattaattatttcttgtgtcttagcttgggcctacccttgcataatctcagtgatgtggggcctggaaggctgaacactacatttccctgatgctttaacaagctgagttgcttttagatactgggaggtactcatagaagaatggaaagcagggagcgaggaggattctctcgctgtttttcagcttctgcaggccttcctctgaaggtcctcaggcattctgaaccccagccccagagtcccctttcagtatccaaagcattaggtatgaggttgtcccatatcaaaggtccaagtaccaaamaagaggcaccctcttcaagtaggtcctctcttcataggacatgtcctgtatttactgattgtgtcctgtatcctgtgttgactttgtcaggatgccctaaatgccctctattcatatctttcagtaaacaacaaaatatt

SEQ ID NO: 408984 - DNA, 571 bp, Homo sapiens
aagcaaaatggacagtctggaggaatcttctctggatgatcaaaatccaaacaagccaagaygggataaatagcaaaggggtgagctgtagttacttacaaattgaagggttctcaaaacctataagaaatactcttttaaggccaagaaaaactagttgtaccaaggagtttatgaggcatagagtttatattagtccctaaagacttgctttggaggtctctaatgtgacttagtatcttaatgctactgcattagcaccaaaagagaaaaagtttaaagttgctttatatatctgtatccccaattatacatgaatataatgaataatacatgtgcatgttaagaaaaatatatacacattcacagcacttctacatatttcattgccttatagaagagtcctcagagcatgagattgtatatggactggcttttttcaaaattaaaaatattcaatacaaaaacggttctaatgaaaacctagatgcagtactttataaaccagcaaaccttaaagaaatccaagtatgaaattgccagctgctaaagtagctgaaaaagtttttac

SEQ ID NO: 408985 - DNA, 619 bp, Homo sapiens
ttcaagctatagattttgtcttatggattgctataaaggagaaagagggaattcccatgcttctttaatttgttaagggtaactacaaatacaatttatttactttcattctaaaaaataacttgcatcattaaaaataaccaaaacattgaatatcttacccaggaaccactaacttctgtccattgtgaattcggtatgaacatcgataatcgtcaggaagcttgcagccaatctgcgcttccacagcatcgaggtcttcctctcgagcaccctctataaaggcacaaawaagagtgaattgtgaagaaacagccttaaatctaagaagaaatgcaatctatctgctaactaatgaaacaatcttggaatgagtgaattctgtccaaaatatatggctgaaatagaaggaaatgaattgaaaactaatttgaagcactgagaaagcaaatttcttagtttcctcccaacagggaaaacactggcacttagtaaaacatgcaaagtgggcaccaatgagatccacaataatgttttcacattataacacaaacctctaaatttcctaaatctaaaatattcatactgctttatttaaaataaaaaaaaaaacaacaaa

SEQ ID NO: 408986 - DNA, 619 bp, Homo sapiens
ttcaagctatagattttgtcttatggattgctataaaggagaaagagggaattcccatgcttctttaatttgttaagggtaactacaaatacaatttatttactttcattctaaaaaataacttgcatcattaaaaataaccaaaacattgaatatcttacccaggaaccactaacttctgtccattgtgaattcggtatgaacatcgataatcgtcaggaagcttgcagccaatctgcgcttccacagcatcgaggtcttcctctcgagcaccctctataaaggcacaaaaaagagtgaattgtgaagaaacagccttaaatctaagaagaaatgcaatctatctgctaactaatgaaacaatcttggaatgagtgaattctgtccaaaatatatggctgaaatagaaggaaatgaattgaaaactaatttgaagcactgagaaagcaaatttcttagtttcctcccaacagggaaaacactggcacttagtaaaacatgsaaagtgggcaccaatgagatccacaataatgttttcacattataacacaaacctctaaatttcctaaatctaaaatattcatactgctttatttaaaataaaaaaaaaaacaacaaa

SEQ ID NO: 408987 - DNA, 550 bp, Homo sapiens
caaacctgatgtgatttaagattctgttgatagctgttgcccaagtgagatctttgaatacctactttcaattaatataacttgtaatttctctctggaaaggatagagtcctaatcttaggttcattctttttacaaattaattatgtagggtagaatttacaggattgcaacactgttgtgttagaaatctttatatagtaagaaagttatttgcttctaatattcgatgttttggggcagctgataacttgtgtagccatgactattgagtcagaactgttacrattcaggcaccctctataggtggactttccagtagttgctttaatgaaaacgtggtttttgtggcaatacttttttcctttaagtaaaaaattttaaaaaacaaaaataaaaagtctgtgtatttagtagcatacatcttacagatcttgggaaaaaaccccaagtccctttgtttatgactaaataactttcttcctatatgtagaaatgagtattgtcctgataataagcataggacaactccttgacttgagattaactc

SEQ ID NO: 408988 - DNA, 514 bp, Homo sapiens
aaatactctttaaaaaatactaccttaaaatttgaaagttgaaagagttcagaatctaaatgttttccaatgctttatcttgtcattacttctcagtagctttcagaaaggtcattaacttatatgtaagaaactcagagtttacatttttttctttgatagctctaaaacctgaaaataaatatgcagggataaagttatattagttctgtttatataarttagtgtttaaagtcagatttctgggttaaatataatgataagaaacagcaaattcaggatattaaataaataatcagaattcctgcttaacacaaaatgaaattatgtatttagaaaggtcaaaatgcactttcagagggaattcactatatattttaaataaactaataagagattttacagttatatatttattttgttattaaaatgaaccatttatgtctataaatgacatttttaaactttagatattattttaccaaaaaaaatgtagaataattctcactcttcg

SEQ ID NO: 408989 - DNA, 514 bp, Homo sapiens
aaatactctttaaaaaatactaccttaaaatttgaaagttgaaagagttcagaatctaaatgttttccaatgctttatcttgtcattacttctcagtagctttcagaaaggtcattaacttatatgtaagaaactcagagtttacatttttttctttgatagctctaaaacctgaaaataaatatgcagggataaagttatattagttctgtttatataaattagtgtttaaagtyagatttctgggttaaatataatgataagaaacagcaaattcaggatattaaataaataatcagaattcctgcttaacacaaaatgaaattatgtatttagaaaggtcaaaatgcactttcagagggaattcactatatattttaaataaactaataagagattttacagttatatatttattttgttattaaaatgaaccatttatgtctataaatgacatttttaaactttagatattattttaccaaaaaaaatgtagaataattctcactcttcg

SEQ ID NO: 408990 - DNA, 585 bp, Homo sapiens
gctttatcttgtcattacttctcagtagctttcagaaaggtcattaacttatatgtaagaaactcagagtttacatttttttctttgatagctctaaaacctgaaaataaatatgcagggataaagttatattagttctgtttatataaattagtgtttaaagtcagatttctgggttaaatataatgataagaaacagcaaattcaggatattaaataaataatcagaattcctgcttaacacaaaatgaaattatgtatttagaaaggtcaaaatgcactttcagagggaattcactatatattttaaataaactaataagagattttacagttatatatttattttgttattaaaatgaaccatttatgtctataaatgacatttttaaactttagatattattttaccaaaaaaaatgtagaataattctcactcttyggtgctacttttttttttttttttttttgagagggagtctcgctctgtcacccaggctggagtgcagtggctagatcctggctcactgcaacttctgcctcctgggttcaagtgaatctcctgtctcagcctctcaagtagct

SEQ ID NO: 408991 - DNA, 585 bp, Homo sapiens
gctttatcttgtcattacttctcagtagctttcagaaaggtcattaacttatatgtaagaaactcagagtttacatttttttctttgatagctctaaaacctgaaaataaatatgcagggataaagttatattagttctgtttatataaattagtgtttaaagtcagatttctgggttaaatataatgataagaaacagcaaattcaggatattaaataaataatcagaattcctgcttaacacaaaatgaaattatgtatttagaaaggtcaaaatgcactttcagagggaattcactatatattttaaataaactaataagagattttacagttatatatttattttgttattaaaatgaaccatttatgtctataaatgacatttttaaactttagatattattttaccaaaaaaaatgtagaataattctcactcttcggtgctacttttttttttttttttttttgagagggagtctcgctctgtcacccaggctggagtgcagtggctagatcctggctcaytgcaacttctgcctcctgggttcaagtgaatctcctgtctcagcctctcaagtagct

SEQ ID NO: 408992 - DNA, 585 bp, Homo sapiens
agtgatttctccatttccaactgaggtacctggttcatctcattggcaatggttggacagtgggtgcagtycatggagggtaagccaaagcagggcgaggcattgcctcaccctggaagcacaaggggttaggatttttccctttcctagccaagggaagccgtgacagactgcacctggaaaaagggtacacttctgcccaaatactgtacttttcccatggtcttaggaaccggcagaccaggagattccctctcatgcggggctcagtgggtcccatgcctatggagctgtgctcactgctagcgcaacagtctgagatcgacctgcaaggctgcagcctggatgggggaggggagttggccattcctgaagattgagtaggtaaacaaagtggctgggaagctccaactgggcgaggcccaccacagctcagcctatatccttcatatacagccaaaccaagcttcaccagtgaaggagaaataaaatcctttacagagaagcaaatgctgagagattttgtcaccaccaggcctgccttacaagagctcctgaaggaagcactaaacatggaaaggaaca

SEQ ID NO: 408993 - DNA, 585 bp, Homo sapiens
agtgatttctccatttccaactgaggtacctggttcatctcattggcaatggttggacagtgggtgcagttcatggagggtaagccaaagcagggcgaggcattgcctcacccyggaagcacaaggggttaggatttttccctttcctagccaagggaagccgtgacagactgcacctggaaaaagggtacacttctgcccaaatactgtacttttcccatggtcttaggaaccggcagaccaggagattccctctcatgcggggctcagtgggtcccatgcctatggagctgtgctcactgctagcgcaacagtctgagatcgacctgcaaggctgcagcctggatgggggaggggagttggccattcctgaagattgagtaggtaaacaaagtggctgggaagctccaactgggcgaggcccaccacagctcagcctatatccttcatatacagccaaaccaagcttcaccagtgaaggagaaataaaatcctttacagagaagcaaatgctgagagattttgtcaccaccaggcctgccttacaagagctcctgaaggaagcactaaacatggaaaggaaca

SEQ ID NO: 408994 - DNA, 585 bp, Homo sapiens
agtgatttctccatttccaactgaggtacctggttcatctcattggcaatggttggacagtgggtgcagttcatggagggtaagccaaagcagggcgaggcattgcctcaccctggaagcacaaggggttaggatttttccctttcctagccaagggaagccgtgacagactgcacctggaaaaagggtacacttctgcccaaatactgtacttttcccatggtcttaggaaccggcagaccaggagattccctctcatgcggggctcagtgggtcccatgcctatggagctgtgctcactgctagcgcaacagtctgagatcgacctgcaaggctgcagcctggatgggggaggggagttggccattcctgaagattgagtaggtaaacaaagtggctgggaagctccaactgggygaggcccaccacagctcagcctatatccttcatatacagccaaaccaagcttcaccagtgaaggagaaataaaatcctttacagagaagcaaatgctgagagattttgtcaccaccaggcctgccttacaagagctcctgaaggaagcactaaacatggaaaggaaca

SEQ ID NO: 408995 - DNA, 585 bp, Homo sapiens
agtgatttctccatttccaactgaggtacctggttcatctcattggcaatggttggacagtgggtgcagttcatggagggtaagccaaagcagggcgaggcattgcctcaccctggaagcacaaggggttaggatttttccctttcctagccaagggaagccgtgacagactgcacctggaaaaagggtacacttctgcccaaatactgtacttttcccatggtcttaggaaccggcagaccaggagattccctctcatgcggggctcagtgggtcccatgcctatggagctgtgctcactgctagcgcaacagtctgagatcgacctgcaaggctgcagcctggatgggggaggggagttggccattcctgaagattgagtaggtaaacaaagtggctgggaagctccaactgggcgaggcccaccacagctcagcctatatccttcatatacagccaaaccaagcttcaccagtgaargagaaataaaatcctttacagagaagcaaatgctgagagattttgtcaccaccaggcctgccttacaagagctcctgaaggaagcactaaacatggaaaggaaca

SEQ ID NO: 408996 - DNA, 607 bp, Homo sapiens
aatagtacaatagtttagtactattattagtacacattcatttatcatgtttaataccattattactattactatgcttagtactattatttctgttagtttataatagtttaatactattattagtacgcatgccaattgctgtcttttcctttctgtgatgttatctgagacctaaaacacaaatatttattaaaacacgtaaacctcacttaattgaattggtattttgamcactggttctttgagatctagtggtaatttcttgtaaaagattcacaactgatgtaatttaagcttttaaatgtgacctttaaaatatcaacatgtatttctatcagtcacaaagcatatcagtaatgtgaacatggtgatgtaatataaatcatgatttaaagtaaaaatgataaccattaaaaggagtaaaataggactctaggaatgcagaagtagtaaatgcaaggacccaccacctctgagactgagaaaggtactaagaatttgggagaacaccatctgttcctacctctatccatctaaggctgagattctgaacttgtttgggtagtgtgtggctaccacaggaatacacagcctaccagaggca

SEQ ID NO: 408997 - DNA, 549 bp, Homo sapiens
attgtctgggggacagaagcacttacatcttttgttgtcctttcttcattatttcataactttttctccttctttctgctgttaattttcccctcaaggtatgacatcctctgatatttgaaaatgaatgacggtttcctccaagtttagtgtgactaggttgttaagattataaatgtgtattctcagacacttgaacattgttcacaaattgtatttttgaagtgttagcaatgtcctctttgagggattaatctctccttcaatagagatggggaggaggaggagcaacgcaagtgcaatatttgacagactttatcgcactcagtttttaaagcttgagaccccgagttrtctcttgagcaatttttcttctttttatctcatgtttctgctttgccagctagatcacacatttttagtgcatcgccagagttttctgtatgcatcctcaatgtattttcatccctattttcatgtcagttcatcttatttcaaggatttaaaggcaagagcctcagtaaaaacattttacttcacatatcttca

SEQ ID NO: 408998 - DNA, 602 bp, Homo sapiens
tggaatggagcaaactttaatgcttcattctgacatcttcctgagaaggtattgaaccgaaaattcagcagttgagagaattatttattattagaaataagtattaagttctttttatgacactagctccctcccaagtttgtaatacattaatctttttaatgtgcttttcagagttataccacaaaaaatractcattaattcagaccattctgaaaaactgaatgtgagaatttcagaaaagtcaaggctgaagttgggcttttcactatttgtggaaacaaatttagtttagtgaatatattgatatatgagtataaaataattttaagaaatttatttaagttaattgacatagtgaactaaaccaaagcactttaatatgaagttatttgaattctacacattttatttggtttgctgtattataactatgagcttagattttcaaatcatcactaaacaaaactttatgtttccatcaatacagttacagttttaaaaagtcatcaaactactttcatagagcatttaaaataattgttttttaaatatagcattttaaattttggtgttaccacatattttgaatttactttat

SEQ ID NO: 408999 - DNA, 486 bp, Homo sapiens
ttttcaacattttctcagatayaggacatataaacacatcatttcaactagtatttaatgtggatcacattctagtaaatccttattgatctgtgttgatgaatgtgttaggggataaacgaaggtggaaaatacttggatagctttttcaattctatcactggagaagcacctgactgaattaactctcctctttctaatttgctcttatctcatcataggttttagatgtcataggttttacctagtatctaacttacaatttatcattttattttttatctctgaatgcttcttatacagcctggatgatgctgaaaactaactatccagtgttttaatttccctgacttgcccttgggaagctcctcaaatttgttctcatattagttccatttagcacagccctgtgttttcaggacaagaaatatctttttgttatgtcctgctcatgaaggcaggtgctggatatttggaacttaacag

SEQ ID NO: 409000 - DNA, 626 bp, Homo sapiens
attgcaatttaaacaaaatatttgtgatgcatttggaattcatggaaaggttgaggttcatgagaagtaacatttcatgcaatttaagtcaggtagaatcagttttcaatgcttgtgactaaaataactacagataattttttaaagctacatattaaaaccaattccaaatttatgtgtttctaagatacaatataaaattttaaagtttgcatatgtcaagttccaattacatggaataaacaaatattcttttttattcttaggtagaggtccctaaaaagggagaaattacaaacattttttcctagaaatggagaggacataatatttaatgctattctgatggctttgcattgaaattggtcaagctractaggctgagattattttccaaaattttctttcaagttacagtgggacacaagagaaattcttgtgtgagttttggagggcagaggtgatactcatactacaaaggttgaaggcacaaagtttcaattggtcctcatgggttccaggacatgcttgtgggttctagtatgttcttgctttcccctactttaatctttctttctttccaaactgcctgattgtagacttcagttccacatcatactcagagt

SEQ ID NO: 409001 - DNA, 471 bp, Homo sapiens
gagagatgtggagttatcacaggatccagctggaagcctctgtggctggtggcaccttctacctgagtattgctcatgcccagtgggctcattccacttattctgcccagcaggctgttctcagctcatgcttctgtcctggatctcacacctgtcaattgtgagccaggcatggagaggcaaagtgtgtatgagtgagtgagcctagggtccagccaccacacacagtcaggcacgctggttcttgcaatgaggcaggcagctccaaatgccagcacaggtgctagctctgtgcaacgctgcagctggacaagatgtactgcacktggcttctgctacaggtacttgcatctggataaggggagtgtggtagcacccagaagcttgaagacaccaggaacttcagaagtccaaagagagtatcacagtcctggctcagggggcccttagatctgggctccccaaagagct

SEQ ID NO: 409002 - DNA, 489 bp, Homo sapiens
atgcacactaatattagatagtgtcatcaccactatagattaaattattaataaaaatatctactctatttacctcatgtcaatacatggagtataattatccacaattacattctatgcttattcatgtgaattgctttggtcaatcaaatrtcattaggttagtgcaaaagtaattgtgggttttgccattagttttgatggtaaaaacctcaattacttttccactaacctaatacctttgccatgtaagtagatgaatgagaaacactttcctggttgggttccctatgttgtgattcaatagtttccataacaagaatatggccaggttagccttactgtctcagaagaatgagagacttctggagcagagcagaagtagccaatggagcctgccttggaatagccgacctgaaatctagtgagctaaataaatgcttactgtttcctcatgctgatattatgtgattatttcttacatagcac

SEQ ID NO: 409003 - DNA, 634 bp, Homo sapiens
attgttgtgtaatgagtatagaatttcagtttttaaagatgaaaagagttctggaaattgggtgcacaataatgggaatgtagttagtactactgaactgaatgctaaaaacatggttaagatggtaaatttaatgtttcttttttatattttgccataattacatgtaattatgtgctgcataaaaaagtttcagtcaataacacactacctttacaatagtggtcttttaagattctaatagcatgttttttactatactttttctatgattagatgtgtttaggtacaaaagtacaattgtgttaaaattgtctacagcattcagtatagttacatgctttgctggtttgtagcctaagaacaataggattcattacatagcctaggtgtgtagtaggctatgtttgtatattatgacgttctcacaatgacagattgcctaatggttcacttctaataaagtattcctgtcattaagtgacaaatgtctctgtgtgcatacgtatatatatttaagatgtcccactcacctrgattagcagcataagccacccatctttcctgtggagagattatgctgtagctgggccctctccactccatgcccaggaagctctccatgtatttggag

SEQ ID NO: 409004 - DNA, 611 bp, Homo sapiens
gcttccccttttagatcacatagggtaacttcctcatgctggtgggagtgtagcagtgaggacaaccagaagtcattctcatagatatctttggccagcttctttactgaaacttgttttatcagcaaggtcttcatgacctgtatcttgtgctgacctcctatctcattctgtgatttagaatgccttaacccactggaaatgcagctcagtaggtcatagcctcattttacccagtccctattcaagatggagttgctctggttcaaaagyctctgacattatgaaactgagtcctcaacatgtgggatctgatgctatccccaggtagatagtgtcaggtaaattagagcatacctagctggtgtcctctgaagaactgattatttgttgctgggtagaaacccctgcaaaattcttggagatcagaagtcacagaagtcttctgtgttgattgttctgctaacagaggaaaaaccattttggttttttttttcctactgatgtatattttacatatgaaaggaagtaaatgattagagactagagatggaactttagtcaacagcctcctaggtggcccctagtgatccctaacccttgatatttat

SEQ ID NO: 409005 - DNA, 580 bp, Homo sapiens
atttaatcggctgccagcatggccagaataaaagcaggcaaaagaatgtggaaaggcttgactcatttagtattgtgtgctacatctttctcccatgctggatgytcctgccttgaacagcagactccaagtttttcagctttggaactcagactggctttcttgctcctcagcttgcaggcagcctattgtgagacctcacattgtgatcatgtgagtcaatactccttaataaactccccttacatacatatctatcctattagttctgtccttctagaggaccctgactaacacacatgtgtacaccatgttttgtttaccattcatctttcttgaaaatttgatgcttctaccttttgactattgtaaactatggcattgtgaacttgagcatgcaaataactcttcaagccttttcaaaaatagtgtagtggtttctgaaaaaaaattaaaaatataattgctattatggcctagctattcttcttctgaatatatatcccactgaggtatatatagttactgcactattttttattgccaccaatagcacacaagggttccactttctccatgt

SEQ ID NO: 409006 - DNA, 466 bp, Homo sapiens
tgctgcagcccctctcacccatgcctgagcagaggaggggcccctcccttgcttggaaccccttacctagtagagctgtgagagacatttgctttcttgtctctcatttcatctttttttagccttgtgacagtcccgtggggcagatagagcagggagcayatctctcttttacagaaggggaatccaaagcccaaagaggttcctcagcaaggactgtggtgtaggtctcatgactcccaggccagtgtgtctcactaagctggctccggcaggccctgggcagagtaagacggagagaagaggctttctggaaagtcaagaaggttcagggggatttgaaagggctctttcccaggatattctggaaccactggcaggcagattctttcagggggaagccagggaagtttacaacttgtccactgggtctagggagaaaggttaaagccagggtatggctcca

SEQ ID NO: 409007 - DNA, 466 bp, Homo sapiens
tgctgcagcccctctcacccatgcctgagcagaggaggggcccctcccttgcttggaaccccttacctagtagagctgtgagagacatttgctttcttgtctctcatttcatctttttttagccttgtgacagtcccgtggggcagatagagcagggagcatatctctcttttacagaaggggaatccaaagcccaaagaggttcctcagcaaggactgtggtgtaggtctcatgactcccaggccagtgtgtctcactaagctggctccggcaggccctgggcagagtaagrcggagagaagaggctttctggaaagtcaagaaggttcagggggatttgaaagggctctttcccaggatattctggaaccactggcaggcagattctttcagggggaagccagggaagtttacaacttgtccactgggtctagggagaaaggttaaagccagggtatggctcca

SEQ ID NO: 409008 - DNA, 504 bp, Homo sapiens
tcatcctgggagtcgtcctaacagcatttgacttttcatgcaacatgggacctcgtggcttgctcacctctcccagggtgaggccagtccccatgcggcttcttctctgaccctctcagcagcctcgtgagggaagcgggtcaaaggccatgagttccatgttaggaacgggaatgctaaggcacagaaggcccaggctggtcagagtggcygtggaagcggacctcaggcactcttttccaccatgttcttcctccatggatctctcagcctcctctgcagcctcctcagctctgctggtggctccgggccctgctgccctgagcagaagcctagtatagggggcgtagcccctgcctgccgacaggggtctgtgaagcccagcctccttctgcagccaccccaggggttcctgcccaaaccaggcccccaacaacaagtcagcttccagacagccattccccgtgggccaagggccttccccttccaccactgtcatggttg

SEQ ID NO: 409009 - DNA, 504 bp, Homo sapiens
tcatcctgggagtcgtcctaacagcatttgacttttcatgcaacatgggacctcgtggcttgctcacctctcccagggtgaggccagtccccatgcggcttcttctctgaccctctcagcagcctcgtgagggaagcgggtcaaaggccatgagttccatgttaggaacgggaatgctaaggcacagaaggcccaggctggtcagagtggccgtggaagcggacctcaggcactcttttccaccatgttcttcctccatggatctctcagcctcctctgcagcctcctcagctctgctggtggctccgggccctgctgccctgagcagaagcctagtatagggggcgtagcccctgcctgccgacaggggtctgtgaagcccagcctccttctgcagccaccccaggggttcctgcccaaaccaggcccccaacaacaagtcagcttccagacrgccattccccgtgggccaagggccttccccttccaccactgtcatggttg

SEQ ID NO: 409010 - DNA, 567 bp, Homo sapiens
ttaattgtaatggaatataatttgatattgaatactggcttgtttaataatagacttaacaatttcctgaaaatttagaagttgattcctttgaagccagtaggcactgcctgtagcccactactgcctgcccctgtgatatggtttggctgtgtccccacccaaatctcatcttgaattgtagtttccataatccccacatgtcacaagagggaccaggtggagataattgaatcatgggggcagttcccccatcctgttctcatgagagttagttctcacaagatcagatggttttataaggggctccccatttgttgggcacccatttttctctcctgccgccatgagaacaaggacatgtttgcttcrctttctgccatcactgtaagtttcctgagacttccccaaccctgcagaactattagtcaattaaacctctttcctttataaattacccagtttggggcagttcttcttagcagcgtgggaacagagtaatacactctgccagcttcctggggcctggggctttacccttcagggagagaggtcaggccaggcttg

SEQ ID NO: 409011 - DNA, 431 bp, Homo sapiens
ttaaaaaatgatgtgtgtacaaagaagaaagccacaaatcacccgaaatccaaacaccctgaattatccagggtcaacgtttggtgcattttattcagagtttctctttatgtgtatattcagaygagatcgggcgcgctcagggtggtatggctgtagaccttatgtgtatattcagataaaggactagatggaggagtgaatggacggatggatggatggatataaagacagacaaaagcaactttataaaaatataatcataccatatttgctattttaaaatgaaaagcatgaaattgaatcttaatagaacttaactgaagagaaagaaactgaagtaaaatggaagaataagtagatttgagataagtgttaattcatcacaagagatattagtacaaaaagatcccactataggagagagagag

SEQ ID NO: 409012 - DNA, 431 bp, Homo sapiens
ttaaaaaatgatgtgtgtacaaagaagaaagccacaaatcacccgaaatccaaacaccctgaattatccagggtcaacgtttggtgcattttattcagagtttctctttatgtgtatattcagacgagatcgggcgcgctcagggtggtatggctgtagaccttatgtgtatattcagataaaggactagatggaggagtgaatggacggatggatggatggatataaagacagacaaaagcaactttataaaaatataatcataccmtatttgctattttaaaatgaaaagcatgaaattgaatcttaatagaacttaactgaagagaaagaaactgaagtaaaatggaagaataagtagatttgagataagtgttaattcatcacaagagatattagtacaaaaagatcccactataggagagagagag

SEQ ID NO: 409013 - DNA, 573 bp, Homo sapiens
tgacctactgctcctaggccacaaacgtgtacagaacgtaactgtattcaatgctgtaggcaatcatagtacaatggtaagtatttgtgtatctaaacatagaaaagatacagtaaatacaatattataatcttatgggaccactgttgtatatccaagtggtcgttgaccaaaacggtgttatgtggtgcatgaatgtatacgaaatgctcagaacaggcaaatccatacagagaggagattgtggttgtcaagggctgtggggagggagaatggggagtgactgctcacgggtatggagtctccttcccagggtgatgaaaataytctggaattaggtagtggtgatgggtgtacaaccttgggaatatactaaaaacgactgaactgtgcactttagaaggatgaatgttatggaatgtgaattatatttcaataaataaaaatcaaacaccccccaccaaattaaacccaaggacagtataaaaggaaggaaatagaaaatagacaacagagaaatttaacaaagccaaaagttggttcttcaaaaaaaattaataaaatagataaacc

SEQ ID NO: 409014 - DNA, 510 bp, Homo sapiens
ctggtcccacaatcagggccaagatgccttctccctcagaaggggagtggggagccgggcaccggctggaatggctgctatgtgcacgtctctgtgcagctgtgaactgtgaggtgctgggggtcgggggttttgatgaagggagggaaggacatgtatcttgctagggaccttcatcccatttggcttggccccctgctatgacatgggttgagatttgaactattccctcagaaagattgccaccccagcctgcttgacatcgctggcacactgaagccctggaargggcagttcttaataaaaagtaccatgtatgaccctgcatttaaaaagcgatgatctgatgggctaaggaaaagctttttcttttatctaataaacaatattctagaggtgagtgtgggcccagtacaaagtcatacttcaaaccagctccctccagtgctggagggggttcgattcctgtggtctccctcgaggctgccatgtcaggtgtttgccgctaca

SEQ ID NO: 409015 - DNA, 559 bp, Homo sapiens
aagatcagcctggccaacatggtgaaacctcgtccctactaaaaatacaaaaattagccaggcatggtggcatgcacctataatcccagctactagggaggctgaggcaggagaatagctttaactcgggagatggaggttccagtgagccgagattgcgccactgcactccagcctgggcgacagaacaagactctgtctttttwaaaaaaaaaaaaaaaaaaaaaaaggtttccctaaaggaagagaatttaatgcaagaatgtgtatgatctagccaaataaagcaagagggaagaggtgagaaagaaaattttttgtccaaagggaacagtgtgttcaaatggctaggtgtaggtgaaaatatgacatttgtgtggaagtaaaagaagtccaatgtagatgttcagaatgaaacaggaaatgagaaagggcatttcctgagacaagatgggcaaagaaagaaagcaaaaggtgaagcaatttgccctgaatcacacagggctaaaggcagagcccattttaaacccttaccacttgactgcaatatactagccat

SEQ ID NO: 409016 - DNA, 552 bp, Homo sapiens
tctaaagacctctgaagtattcatcacmccaaacaataccgatttatctttctattgcttttactagtttggtctttcccttggggaaggaacgatgccatactcatctaggtaggccttcaaatgtttgctaagatgtggtttctgtccccctcaaaagatagatgttcagggaaactcaacttaaaaccacaattaaatatcaccttacccagccagactggccattactaaaaagtcaaaaaacaataatgttggcacagatgtggtgaaaacacttacacactgctggtgggaacgtgagatttctcaaagaactaaaagtagatctaccatttgatccagcaatcccactactgggtatctacccaaaggaaaagaagtcactgtatcaaaaagacacctgcatacatatggctatcgcagtacagttcacaattccaaagatatggaatcaacctaagtgcccatcaaccaatgagtggagaaagaaaatgtggtatgtatacaccatggcctactactcagccataaaaaaagaaaaaataatgc

SEQ ID NO: 409017 - DNA, 578 bp, Homo sapiens
ccagtattactctaatcctaaaaccagacaaagatattgcaagaaaagaaaactgtagaccaatatctcttatgaacataaatgcaaaaatccccaacaaaatattagcaaatcaaattcaacatttataaaatgaactatatgctgtgatcaagtgggatttatccaaggcatgtaagaaattaatccattacattaactggctaaagaaaaccaaatcatatgatcatatcaatagatgtttaaaaaacatttgacagaacccaacacccattcatgattwaaaaaaaaactctgtaactgtaaaacttggaatagagagaaacttcttcaacttgagaaagaacatctattaaaaaaatctacagctcagcaaagtgggggggggataaaaatgttctaaaattagattgtagtgatagttgcacaactctgtaaatacactaaaaaatactgaattgtaggttttaaatgggtgagtgttatagtatgtgaattgtgcttcagagtggtaaataataattttttcaaaagaggtaaggggacataacagcctaaatgcagtaaagagcgtcact

SEQ ID NO: 409018 - DNA, 578 bp, Homo sapiens
ccagtattactctaatcctaaaaccagacaaagatattgcaagaaaagaaaactgtagaccaatatctcttatgaacataaatgcaaaaatccccaacaaaatattagcaaatcaaattcaacatttataaaatgaactatatgctgtgatcaagtgggatttatccaaggcatgtaagaaattaatccattacattaactggctaaagaaaaccaaatcatatgatcatatcaatagatgtttaaaaaacatttgacagaacccaacacccattcatgatttaaaaaaaaactctgtaactgtaaaacttggaatagagagraacttcttcaacttgagaaagaacatctattaaaaaaatctacagctcagcaaagtgggggggggataaaaatgttctaaaattagattgtagtgatagttgcacaactctgtaaatacactaaaaaatactgaattgtaggttttaaatgggtgagtgttatagtatgtgaattgtgcttcagagtggtaaataataattttttcaaaagaggtaaggggacataacagcctaaatgcagtaaagagcgtcact

SEQ ID NO: 409019 - DNA, 570 bp, Homo sapiens
cacaactctgtaaatacactaaaaaatactgaattgtaggttttaaatgggtgagtgttayagtatgtgaattgtgcttcagagtggtaaataataattttttcaaaagaggtaaggggacataacagcctaaatgcagtaaagagcgtcactgaattaggtgttggtattgggatatgaatggaagattaaaagtattttatgaatgtgagaataaaactatagctaacgttttatgtaatggtgagaatctagaacttaagattcccagtaagatcaggaacaggataaggatgtcccgttttaccactccttttcacatcatactggaagttctagctaatgcagtaagataaaaaaatgaaaagaaatgtatactgattgggaaagaagaaataaaactcattttgtttgcaagatgatatgattgtctatgtagaagatccaaaagaattgacaaactggaaccaataagcacaaggtagcaggatacaaggttaatatgcaaaagtagattatattcctatataccagcagtgaacaagtggaattctaaaattaaaaacacaa

SEQ ID NO: 409020 - DNA, 570 bp, Homo sapiens
cacaactctgtaaatacactaaaaaatactgaattgtaggttttaaatgggtgagtgttatagtatgtgaattgtgcttcagagtggtaaataataattttttcaaaagaggtaaggggacataacagcctaaatgcagtaaagagcgtcactgaattaggtgttggtattgggatatgaatggaagattaaaagtattttatgaatgtgagaataaaactatagctaacgttttatgtaatggtgagaatctagaacttaagattcccagtaagatcaggaacaggataaggatgtcccgttttaccactccttttcacatcatactggaagttctagctaatgcartaagataaaaaaatgaaaagaaatgtatactgattgggaaagaagaaataaaactcattttgtttgcaagatgatatgattgtctatgtagaagatccaaaagaattgacaaactggaaccaataagcacaaggtagcaggatacaaggttaatatgcaaaagtagattatattcctatataccagcagtgaacaagtggaattctaaaattaaaaacacaa

SEQ ID NO: 409021 - DNA, 607 bp, Homo sapiens
taaatttgtcaatggacctagtagaaatgtctgattctaccataatatgttgtgtatcttgatggtgataactattttcactattgttgatatttttatgatacagcacaagtacctagcaaattagatacatctaacaaatgactgtttaattgtttaataaagtagataatttatctttatatttaataattttaaaagaaacatagaaattttttccagtttgagtgtccaattggttaacaatggtgaaaattagaatgtttaattttcccttattaaatacagtaaagttttatttataaattaataacwatatattgccaggtctcacttttgcataaaatacagctttatggcataatgggagtccaggatttattataacaaataagatgggatttcaatatacactgaaatagattacagatttttaatatggtcacaatttcattttatatatattttaatattgaaaaaggacctaatagggcatatggagtaatgctgtatttaaagaagtctgtatttttcataaacttgcaaaaggatagtgctactgaatacaacatttgacttttttgcttaacagctactacttacattt

SEQ ID NO: 409022 - DNA, 607 bp, Homo sapiens
taaatttgtcaatggacctagtagaaatgtctgattctaccataatatgttgtgtatcttgatggtgataactattttcactattgttgatatttttatgatacagcacaagtacctagcaaattagatacatctaacaaatgactgtttaattgtttaataaagtagataatttatctttatatttaataattttaaaagaaacatagaaattttttccagtttgagtgtccaattggttaacaatggtgaaaattagaatgtttaattttcccttattaaatacagtaaagttttatttataaattaataactatatattgccaggtctcacttttgcataaaatacagctttatggcataatgggagtccaggatttattataacaaataagatgggatttcaatatacactgaaatagattacagatttttaatatggtcacaatttcattttatatatattttaatattgaaaaaggacctaatagggcatatggagtaatgctgtatttaaagaagtcygtatttttcataaacttgcaaaaggatagtgctactgaatacaacatttgacttttttgcttaacagctactacttacattt

SEQ ID NO: 409023 - DNA, 609 bp, Homo sapiens
ttcccatttagcagaattcagccaaccatggatcaaaactattcaggaaaaacaaaaaacagatggttgtgtctgtactgaatacgtgcatttttctaatcgttccctaaacactatagtataacacatatttacattgtattagttattataaataatctagaaatgatttaatgtatgtaaatgggaagatgtgtgtaagttacatgtaaatacaacaccattttatctatgcggcttgatgatccatggattttggtatctgcagcgggtcctggaaccaaccaattcccccatggataccaaaggatgactatattttaatgtctatgtcctgttgccctatagctgaataaaaggggcctatctcttacacctttatctttctcacttccaatcagggcacattaacaccgtgccttgtgtttaacagttattagtaaaataaatgattttagactaaggaggtatttgataatggcttaagggataaccacaccaaaaatatatctgtatttcartaaaggatttttctggaagtctgaaaagcctctacaactaaaggcgtgaactaaaaattcagggatggctgggtgcagtggtcatgcc

SEQ ID NO: 409024 - DNA, 556 bp, Homo sapiens
aaaagtattaaaaaactgtaactataaaaatgttaatgagtatacaacataaaaggataacattgtgacatcaataacaagggaagagtaagaaagttacatttttatatgcaattgaagttagattgttatacgcttaagacagactgttttaactataaggtgtttttatatataagccccatggtaatcacatgtgaggactgacacragaaaatgagaggggagtcaaagcacaactacaaaaaataaagaaagaaagaaagaaacacagagaaaaacaggaggaaaggaaaagagggacaacagcactacaagaaagacagcaagcccttctctatcagtaatcactttaaacgtaaatggattaaactcctcaatcaaaatacatggagtggctgaatggatttaaaaaaaaaaagaaagatccaactgcatgttgtctccaagattcacctcagatttaagaacagaagctgaaagtgaaagaatggaaaaatatatcccatgcaaatggcagcctaaagagtataagtgaccatacttagataaaata

SEQ ID NO: 409025 - DNA, 621 bp, Homo sapiens
aaactatgtaacactacacagacattgaaagtgacattgtggaactacacatatttacaggaagaaggctcataatatattaaattttaaaagcaattataaaatgatatatagtaagcctttggtatccatgggttctgcatctgtagacttaagcaactgcaggttgaaaatatttgaaaaagaaagtgtgtgcattgaacatgtacagacttattttcctgtgtttctgtattatttagggaatagtgactattattagatataagcaatctagagatgatttaaagtatatgggaaagccggatgcggtggctcatgcctgtaatyccagcactttgggaggtcgaggcgggcagatcacttgagctcaggagttagagactagcctggcgaacatagtgaaacaccatctctactaaaaatacaaaaaaaattagccgggtgtggtggtgtgtgcctgtaatcccagctactcaggaggctgaggcaggagaatcacttgaacatgggaggtggaggctgcagtgagctgagatcatgccactgcactccaacctgggtgacagagtgagaccccatcttgaaaaataaaaataaaataaaataaatatatgggag

SEQ ID NO: 409026 - DNA, 566 bp, Homo sapiens
atgcaagatattgctaatgaagtcagtcaattccaagaccaatgctagaatcagcattccaagtccatcccccattctttgtgagacaatatgtatacttgcattttgaagttttatcttgataatggcattttactgatttttcagaaaataatctccaaaaatggcacttgaatatatatccaagtttatttctttacaatgcccaacttgccaaaacctggcaattccattckttgtgctgctaccttctttcagggttgttacctatgatttaactcctaactacatttgtgtctccacaaatgtatcttcagtgaattctacatcttgttgtctgcttagtttttctaaagcaggtgtttacatacacacttaaagacaactgagcaccagcaagttccttcttgagaaacgtatttacacatccaatttcaactacttttatttgttgcattagaatggagacttgggtttgttgccaccatttcagttggttattatgaaatattaagtttaacagatgtgggggaagtgtacataacagctggtagaagacactaaat

SEQ ID NO: 409027 - DNA, 566 bp, Homo sapiens
atgcaagatattgctaatgaagtcagtcaattccaagaccaatgctagaatcagcattccaagtccatcccccattctttgtgagacaatatgtatacttgcattttgaagttttatcttgataatggcattttactgatttttcagaaaataatctccaaaaatggcacttgaatatatatccaagtttatttctttacaatgcccaacttgccaaaacctggcaattccattctttgtgctgctaccttctttcagggttgttacctatgatttaactcctaactacatttgtgtctccacaaatgtatcttcagtgaattctacatcttgttgtctgcttagtttttctaaagcaggtgtttacatacacacttaaagacaactgagcaccagcaagttccttcttgagaaacrtatttacacatccaatttcaactacttttatttgttgcattagaatggagacttgggtttgttgccaccatttcagttggttattatgaaatattaagtttaacagatgtgggggaagtgtacataacagctggtagaagacactaaat

SEQ ID NO: 409028 - DNA, 599 bp, Homo sapiens
gtgttaggtattcattttagtctttgcagtctgggcttgtttgtacccatcatttctggaaaggctttttagttattcaaagaaactttcgtgttatgatctaagtctttggtcactgaagccataagccataytaaatttaggggaagcccaagcccagtagcactgtggctactgaagattcagaggggtagccttttagtgctcttgggtaaaattcaggaaaattctctggattaccaggcagagactcttattctcttcctttactttccccatcaaaagtggagtctctctgtgctgagctttctggagctgggggaggggtgacatagatacttctgtggctacccccaatggcactgcactgggtcaaatctcaagccaacacagcactgggtctcacccatggcccaaagtaaacagtacctggctgccatctatgttcactcaagggccaagggtctccaatcagcaggtggcaaatccagacagagttatatccttcttttcagggcagcaagctccccctggccctgggtgggtctgaagatgctgtgtgggatccagtgcctcaatttgggaaacttaggaatcta

SEQ ID NO: 409029 - DNA, 599 bp, Homo sapiens
gtgttaggtattcattttagtctttgcagtctgggcttgtttgtacccatcatttctggaaaggctttttagttattcaaagaaactttcgtgttatgatctaagtctttggtcactgaagccataagccatattaaatttaggggaagcccaagcccagtagcactgtggctactgaagattcagaggggtagccttttagtgctcttgggtaaaattcaggaaaattctctggattaccaggcagagactcttattctcttcctttactttccccatcaaaagtggagtctctctgtgctgagctttctggagctgggggaggggtgacatagatacttctgtggctacccccaatggcactgcactgggtcaaatctcaagccaacacagcactgggtctcacccatggcccawagtaaacagtacctggctgccatctatgttcactcaagggccaagggtctccaatcagcaggtggcaaatccagacagagttatatccttcttttcagggcagcaagctccccctggccctgggtgggtctgaagatgctgtgtgggatccagtgcctcaatttgggaaacttaggaatcta

SEQ ID NO: 409030 - DNA, 459 bp, Homo sapiens
aggctgcttctttaagtgggaccctgatccattcctcttcactgggcaggacctccttgtgggggcttcagccactctagccagggttctacggacagagccctgatctcttcctgggatgaagctcctggagggaggggtgaccaccataccacttgtttggtagactcagctgttccagcctgcaggctttggagaacacaaatggttcagatgaggaagggtcggtcccytacattgcagcacaactgctcttcaaaaaagcagccagactgattctttaagcaggtccctgatctcatttctgctgattgggcaatacctcccaatagggctctccagccacctcttataggtgcacttgggctggcagcaggttggtggctccatgagacagagcttccagaggaaggagtgggctactatctttgctgtttcacagacttcactggtgatact

SEQ ID NO: 409031 - DNA, 563 bp, Homo sapiens
atgacataaaactcaaaaaccayaaagataaagattgataaatttactttcatctatgttttaaattgcaaagattgaacatattctaagacaaatgacaaaatatgtaataggaagatatttgcaactaaagtaacaaataaagagccagttttcctaaaatataaaacacttccacaaattaattaaaaaaagaaggacactaacccaattggaataaacagacaaagaatatgaattgggaggtcacaaaaagggaaatataaataatactttaatataaaagtgtttgtcatcatttacatggtatttatattacatttatattatatgacagatttttcacttagcaaagaacaaaattttgatgatgcactgtgatggtgagaatgtggggaaacagatactgtcattacattgatggtgtaagtgtaaattatcctatggaggacagcttggcaatatccatcaaaattacaaatgacatatatcctttgatccaacaattccacttgtaggaatgtatcctatacatgagggaattgatatggagttatctatct

SEQ ID NO: 409032 - DNA, 594 bp, Homo sapiens
aagttttaattgttccccaaaataaatgatattggaaggaaatggggagaacacactaataatcattaaaacagcaatcaatcattgtaaagtgtggcccttatcaacaggaaraaggtagttcttgggagaactacggcaaattagacacagacaagtcattagatgatattaaacaattattgttaattgtgttgggtgtgataatgttgttttgtgtgtgttttaagaaaaatccctttttcataggtatgaagtctttataggagaaataatataatgcatgaatttgctttaaaatgccctagtatctcctttctattaaaagaagaaaaaaagagttttgtaatgggtagagattaaacaagaacagcggactggttataactgttgtagttgcgtggactaaatatgagaactcattttattatttttttgtatgacatttcttctaatgaacaatttaaaataattttgtttacaaaatgcttttacgtctcatgttttttgtttgtaattttaacagctaattcccatacttataaaatatttaaaaccatagcaaatattaggatgtgttatcccaattagttt

SEQ ID NO: 409033 - DNA, 583 bp, Homo sapiens
aaatcaaacaagttggttaattccaagataaatgagggtataggcactaggtaagaccaaaagggagaaattggccaaaacaaagaggctacaggtsccatgcaagtctgaaacctggcagggcagttattaaatcttagagctccaaaataatctcctttgactccatgtctcacatccaagtcacattgacacaaagggtgggcagcttcacccctgcagctctgcagggtacagccttcgtgactgctttcatgggctggtgttgagtgcctgcagctttttcaggtgcacattgcaagatgtcagtggatctactattctgggatctgaaggatgctagccctcttctcatagctccactaggcaggccccagtgggaaattgtgtgggggcttcaaccctctatttcccctctgcagtgccctagaagaggttttccacaagggctctgctgcagcagacttctgcctgtacatctaggcatttccatacatcctctgaaatctaggcagaggttcccacacatcacctcttgccttttgcacacctgcaggcccagcaccacgtggaagctgccaag

SEQ ID NO: 409034 - DNA, 583 bp, Homo sapiens
aaatcaaacaagttggttaattccaagataaatgagggtataggcactaggtaagaccaaaagggagaaattggccaaaacaaagaggctacaggtgccatgcaagtctgaaacctggcagggcagttattaaatcttagagctccaaaataatctcctttgactccatgtctcacatccaagtcacattgacacaaagggtgggcagcttcacccctgcagctctgcagggtacagccttcgtgactgctttcatgggctggtgttgagtgcctgcagctttttcaggtgcacattgcaagatgtcagtggatctactattctgggatctgaaggatgctagccctcttctcayagctccactaggcaggccccagtgggaaattgtgtgggggcttcaaccctctatttcccctctgcagtgccctagaagaggttttccacaagggctctgctgcagcagacttctgcctgtacatctaggcatttccatacatcctctgaaatctaggcagaggttcccacacatcacctcttgccttttgcacacctgcaggcccagcaccacgtggaagctgccaag

SEQ ID NO: 409035 - DNA, 563 bp, Homo sapiens
tctcaatttcttcagcagtaaagtgattaccataatccattttagttttatctctgatacagttaatagtacatgtgcctgaaaataacttttcattagagggcttaaaagacttcgttggttttcaatgctgaattccttattttgccaaatgagtaaaattcataattttttttattaacattcayttttttgcatatttactgacaaaaaattgactgcatcactttggaaaactgaaaagactattaatggaaagatggaaatgtattcattcaataatgctgggcactgtgctcagccctgaggaaacagtagtgtataagaacaatctctgcttgctaggatgtacagcatagtggagaaggcaggtctgcaaataaacaattacactcttgtgagataacactgttgaggagtgcatgcaaccactatgtaatcacgaataaagcatgcagagtaaaggaaaacatcatagtggagctgacacttgaacaaaggcctgaagcaaacatatgtatttcctagcacttgaaggagaagaaggaagggagcaagttgca

SEQ ID NO: 409036 - DNA, 618 bp, Homo sapiens
aacatctgaaaatttttcagagttaatcacagacaacaaatcaataattcaaacagcttaaagaataccaaataggatgaatacaaaatattagtcaactaattaatttaaaccactaaaacacaatatataacatatttataactactgaaaataaaaagcaaagagatcttcaaagcaaccatagatgaaagaaataagtgggagaaaacagaaaaagagcaagacaacaagcaagagttatgtagcttaggaatgacagaaacaaaggtaagaattacagcagatttctcattagaaccatgcaagccaaaagacagtggtatgmcatctttcataagctgaaagaaataaactgtcaaaccagaattctatacttactgaatatctctttcaaaaataaagaagaaataaagatgttatcagacaaacaaaaactaatgagcattaccaacagagctagtctacaagaaaaatgttaaaggaatttcttcaagcaggaagaatatactatcagactgaaacatggatatacacatggaaataaggaccactagaagtggaatcagtgaagattttcttttaattgctctaaaagataactgactttaagcaaaa

SEQ ID NO: 409037 - DNA, 521 bp, Homo sapiens
ataactgactttaagcaaaaattgaaggaatttagtatgtgtttatagcatargtaaaagttaaaggtatggcaacaataacccaaagtggaggagggaataattgcagatatacttttgtaggttcctataattacaacttaaagtgatactagtattatttgaagatagactctgattaattaaagatgtatattgttacccttagagcaattactaaaaaaaaaattaaagtacaaatagtaagtcgtagagtagatgagatggtgtattagtttgttttcattctgctaataaagatatatccaagactgggtaatttataagggaaagaggtttaattgactcacagttcagcatagctggcaaggcctcaggaaacttacaatcatggcagaagggaaagcaaacacatccttcttcaccttatggcagaaaggagaagaatgagcaaatgtggggaagtcccgttataaaaccatcaggtcttgtgagaactcattgactatcatgagaacagc

SEQ ID NO: 409038 - DNA, 432 bp, Homo sapiens
cacaacacttggggattatgggaactacaattcaagatgagatttgggtgggggacacagttaaaccatatcagatkgtatcataaaagatattcaattattacatgagaaggcagaaaagaggaaagaagaagcaaagaaccaatggaataaaagaaaacagcaaaatgttatattttttattaactacaacattaatctcattaaatgtgagtgatctaaatacaccagttaaaagatagaaattttcaatacttaataactatatattgtatatataaaagttactaagagagcagaaagtgttaggccacatttataagtacacaaggttatacatatgtaattagcttgatttggccattccacaatgtttacttatatcaaaatgtcattttgcaaatcataaatatatactatttttgtcaatta

SEQ ID NO: 409039 - DNA, 656 bp, Homo sapiens
gtttcttaataaggacacactaggctggagtttacctttacatttagcgttagaattgcacactggttatcctataaatgtatcaagaaggtaattttaaaatataaaaccttttaacagctttagcttatgttggaaacatgtgatctcaatgaaaagtgtaaaaaagcagcctgccagatgttttgactacatggtgtatcacatcttaatgtttccaggattggcagtggtaatactagagattcaaaattgtagagttaacaagttgtgttttaaccttttcttattctttactttaaaaaatgttttataataaaaacatttatatgatgaaatttttactttcaaacacatgtttttaggaggaatatttataaaccacaaataaaatctacaaagactatattgtgtttcttatagtaagtatataaactattggccagtatgcstggggaatgagattttcagattaatcaagtattctgctaatgcataccacaactattataactttcaagtgttaaaagctcaacactacatccataccaaacatgatttgcatgtgaatatacaggaagacacttcagaatcttgctggagcttgtgtcataattttgatcaacagcttaaatgtacatgaatttgcttcaaca

SEQ ID NO: 409040 - DNA, 595 bp, Homo sapiens
tagccatatgtatgagaattaatagactttatctgcaaaatcattaagttgcaaaaacaaaggcaccacaggagttttaaatyagactatttttaagtcttcctgagaacacctgcccctacttcaaactgctaatttacaaagcactttattttaaagtctcttggatacagaaaagagaagaattagaatgcatagcaaaagattgcaaacatttctgtttcactcttgttttaaggtatcagtcaagtaacattatgtttcaaattaactccaaagctggcagaaatgttagtaaatctgcttatccctggtccactttaccaaatatggattcagattttaatcatacacattttggagtgtttggaatgtgtttcttcttatctgtgattagagtcaggtacacacaggaagatgatagtatctctgataaggaaacgttattttgtccataggctaaataatattctttgggggaagagatatgagtttaaaatgtaagccaacaagtatattatgaatcaatctgtcataggtatttttttgttggggggagcagatgcccattcagatcatcatactattgaataac

SEQ ID NO: 409041 - DNA, 595 bp, Homo sapiens
tagccatatgtatgagaattaatagactttatctgcaaaatcattaagttgcaaaaacaaaggcaccacaggagttttaaattagactatttttaagtcttcctgagaacacctgcccctacttcaaactgctaatttacaaagcactttattttaaagtctcttggatacagaaaagagaagaattagaatgcatagcaaaagattgcaaacatttctgtttcactcttgttttaaggtatcagtcaagtaacattatgtttcaaattaactccaaagctggcagaaatgttagtaaatctgcttawccctggtccactttaccaaatatggattcagattttaatcatacacattttggagtgtttggaatgtgtttcttcttatctgtgattagagtcaggtacacacaggaagatgatagtatctctgataaggaaacgttattttgtccataggctaaataatattctttgggggaagagatatgagtttaaaatgtaagccaacaagtatattatgaatcaatctgtcataggtatttttttgttggggggagcagatgcccattcagatcatcatactattgaataac

SEQ ID NO: 409042 - DNA, 595 bp, Homo sapiens
tagccatatgtatgagaattaatagactttatctgcaaaatcattaagttgcaaaaacaaaggcaccacaggagttttaaattagactatttttaagtcttcctgagaacacctgcccctacttcaaactgctaatttacaaagcactttattttaaagtctcttggatacagaaaagagaagaattagaatgcatagcaaaagattgcaaacatttctgtttcactcttgttttaaggtatcagtcaagtaacattatgtttcaaattaactccaaagctggcagaaatgttagtaaatctgcttatccctggtccactttaccaaatatggattcagattttaatcatacacattttggagtgtttggaatgtgtttcttcttatctgtgattagagtcaggtacacacaggaagatgatagtatctctgataaggaaacgttattttgtccataggctaaataatattctttgggggaagagatatgagtttaaaatgtaagccaacaagtataytatgaatcaatctgtcataggtatttttttgttggggggagcagatgcccattcagatcatcatactattgaataac

SEQ ID NO: 409043 - DNA, 595 bp, Homo sapiens
tagccatatgtatgagaattaatagactttatctgcaaaatcattaagttgcaaaaacaaaggcaccacaggagttttaaattagactatttttaagtcttcctgagaacacctgcccctacttcaaactgctaatttacaaagcactttattttaaagtctcttggatacagaaaagagaagaattagaatgcatagcaaaagattgcaaacatttctgtttcactcttgttttaaggtatcagtcaagtaacattatgtttcaaattaactccaaagctggcagaaatgttagtaaatctgcttatccctggtccactttaccaaatatggattcagattttaatcatacacattttggagtgtttggaatgtgtttcttcttatctgtgattagagtcaggtacacacaggaagatgatagtatctctgataaggaaacgttattttgtccataggctaaataatattctttgggggaagagatatgagtttaaaatgtaagccaacaagtatattatraatcaatctgtcataggtatttttttgttggggggagcagatgcccattcagatcatcatactattgaataac

SEQ ID NO: 409044 - DNA, 631 bp, Homo sapiens
ttgtggtgatagacatatatatgtatgtgtatatgcaaataaatcagagggaaatgcatcctttacatcacaaataaagtgaaaatgaatattattggacctggaccacaatttctgccccagtcaaggtataaaataaatcaacgttaccccmctcttttacctggaactgtcccagtttttctcttaggggcttgtctggatgttgatggccgtgtcctatgcatgtttcttttactaacaccagctgtatattttccaggatcatgctgtttggactatcagacaggaattgaggagagagctacaatcattgtggaaaatattcggatagtgcttacatgatacatgaccaataataaagaaagcaaaattctctctgtctcattttttaatcataaaagccacattatggtttatccagacagaagatgcaggcttgtaatggtaggccctaggaaaccacctcaaaatgaaatgctgacctgcctatatgttacaaatctgggtgagatttggcctttacccatcacataaatgctcagttgctgaatgatatgcaagacaagtcattatttcctaaaaggaactcttccaacttatattgagagaagaattatggccttttgca

SEQ ID NO: 409045 - DNA, 580 bp, Homo sapiens
ataaagtaatcattttaagatgacaaggcaaagcagcataaaacagggaattttttcaggcatcttcatttttctctttaacttttatcttaataactttaaaccacttttgcatgaattataaatgctccttgctataaattacagaaacagaagctttcccttttaaattgagaacgtgattgtattgtcgtaaactaggaattccctgagtagacaatagccaacaagacatacttattttcagaaaaaaggatttaaaatccgttgctcccaagccaaagtcatctttcttggcagacatcctccatcacattaactcattaagatactcgcagctagtttatgtggaaggatttcattagcagttcaattataggactatggttttaacactttatctgaaaaatgactaggstgaagtcatatagccctgtcctgtggtgaagtcacagacatatacaggtactagagaggtaaggtaattgagtagagcagcctgggtggaaaatgtcgtcagttggggtagcatagaacctatctcaagaactctgaataagcaccgccatgctggaacata

SEQ ID NO: 409046 - DNA, 486 bp, Homo sapiens
agttcccagtttgggcaagatatatttctttattcatttcaaaaatgtttaacaagacattcatgtccagctattactacaatattggttttggactttcccttctgacataaaaaactatagaagtgtacaaattagacaaggtaactctttattggcactggttaacacgcaatgcactgagaagtcaaaaattttaaagacacactgaagtactatacaatactgcaaaccattataaaataataactcagagamgaatgtaaaggataaagggaattgaaatctgatcatttgattatttaatctcagtttttgttgttccttacatttctttttgagtcttttccttgattgtagtatgtccattattcagagacaagttattactaaaattctttttttcagctaaaattctctctgtctccattttgtttttgttaagtttaaatgggtatctattgtttagatgtacagtatggtgtc

SEQ ID NO: 409047 - DNA, 486 bp, Homo sapiens
agttcccagtttgggcaagatatatttctttattcatttcaaaaatgtttaacaagacattcatgtccagctattactacaatattggttttggactttcccttctgacataaaaaactatagaagtgtacaaattagacaaggtaactctttattggcactggttaacacgcaatgcactgagaagtcaaaaattttaaagacacactgaagtactatacaatactgcaaaccattataaaataataactcagagacgaatgtaaaggataaagggaattgaaatctgatcatttgattatttaatctcagtttttgttgttccttacatttctttttgagtcttttccttgattgtagtatgtcyattattcagagacaagttattactaaaattctttttttcagctaaaattctctctgtctccattttgtttttgttaagtttaaatgggtatctattgtttagatgtacagtatggtgtc

SEQ ID NO: 409048 - DNA, 557 bp, Homo sapiens
gagttttagctcagatccaacgtacagtgggtctggtgggtccggtgggtccagtgggtccctggactcattctttggtcattttcccagtracagaatgcataattggcatagacatacttagcagctgacagatcccccacattggctacctgactggcagggtgagggctattatgccttcagtgccttgccagctgaaggcaaattgcttctggtgggccttatggacaggaatggtgcgaaaggccaactgggagccactacgctgcctcaatctagaaaaatagtaaatcaaaaacaatatcacgatcctggagggattccggagattagtgccactatcaaagacttgaaagatgcagggtggtgtttcccaccacatccccattcaactctcctatttggcctgtgcagaagacagagggatcttggagaatgacagtggattatcataagcttaacaaagtgatgactccagttgcagctgctgtaccagatgtggtttcactccttgagcaaactaacacatcttctggtacctggtatgcagccat

SEQ ID NO: 409049 - DNA, 557 bp, Homo sapiens
gagttttagctcagatccaacgtacagtgggtctggtgggtccggtgggtccagtgggtccctggactcattctttggtcattttcccagtgacagaatgcataattggcatagacrtacttagcagctgacagatcccccacattggctacctgactggcagggtgagggctattatgccttcagtgccttgccagctgaaggcaaattgcttctggtgggccttatggacaggaatggtgcgaaaggccaactgggagccactacgctgcctcaatctagaaaaatagtaaatcaaaaacaatatcacgatcctggagggattccggagattagtgccactatcaaagacttgaaagatgcagggtggtgtttcccaccacatccccattcaactctcctatttggcctgtgcagaagacagagggatcttggagaatgacagtggattatcataagcttaacaaagtgatgactccagttgcagctgctgtaccagatgtggtttcactccttgagcaaactaacacatcttctggtacctggtatgcagccat

SEQ ID NO: 409050 - DNA, 520 bp, Homo sapiens
cctttgtactctgctaacttctcttcctccttctcccactctttttcctttcttaccttccattattttgtgtataaggtacattgtgccagacattgtgctaaatgccagaaatacaaagatcaattaaaaatgaccactttttgggtagagtttaaaaacttgtatagagatttcttaagaaagaacaattatatttataaaaataaatgcactaccacttcataaactaatagcagccaaattttcttcattgggttttcttgatatctgttctgagatattttggtaacttctactgatattcacaatacrcttattgactacatatggaaaaactgctaactgagaaaaatgtcagtaattaatgggctaattacattctttcaattaaatgtgttctcctcctttaagatcatgataaagacaaccaacatacagttagatactaatacagaattgtgggaggttttcagatttgataaagttttttgaaaatttggagtgataattacaatgt

SEQ ID NO: 409051 - DNA, 556 bp, Homo sapiens
aaggagaaatggccagatatgtgattatatactgattcatgggctgtagccaatggtttggctgaatggtcagagatctggaagaagcatgattgtaaaattggtgagaaagaaatytggggaagaggtatgtggatggacctctctgagtagttgaaaactgtgaagttatttgtatcccatgtgagtgctcaccaagaggtgatctcagcggaggagcagtttaataatcaactggataggataacccgttctgtggacaccactcagtctctttccccagccacgcctgtcattgcccaatgggccgatgaacaaagtggccatggtagcagggatagaagttacacagtagctccgcaacatggacttccactcaccaaggctgacctggctatgaccactgctgagtgaccaatttgccagcagcacagaccaacactgagtccttgatatggcaccattcctcagggtgatcagccagctacctggtggcatgttgattatattggacctcttccatcatgaaaagggcagaggtttgtactcactggaa

SEQ ID NO: 409052 - DNA, 541 bp, Homo sapiens
tttgttaagaatgacttacttagagtaataaaagacaaagatattttgaaactatatcctctaacatcaccccatctttcagcgaatccttactgccaaaaaaagactgcaaccagctgtaaaatatagaaagttatttaatcttagaaatctggggaggctgaggcgggcggatcacgaggtcaggagatagagaccatcccggctaacaaggtgaaaccccatctctactaaaaatacaaaaaaaaattagctgggcatggtgrcgggtgcctgtagtcccagctactcgggaggctgaggcaggagaatggcgtgcacccgggaggtggagcttgcagtgagccaagatcacgctactgcactccagcctgggcaacagagcgagactccgtctcaaaaaaaaaaaaaaaaaaaaaagaaatctggattgtcttcatttggtctttcagaatcttcatctaagctcattgctagagtcatttatttctctaacaataacctcacatgtatatgtctgtagtcccgaccacaaacttgc

SEQ ID NO: 409053 - DNA, 569 bp, Homo sapiens
aaaattcagcagggcaagttatctgaatttaaaagcaatggaagaacttccaaataagaatgtcagtaaattctcagcataaaatactacaactttgaggaaactgcaattaaaagacaaatactatgaatcaaattattaaaacaaattagactgtttctatcattaaagtttaaatgcctcagacaaatagataagaaaatactgatataataatagataaatacactatgaactgacaattcacaatacaggaaagagaacaattatgataacattagataacataaatattagataacataaatattcaaaacagctgaatataaaagagttgataaagttttaacaaagttttaaaatttcgaactgactaatacaactctgtagggaagatatgwactctggagttcaaaatatctgtgtacacttttgtagccccatcatagtagttctttaaaaatctaggctctgacataacaaaatccatatttctactgtgtgcaccccttgctcttttatgatcctttgatgccctgcttttcagtggagtccttaagaagatcttt

SEQ ID NO: 409054 - DNA, 586 bp, Homo sapiens
atgactcatttattggacaccagtcagaatctttctccagccacccctgtcatcacccaatgagcttatgaacaatgggctataatggcagggatggaagctaagcaggggctatgcaacatagatttccactcacagaagccagcctagttacaaccacctctgatttcccaatctcccagcagcagagaccaagctgtaactcctgataacgcatcattccttggggtgaccaaccagctacctggtggccratagattatagaggatcacttctatcatggaaggggtagcattttgtccttactacaataggcacttactctgaatatggatttgccttctctacaccaatgcttctgccaaaatatatatggatttacaaaattctttgccaacttacatggcttggatatttctcccctccaaatctcatgttgaaatgtgatcctcattgttgaagatgggcctagtgggaggtgactgggtcatgggagtggacttcccataaatggcttggtgcatccttgtaatgagtgagttctcactctattagttcacaagagaactagtggttaaaagaagc

SEQ ID NO: 409055 - DNA, 552 bp, Homo sapiens
aaaaaaaaaaaaacattaaattaaaattaaaaaataaaaagacatctatcatcaagatctgaaagtaatgtatatttttattatataactatatagccttagttaatagctttcatataaaatagttatttataaattagaattttaaaaatgtataaatttggcaagcattatatgrtaaatctttcagggtaggagcttttttataggttagtctaacaatgtaagaatcacaatttttataaattctcaaacattattttatctaacaaatacaaattttttattacaaaatatgaactgttcagataaattatgatatttaaatgactagaattttataaagtctttgaatggaatttcttgttctggcagaataataacgtcctgtgcctagtattcaaactgatatccctcaagaccaaataatcagggaataatacattaactttctataattgacattccttctactaatatattattacatgtatactattgcttatagtcaatccaaacttctgtttaaatataaaacttcagaagaccctc

SEQ ID NO: 409056 - DNA, 552 bp, Homo sapiens
aaaaaaaaaaaaacattaaattaaaattaaaaaataaaaagacatctatcatcaagatctgaaagtaatgtatatttttattatataactatatagccttagttaatagctttcatataaaatagttatttataaattagaattttaaaaatgtataaatttggcaagcattatatggtaaatctttcagggtaggagcttttttataggttagtctaacaatgtaagaatcacaatttttataaattctcaaacattattttatctaacaaatacaaattttttattacaaaatatgaactgttcagataaattatgatatttaaatgactagaattttataaagtctttgaatggaatttcttgttctggcagaataataacgtcctgtgcctagtattcaaactgatatccctcaagaccaaataatcagggaataatacattaactttctataattgrcattccttctactaatatattattacatgtatactattgcttatagtcaatccaaacttctgtttaaatataaaacttcagaagaccctc

SEQ ID NO: 409057 - DNA, 536 bp, Homo sapiens
ctgtcttgcaaatgtaatcaatttaaaataatatatctttgcgtttttatatgaagatttaatttcagctgaaatgactggctaatatcaatattacaaatggcataaccaaactgttaaattgactcacagtctaaaaagtaagtatggaaggcaaatttccgctattaaactaataagcaaggagcaccacttgtagtgcaatgcattkttattttaggacttctgaataatagagcaacattaactgggacaataaagaataaagcatcgtgaagtgtggcaaaatgaattcatcaaaaatgtatgaactactaaaaaagtttaaactgtacataaacacataggtcttggacgattcatagaaaagtagtaatccagataacattattgtattagcaaaaagcctggactttgtgtgatatgagcaagattttgaacttgagctaaaaagcacatctatttgaaaaagaggatcttaatcatcaaagcaaggcagcctaggacagagataaaatggaaaataatgtttattt

SEQ ID NO: 409058 - DNA, 538 bp, Homo sapiens
atatttttcaaatagtaaaactttggtttgtctgtccygtcaagtatctagtcactgcattctacttaaaacacactaggaaacacactgtattactttaagattaaattaattctttattctgatattaactccttattagcaagaaattcactaaattttgaaattgtttttcaccttccctacctctgaacctacaagctggcccctttttctcttttgaagctgtgggaagataaggataaaggcatatttgcaagtttttggcagcattaattgcagtgtctgaagcaaattcacattttgcagccttgaaaaatgaaagatgcagtgagggggcgaagatggaggacaactgagaatttctttctgctttataccacttactgtatgttgatttctagtaattaaccttgagcaaaatctcatatttcaattttttaatttttagactaaaatttgatacaggtttaatatatttttgtgtaatttctgtagcctttttccccatgatttctcagaattacttataattgcc

SEQ ID NO: 409059 - DNA, 538 bp, Homo sapiens
atatttttcaaatagtaaaactttggtttgtctgtcctgtcaagtatctagtcactgcattctacttaaaacacactaggaaacacactgtattactttaagattaaattaattctttattctgatattaactccttattagcaagaaattcactaaattttgaaattgtttttcaccttccctacctctgaacctacaagctggcccctttttctcttttgaagctgtggkaagataaggataaaggcatatttgcaagtttttggcagcattaattgcagtgtctgaagcaaattcacattttgcagccttgaaaaatgaaagatgcagtgagggggcgaagatggaggacaactgagaatttctttctgctttataccacttactgtatgttgatttctagtaattaaccttgagcaaaatctcatatttcaattttttaatttttagactaaaatttgatacaggtttaatatatttttgtgtaatttctgtagcctttttccccatgatttctcagaattacttataattgcc

SEQ ID NO: 409060 - DNA, 579 bp, Homo sapiens
acatttttgggtatcttttcagcagcaacccactcttccagtgccaatttcctatattagtctgttttcatgctgctgataaagacataccccagactactcaatttacaaaagaaagaggtttaattggactcacaatcatgatgggaggcaaggaggagcaagtcacatccttcgtggatggtggcaggaaaagagagagcttgtacagagaaactcccatttttaacaccatcagatcccatgaaacccattcactgtcataagaacagcatgggaaagactcacctccatgattcagtcatctaccactgggtccctcccacaamacaggggaattatgggagctagaagatgaccatatgaggaggttaatttatatcttaacaatatgtcttttgacctatgaaaaagtgtgtgtctttatttgggaggttttccttaacttccctcatcaatgttttgtagttgttagtgaagatttctttccttgccatgtcagatttgtctctaagtatttaatatttttatctaatgtaaatgtatatatatataacatatatacatatatatttgtag

SEQ ID NO: 409061 - DNA, 619 bp, Homo sapiens
gtgagtttttcatgaatggtttagcaccatccctcttggtactgtcctccttgtagtgagtgagttctcgtgaggtctgctcattgaaaagtatgtaacacctccccctcacccctactcacttgctcctgctctggccatataaagtgcctgctctccctttgccctctgccatgattgtaagtatactgaggcctccccagaagccaagcagttgtcagcatcatgcttcctacataacctaagaactatgtgccaattaaacctctttttcttataaattgcctagtctcaggtatttctttatagcaatgcaagaacagactgatacaccactcaaattcttagtaaaataaccagtgcctctaattgtktcctgttgcaaaagaaaacagattcttattaaacttatgccaacaactgtattgctataaaataagaataatcatgaatagttttgaattctggagggatccaatagagagaaaagtaaatatttccattttgcatgttacctaattgctgcaagctataagtagcttaaaaaaaattggttctgagaaacaaaaataatcagcaatgtttcaaatttaaaaagtaaaaaaagtaatttgagtcc

SEQ ID NO: 409062 - DNA, 589 bp, Homo sapiens
tatttgtttgggggggtgaagtatctattttttggggtccatttttaagctgggtttttccccaaggggcctttatgtattttggttacaatacttgttacatatatttattttgagtaatttttcccagtatatagcttgccttttattttcttagtagcatctttaacagaacataatttttaatatttttaataaaatctcatttgttagttgtctattactatttaacaatcagcttaaccaacaacatttattatctcatatagttctgagaatcacgaatctgggagtagctaggtggatggttctgggctcagatctcctatgaggctgcattaaagctgtaggtttgactggagctggagaatcygcttccaagctcactcacatggcttttgaatggtctccagttcctgcttacataggcttctccataaggctgtttatcacaagtcaactcaatttcctgagagtgttattcaagagaggaaaggccaagatggaaactatagtgtctgataaaacttaacctcagaaaatggcatactatcacctctgccattgtctattggttacacacaccaac

SEQ ID NO: 409063 - DNA, 467 bp, Homo sapiens
agcaggatttgagaggattgactctaatttcaaaagaagttctactgtgggtaaaacagcatcacatgacacaaagaaatcttttatcaaaggaagagtcaatcaatgtggccaacttcattgctgtcttattttaagaaattgccacagccacttcaaccttcagtaaccaccacatcatcttcagcagccatctaccttgaggcaagaccacaccagcaaaaagctaatgactggctgaaggccaagatggccattarcattttttatcaataaagttttttaaaattaaggtatgtacagttttgacataatgctacggcacactgaatagattgtagtgtattataatgtaacttttatgtgactggctagccaaaaaatttatgtgactgactttattgcaatattaattttgttgtgatggtgtagaacagaacttttactgtctccaagttatgcctgta

SEQ ID NO: 409064 - DNA, 467 bp, Homo sapiens
agcaggatttgagaggattgactctaatttcaaaagaagttctactgtgggtaaaacagcatcacatgacacaaagaaatcttttatcaaaggaagagtcaatcaatgtggccaacttcattgctgtcttattttaagaaattgccacagccacttcaaccttcagtaaccaccacatcatcttcagcagccatctaccttgaggcaagaccacaccagcaaaaagctaatgactggctgaaggccaagatggccattagcattttttatcaataaagttttttaaaattaaggtatgtacagttttgacataatgctacggcacactgaatagattgtagtgtattataatgtaacttttatgtgactggctagccaaaaaatttatgtgactgactttattgcaatattaattttgttgtgatggygtagaacagaacttttactgtctccaagttatgcctgta

SEQ ID NO: 409065 - DNA, 581 bp, Homo sapiens
tcattagattttaagggctcattgtctccagcttcatcggggtcttcctacacatcctcatcctaacttacagtatctcattctttcccaatcaatcaatcaatgctctcactttaacaagagacattgtrtgaggctgaaagtttaacttgtgttgtaatttagccaatgacaggataaggaccttgaaaatctaaggtcctatatttgattttcaataattgcagtgctgggcagcaggagataagtctgtccctcagggcacacctagaagctcttaggtcatttatatggcccttgagctgcgaattcaaattccttaaactcctcctttctcatcaccactttgcccagcaacattaagaagaaccaaccaatgttattatatatttttcaccaaaaatatttggaagcatcatattcagagttacttagctctttgcttcctttaggtgattgcttagtagtgtccagtgcagatattttggatatctgtataaacagttcatatcatagagtatcaaggctcactttatgactggaaatagagtacttataatctttaaatgatcacattacag

SEQ ID NO: 409066 - DNA, 581 bp, Homo sapiens
tcattagattttaagggctcattgtctccagcttcatcggggtcttcctacacatcctcatcctaacttacagtatctcattctttcccaatcaatcaatcaatgctctcactttaacaagagacattgtgtgaggctgaaagtttaacttgtgttgtaatttagccaatgacaggataaggaccttgaaaatctaaggtcctatatttgattttcaataattgcagtgctgggcagcaggagataagkctgtccctcagggcacacctagaagctcttaggtcatttatatggcccttgagctgcgaattcaaattccttaaactcctcctttctcatcaccactttgcccagcaacattaagaagaaccaaccaatgttattatatatttttcaccaaaaatatttggaagcatcatattcagagttacttagctctttgcttcctttaggtgattgcttagtagtgtccagtgcagatattttggatatctgtataaacagttcatatcatagagtatcaaggctcactttatgactggaaatagagtacttataatctttaaatgatcacattacag

SEQ ID NO: 409067 - DNA, 622 bp, Homo sapiens
agttttcttacttgatacagataaagcagtattacataaaatattaatttagaaaaaatgacattttgaattatttaatccttctatccaataacagaatgtgcttttaccttttattaaggtagtcatctctggattgttttgttttggtttggtttgtatttttgttattctgaaagagtttgtagtagggcatttgatgtatttagattgtcaattgtaaatataatatttgaatcaatttctttactcactgattattattgtactagcatatatgaaattttatatgtttgtctaagttatttataatcaaagcatattackgattgtacttattacttgataattttttatatctatttgctgcattctattttgtaaacatgtatatataatcaaactatatagaagaaatatagtttacttccattttttccagtcatatacatctttttaaaaatattttacaaatatatatgttactgtggagacactctttttgagacatttagaattctacactccattgtctttactcttcctgttcttaatatttattatctctgctactctcagaaaagacttgagcagaaaataagggaataaacaaaaagcagta

SEQ ID NO: 409068 - DNA, 557 bp, Homo sapiens
tttctactttatatctttactttcttccttttgccattagaatactggttttgtgataagatttcagtattcaataatttctcatttgccttattctaaaccatattcacaatagttttggaataacaatgcaaatatttccaaaactaaaataatgattgggtatacttaattgttttgcatgtgttcttttttgttctcagctatatctgattttactatacctactttgtcctagcatatagcctttatactctatattctcttctcatttagtcttatttctatatagctaatgatatacccaaggcttattttcatatgctgatttttatataaaattagatttcttgactttgaaaagccagtttgtaccagaatarcttttctaactttacagaggtctcatatttttttccactttgtatttaaaaatataagattattctggcttaattcccctgcctcacatttttttttttttttttaggatttggatttcaacactttaatttcttttgaatataagtcatgttttccaagctaggaaacataat

SEQ ID NO: 409069 - DNA, 539 bp, Homo sapiens
gcctgctttgggaagagctacgaggctggccaagcctttatgaccttctttaactttctttacacagctttcttccttccaactcagtcctagctccctttttcccrgaagcccagaaatgagaaatatccaaacttggtcagaggtccttgctgctctttctgttcctgttaccattttcttttcctaatgcatatactcagcccttgaatagaaaatgaaaattcaaaaatctctccagggatggtgggaggagagtagttgtggagatggtaatttctattgacggtatatctttagaaaatgagaattactcattgttcctctgcagttacaaatcacaacagatctaaatttataaaggtagtattttgaaactgttatcaagtcaaaagagcaagtagttgaataattttacttgtgactcataagaaaaactccttgaaatgggagaagtagaagaaaaaggagaagaaacactggagactgaactaaccttagaaaagaatctaatttctatataatgaccttaacaggat

SEQ ID NO: 409070 - DNA, 539 bp, Homo sapiens
gcctgctttgggaagagctacgaggctggccaagcctttatgaccttctttaactttctttacacagctttcttccttccaactcagtcctagctccctttttcccggaagcccagaaatgagaaatatccaamcttggtcagaggtccttgctgctctttctgttcctgttaccattttcttttcctaatgcatatactcagcccttgaatagaaaatgaaaattcaaaaatctctccagggatggtgggaggagagtagttgtggagatggtaatttctattgacggtatatctttagaaaatgagaattactcattgttcctctgcagttacaaatcacaacagatctaaatttataaaggtagtattttgaaactgttatcaagtcaaaagagcaagtagttgaataattttacttgtgactcataagaaaaactccttgaaatgggagaagtagaagaaaaaggagaagaaacactggagactgaactaaccttagaaaagaatctaatttctatataatgaccttaacaggat

SEQ ID NO: 409071 - DNA, 538 bp, Homo sapiens
agaacatacatgcttcttcttgaattcttgcagacaaactgtttgttagaactttgatgagttgggaatgtattacagcagctgtcactgggttaaccatgtgattgctcctacagatgtagttgcttgtctgagtgcatttcccgggagaggggagtaggcaagccggaaggtaggaaagctgtccaggctacttcttgtctgagctccactgctttccggccttgagataggagcttgcccagggtacttggcctatttggttaagttgtcagtgtttgttggtgaattttcattaaaatgmagagaggctgttgaagaaatcatggcataccggtaagtgcttgggctttggaaatatacaggcctgcatttagtcccagctctgctactatttgctttgttttcccatcttcctacccctaactttgtttttcatcactaaaatggttattataaggaaaaaatacagtaatggactgaaaaactttatgcaagctgaaagtgacctactggtgtcacttgcaggcattattat

SEQ ID NO: 409072 - DNA, 538 bp, Homo sapiens
agaacatacatgcttcttcttgaattcttgcagacaaactgtttgttagaactttgatgagttgggaatgtattacagcagctgtcactgggttaaccatgtgattgctcctacagatgtagttgcttgtctgagtgcatttcccgggagaggggagtaggcaagccggaaggtaggaaagctgtccaggctacttcttgtctgagctccactgctttccggccttgagataggagcttgcccagggtacttggcctatttggttaagttgtcagtgtttgttggtgaattttcattaaaatgaagagaggctgttgaagaaatcatggcataccggtaagtgcttgggctttggaaatatacaggcctgcatttagtcccagctctgctactatttgctttgttttcccatcttcctacccctaactttgkttttcatcactaaaatggttattataaggaaaaaatacagtaatggactgaaaaactttatgcaagctgaaagtgacctactggtgtcacttgcaggcattattat

SEQ ID NO: 409073 - DNA, 524 bp, Homo sapiens
accacacttctaccaatgtagctgagcctggccagaacctgctagctggtcttatgaatgtcaaatgggctcttggtgcagcctagcagtaccactatgttgctctaggccctttactctcataacctcctgttattcattatttgatttttattatcacttaatttcattcttttcaaacttgtaataccttctcccccacccccaatctttgctgatgaccttgcttactctttcactaagcaaccagaaacaaccagaagagaatgttcaccagttctcgctagcatatcttcctaaattcttgcatcagtgcccatcactctacctatcctcctgctcccagggtcaaaccagccttcctcttaaaaccaaccccttccttatctactagatacatctcttctcattaattcaaatatgctgctccagkgaactgtcttctctctgtcctccatcattagttttccctctcttcccatacatataaacatgctatgatgtcttccctctttaaaaaaatt

SEQ ID NO: 409074 - DNA, 548 bp, Homo sapiens
atcacagttggaatgtcctgaatgggccccgtttcctcttggaagggcctgtgacctctatatctgcccactaactctcctcttctgctgaaatactaaaatacaccaggcttagacttacttgcctcatctgcagcctttggtttcagatttttaatcagaggcagcaaaattactgcagttatcaagcttttctctctccctcttgaaaagtcttagacaggccaaaatggagaaaagccattttcctagaactctattggatgtgacttaaccactgcatgctgcattgcccaagccaaacaagggtctttaggtcataaacacacaggcatctctgtaccctctttaagaacaggcatgatttatggtgttttgtgagctttaaatgaggtcagttaatgtttgcaatgttcttagcaaactgcctaacatataacaaaagctcaaaaatgcaagcttcactatttaacagaattttccagtctcgcaccacagatagagaatacacagtctggctygaaaatttattacttcccaagtcgttt

SEQ ID NO: 409075 - DNA, 499 bp, Homo sapiens
aaaagtgggttgagatgagacagtaaaggttcttgaatgtctgccaagtgactggaactttaccttataggtgatgtgttggccacataagttggtaagcttgacagggctgaactgtgttagagaaggggagagctgaattggggaatgtgctacctggaagatgagctactctgggggcactagcatataacctgactgtgcttgtttttattcctactaatttgccatctcagggacaaaggccacagacagtttgtgactgtggtgtgctcacactcacacgcacacacatacgtacataatgtgaatcaaggctctgtccttggaaatgcccctgggttgggtgacgggtgtggcaactgcytaagcagctcctagacaatttgaggactcaactacttagcacttattaggtgtcaggcatgagctaagtatttcaggtgttgtgttttagtcctctagaaaagctcccaggtgagaaaagttgattgatttc

SEQ ID NO: 409076 - DNA, 499 bp, Homo sapiens
aaaagtgggttgagatgagacagtaaaggttcttgaatgtctgccaagtgactggaactttaccttataggtgatgtgttggccacataagttggtaagcttgacagggctgaactgtgttagagaaggggagagctgaattggggaatgtgctacctggaagatgagctactctgggggcactagcatataacctgactgtgcttgtttttattcctactaatttgccatctcagggacaaaggccacagacagtttgtgactgtggtgtgctcacactcacacgcacacacatacgtacataatgtgaatcaaggctctgtccttggaaatgcccctgggttgggtgacgggtgtggcaactgcctaagcagctcytagacaatttgaggactcaactacttagcacttattaggtgtcaggcatgagctaagtatttcaggtgttgtgttttagtcctctagaaaagctcccaggtgagaaaagttgattgatttc

SEQ ID NO: 409077 - DNA, 560 bp, Homo sapiens
cagcccctgacttccccagtcagcttctagcttctccaggctcactgatttgctggatgagcctcatctcctgcctgggttatgtctcaccacaacttcagtccaccttctgttttcccagggcctggagttagtcatgcggcctgaggtagtggggtcttcttatctgctgagcttatcttcaccctgctgcagtgcctcagcctrtgtgcatgtctaggatcctaattctccgtctcatttttggcctgatcatttgagaaggttgaattttgctccctttgttacagctactggctagagtcccgatcacaagggatccaatgccaaagcactctaggaccttgaatgtctgctttcaagataactgccagatattcctgggtagtatcttttgatttcaacatttccctcctcttttatcaacataggcatatggccagaggcctaaggggtaggctttgaaatcagacattttgggaaggcatcctggtcctgcctcttgaccgctgtgtgaccttgggaagtgtgttcaattttccctggtcttccttttctct

SEQ ID NO: 409078 - DNA, 560 bp, Homo sapiens
cagcccctgacttccccagtcagcttctagcttctccaggctcactgatttgctggatgagcctcatctcctgcctgggttatgtctcaccacaacttcagtccaccttctgttttcccagggcctggagttagtcatgcggcctgaggtagtggggtcttcttatctgctgagcttatcttcaccctgctgcagtgcctcagcctgtgtgcatgtctaggatcctaattctccgtctcatttttggcctgatcatttgagaaggttgaattttgctccctttgttacagctactggctagagtcccgatcacaagggatccaatgccaaagcactctaggaccttgaatgtctgctttcaagataactgccagatattcctgggtagtatcttttgatttcaacatttccctcctcttttatcaacataggcatatggccagaggcctaaggggtaggctttgaaatcagacattttgggaaggcatcctggtcctgcctcttgacygctgtgtgaccttgggaagtgtgttcaattttccctggtcttccttttctct

SEQ ID NO: 409079 - DNA, 493 bp, Homo sapiens
ctgtgcaaatagtgggtagatttaagtgataggagtgagttttcagctcttctagaatgagacaaacaaatatttgatgtttaaaaaaccaatctagaaatgctttttccatttrcttatatttatgattttttatgggaataaatttctactaagcaatcaccctttttgtttcaactgagaatacagcaactgtgtccacacaaaagatgggcacatatattctacttatagatgtatctagtctaagccaagatattttataaaagtatttaaaataaaatctgaaaaaaaatccctctggaataaaggataaagaaattagatctaacatctgatgacctcaattcatctttcacaattgaaggcaaactctagctcttacctgttagatgtaaaattgtaatagccactttcctcaaggacttcttcaatcacagtctaaaattttaaaaatcaggttagtattgaattagaagtaacaaaataaaat

SEQ ID NO: 409080 - DNA, 565 bp, Homo sapiens
atgcccccttcagcagttgctgcctgccagtatttcctttgtcccaaggtgagggctttggtgggctgtgctcccccaatcccttagaaatagtccacactgaggcttaggtctccagggggtctaaaactcccctcagrgacccactggtcccctgtgcttgccaaagttagagcaagttgtgaggtccatatcactctttatctttgctttttcactctttatcttcatttttagttttcattctatcctttctctccccttctcccaaagcagtcttactgaagtctctcagatggaaaaaccaacttcataagcttgcccctgaaaattcaagttgcacatatcttaagtcttcattttttattcattaggtggggaaaacagggattcatctagatttaggtccagatggattcaggctttgtatctctcttcatcttaccagctctggtcctctctgtgtgccattattctttagacagcctccttccattagtaggcaagatggccacaaagaactccaaactaacatctgccaggcccagcacttcctctcccaagg

SEQ ID NO: 409081 - DNA, 592 bp, Homo sapiens
tacaacacctaagtaattaatggacctaggcatcaattcctgctaaaaagagagagaataaatgagacattatgcacctaatgataatatatatatatcatctagagtctagtcaaagggtgaagttaagtctgataaaatttcattccactgtacatttrtaggaaatacagaaggatgtagttgaactataccatggttatgcaatccataacatccagactgcaaaattctacaggtcaaatgacacaggtgtttcagcagttaaattgtaagagaaaaaaaaagatgaaaggtgaatctccagatttaaaaagagacttaaaaaattgtaacagaaaaaaaaaaagatgaaaggtgaatctccagatttaaaaagagacttcaaaatttttttaatgtaatgagaaaactcaaactattatgttaaggaatgaacatttgggatataaaaccattaagaaatgcaagaaagttttattcaaaagttgtcagtgtttacttttggaaagagagagggcctatgattggaaaaaggcacatagaagcttcctggggtgctggcaacattctttgttgacctgggcagtgg

SEQ ID NO: 409082 - DNA, 592 bp, Homo sapiens
tacaacacctaagtaattaatggacctaggcatcaattcctgctaaaaagagagagaataaatgagacattatgcacctaatgataatatatatatatcatctagagtctagtcaaagggtgaagttaagtctgataaaatttcattccactgtacatttataggaaatacagaaggatgtagttgaactataccatggttatgcaatccataacatccagactgcaaaattctacaggtcaaatgacacaggtgtttyagcagttaaattgtaagagaaaaaaaaagatgaaaggtgaatctccagatttaaaaagagacttaaaaaattgtaacagaaaaaaaaaaagatgaaaggtgaatctccagatttaaaaagagacttcaaaatttttttaatgtaatgagaaaactcaaactattatgttaaggaatgaacatttgggatataaaaccattaagaaatgcaagaaagttttattcaaaagttgtcagtgtttacttttggaaagagagagggcctatgattggaaaaaggcacatagaagcttcctggggtgctggcaacattctttgttgacctgggcagtgg

SEQ ID NO: 409083 - DNA, 578 bp, Homo sapiens
agagcagtgaaatctcatgtatggamcatcccatatctttgattcagggaattctttggatgatcacttactcacaaagactaaacaaaaaattgtgtgactatatcatcaatttagaacgtgccaaagtacccgtataagtcactgtctttaaatctaccatttggtgaccacagaaatgcttactgaggaaaggaaactgaacattaattgggtgcccactatttcttcagtactttgtataccttctttaatttcattctcatcacacccctgtaaaatatgtatttttattcccattctactgatgagaaagatgaaggtgcaaggagagtccgttaacttgcctgaggtcacatagctggtaaaagatgaaactgctcatggggaaaacagaacatctctccaatttcacagagttattgtaataagaagatgcatgattttatacgatatcatctggtacttaggtatgcaagaaatgttcatgtcctcctcctcatcccccacccctacttaacatgtaggactctattcattcacccactcattcattctttcactaaactcatactgag

SEQ ID NO: 409084 - DNA, 578 bp, Homo sapiens
agagcagtgaaatctcatgtatggaacatcccatatctttgattcagggaattctttggatgatcacttactcacaaagactaaacaaaaaattgtgtgactatatcatcaatttagaacgtgccaaagtacccgtataagtcactgtctttaaatctaccatttggtgaccacagaaatgcttactgaggaaaggaaactgaacattaattgggtgcccactatttcttcagtactttgtataccttctttaatttcattctcatcacacccctgtaaaatatgtatttttattcccattctactgatgagaaagatgaaggtgcaaggagagtccgttaacttgcctgaggtcacatagctggtaaaagatgaaactgctcatggggaaaacagaacatctctccaatttcacagagttattgtaataagaagatgcatgattttatacgatatcatctggtacttaggtrtgcaagaaatgttcatgtcctcctcctcatcccccacccctacttaacatgtaggactctattcattcacccactcattcattctttcactaaactcatactgag

SEQ ID NO: 409085 - DNA, 435 bp, Homo sapiens
atatcagaagttccagcaggcagtacatcatagaaggcttttaaagcagagaataaataagaaaaaaagagaagagtttgacacaatcttagacaaggactgtaatgatagaaggaagtgaaactcatttaaagaaactcatttaaaaattggttttaggatttcataagaatctcatggaatccagttgcaaaaagtagaactttgggaattggactattcctgartagttagtctctccatttctctcttcctgagcccctgtggcctctaggtccaggttggcattggtcatatgcttcattcttctttttctggagaaaaacttctatgctcactcagatacctacctaggcggcacgcactcagcctttgggtcaatctgactttcaaaatcaactccttaaaaataactgactctcatcttttttccaa

SEQ ID NO: 409086 - DNA, 594 bp, Homo sapiens
ggtctggtctcagaaaacatagaattcaccaacatatgccagtgttcttccattcttcacagtacttgaggagatattttggaggttggaggtaaccaaagctttcaattgaaaaataatatggctaggtgctgtgactcactcctggaattccagcactttgggaggccaaggcaagcagatcacctgaggccaggagttcaagaccatcctggccaacacagtgaaaccctgcctctactaaaaatacaaaaattagctgggtgtggtggtgcaagcctgtagtctcagttactcaggaggatgaggtgagtggatcacttgaacctgggaggcggaggttgcagtgagctgagatcacaccactgcactccagcctgggtgacagagtragactccatctcaaaagaaaagaaaagaaaaataatatattcatgggaagcgaggggtatgtgtatggttactacattcaggtaaagtgtcacttaacagattaccattttcaccccttagatacgcataaataccatatcttggacttgaaaccagaatatctgatgttgaagccctggctgctactcttacaaccatggc

SEQ ID NO: 409087 - DNA, 516 bp, Homo sapiens
tgcaatgactctgcaatgtccttagcagatcaaagtctcaatgactgtatcctagctgaaatgctagtttacttgcagaatattaatagctaaattaatagattaggtttataggagatagaccttaaattctgcctgcagtgaatgattatggaaattctttccctcaaattatttaaaaacagagccaatttctctgctcttgggaatataagttgacataaccttcccagaaagcaatttgtcaatacatagaacaacactatttttaaagtgtgttacstttgatccagcatttctacttctcagagttagccttaaagaaccaattaacaatatatgcaaatattttgccacaaggtttttacattaacattgtttatgacaacaaaaactagtaaatatctaaatgtccaacaagaagagacacagtaactaagttatgctccatccatacaaagaaacaccaggtagccattgaatgttccgaacaggcataggcataaagaaatgata

SEQ ID NO: 409088 - DNA, 516 bp, Homo sapiens
tgcaatgactctgcaatgtccttagcagatcaaagtctcaatgactgtatcctagctgaaatgctagtttacttgcagaatattaatagctaaattaatagattaggtttataggagatagaccttaaattctgcctgcagtgaatgattatggaaattctttccctcaaattatttaaaaacagagccaatttctctgctcttgggaatataagttgacataaccttcccagaaagcaatttgtcaatacatagaacaacactatttttaaagtgtgttacgtttgatccagcatttctacttctcagagttagccttaaagaaccaattaacaatatatgcaaatattttgccacaaggtttttacattaacattgtttaygacaacaaaaactagtaaatatctaaatgtccaacaagaagagacacagtaactaagttatgctccatccatacaaagaaacaccaggtagccattgaatgttccgaacaggcataggcataaagaaatgata

SEQ ID NO: 409089 - DNA, 516 bp, Homo sapiens
tgcaatgactctgcaatgtccttagcagatcaaagtctcaatgactgtatcctagctgaaatgctagtttacttgcagaatattaatagctaaattaatagattaggtttataggagatagaccttaaattctgcctgcagtgaatgattatggaaattctttccctcaaattatttaaaaacagagccaatttctctgctcttgggaatataagttgacataaccttcccagaaagcaatttgtcaatacatagaacaacactatttttaaagtgtgttacgtttgatccagcatttctacttctcagagttagccttaaagaaccaattaacaatatatgcaaatattttgccacaaggtttttacattaacattgtttatgacaacaaaaactagtaaatatctaaatgtccaacaagaagagacacagtaactaagttatgctccatccatacaaagaaacaccaggtagccattgaatgttmcgaacaggcataggcataaagaaatgata

SEQ ID NO: 409090 - DNA, 654 bp, Homo sapiens
ctgcctcagcctcctgagtagctgggattacaggagcccaccaccacacccagctaatttttttgtatttttagtagagatgggggtttcaccatcttgcctaggctggtcttgaactcctgacctcaggatccacccgcctcccaaagtgctgggattataggtgtgagccaccatgcctggccgaggaaatgaatttgattaaaaaatttaatgggaacttcagggggtggatacctatgctgttatagagatttgcaggagaaaaaacaaaacctggtctgttctggaatctacgtgtttccttaaagtcttagcatgagcaactccattttggtttggtttctcrtgtcctagtgcatgagctcagttcaaaacaatggcctcccataattttgttttagaaagttctccatttttggtcaggctctcacttgggtgagagtgtaaccaaaacttagggccttagcaccactctcagttatcatcattttgggtttctcgtctcagcaaatcatttataggttatggtgttctcatggctgcacatttctttcagctcctgttattccagttgaagagagaccatgtgacattctagagatggctgcatgcaagcatttaaaacctttgagagaatacagcatacaaggg

SEQ ID NO: 409091 - DNA, 654 bp, Homo sapiens
ctgcctcagcctcctgagtagctgggattacaggagcccaccaccacacccagctaatttttttgtatttttagtagagatgggggtttcaccatcttgcctaggctggtcttgaactcctgacctcaggatccacccgcctcccaaagtgctgggattataggtgtgagccaccatgcctggccgaggaaatgaatttgattaaaaaatttaatgggaacttcagggggtggatacctatgctgttatagagatttgcaggagaaaaaacaaaacctggtctgttctggaatctacgtgtttccttaaagtcttagcatgagcaactccattttggtttggtttctcatgtcctagtgcatgagctcagttcaaaacaatggyctcccataattttgttttagaaagttctccatttttggtcaggctctcacttgggtgagagtgtaaccaaaacttagggccttagcaccactctcagttatcatcattttgggtttctcgtctcagcaaatcatttataggttatggtgttctcatggctgcacatttctttcagctcctgttattccagttgaagagagaccatgtgacattctagagatggctgcatgcaagcatttaaaacctttgagagaatacagcatacaaggg

SEQ ID NO: 409092 - DNA, 654 bp, Homo sapiens
ctgcctcagcctcctgagtagctgggattacaggagcccaccaccacacccagctaatttttttgtatttttagtagagatgggggtttcaccatcttgcctaggctggtcttgaactcctgacctcaggatccacccgcctcccaaagtgctgggattataggtgtgagccaccatgcctggccgaggaaatgaatttgattaaaaaatttaatgggaacttcagggggtggatacctatgctgttatagagatttgcaggagaaaaaacaaaacctggtctgttctggaatctacgtgtttccttaaagtcttagcatgagcaactccattttggtttggtttctcatgtcctagtgcatgagctcagttcaaaacaatggcctcccataattttgttttagaaagttctccatttttggtcaggctctcacttgggtgagagtgtaaccaaaacttagggccttagcaccactctcagttatcatcattttgggtttctsgtctcagcaaatcatttataggttatggtgttctcatggctgcacatttctttcagctcctgttattccagttgaagagagaccatgtgacattctagagatggctgcatgcaagcatttaaaacctttgagagaatacagcatacaaggg

SEQ ID NO: 409093 - DNA, 548 bp, Homo sapiens
tggtcttgaactcctgacctcaggatccacccgcctcccaaagtgctgggattataggtgtgagccaccatgcctggccgaggaaatgaatttgattaaaaaatttaatgggaacttcagggggtggatacctatgctgttatagagatttgcaggagaaaaaacaaaacctggtctgttctggaatctacgtgtttccttaaagtcttagcatgagcaactccattttggtttggtttctcatgtcctagtgcatgagctcagttcaaaacaatggcctcccataattttgttttagaaagttctccatttttggtcaggctctcacttgggtgagagtgtaaccaaaacttagggccttagcaccactctcagttatcatcattttgggtttctcgtctcagcaaatcatttataggttatggtgttctcatggctgcacatttctttcagctcctgttattccagttgaagagagaccatgtgacattctagagatggcygcatgcaagcatttaaaacctttgagagaatacagcatacaaggg

SEQ ID NO: 409094 - DNA, 598 bp, Homo sapiens
gaaaccaggcattaggaaagacaattttgtaactgaagtttgattttggaattccagattaccataaattatttattttgccaaaatgatgattcagaaattttaaagaagaaaaaccttttataacctttataaaaatggaaacaaaaacattctactctttttacacacctaacatgtaaaactgtttctagtagtcttaattgcatgttacagtggtgactcaacaattttaactttaatgtaaaacctggtaagttatattctgatagggtttgactgtttacagtatagctagggtgtggacaactctgcatgtccaggccttacctagctggaaagcaggcaagttaaacaattttcaaaagccaaagcagcagtttatcaccttaaagcatttagcaaacctcatatctgaacataatttagaccacatgttaacattttgaagacaattgtattttaccaataatctttaaaaccatctttatttccraaagattgctaaagtcacatgaagtaaaaagcattacactttctacttttctaacaaaatatttgatttaagctcttattattaataaaccaattaattaaa

SEQ ID NO: 409095 - DNA, 598 bp, Homo sapiens
gaaaccaggcattaggaaagacaattttgtaactgaagtttgattttggaattccagattaccataaattatttattttgccaaaatgatgattcagaaattttaaagaagaaaaaccttttataacctttataaaaatggaaacaaaaacattctactctttttacacacctaacatgtaaaactgtttctagtagtcttaattgcatgttacagtggtgactcaacaattttaactttaatgtaaaacctggtaagttatattctgatagggtttgactgtttacagtatagctagggtgtggacaactctgcatgtccaggccttacctagctggaaagcaggcaagttaaacaattttcaaaagccaaagcagcagtttatcaccttaaagcatttagcaaacctcatatctgaacataatttagaccacatgttaacattttgaagacaattgtattttaccaataatctttaaaaccatctttatttccgaaagattgctaaagtcacatgaagtaaaaagcattrcactttctacttttctaacaaaatatttgatttaagctcttattattaataaaccaattaattaaa

SEQ ID NO: 409096 - DNA, 598 bp, Homo sapiens
gaaaccaggcattaggaaagacaattttgtaactgaagtttgattttggaattccagattaccataaattatttattttgccaaaatgatgattcagaaattttaaagaagaaaaaccttttataacctttataaaaatggaaacaaaaacattctactctttttacacacctaacatgtaaaactgtttctagtagtcttaattgcatgttacagtggtgactcaacaattttaactttaatgtaaaacctggtaagttatattctgatagggtttgactgtttacagtatagctagggtgtggacaactctgcatgtccaggccttacctagctggaaagcaggcaagttaaacaattttcaaaagccaaagcagcagtttatcaccttaaagcatttagcaaacctcatatctgaacataatttagaccacatgttaacattttgaagacaattgtattttaccaataatctttaaaaccatctttatttccgaaagattgctaaagtcacatgaagtaaaaagcattacactttctacttttmtaacaaaatatttgatttaagctcttattattaataaaccaattaattaaa

SEQ ID NO: 409097 - DNA, 598 bp, Homo sapiens
gaaaccaggcattaggaaagacaattttgtaactgaagtttgattttggaattccagattaccataaattatttattttgccaaaatgatgattcagaaattttaaagaagaaaaaccttttataacctttataaaaatggaaacaaaaacattctactctttttacacacctaacatgtaaaactgtttctagtagtcttaattgcatgttacagtggtgactcaacaattttaactttaatgtaaaacctggtaagttatattctgatagggtttgactgtttacagtatagctagggtgtggacaactctgcatgtccaggccttacctagctggaaagcaggcaagttaaacaattttcaaaagccaaagcagcagtttatcaccttaaagcatttagcaaacctcatatctgaacataatttagaccacatgttaacattttgaagacaattgtattttaccaataatctttaaaaccatctttatttccgaaagattgctaaagtcacatgaagtaaaaagcattacactttctacttttctracaaaatatttgatttaagctcttattattaataaaccaattaattaaa

SEQ ID NO: 409098 - DNA, 578 bp, Homo sapiens
tcaccagacacctgggtggacaaacagctcagtaaatagacagctagacaataagttagagaaccgagaaggaaatatagcaaaacaataacagtgatattttctaggatgtatgcaagaattatatgtgacattaatttttaatttttttaaatctgtgttttctaaaatgaacttgttttacttgtattaaaatagttaccaaaaatttttatctctaataaattatgtctattaaatatcattagtcctagaaaatttgccatgtaaaaccacaacttggggtagccgtccttcttgcatgagtctccctagtagctggggctactctagactcctaaagcctgtgttaacacacagcttttatgtccttagtttcttctatgtcactgcttccagatcttggaggcttagtaaaacttgtaacttccttactgttatattcatttgtatatgcaagaatttttctctccaagcagccccaggccattttgtcaatctgctaatctgtcctcagattycatgctacttggcacaaaagtacaacatcggaacttgtaaaagtaacagtagcccag

SEQ ID NO: 409099 - DNA, 614 bp, Homo sapiens
atatcataaatcatgaaccatgaaatgaaatagtgatttgtaaacttacaaaaagaagggtccttcatgaagactagcttggtttttttagaggttctgtagaagaaacactggagctgatctttgaaggataaatttaggtaaatcacagcaatcaaagtggacattccaggtagggggaacttggaggtaaaggttgggcattgcatattaatggaaaaatgatgaaagggatatgacatgattccatgttatatgggcattcatgatgaaatgaggaaaacaagttccattcattaatttagtatttttaatcaattattttgtgccaagcacagatccaaacaatgaaaaaacacattaatggataaaaattatactcttggagttcgctaactacttagggagaaatatgtctgtgaaatgtccacctagatacatgtaaaattgcaactgttctaaatgcrttgaaagacaggtttgtgactttaggaggtagcagatagatttgacttagtcagcaaaggcttccatgaaaaagtgacatttatgccaagagctgaaagaatgagtaagaatgagtagatggggcgagaagaacattacaggcagag

SEQ ID NO: 409100 - DNA, 625 bp, Homo sapiens
gtatgtccaaatattccagtctaatcttgtacagttcctgctctagaccaaaatcacctatatccccaaggagtcatgggtggaggagctcattgctgcttgattagtttctcgactatttcaatgaaaatattaggaaatgtgtatattttttaatagatgagatttatcatgaactcatattcattcacactgatacttccaattccaatttagatgaatctctgctatcttgcttctgtttcccctttcctccatgctgaaaatcctagttcccaagggtacctatacaattacttggttgctttactcccctygcaattctagccaagattgagcagactggattgaagactaacttaggtgaggtataaataaagagcttaatgtcttagaaaaggccttttgcactttttgaatcttctgtatccttctgggtcttaggctattagtaagtaggcacagtcatcccataatggctccttcaaactagggacacagggcccgtgggttttagaagtttcagtgagaaaggtagaaatcaagtgcatttacgggctgtcaccacttactgctcctatggccctggtatggggtgactgtgtcagtcaaaggctaattggcc

SEQ ID NO: 409101 - DNA, 423 bp, Homo sapiens
ttcattcacactgatacttccaattccaatttagatgaatctctgctatcttgcttctgtttcccctttcctccatgctgaaaatcctagttcccaagggtacctatacaattacttggttgctttactcccctcgcaattctagccaagattgagcagactggattgaagactaacttaggtgaggtataaataaagagcttaatgtcttagaaaaggccttttgcactttttgaatcttctgtatccttctgggtcttaggctattagtaagtaggcacartcatcccataatggctccttcaaactagggacacagggcccgtgggttttagaagtttcagtgagaaaggtagaaatcaagtgcatttacgggctgtcaccacttactgctcctatggccctggtatggggtgactgtgt

SEQ ID NO: 409102 - DNA, 625 bp, Homo sapiens
gtatgtccaaatattccagtctaatcttgtacagttcctgctctagaccaaaatcacctatatccccaaggagtcatgggtggaggagctcattgctgcttgattagtttctcgactatttcaatgaaaatattaggaaatgtgtatattttttaatagatgagatttatcatgaactcatattcattcacactgatacttccaattccaatttagatgaatctctgctatcttgcttctgtttcccctttcctccatgctgaaaatcctagttcccaagggtacctatacaattacttggttgctttactcccctcgcaattctagccaagattgagcagactggattgaagactaacttaggtgaggtataaataaagagcttaatgtcttagaaaaggccttttgcactttttgaatcttctgtatccttctgggtcttaggctattagtaagtaggcacagtcatcccataatggctccttcaaactagggacacagggcccgtgggttttagaagtttcagtgagaaaggtagaaatcaagtgcatttaygggctgtcaccacttactgctcctatggccctggtatggggtgactgtgtcagtcaaaggctaattggcc

SEQ ID NO: 409103 - DNA, 572 bp, Homo sapiens
tcactcaataggactatgtaagaatttaaattttactgcaaatagcatgactagatgctataatttttaccctgcgattcagaaggaatatattattttgctctttttcaaatggctgcttccatttatcttattgtttcttcattgattgatattatttttcatttaacaaattattcattaattgcacacatatactgaattttgtgaagaacagtcttgacacagaatggtgcacttttatcagatgtttaggtgcttataatatgcctagaactatgccaaacactgtagccttggtactataggatctgacactttggaccaggaaayacatatctgctttagtagtatatatagtcagatgcctgtcttggagtgctcctgaaaattcagctgcagagaggtcagatttaggtaccaatcattccagaagaaagagaggatagattagcatatattaagaccagactaggatgagttacatttagtaagtgagtagtagaaagtcatggtaggaccttagaaaacatggtaacaaaaaaaatggggattaaaaaaatgatttgtca

SEQ ID NO: 409104 - DNA, 483 bp, Homo sapiens
gcaggtttagcagctacatggcatgaatgtaataaatgtatgaagacaatgaccaacacttaaggaagggcctggaccacattgttaagtatggaggccactgggcacatgtgactcttgagcagcttaaatgtggccagtgcaactgagggactgaatttttaattttgtttaatattaattaagatgtaaaataataagatttcaatttgtatatgttgaaataatattttggatatttttgattaaataaaatagawttatttcactttattctttttactttttgaaaatgtggctaccagaaaacttaaaattatgtttgatgcttacaatcggtttccattagacagtactagcttcatctagaagggtaaggggcaaagttattcggaaagcatttgctggggtatggcatttgtgcaggcatacaaggaactggaacagatgctctgctcctcagctcagccctgggcttgtcct

SEQ ID NO: 409105 - DNA, 581 bp, Homo sapiens
tttaatttctatttatttgattacaatgaggctaaatagtttttatatgtatatttgtcattttgcttcttaatctgtgacgtgactattcataaaatattttaaaatattttaatttccatgtagtatcatttatctagaaaactacatccaattggctatcagttttgtgaattatgggagaawtatggacaactcttatttgacctggttggaagcagaaaattaatgtccaagtacatttgttgaacacagatttgactggatggtggaaatccaatgtgaataagccacagttcctatactctagtcctctgcaggctaggaaggaaaatgcttaatgatattttttaatttaaaaactattattttattttgataagaacacttaacatgaaatctaccctcttaaccaaattttaagtgtataatacattattgttgactatagatacaatgttgtacagaatatctccagagtttacttattttgcttgactgaaactttactctgatttattagtaactctccatttcctcctctccctagaatgttgttctttaaattccattttgattca

SEQ ID NO: 409106 - DNA, 542 bp, Homo sapiens
aatccaatgtgaataagccacagttcctatactctagtcctctgcaggstaggaaggaaaatgcttaatgatattttttaatttaaaaactattattttattttgataagaacacttaacatgaaatctaccctcttaaccaaattttaagtgtataatacattattgttgactatagatacaatgttgtacagaatatctccagagtttacttattttgcttgactgaaactttactctgatttattagtaactctccatttcctcctctccctagaatgttgttctttaaattccattttgattcaagacatgactagggtttaatacataattttccagttgcttggagaagtactagacctagaaaaataccagaaaaaagtattgatttggtcccagaattgccacaaggatattgtgaacacctaagacattttttcacaactttctgcacccggcatgcatgattcagttctttggatctaggcctttggttccaagtatggaaagacctctgcagtgggatttgtagtatatgc

SEQ ID NO: 409107 - DNA, 620 bp, Homo sapiens
tgttcgattttgtgtgagcaaggactaattgtatatttgaacattgctctcatggggcatttgcttcttattttaataataaagcttgcagtgattataactactccacaaaggcaaatttcattcakattgcccctcaaataaacatcatggtactaacagtagtttagtatgctttagataaagattttgaaaaaaaaaattctgccttctctgtcattcctttgtgtctgcaagaaataagaatgcaacaaagaaaccaaagcatactgaattagttttctgatggtatcaataagggaccttttgtgggtaggtgtgcttggcatttctgacaactccttgaatacctccaatagctctaatttgaagcttatgatttcctatggctctcctgtccatagatttatttaaagctctttgtttttagctcacaccaaatttctggtaatgaattagttatgttcccactttcatattgcaatataatttagtattttcttaaattattcactaataactttgtttctcctttttaaagaactgttatttttcatgaacaggaagtatctcttactttaatttcttatttctcttctgaaaagcagtccactccttgc

SEQ ID NO: 409108 - DNA, 620 bp, Homo sapiens
tgttcgattttgtgtgagcaaggactaattgtatatttgaacattgctctcatggggcatttgcttcttattttaataataaagcttgcagtgattataactactccacaaaggcaaatttcattcatattgcccctcaaataaacatcatggtactaacagtagtttagtatgctttagataaagattttgaaaaaaaaaattctgccttctctgtcattcctttgtgtctgcaagaaataagaatgcaacaaagaaaccaaagcatactgaattagttttctgatggtatcaataagggaccttttgtgggtaggtgtgcttggcatttctgacaactccttgaatacctccaatagctctaatttgaagcttatgatttcctatggctctcctgtccatagatttatttaaagctctttgtttttagctcacaccaaatttctggtaatgaattagttatgttcccactttcatattkcaatataatttagtattttcttaaattattcactaataactttgtttctcctttttaaagaactgttatttttcatgaacaggaagtatctcttactttaatttcttatttctcttctgaaaagcagtccactccttgc

SEQ ID NO: 409109 - DNA, 432 bp, Homo sapiens
acaacttttagtagtttactttcaagttaattattaacataaagtacttaaaactcatcttcacaattgccaaagtgattttaagtacataccttcttttattatgttgcatagcatttttaatcatataaaaatttgctcacaggttttagtcaaaacttctatgatactagtctatactatataatttggcatataattatatacattgttgggatttgtgaagtattaactatgttttccaaccagattgtaagcaccttcattgcaactttgatagatataggtgtatctcacagatattgcaggttccrtcccggccaacagcaataaagcaaatatcacaattaaacatgtcacctgaattttttggttttccaatgcacataaaggttatgtttacactatactaagtctattaagtgcacaata

SEQ ID NO: 409110 - DNA, 562 bp, Homo sapiens
gaacttcttacaaaaactggagtcagtcccctgaaacctactgctgctttatgaacyaaatttatagactattctaaattatttgttgccatttcaacaatgttcatagcatctttaccaggagtagattccatcacaagaaaccacttttgttgctcatccctaagaagcaactgctcatccattcaagcttttggatgagactgcagcaattcagtcacatcttcagtctacttctaattttagttctcttgctatttctactacatttgcaattacttcttctactgaagttttaaaccctcaaagtcatccatgagagttggaaccaacttcttccaaactcctgttactgttgatattttgaccattcatcataattttttaaattttttaaatttctttccataagttattggggtacaattctttagtggtgatttgtgagattttggtgcacccattacctgagcagtatacactgcaccatatttgtagtcttctattcctcacccctttcccactcttccccccaagtccccaaagtccattttatcattat

SEQ ID NO: 409111 - DNA, 515 bp, Homo sapiens
atgcatacctcagctttcattggtgggtccctgtagcaattatctattgctacacatgttgtataacaaagyacctaaaaacttagtggtttaaggtagcaaccatttatttttttcttatgagttcatgggtcagttggaagttctgcctatctgagcagagctccactgatctctgctagactttctcctgtgtctatggttagttggcaggttggctgaagtctagctgatttaggattgacctagaggggacaaatcagttctcttccctggtctcacacgtgttttcagcaacttagcccagatgtgtttttgtggcagtagcaagagttgaaaagagaatgcagaaatgcactcctattttgacaagccacttcttgtgttgttttcttcattctcaatggtcaaagcaggtcacacggtcaaatctatcattagtgtggggagctgtatgaggctttcactgctgtgcaaccagttgctataagtttaacagtttaaaataacacaca

SEQ ID NO: 409112 - DNA, 438 bp, Homo sapiens
gggagtggtgcatttggtcaatgtcatacaatggccaaatataggttagaaccttgctgttcaaggtatagatgcagatcatacgttgaacagactgatagaaatgcaaaatgttagaccccaygccagacataccacatcagaaatttacattttaacaagtctcgcttgtgcagattcatattcacctaaagtgtgagacatacgctaattttgaagctataattgtttctactagatcattgtattatgtgtgatgttttgggctgcaagtaatagcatcaaacaggaatagcatacgaaaataggactattattgtttcctgtaacatgaagtcaggaaaaggtgttctcatgattgattttatcaatgactaaaattcattttcactcttccatttcattattttcaatgttttggctttattgcctcattga

SEQ ID NO: 409113 - DNA, 438 bp, Homo sapiens
gggagtggtgcatttggtcaatgtcatacaatggccaaatataggttagaaccttgctgttcaaggtatagatgcagatcatacgttgaacagactgatagaaatgcaaaatgttagaccccatsccagacataccacatcagaaatttacattttaacaagtctcgcttgtgcagattcatattcacctaaagtgtgagacatacgctaattttgaagctataattgtttctactagatcattgtattatgtgtgatgttttgggctgcaagtaatagcatcaaacaggaatagcatacgaaaataggactattattgtttcctgtaacatgaagtcaggaaaaggtgttctcatgattgattttatcaatgactaaaattcattttcactcttccatttcattattttcaatgttttggctttattgcctcattga

SEQ ID NO: 409114 - DNA, 632 bp, Homo sapiens
tgtggcagacactgtagttacaaagcagttaagtgtagacactttagttacaaaagttttgtaactaagcattattaacagcccccattctttatcttcctctactgaagtggttgaaaagctaaaatattgcttgatttgttgtagccatgtgaaaagctttggcttaatattatataggcagatgtcactgaggggaacttcccctttttcatacaaagacaagacttcacaaggagaaggcttttggtgcttcccccttttyctgacctggaatgtcaatgtgatgactgaaggagcagtagctatattgcaaccacatacttgaaagccaggcgctaaagttggtggtcttgaaaagatagaggaaaacagaaccttttatgaaattgtaagacccttgtaatgattttgttctgtcaatctttagacttatatgagggaagaaaaccttaattatttaagtcatattaattagatttataactacatgctgcataatgtgatctaagctggtacagctgtgtctcaaacatgtcccctcaggaaaactatttttcccagaatactttgtggaggggactattgtatcagaacaattttaatgcaacagtcatcttcagaaaaattac

SEQ ID NO: 409115 - DNA, 632 bp, Homo sapiens
tgtggcagacactgtagttacaaagcagttaagtgtagacactttagttacaaaagttttgtaactaagcattattaacagcccccattctttatcttcctctactgaagtggttgaaaagctaaaatattgcttgatttgttgtagccatgtgaaaagctttggcttaatattatataggcagatgtcactgaggggaacttcccctttttcatacaaagacaagacttcacaaggagaaggcttttggtgcttccccctttttctgacctggaatgtcaatgtgatgactgaaggagcagtagctatattgcaaccacatacttgaaagccaggcgctaaagttggtggtcttgaaaagatagaggraaacagaaccttttatgaaattgtaagacccttgtaatgattttgttctgtcaatctttagacttatatgagggaagaaaaccttaattatttaagtcatattaattagatttataactacatgctgcataatgtgatctaagctggtacagctgtgtctcaaacatgtcccctcaggaaaactatttttcccagaatactttgtggaggggactattgtatcagaacaattttaatgcaacagtcatcttcagaaaaattac

SEQ ID NO: 409116 - DNA, 632 bp, Homo sapiens
tgtggcagacactgtagttacaaagcagttaagtgtagacactttagttacaaaagttttgtaactaagcattattaacagcccccattctttatcttcctctactgaagtggttgaaaagctaaaatattgcttgatttgttgtagccatgtgaaaagctttggcttaatattatataggcagatgtcactgaggggaacttcccctttttcatacaaagacaagacttcacaaggagaaggcttttggtgcttccccctttttctgacctggaatgtcaatgtgatgactgaaggagcagtagctatattgcaaccacatacttgaaagccaggcgctaaagttggtggtcttgaaaagatagaggaaaacagaamcttttatgaaattgtaagacccttgtaatgattttgttctgtcaatctttagacttatatgagggaagaaaaccttaattatttaagtcatattaattagatttataactacatgctgcataatgtgatctaagctggtacagctgtgtctcaaacatgtcccctcaggaaaactatttttcccagaatactttgtggaggggactattgtatcagaacaattttaatgcaacagtcatcttcagaaaaattac

SEQ ID NO: 409117 - DNA, 538 bp, Homo sapiens
cattgctcattcaggagcaggttatttaatttccatgtatttgcatggttttgaaggttccttttgcagttgatttccacttttagtccactgtggtctaagagagtgcttgatataatttcaatttttaaacatttattgaggctcattttatggcctatcatatggtctatcttggagaaagttccatgcactgttgaatagaatgtatgttttgcggttgttggatgaaatgttctgtatatatctgttaagtccatttgtttcaaggtatttagttaaatccattgtttctctgttgactttctgtcttgataacctgtctaattgtgtcagtggagtactgaagtccccgctrctgtctgtctcatttctttttttttttttttttgagatggagtctcgctctgtcgcccaggctggagtgcagtggcacgatcttggctcactgcaagcttcgcctcccaggttcacgccattcttctgcctcagcctcccgagtagctgagactataggcgcccgctaccatgcccggct

SEQ ID NO: 409118 - DNA, 614 bp, Homo sapiens
ttttaccattctgccatttcatatgaagaaactaaggcccaaagaagttgtgactttctgaaaaccatattgcaatgcaagccaggcctctgacttcaactgtatgatcctcttcccgtgagatcacctttcctgaaatacagtcagccttattgtttctcaccatcgtgtatggtccctggctacctctccagctgtatacatactgtactttttttattgtactgcacaccagctaaactgaacagtttgctgttcttcagttgcagccctcacttagctgacttcactctttgctggaattattccttctcctaagaacccacactcacayacaacttccctcacacccaatacatttcctgtgctatcgaagaccttctaattcttcctggtcttctcaaattaacatttgaatttgctctttagcctacatccatggttgtctgggtgaaccttctatgaaatccttatgagttcaagattcttcatctaaccagggacacagggattgattgctgaacacttacagatttgaactacaattacgttactttatttcattgttatgatagtaaagaggtgagagtaaatttgtattgtagtttgacaac

SEQ ID NO: 409119 - DNA, 612 bp, Homo sapiens
ttttgcttcttcatggatttccttccttaaccctttttttctccagttgtccaaaagttcctgatccttagctgagagaattcagaaaaataatgcattgataccatattttgatcaattgggagagtacagtgtaacccacttttttgggtttaatttgtagttattaacagcttcaaagtgtatattgtgaattatagtttcaatagaatggacatatagtatgtgtcaagtgtcaagtgtcaaagcaccagggatgggcaactaacttggctattttattatgcaatgatatactaaagcagaatgtatgcacagcactagctgtaaagacctaatgcttccagcttattatgtctacatgctttccaaaaataattaattaaatgttgagagagatagatagaacatcgtgttaaaagtagcagtccttttaagaagagaaataatatttcattaygggaaggagatattgttttgtatttgcagtaaccagaggcgccttctagctgtgtccttgcatggtagaagggggtgaccacctccctctggcctcttttataatggcactgattccattcatgaggcctccgcccttaggacctaatcacc

SEQ ID NO: 409120 - DNA, 563 bp, Homo sapiens
aatgcttactgagctggctctacagaatgatcacacatttcaaaattagctactgggatcctcagatttattcttctggtttgaagggggtaaaaaagtcatgtataagtttttttttcagacccaacatagggtacatgaacttaaataatcatactgtaaaccccagcctcttcataccatctcatacagaggcccactaaagatgataatccaagatacaagcacggggggraaaggtttgcaaacttgtatgaacccaagggaaactgcagccgacctactgaacagagaacaccacgagataaagatgtgcaaactgacttccaaatttcagcccccaaatgaataaacacaggtaaaataactttaaatatttgggatggagagacaacactagtgcagagaataattcattttgatgtgaattgctatgaattatcccacaataattccccagctttatcatgagtatgttaacagagtaggaacaaattattatccatatcctccccaaattaaaatccatttaaaaattgccttaggtctcagcaggagtttta

SEQ ID NO: 409121 - DNA, 674 bp, Homo sapiens
aggagtaagatatagcataagcaaagagaagcactaatcatttttgtgggtttctgagtcacacgtgcctgacattttagaaggtctaagaaaatgtagaataagaatgggaggataaattgaggcttgctttccaaggttcccgcttcagttccctattcctttgtaacaaactatcctaaaacgcagaaggcttaaaataacaatttgttttttctcaaaattctggggattggctgggctcwgctaggcgattctttggttggggtaatttatgcagctgcattcagctggtagctcatctgggcctccaagatgtgggtacttcagttcttcctgtctgtctctttctctttctcatcctccctcctctctctccacgtgacctctcatcattcagccatttggcccaagcttcctgacacagcagtggcaagcatgttcctacagaacaaagagaaagccaccaggcttggaactggcacagtgtcacttccactgcattctactgcccaaagcaagtgaaaagcgcagctgcccagagtaaatgtgagaaggcacttagactctacctcttgaagaaaggaatggaaaagaatgtgtggccacttttaatccacctgattccctgcatgtcaagcaagagaatttaagctcaatttcctaagaaacag

SEQ ID NO: 409122 - DNA, 677 bp, Homo sapiens
cccaaataaaaacaccacaattgtttactataaatacattgtttaaagtatgtaaaataactacaatagttaaattattttacctactccaaaatatttgttacttattatgcaaagcctatagaaaaatgtttcaaatatcactattacaattgatacttataatacagcatgatgtatgcaagtgtgtggtgcacatattatgtttgtggttactttaacttgtagatcataaactgtgtgtcaaaaaaaaaaagaaaaaaaaaagagaaacataagaccagagaggataaattataaagattatgtgacatgtgtaggtaaagtccttagcacagcacctgaaacatgatagttattcagtaaatggaaactaaaactattattatatctataacacactgcccccaggcataagagaatatattttctcaatggaaagcaaagattcctttctcccagtgatctcaaaccattggtcgtcctctttacagaaacactaagaaaagttgcagcatcctctcttgaacccaaagggatctaaggcagtcaactttaattgtacaaaaagcaaaytgaggacaagaggggtacatggtttatctgcagttacacagatgacatgcaggtgagaatcctggctctttccaatggcaaatgtacttgagcaactatga

SEQ ID NO: 409123 - DNA, 586 bp, Homo sapiens
acagtcccagctactcaggaggctgaggtgggaggacagtttgagcccaggtggctgaggctgcaatgagccataatcctgccactgcactccagcctgagtgacacagcgagatcctgtyttaaggaaaaaaaaaagaaaaagaaaaagaaaaaaataaaataaaaaagaagtagtgaaactggttttaaaaatacaattgggccaggtgcggtggctcatgtctgtaatcccagcactttgaaaggccgaggcgggcaaatcacgaggtcaggagtttgagaccagcctgaccaacatggtgaaaccccgcctctactaaaattacaaaaattagccaggcgtggtggtgcacgcctgtaatcccagccacttgggaggctgagacaggagaatcacttgatcctgggaggcagaggttgcaatgaactgagattatgccactgcactccagcctgggcgacagagcaagactccatctgaaaaaaaaaaaaaaaaaaaaaaaaaaaattggattttacttaatatatccaaaatgttttaatttcaacatgcaactaatataaaagatgaatgagatagttaa

SEQ ID NO: 409124 - DNA, 578 bp, Homo sapiens
ttgggtatctttagaggacattgttttcttgctagaaattggatgaagtctgttttctacagacttgcacaaaaaccaaatggaaaaattaaaagcagaaaaattcacatgtttcttcatttcctttcactgtatagcatgatccaacttgatacagactcttcataaacccaaagacgtatatattttttaagttgatycaattcaaaagtggattgagaatggcatttttcactagcaggtgggaaacaaactcagaagtaacagctgattcactctcattttttgatttctattattattttttcattctcatgtcttcagatcagactttctaataactacagtcctttagaaattgcagttatattcttactgtccacagagtaaagcgtctatcaaaaataaccaaaatcttccctaagatataagaatcaggtaacaagataatttgtgacaacatgagtgccttgttcatcaccaaaaaagaaatgaattagtgaaacctaggtacttttccctgggcgtttcagtctctcttccacaaacttgcccctttgtacagaactaaaggaaaa

SEQ ID NO: 409125 - DNA, 608 bp, Homo sapiens
cagacttttttcccctagtaggcaaacggtagggtggcctaggatattaaaccagttctgtactctttaatgctcrtgtgggtgttactctcttcacaacagagagggaatcaagcaatggaaatcccagatgaaagccacagactctcagtagaggactgcaacaatggagacatcacatttgctagcatgagggccatgcttttacactgctcacccgtcacctggcgagatgctgctggagcaggtggcaatgaggagatgaggcactgactggtggaggggatgacaaatgagacttagtggttaaggaagcagacagaaagatggcagccccaagatgtagagttactgtctacaaatgggcttggatgggctactcttgaagaaaaaaacaaaaagggtagatgggaggagaaagaacaaaacaagagaaacagagttagatcagacaattgttttctcacctgagataacttctacaaattatgaatgaaccctacagacacaccatttgtctatccactgtcctcctgacccgggtcccatttcatggaaagactacccaagagccaagtttaggaggcaaagtcagtgtgctgactgtg

SEQ ID NO: 409126 - DNA, 492 bp, Homo sapiens
ggtggcgggcacctgtagtcccagctactcaggaggctgaggcaggagaattgcttaaacctggggggyagaggttgcagtgagctgagatcaagccactgtgctccatccagcctgggcaacagagtgagactctgtctcaaaaaaaataaacaaatttaaaaaaataaacaaaagtccaaaattatggccctttgtggatgtgagtcctgggctaggtggctttctcaccttgcctcaaggctgtcacatttccagacacctatgtactctctttctctcttcctggcttgcttgctgtgttaactcttcatccatttttgcagcgctagcaaattcttccttagtggtaaaacttgaacccaccatctgatgggtttcgggaccaggcaccattcccgcactgtgtgcctggttggtcaagacgacaccaagtcattagaccgggatggcctcttgcactttggaggtttgctctcaacttttggcatc

SEQ ID NO: 409127 - DNA, 492 bp, Homo sapiens
ggtggcgggcacctgtagtcccagctactcaggaggctgaggcaggagaattgcttaaacctggggggtagaggttgcagtgagctgagatcaagccactgtgctccatccagcctgggcaacagagtgagactctgtctcaaaaaaaataaacaaatttaaaaaaataaacaaaagtccaaaattatggccctttgtggatgtgagtcctgggctaggtggctttctcaccttgcctcaaggctgtcacatttccagacacctatgtactctctttctctcttcctggcttgcttgctgtgttaactcttcatccatytttgcagcgctagcaaattcttccttagtggtaaaacttgaacccaccatctgatgggtttcgggaccaggcaccattcccgcactgtgtgcctggttggtcaagacgacaccaagtcattagaccgggatggcctcttgcactttggaggtttgctctcaacttttggcatc

SEQ ID NO: 409128 - DNA, 558 bp, Homo sapiens
gaatccagctgtcgcctgttttgtaaataaagttttattggaacagttggaaaacagccacacccgtttgtttacagatgggytgggttatatttgctccacaacagcagcgctaagtagctgggacagagagcatctggcctgcaaagctgaaaatattttactgtacaacaccacagaaaaagtttgcagacccctgctttaagagttttgcagcactgaggccttaactttagacaagatgcaatattgaagaatgagcagaggaaggggatgctcattaaaaaggatgagaaggagccatcagagatagcgccagagaaccaggaatgaggaggacaacctggaggcaaacagaagagagattttctttttcaagagaaatgatatgaatgacagtgtcttgtgtcatcaaagtttaagtaaggtaagggttgaaaactctcttttgaatttagcacctggaaactcattggagttaccatcactatcagttacttaccttcattaaatttgtacatacatggagacctattacatcatattctaaattcctaa

SEQ ID NO: 409129 - DNA, 607 bp, Homo sapiens
cctgatccagtaacttccaggatgctggcaccttaatcaagttacataaatgtgactcagctgtaaaaagagctcatcttcactttttcaagtgagttttacgctctcctcccatgygggctcagcagcactgagaaactcttctctatttctctgtgaaaggagaagtaattaaatcgcaaagttacctctgtacccatctataacctgtctctttccttatcttaagtttcccctgtttaaaaaaagaaaaatctaggccccttggttctatagaagtacttcatcactttaaacagtgcaaatgtttgcctaaaaacgggggaaaaaagttttccagcactggcaaacattttatcaattgttaaacatttcactgttcaagtaagtgctgtttgtctgaagaaatggctctaccaagagtggaggtatgagcagttatttcattctggttcttttcccagcttcttttcctgtaaattttctgtctggaatgctgatgggaaatgttattttgtttttgtttgcagcagttctgttgttttgattttgtctgagtggtatggaaaacagtacgtcacttagagtgggtgttttgtctaccggc

SEQ ID NO: 409130 - DNA, 530 bp, Homo sapiens
atgtgctaactagcttggctgcatttttactttattactggtttataagataaagggcctacagaaggcccaatgaaatacggcatattcttttttatgtatcaagtattttttagaaagatataaaaatattttttaaaactacatttatgccttttatcagtcaaataagctcagtattattttgtttgctattaaaaaaagacagatatggaaggtatagccgataaatacatagatgaattatgcctccatctaattcagctcgtgatgtaaaatcagattctgttaaaactaaatgcatgacttcaactctgttttcatccatatatgcaatcaatgcatgttttcattcttctctttcattctctcctctcccttttcttattcttggtgggaaggagagaagggaatgcgacaggattggaaatcatttarcaataaaagcagccatgagaatttactaaaataattatcaacatccataacaatgcaaatattttagtccctgactaatccaggtatctgga

SEQ ID NO: 409131 - DNA, 589 bp, Homo sapiens
aagtgcatttagaatggccatacctatgttatcatatacctatgttatcgtctctgaatctttgatatatgccagatgggttgcaaattctacagtgaattgttcacttctgtaggtcttctgtgcaggaccctagctctcctgtaatggcastgcaactgctgagaagaaaagacagagtgcaatgatcatgcttccccactctgaccccctcctagttcttccctgcactcttaaggaggcagttgcacagttattttttatttgacattatagttacatatatgcaaagaagatcagggagtatgctcattttattgtgtcttgatgtgttgggaagggaagcatggattataaaattatcttttcatcaagccttctagttagagttgacttgcttctcctggggactgagtaatttgttactcttcattgccctgttactttttccccccaagggtggttctcctcacacctgcaggagacttgttctttcacttctgtattatcacattacatactgcacttatgaaaaacggggcaaatgttttctaacagccatcgtgacaactctgttacaaacagggag

SEQ ID NO: 409132 - DNA, 564 bp, Homo sapiens
acacggctctagagctggactgcccgggctcaatgcttcgctgtgtgaccttgggcaagtcacctaaccttgcggtgcctcagtcactgcagctattaaatagagataaaactaggtttttccttttgggattgttgtgaggataaagtaagacagttcctgaaaagcacactgcctggttccccatggctctcagggaacattagctgtcccaattccattactagcagctggaagacaacataacaggagccaaagggtgggttgtttgtttttttaacatttgcaataagatttcaaaatagaaaatttgaatttgtcaatctggggaaaatacaatcatttaattatagtaataaaatgtctcataatattactgaaaaaatcactgcattgtctcttgcctaaccacagtgaggtcagagggatattatttcttttacacagtggaggaacttaagattcagagaatttaagatgctgagaggcaagccacaaacaaasaattgagattgaaactcaggtttgtctcagtccaaggtttgtctcagatatgccatgtct

SEQ ID NO: 409133 - DNA, 542 bp, Homo sapiens
attattgccaaatttgactgttacgtacttaaaacattatcagaggtattgaattaagaagtaggaagtatagccattagtatagtaagtatagacattcaagatttaatcaatcttctgaaagttggctttttcattgtgtggtaactaacatgataaatgatagtagccataaattctccccacttttagttaagaagcacctgtttttttttctgatctcaagtattcagttttaccacccactgcaaaaatctcagattgccataatacaagattatgctcaggttagatggactaattcatttctctttttaaatrgctcagatatataatctgtgttatacatggttaatatctcccagtatccattcttatatttacttctttttaaataagtaaatttagaatttatttctagaatttctagaaccttctgctcaggttttagttggatatacggtttcctagccagagactagatttccagcctcttttgcagcttaggtcactcatacgactaagcttcaggctatgggata

SEQ ID NO: 409134 - DNA, 579 bp, Homo sapiens
taatgggagtatctttcaggtcaaatcccttaaaaagaaaatttcttgtgctccaattctcttttctttctttcgttggactagaatgcagatattatagcgagttatctctgatcaggctgtcatgaacatcactatgaaagatttaatagatttaagagccacataacagaatgaacctgggtccttagagcagagccactggggttacttaccaactctggacaattatgtgtgagaggaataggcctctatcttgtttgagccactgtattttgaggactctgtcataacagcttaatatatactataaaacatcacctaaagcttttgattcatttttatatgaattgtagcatacaggatcatattttttttattgycctcagtagccaacaacttgggcaggatctccacagtgacgatttaatcatgcttggatatatctttctagtttaggagcatggaacctagagccttctgaggccagagcctgtcagtgactccaacttcagaatccaggacactgaccccatttgtcaaaagtgtctgtcaggacatttcaacaggaggaagaac

SEQ ID NO: 409135 - DNA, 605 bp, Homo sapiens
agggtatttctcacccactcttatgcagttagtggtgaagaggagcagaagagcaatagcaatgggaggaaagtttctgaagcaaggtcaggaatgtctgcagccaagaagaggaagaaaaatagagaccactttagccattcagtgattgctggaaatgacaaaaagcagggatactcataggtggtgacgaggaagaccaaatttgccaccccaaaaagccacttgagccacttccggaggttctgatgatgaaaggaagaaaatggtcaggtgcttggagttctggtgatgctgccaaagaggtctcagtgaaagactgtttggtcatyaatactgtcatccacattcctcattcgcactccctgattttagtggaaaacacaggactatttttgattctcagaatagatttctctttcatgattgaggacataatatagagaaaactccactgacttaagatttggctatttcatatttttgcagataactaatgaagggcccttgagagatacagaactacagtacatgacaaaagagcaacatcccataaatgcgcacatacacacacacacacacacacacacacacacacgcatttt

SEQ ID NO: 409136 - DNA, 588 bp, Homo sapiens
atcttaatttttagtcatcttaccttttcagtaagtttttttattggctcctaagttaccatagtttagttaggtaaaatttcacaktcattgtaaaccaaaatatatggagaagaaaactaaattgttgcggtaacacacacccgtggaggcacaaattggtcctagactgtcatggacccaccctgacttttacaaggatcatggtacaaacctccaaaagtaagagatcatcttgatttctgttttggtgggtttttcactattctcatggccagacatgaatagacatgccaaattttagaacatgtaacacatatcaatagtcatgaaacttcaatttaaatttcatgatgcattttttttttaaataaagtagttaaaaactaatgtgagtttagcctcagtcaaacgaatcctattgggatgttaaaacattcttccagtgattcttccagtgattctcttaacactcttccagtgattctcttataactcagaaatgctttcctgtggaaaatgcctttatagacttatatattcttttggtcattatccgtagcgtttttaaaaattgagaatgaattc

SEQ ID NO: 409137 - DNA, 588 bp, Homo sapiens
atcttaatttttagtcatcttaccttttcagtaagtttttttattggctcctaagttaccatagtttagttaggtaaaatttcacagtcattgtaaaccaaaatatatggagaagaaaactaaattgttgcggtaacacacacccgtggaggcacaaattggtcctagactgtcatggacccaccctgacttttacaaggatcatggtacaaacctccaaaagtaagagatcatcttgatttctgttttggtgggtttttcactattctcatggccagacatgaatagacatgccaaattttagaacatgtaacacatatcaatagtcatgaaacttcaatttaaatttcakgatgcattttttttttaaataaagtagttaaaaactaatgtgagtttagcctcagtcaaacgaatcctattgggatgttaaaacattcttccagtgattcttccagtgattctcttaacactcttccagtgattctcttataactcagaaatgctttcctgtggaaaatgcctttatagacttatatattcttttggtcattatccgtagcgtttttaaaaattgagaatgaattc

SEQ ID NO: 409138 - DNA, 508 bp, Homo sapiens
ttcatttgcttttgctttttcccctttgcactttaatctgattcacttcccttctatatcatttttcccatttacctagagattatcctcctctttatttttctccaartctgaaaagtcatgtgctctttcgaagatgctaaacaattatgtgatctgtcttccggttttaaaattttcagtttttttttcttttggtctaatttcctccccatttctttatgtatttctctctctcttttttttttttacacttgtttttcttccttgttctcattctccaacatatttgcttgatcctggtattgacaaaaagataaggtaaacaagtagaactctattttttttttttttttgcatgaggcttaaatagctttttagatataagagaatggaggttgtgattcacagcttccagcaaaattctcaatttttaacagtctacttagggtatttctcccaacttcgttttgtaatacttgggactctgttcctaaaatctaattcc

SEQ ID NO: 409139 - DNA, 504 bp, Homo sapiens
gttcttttttgcttagtcttgctttgaatatgcaggctcttttttggttccatccgaattttaggattgcttttcctagttctgtgaagagtgatggtggtatttggatgggaattgcattgaacttttagattgcttaaaatttttaattttgtcatccatctcccatttctcccatttcatttgcttttgctttttcccctttgcactttaatctgattcacttcccttctatatcatttttcccatttacctagagattatcctcctctttatttttctccaaatctgaaaagtcatgtgctctttcgaagatgctaaacaattatgtgatctgtcttccggttttaaaattttcagtttttttttcttttggtctaatttcctccccatttctttatgtatttctctctctctyttttttttttacacttgtttttcttccttgttctcattctccaacatatttgcttgatcctggtattgacaaaaagataaggtaaa

SEQ ID NO: 409140 - DNA, 593 bp, Homo sapiens
  misc_feature (1)...(593): n = A,T,C or G
cccccaacttcctaaacattttttaaaattagcatatagtaaggcttacttgtgctgtaaagttatatgggatttgacgtatgcatgctgttgtatatccactattgcagtataatgcagaatagtttcgctgccctataccaccctctttgcttcacctgttcaacccttacccctctgaaaatcctggcaaacatttgtctccttcacatctctatagttttggcttttctaaaatgtcatataaattgaatcatgtagtatgtaaactttccaggctggcttatttcacktaacaatatgcatttaagattattctgtatctttgtatggcttgatacctcatcctgttttataacttagtagtatgcaattgtatgactgtaccacagttgtttgtccactcctctatttaaggataacttggttgcttacagtttttgatcattacaaataaagttcccataagtattcacttgtaggtttttgtgcgaacatatgttttttgagcagttgggtaaagacctaggagagcaaccgctnggattgtatggtgaaactgggtttaggtttgtaagaaacttccaattgtc

SEQ ID NO: 409141 - DNA, 426 bp, Homo sapiens
gctgttggcttccctacttttggggttttgggaatccttgctcctcagcttgcagatggcctattgtgggacttcaccttatgattgtgtgagccaatactccttaataaacttccctttatatatacacctatcctattagttctgtccctctagagaatcctgactaataccaaaacttcgaatgaatctgtgtcatacagatatttcatctgtaatccactgtttttatactggagttctgttgatgtgatggtmaggtgggggaagaggtagtactctataatgttcttaataaatctcagtcttttagtgggcttagatgttacagttgaacccttcgcaattgtttctccttgatataacttcttcccccacatgcttcttggctgcagttgatccctgttgactctttttgttttcatt

SEQ ID NO: 409142 - DNA, 551 bp, Homo sapiens
cctgcttttctcagttatttttgtctgacttgccaaaaagaaaagacagtagagagtttgttttaatggaatgtagagcacaaccagtgtaaaataatcacatattttactctaagaattcttttctaaagtttagtttttgtttttaatatcaacatgctgttataatacttataattaaaattctatttattttaatttttaaagaaatgcatgctcattgcatgatctaaatagtattactattttctatttctttactgtattcaaacaaataaacatataaaaatgcaagtttacatacatagcaattataaaactgaaataatagaawgtattaagatgtacacataaacatttatcattttttcactgtattataatctaatatatattaaatactaaatacacattaaatactattcaaaagtacataaaaatatggtacttcttataaattattttaaaagataaaaagtataaaggatataaaaagacatccatgaaaaagcattttgctacatagtaagtgctttatttaaaaaaatcac

SEQ ID NO: 409143 - DNA, 599 bp, Homo sapiens
gtgcataggaagtgatttttttttaatggtaagatttcattattccaataatatccctttgcttagcatatttttgtgacatcttttgtgactggcctttagaatcaccttataaattacacgggcaaagctgttctattattttgaattgacatcctgtttacccaaatccgtastgtccagttaatgaactactttctttttagacctttgattcaaaataaagtttagcttttataagaatgagaatccaccttcaagtgaacacactttgtggcaattaaaggtacttatgatgagaagcatgtttcgaaagtgtgatggtgtgtatttattttgttttgtttttaatagaaaggaagcaaagcataatggttaagaatatgaactgagaagtcaagcccaaattctagatgtggttttgtcactttgacaagtaactaattccacctggcctcagtttcctcatctgcaaaatggagcctctaccaacactttacagttgccatgagggtgcaatagatttaacatagacatatgtctaccacagtgccataggaaagaaaccccgtaaaagacagtttagtcttcctcataca

SEQ ID NO: 409144 - DNA, 598 bp, Homo sapiens
aaagtgtgatggtgtgtatttattttgttttgtttttaatagaaaggaagcaaagcataatggttaagaatatgaactgagaagtcaagcccaaattctagatgtggttttgtcactttgacaagtaactaattccacctggcctcagtttcctcatctgcaaaatggagcctctaccaacactttacagttgccatgagggtgcaatagatttaacatagacatatgtctaccacagtgccataggaaagaaacsccgtaaaagacagtttagtcttcctcatacacttgcgtgatggcatagaacactaataaagacacctccataatatctctcccctttcatctaaaaaaaaattatgtcttgcctgatagactatttataatagctgatcaggagcaaaacagagaataaatacagagagggagttcaaggtatgaggtccgaggagtttagaggcatatggatatcattagagcatagaagagtaagaccaattggtgggcagggaagtgaataagaggaaaagtgggaggctttgagattttttgtttgagtctaggtgtggcctgcatagaatttaggagataaatgtta

SEQ ID NO: 409145 - DNA, 598 bp, Homo sapiens
aaagtgtgatggtgtgtatttattttgttttgtttttaatagaaaggaagcaaagcataatggttaagaatatgaactgagaagtcaagcccaaattctagatgtggttttgtcactttgacaagtaactaattccacctggcctcagtttcctcatctgcaaaatggagcctctaccaacactttacagttgccatgagggtgcaatagatttaacatagacatatgtctaccacagtgccataggaaagaaaccccgtaaaagacagtttagtcttcctcatacacttgygtgatggcatagaacactaataaagacacctccataatatctctcccctttcatctaaaaaaaaattatgtcttgcctgatagactatttataatagctgatcaggagcaaaacagagaataaatacagagagggagttcaaggtatgaggtccgaggagtttagaggcatatggatatcattagagcatagaagagtaagaccaattggtgggcagggaagtgaataagaggaaaagtgggaggctttgagattttttgtttgagtctaggtgtggcctgcatagaatttaggagataaatgtta

SEQ ID NO: 409146 - DNA, 598 bp, Homo sapiens
aaagtgtgatggtgtgtatttattttgttttgtttttaatagaaaggaagcaaagcataatggttaagaatatgaactgagaagtcaagcccaaattctagatgtggttttgtcactttgacaagtaactaattccacctggcctcagtttcctcatctgcaaaatggagcctctaccaacactttacagttgccatgagggtgcaatagatttaacatagacatatgtctaccacagtgccataggaaagaaaccccgtaaaagacagtttagtcttcctcatacacttgcgtgatggcatagaacactaataaagacacctcyataatatctctcccctttcatctaaaaaaaaattatgtcttgcctgatagactatttataatagctgatcaggagcaaaacagagaataaatacagagagggagttcaaggtatgaggtccgaggagtttagaggcatatggatatcattagagcatagaagagtaagaccaattggtgggcagggaagtgaataagaggaaaagtgggaggctttgagattttttgtttgagtctaggtgtggcctgcatagaatttaggagataaatgtta

SEQ ID NO: 409147 - DNA, 598 bp, Homo sapiens
aaagtgtgatggtgtgtatttattttgttttgtttttaatagaaaggaagcaaagcataatggttaagaatatgaactgagaagtcaagcccaaattctagatgtggttttgtcactttgacaagtaactaattccacctggcctcagtttcctcatctgcaaaatggagcctctaccaacactttacagttgccatgagggtgcaatagatttaacatagacatatgtctaccacagtgccataggaaagaaaccccgtaaaagacagtttagtcttcctcatacacttgcgtgatggcatagaacactaataaagacacctccataatatctctcccctttcatctaaaaaaaaattatgtcttgcctgatagactatttataatagctgatcaggagcaaaacagagaataaatacagagagggagttcaaggtatgaggtcmgaggagtttagaggcatatggatatcattagagcatagaagagtaagaccaattggtgggcagggaagtgaataagaggaaaagtgggaggctttgagattttttgtttgagtctaggtgtggcctgcatagaatttaggagataaatgtta

SEQ ID NO: 409148 - DNA, 492 bp, Homo sapiens
atttaagagaaaagaatctgatttaagaaaaataacttaagtaatttatcttcataattgcttctttctttacctttgtgtttgagggatgaccactttgtatttccctaatttatttagcagctgaaaagcaaattgaaagctgtttttagtttttaattgttgggattaattctcttaaaataaacctgtctttttaaagcttaaacttgttatagtgaaataagaaatgaatayatttaggagaaattggaatttgcaaatttaaacacaagtacttgagaatttaattttagagataaatgcaaagttcacttaatcagtaattcagttaaatctaaccatagtatgtggatagtatgatatcacagaaattaaacagatgaccttagttatctcattttgagaacacctgcaacttgatattataggttaataaataacaaaatttttgttacatttatgattgcttaatttcaatttaagaggaaa

SEQ ID NO: 409149 - DNA, 604 bp, Homo sapiens
tagtgaaataagaaatgaatatatttaggagaaattggaatttgcaaatttaaacacaagtacttgagaatttaattttagagataaatgcaaagttcacttaatcagtaattcagttaaatctaaccatagtatgtggatagtatgatatcacagaaattaaacagatgaccttagttatctcattttgagaacacctgcaacttgatattataggttaataartaacaaaatttttgttacatttatgattgcttaatttcaatttaagaggaaatataagatgaaatgtttgatgctcagtacctacaaaggctctgtgaaatactttggtgtctttttgtagtgatttattcaagaaaattttgctaaatgccaatgagggtggaaataaaattacctcttaaaataaaattgtttgttttcatctcactgagtgattgcttctacagcattttcattaactcaataaaggaggactggaccatctatgcttataacaattataaaaactaattggacaagttctcaagaaacaagaaaatctggccttataatttgtgattttaggttgtatttttatgaaattacaaaaagatttagg

SEQ ID NO: 409150 - DNA, 604 bp, Homo sapiens
tagtgaaataagaaatgaatatatttaggagaaattggaatttgcaaatttaaacacaagtacttgagaatttaattttagagataaatgcaaagttcacttaatcagtaattcagttaaatctaaccatagtatgtggatagtatgatatcacagaaattaaacagatgaccttagttatctcattttgagaacacctgcaacttgatattataggttaataaataacaaaatttttgttacatttatgattgcttaatttcaatttaagaggaaatataagatgaaatgtttgatgctcagtacctacaaaggctctgtgaaatactttggtgtctttttgtagtgatttattcaagaaaattttgctaaatgccaatgagggtggaaataaaattacctcttaaaataaaattgtttgttttcatctcactgagtgattgcttctacagcattttcattaactcartaaaggaggactggaccatctatgcttataacaattataaaaactaattggacaagttctcaagaaacaagaaaatctggccttataatttgtgattttaggttgtatttttatgaaattacaaaaagatttagg

SEQ ID NO: 409151 - DNA, 566 bp, Homo sapiens
cagaattattttagtgttgcctgttcaaacttactctgaggcagagggatgaattccctcaaatactgcctcagccaagaatgagtccaaatgtagcggcagtcttgattattttgaggaggttggtaattagatcttttccaaatgtcttactttctttgtttcttgaaaagttctattacaggtgtcatccctgatttgccaaatcaatatttttaatgttggggtctttatttcaaaacacccacatgtgatttttctgggcattcctggttaagaactactttaggaacttaaattctggttttagcattctttcaggaagatcattgtttcataatccaaccaactgccttatctagcaacacttggaaaagtcattaaccagccttacatgcaaaagtcactcctgcttttattcattttggagtgtaccacatsgagctgtttaattaggaataaacaccagctgtttaattaggaataaacacaagtctgtccttgtgacttttgattgtgggtcatttttaaaaaaactgttatttgcttgggttgggtttggtttc

SEQ ID NO: 409152 - DNA, 647 bp, Homo sapiens
tgcaacacctgcagccagcattggtcaacagaaagggccaaattcttctccatgacaaccctcgaccacacgttgcacaaccaacacttcaaaagttaaaagaattgggctacaaagtttttcctcatcctccatgttcacctgacctctcaccaactgactactacttcttcaagcatctcaacatctttttgcataaaagccttccacaaccagcaagatgcagaaaatgctttccaagacttcatcaaattccaaagcatggatttttatgctacaggaataaacaaacttatttctcattggcaaaaatgtgttgattttattggttcctacatttattaataaagatatatttgagcctagttataataatttaaaattcacgatccaaaactgcaattacttttgcactaaactaaatttaacagtaatttcttaatatcatcaaatrtctagtttctacttgaattttcctgatagttttatagatgctttctgtagtttttgaattagaatgcaaatagggttcacacattacatttgtttgaattgcctcttaaatatggttttctctgtagatttcccctctagctttttgtcctgatgtatttgttgaagatattaagtaatttgtttggaaaatt

SEQ ID NO: 409153 - DNA, 526 bp, Homo sapiens
tattttactaattttttcaaagaaacaaattctggattcattgatttttcgaatagcattttgtgtctcagtctccttcagttcagctccaattttgattatttcttttgttctgctagcactgggtttgttttcttcttggttatctagttattttagttgggatgttagattggtaattttcagatctttctaactttttgatgtgagcatttatcgctataaattttccttctaaccatgccttagctgtgtcttggagattttggtakgttgtatctttgtactcattagtttgaaagaacttcttgatttctgccttaatttcattatttacccaaaagtcattcaggagcaggttattaaatttctatataattatatggttttcactgagtatcttagtcttgatttctaatttgattatgctgtggtctgagatactggttgttatgatttcagttcttttgcatttgaggagtgttttgtgtgtcattatgtgatcagttcttgagtatgtgccatg

SEQ ID NO: 409154 - DNA, 563 bp, Homo sapiens
gtcactaaaatttaaggttactatgaataattactctagttagtatataattctgtatacaaaatgtgccagagatgtgttcttgttgagtaaaagaataatgttgtctaattcagaagttatctaaagattaattcaaattatggacttaaaaaggttatttatgaaataagatagaaaggaaccagtaaatagcagagagaaatgtgaagaaagttatgtgtatgaagatgaatttttggtaaggaaggttataaagaaaagacaataattttgtatgagaaggaatcttgtatggcaaatttttgtcctaaagtaaaatgattggtaatttaaaaaaaaattaagaaaaaagaaaagaaaatttaggacaaaacagaatgtccaagcatgtcataggtggcctgagtatatcataygtagttttctcctctttgtgtgtgtatcttcatgcatatgaaaataaaagttgaaaaagtttaaataataaaatattctttaaaacctgatagaaaactggaaaaatctggctaattatcattgctcatagttaaagctcttag

SEQ ID NO: 409155 - DNA, 553 bp, Homo sapiens
ttttacaaacatgctggcttttaaatcattgataaaataaaaataaaaatgtcttcagaattgtcagtatacatttttatctggattttctatttgtccttgctacatattttgagatatcagggtttggcacagaaagttataaagctacaaacccagcccaaaaaatgatctttgtccattttttttgataagtaagacaaattgaatgtattcatttaataaaactggaatcttctgcattattggcaaaaatacccatgyatttaactttgaggttcttacttggtgagaaattcctgatgttcactagctgtttaaaaaatggttcacaaggaaatcaccaactttaaatcatggtgtctaatatctcagttttcagaagtaatctcaataaactgttgaaagaattgagtacatgtaagtgtgataaatgttttaggtaaacttttatgtaatttaaaatcttaaaattatttttgatgttcattggatatctgtgtcatttccgattaagaaacagttatgatatggggaaatatgtttccaaaaa

SEQ ID NO: 409156 - DNA, 568 bp, Homo sapiens
gcactaaagtacttgctggtcacgcccctaagtgaatttcttaattgtacaaaatacatagtggtattgtggacttaaagatgttaaattgtgtatcagaaataaaatattcatcatatgggtttttttaggctctgggtaacactgtacctccaaggtaaattgaatagagaaaaattgatggttagcattctgtttatttgtttctaattctaatttttatttatttgctgtttgttctcctttgggtttcacttatataawaccattggttttttttagtttctaatggaaggcttttatttggttctacgatttactctatctaaagttcctaagctatctttgtcaagcctccaaaaattgatatatgacaccagccatgtaaaactcaattggttttgcttacctctaatgatcttgagagctaaaagaaatttcaggttactggggaagaaagacttattttataagttctgaagagaaatagtacatattatatattttattatttggaaaaagtaggtgagaatacaaatgtttaaatggtgcttatttgcaattcaac

SEQ ID NO: 409157 - DNA, 568 bp, Homo sapiens
gcactaaagtacttgctggtcacgcccctaagtgaatttcttaattgtacaaaatacatagtggtattgtggacttaaagatgttaaattgtgtatcagaaataaaatattcatcatatgggtttttttaggctctgggtaacactgtacctccaaggtaaattgaatagagaaaaattgatggttagcattctgtttatttgtttctaattctaatttttatttatttgctgtttgttctcctttgggtttcacttatataataccattggttttttttagtttctaatggaaggcttttatttggttctacgatttactctatctaaagttcctaagctatctttgtcaagcctccaaaaattgatatatgacaccagccatgtaaaactcaattggttttgcttacctctaatgatcttgagagctaaaagaamtttcaggttactggggaagaaagacttattttataagttctgaagagaaatagtacatattatatattttattatttggaaaaagtaggtgagaatacaaatgtttaaatggtgcttatttgcaattcaac

SEQ ID NO: 409158 - DNA, 568 bp, Homo sapiens
gcactaaagtacttgctggtcacgcccctaagtgaatttcttaattgtacaaaatacatagtggtattgtggacttaaagatgttaaattgtgtatcagaaataaaatattcatcatatgggtttttttaggctctgggtaacactgtacctccaaggtaaattgaatagagaaaaattgatggttagcattctgtttatttgtttctaattctaatttttatttatttgctgtttgttctcctttgggtttcacttatataataccattggttttttttagtttctaatggaaggcttttatttggttctacgatttactctatctaaagttcctaagctatctttgtcaagcctccaaaaattgatatatgacaccagccatgtaaaactcaattggttttgcttacctctaatgatcttgagagctaaaagaaatttcaggttactggggaagaaagacttattttataakttctgaagagaaatagtacatattatatattttattatttggaaaaagtaggtgagaatacaaatgtttaaatggtgcttatttgcaattcaac

SEQ ID NO: 409159 - DNA, 518 bp, Homo sapiens
ctatgttaatatactgtgattctctttaaaggcagtargtaagtggctggatctagcagcaggagatgaatgaagacctcctttgagaagggaaggcattttgatacagttgatcctcatttgccatggtcatgacacagtcactctgaacactgaattaatgaatacaaaccattgttcctatggaaaatacaaggttatgttcctataagcctctggtcacaatatttttgtcaatcagttaattcacaaccttgttttatgtgtgtttctgtttaaagacaccttacttaatatatgttattgattcactacccttgaactcatggctaacagcactctaacttatgcccaaacaaagcttatctaacacacatattttctccataatgcacatcacagacttcttgtgcttaaaatagtagacaacaatttagcactatgcttcaaggacattttacagcaaacctgctaacaaacaaaacaaaaatgtgaaaaacttagcagtaagtagactg

SEQ ID NO: 409160 - DNA, 570 bp, Homo sapiens
caactattgccacaaaaaaaaaagttgtataataaagaaacttacatacagtttctttaaaataatccatggaagaaaccagtcatgggtaccttgcttgtacattgtcgcctactactactactactaccaacaataataataatgatgatgataatgtttgtggtatttcccatttgaaaacagtatcaaaatgcctccccaaactgaaggaatagattaagaaaaacctatgtctatgttaatatactgtgattctctttaaaggcagtaggtaagtggctggatctagcagcaggagatgaatgaagacctcctttgagaagggaaggcattttgatacagttgatcctcatttgccatggtcatgacacagtcactctgaacactgaattaatgaatacaaaccattgttcctatggaaaatacaaggttatgttcctataagcctctggtcacaatatttttgtcaatcagttaattcacaaccttgttttatgtgtgtttctgtttaaagacaccttacttaatatatrttattgattcactacccttgaactcatggctaac

SEQ ID NO: 409161 - DNA, 589 bp, Homo sapiens
ctctcttctgaaaacaattgttttggaatgatagaattgtataattgaaccccagtaattttaaggatactgttagcatgttaaaatgtcaatagagtaatttttacttcgttctatttcccctaaacaatgtaaccaagatggtacaaaaatttctaaaactgagacagaaaaatatgaaagccaagagctttaataactagaagatcaatgttcaatttataatcaccacaatgaaagtcaccttacttagaacagaaaccttcccaggaaagtgtaatacatgttttgcatagctgtcacacttattttacttgtatagtcttgaataatgcaaaaactacatataactcgatacataaccctaggaaaaaatgtacgataatgagtaagtttctgatttccatgatttttgctttcgtgttcattgacttgacagtcaaaatcagtcacttaaagggtgaatggtattttgccttgacaggaactgcacttcaatatagcagactgtttaatataactgtggtatagtctgcatgatatattatgcagttaaggtatttyatgtactaacatacagaaattcaga

SEQ ID NO: 409162 - DNA, 565 bp, Homo sapiens
tgcacttacttttttccccagtattttatttattgggttgaatagttcargctttaggccaatagaggaggtgtccatggataaaaacttgctatggctaaagcaggtgaaaaatgcaatacccaatggtgatcataggtcccaaccttgacagaggcagcaagaggacctctcagtgaaaatcatcaaggtctttttagggtgaaggtaggaagccatcttagctcccctgccaggccagaagaaagtaatccacctcccattctgactctgtgttccaactattcagatcagacaggcatctcttgccattgacaagagtactgattttccatgtagagagcgtttgtgactctaccttttatttaagcctgaacctggagggcacttttcctttgggaatgcatttagtctgaagtgttccagagaggctatctacagatgcaatcatgctgagctcctgtgggagaagccccagcttgtgtgtgcagtggtgggtgagggagagaagaggtccccttcttcaagacccttcataagcaccagggctgcctcactattgggg

SEQ ID NO: 409163 - DNA, 565 bp, Homo sapiens
tgcacttacttttttccccagtattttatttattgggttgaatagttcaggctttargccaatagaggaggtgtccatggataaaaacttgctatggctaaagcaggtgaaaaatgcaatacccaatggtgatcataggtcccaaccttgacagaggcagcaagaggacctctcagtgaaaatcatcaaggtctttttagggtgaaggtaggaagccatcttagctcccctgccaggccagaagaaagtaatccacctcccattctgactctgtgttccaactattcagatcagacaggcatctcttgccattgacaagagtactgattttccatgtagagagcgtttgtgactctaccttttatttaagcctgaacctggagggcacttttcctttgggaatgcatttagtctgaagtgttccagagaggctatctacagatgcaatcatgctgagctcctgtgggagaagccccagcttgtgtgtgcagtggtgggtgagggagagaagaggtccccttcttcaagacccttcataagcaccagggctgcctcactattgggg

SEQ ID NO: 409164 - DNA, 534 bp, Homo sapiens
ttatttaagtatggactcagatatttatataactatggactcatagatatttatttatataactatgggctcatacattttatacttttggttttaatctaacacactttgtatacttcgttgctcaaattcttccagstttggcccttgggagctcttgaatgctttcatttggctcctgtgtccctttggcatacccccattgatattgatgtctctctctctctctgtgtgtatgtgtatatgtgtgtgtgtgtatgtgtgtgtgtatgtgtatgtgtgtgtgtatgtgtatgtgtatgtgttttgtacttattttctgacactatagagtgctccagcctcattgttttattccttctgtgccctggaatcagccatttctcaaaggagtcctcgttcgtttcactggagaatgacactggaaacatgtagcccctttgttttggccaatttctcccatttgaaatgggtgtatttaccaaattccagtacccccattgtagctaagaagtagctaacttgcttttgatt

SEQ ID NO: 409165 - DNA, 548 bp, Homo sapiens
aatattcttagactccacactctttcggcatgcttataagtgagggagagagggacaccagaaattactgaatctgtgctccagcattttcctgtcctttayccatatcgttagttacatgttatatattttgcgatttttgcataaaagaatgtatacattttccaagttaataggttagcttcaataacagtggctaaccatagttaaaacaaattatacttgttttaactcaagctgttggagctttcacttgatgtaggaagtgcagaattgcttttggagttataaagaactaggtttgaatccctgccgtgtgatatcaggcatattatttaagttctccacagcttagttttcttatttgtataatagtgagttattatatgcgaagctgccacattataacccctgtggcaaactaactgttcaatagtaatggatacattttcctttcctaaaaatgattgccctatttactcagtaattcatggctgcaattatatttttttcaacttttattttagaatcaacaggtatgtgtgcag

SEQ ID NO: 409166 - DNA, 555 bp, Homo sapiens
gaagctctctttgaataaaggcaaactaaatattcccatggaggtggaagagatagagtttacactttcaaaatttcccgtatacagttcacccttctgattgtagtatacttactattaaatagctgtgctttgagttggaattagttctgtacatgattgttactacttattaggatggtatagtgaacatattttgtcttgcctacatagccccagcatcaatctttccttctcctttcctaataatgcccagattttcctgtgtgttatccctactgtttgagtgcttgcattcagaaattcaaagtgaatcttaatacacctacaccagttagcataatcctgtaccctttgtctcagtaattagctcaaagatagacatgttatctatgctagtccaatactagtgaaaactaggtctttttttccatggtttgggaaagcatccactatttctgtttgtaaacatgaatgaggaaacagggagccctggaaactattggcactgrcatcgatgatatgttgaggaaaggaggtatctttatgaagttg

SEQ ID NO: 409167 - DNA, 563 bp, Homo sapiens
tattgcagtatttgaactgaatctatgattcacttggtaaaacactttgttgttgtgcctaattacagtagggccaagttttacaagtaatcaactaatccaaacctctctagtaatttgagtaggtggaaagtaggtgcaatttagtcctatttcacaaaatatctaccccaagttttaacactccaaaatgctgtgaaagaaattgttgaaaatgcaatgtgttacagaagttcaatattttgtaagggaaatagaaaaggaatctaagttcatgaagaaaagcagacaatgcaaaatttccaattgctgaagaaaatcatgctcatgtattttttatacagtcaattttcttttcaaattgccaaagtatttgtctcatctccaatttttaggaaaatgtctatattaataagaagccagaaattatwcccttttaaattatttatacttacaatgaaaaaatagacattaatgtaaaatgtgcttggatatttgatttttcaaaattacttcagagtttatcaactatctaatgtaagaagccacttcaaattatagtg

SEQ ID NO: 409168 - DNA, 530 bp, Homo sapiens
gacaactagtgtctaaacattagctggaaagggcctaagaaagaagaacttaatgtgttcggaattttattactggtaaaygtaaaagaaaaagaaaactagtggtttggctgataggattaaagatagcaaaaagaaggcaggactagcttgtagctcttgctaggacagacagagcagtgagtggagactcctcattgtgaacttttgctcaaagaactactgcaggaacataccaggaaagctgagagaatccacagaccctttgaaggaactggatcaccgctgttggctccctaagatgccgaaaactgtgagtcacttgctttctcaggagggaggctagtggtctggggcaagttctcagccctggtcactggctgcctggaaatagacttagtgctgttgcagggagcacagtgggagtgagaccagcctttagaactgcaggctgcatgggaatggggtgagacctgtgactactggctttcccccacttctctggtgacctgtataactcagcagaggca

SEQ ID NO: 409169 - DNA, 530 bp, Homo sapiens
gacaactagtgtctaaacattagctggaaagggcctaagaaagaagaacttaatgtgttcggaattttattactggtaaatgtaaaagaaaaagaaaactagtggtttggctgataggattaaagatagcaaaaagaaggcaggactagcttgtagctcttgctaggacagacagagcagtgagtggagactcctcattgtgaacttttgctcaaagaactactgcaggaacataccaggaaagctgagagaatccacagaccctttgaaggaactggatcaccgctgttggctccctaagatgccgaaaactgtgagtcacttgctttctcaggagggaggctagtggtctggggcaagttctcagccctggtcactggctgcctggaaatagacttagtgctgttgcagggagcacagtgggagtgagaccagcctttagaactgcaggctgcatgggaatggggtgasacctgtgactactggctttcccccacttctctggtgacctgtataactcagcagaggca

SEQ ID NO: 409170 - DNA, 530 bp, Homo sapiens
gacaactagtgtctaaacattagctggaaagggcctaagaaagaagaacttaatgtgttcggaattttattactggtaaatgtaaaagaaaaagaaaactagtggtttggctgataggattaaagatagcaaaaagaaggcaggactagcttgtagctcttgctaggacagacagagcagtgagtggagactcctcattgtgaacttttgctcaaagaactactgcaggaacataccaggaaagctgagagaatccacagaccctttgaaggaactggatcaccgctgttggctccctaagatgccgaaaactgtgagtcacttgctttctcaggagggaggctagtggtctggggcaagttctcagccctggtcactggctgcctggaaatagacttagtgctgttgcagggagcacagtgggagtgagaccagcctttagaactgcaggctgcatgggaatggggtgagacctgtgactmctggctttcccccacttctctggtgacctgtataactcagcagaggca

SEQ ID NO: 409171 - DNA, 608 bp, Homo sapiens
gtttaacctttctaatgtagtatcatctgcaattttggaggaaaaactggtatttaagtcatagaaaaattgtaggaatgagtaagatcatgcatataaagcacttgagcacagtgtctgtagtatttaataaacagtagtctaagataagtaatatctattctacttaagcactatgcaccctccaaatcccatacttaaagcatttcataacttaaaaagtaaaaattgaaggggggaagaccaagttaaatcccattcttttcataagccattcccggccacattgagcctgaggtaacacacctgtttcctgcctttcattggcctagcctctgctatttggcattatyattcatcctcatctgaataggtcagacctctgcagaaaaatgtcagctacctaagtccagaatactattttgcctctttgtggctcaatacaggaagatgtcatcactgttggtctgttacatctcaaagcgatatcttctttctctagtgtttctatgctgatctggctgctggcattgcttccaactcagctcatcctccttagactttctaactgggttttatagactttctcatcttccttggcctgtaca

SEQ ID NO: 409172 - DNA, 625 bp, Homo sapiens
atatgtgggagaagaatattccaggtaatagaatatctaaagcaaagaaaccaaaatgagagcattcctggaatatttgaggaacacaaggagctcagtgtggctgcaggagactgaatgagagagagcagcaggccaagaagccaaagtggaaaggggaggtcctggccttgtagccattgtatggacttcaacttttcccttgagtgaaatgggagctatttcaggattttaarcagaagagctccatgatgcgatttcggttttatagggctcactctggctaattttttgacaatagactctaagaggacaagaatagaatgagacctgatcaggggttctagtaactcagcagaggaggtaagaaatggtcaaattctgagtatattttaaaattagggctaacaggatttcctgaaagatcggctgtggggtgtgaaagaacaaaagtcactaaagatgatcttcaagttgtcatgagcaactgtaatgatggagttgcctgaactgagattagtgaaggtttgcagagaggtgaggaatatcaggagttgaatatgaggcatgttgagtctaagagatattgctggatacaggaatatcaggtctggacaaaagatgg

SEQ ID NO: 409173 - DNA, 483 bp, Homo sapiens
cataattcacaatggcaccttccagcctctgtggcaaacccattcttccgcatcctgaattcatgtcaggtatttgtttttctttcttgattgccttcctgttaagtatttgttgttayttctattatttttcaagatcattttgggttcaattctatcttcaaaggagctaggcatcattctcacttttgtgtgttaattcaattccaaagtattaagtattatttttgagccactctaaatcagcaataaacaggtggggtgcatatgccggtgactagggcaggatttgagaggctcagtgcctctttctctgcggcaccttagagaggtggctttactcattgttctcttgtcacataccaaccagaaaaaggaatcagatgtaatcaaatgctgtaaaaacaaaataaaattcttgtcacattagagtattcaaaaacattagtttcctttccttttatactatctgaaaaaaaaaca

SEQ ID NO: 409174 - DNA, 534 bp, Homo sapiens
ggctaaatgtcctgaagttgttggtgctctaggaaaagtcatcttcagtacaaactcttatgatttagaaaactaatctgattattattttttcataatcaacatgcggtttagcaagcaactgtgtgtcttcatgtggtctctggaacatatttttggtttacttttgctttttgkatataactttacatttaaacatgttgatagtaaatcagtattgaatattatttttaaaacactttttaaaaagtattgctttttagccattgtatcctgagaaccacatatgttaccatctgatggaaaatgtattcccagtggtgcattgcaaaaatacaagaccagttttttttaaagcaattaataaaaaaaaatcagagcagactgatggttatctctataatatagtcatttcacctactagaattgtgtaatattcacttagtgggtgagaaagcaatgaaattaaacttggcctggaggaaagagcacataattcagatactggttggtacatcttttatagttatgcaa

SEQ ID NO: 409175 - DNA, 647 bp, Homo sapiens
ggctcagtggctcagtaatcccagcactttgggaggccaaggcaggtggatcatgaggtcagcagctcgagaccagcctggcatggtggaaaaccctctctcctaaaagtataaaaattagccaggcatggtggcacgtgcctgtagtcccagctactcaggaggctgaggcagaagaatcacttgaacctgggaggtggaggttgcagtgagctgagcttgccctactgtactccagcctgggtgacagagtgatgctccatctcaaaaaaaaaaaaaaaattatatccatgttattctatatttttattgtctttttttgttattattgttggtagtaaacaaaaagatttagactaatgtggaaactcaaccaaaggaagtataatagaaatttttgtcaaaacacttatctttaaaagttaatattctctttccttttaaaamaattcttagagatctacatctacatatatttccccttttggaaagttatataatagttgaacaaatgaaaaatgtttgtatttaaagtaaaatgcaaaaacttaaagcaaaagacagtcaaagtacttatttatctttagcctatttttaaagtcccaatttgattatgtaaaagcataatgtttataatagcaacattt

SEQ ID NO: 409176 - DNA, 669 bp, Homo sapiens
caatttaattgcacaaatatttagagggttcaaagatgatgttggaaggctggagctcgtaattgatgcatacacatctatgctgattatagaatagatttwtaaatagcttttggacatttctttctaaagaaaccaatgatcagtttcctaagaatttctgcctcttgcaattttttggcatctagagctgattctgtttaaaatgaggcacttgtgacactttgaatgcactctggttctgaacaggatcttgagcctgtcttgagtctcctaccttgagctgccacctcactttgtcatactctgtcatctaccttcttcctagtgaatgatttattttgaagtttttgttttaattttcttctctcactttagctttagattgatagtcttcctctcttgacatctgttttgcctcactgagaaggctgtccaaatgtagcacgttaccgtgtttctttattatctttatagaacaacggggtgtagatgtgtgaccataattcaagaggcttgttgcagggtgctagaaacttgctggggaaaagtgcagtacatgaaggatgttggaaagcagacaattgcatggtgtggcaggaaaacaaagcacaatgcactcagctcttatttcccagcaaacctccaagttgtctgaccctaccaaca

SEQ ID NO: 409177 - DNA, 444 bp, Homo sapiens
atcagtttcctaagaatttctgcctcttgcaattttttggcatctagagctgattctgtttaaaatgargcacttgtgacactttgaatgcactctggttctgaacaggatcttgagcctgtcttgagtctcctaccttgagctgccacctcactttgtcatactctgtcatctaccttcttcctagtgaatgatttattttgaagtttttgttttaattttcttctctcactttagctttagattgatagtcttcctctcttgacatctgttttgcctcactgagaaggctgtccaaatgtagcacgttaccgtgtttctttattatctttatagaacaacggggtgtagatgtgtgaccataattcaagaggcttgttgcagggtgctagaaacttgctggggaaaagtgcagtacatgaaggatgttggaaagcagacaat

SEQ ID NO: 409178 - DNA, 539 bp, Homo sapiens
ggtttatccacagatgattgtcagtgttattactgtagacagccaaataatatctcccttaaatattttccatggtaaatcatcttcagtttggaatgttgtctgtccctaaaatttttatttcctcttggagacattgctttttaagaatctacatttgattctatattttatgatatggaaatygataattgaattaacaaaacatgaactaacacaataataaactcacaaaacaatctcaggaagccctgtatcatttgatacaacaaaaaaaaattaagaaagagcaatgagaagccatattttctaatgtttttaccccatgcttttagttcaattcctcaaataactcataaaatttataattcttaataaaaatgttgatcatttctatatgcaagttaattccaccatatttgtaagttaaaaaactacaaagcaatatttctatagcattgaatacccaaaatgacagtattcctcatactgaataggtagataccaacttatggttctcaagtgaacagacagaaaat

SEQ ID NO: 409179 - DNA, 539 bp, Homo sapiens
ggtttatccacagatgattgtcagtgttattactgtagacagccaaataatatctcccttaaatattttccatggtaaatcatcttcagtttggaatgttgtctgtccctaaaatttttatttcctcttggagacattgctttttaagaatctacatttgattctatattttatgatatggaaatcgataattgaattaacaaaacatgaactaacacaataataaactcacaaaacaatctcaggaagccctgtatcatttgatacaacaaaaaaaaattaagaaagagcaatgagaagccatattttytaatgtttttaccccatgcttttagttcaattcctcaaataactcataaaatttataattcttaataaaaatgttgatcatttctatatgcaagttaattccaccatatttgtaagttaaaaaactacaaagcaatatttctatagcattgaatacccaaaatgacagtattcctcatactgaataggtagataccaacttatggttctcaagtgaacagacagaaaat

SEQ ID NO: 409180 - DNA, 539 bp, Homo sapiens
ggtttatccacagatgattgtcagtgttattactgtagacagccaaataatatctcccttaaatattttccatggtaaatcatcttcagtttggaatgttgtctgtccctaaaatttttatttcctcttggagacattgctttttaagaatctacatttgattctatattttatgatatggaaatcgataattgaattaacaaaacatgaactaacacaataataaactcacaaaacaatctcaggaagccctgtatcatttgatacaacaaaaaaaaattaagaaagagcaatgagaagccatattttctaatgtttttaccccatgcttttagttcaattcctcaaataactcataaaatttataattcttaataaaaatgttgatcatttctatatgcaagttaattccaccatatttgtaagttaaaaaactacaaagcaatatttytatagcattgaatacccaaaatgacagtattcctcatactgaataggtagataccaacttatggttctcaagtgaacagacagaaaat

SEQ ID NO: 409181 - DNA, 567 bp, Homo sapiens
ttatgtgtgactacacaattttgcccctcacttcagcacagtacggttttttactatttaaccatgtcatgtccaatattgtatagcctcttgaagtcaagaagatatgcatcatcttaaatctaaaatccacaaccctgtttaaaacagcagaaaattaaaaaaaaatcagtgacctggaaattcatctgtaaaccacagtaattgatatgttcaccaacctgactgagcatgtacaacattactggcattaggcatcaagaattcctggaaaatgtgggcagcatacattagtcrtttatcattaagctgtggaggctttttattagtctcagctgtgttcctgttaatagtgtttgacatttatacatcccagggctccttcagtactaagtgattggaacccaattaaaactagtttaagtaaagaccaatatttattggctgatggaactgggaggtcaaggctggaatctgggctcaaacgatattttcatggtttgagctttgtctctgtcttttggttctgcttctcatcacttatacacatgtgttagcttcttctac

SEQ ID NO: 409182 - DNA, 625 bp, Homo sapiens
atcctggtgtgatccagtgactcacaagttcatccctaacttttgttgccagataatgtttaaacacttctggcttttgctttctctctggggtcatttataattttttttctaaaatccttgccatcctttacctccctgagcattcaatatcccctctaacttctgctgggaatctaagatgtcaacaacatgttatttagatgaaaygctgctatcctttcctttactggggttgtcattccctattgtctgcccatacaaatagctgcacctataggactttgatctgctgtcagtctggacaacattactttcttattttacctgttgtcccaatatcaatatatctaaatagacttctctgtaatattacacaaagtcgcttgtaagataacctggttcttgcccgagtttatgacatcctgtggtttgctgccttatcatttttaaagccaagacttttaaaaatcatagcttaaggtttaatttcacaaatgcaaagtacagaatttggctactattgggagcccccatatttttaatgatttaattaaagttatatatcccatctgtataagagcttccttttatcttccaaaagagatggatttccattctttcc

SEQ ID NO: 409183 - DNA, 592 bp, Homo sapiens
ggttaacctgaaagaatttgaagcaacatgtaagaggtgtgaaataatatatctayggttaccaccatcttgtattcaaatttcacttgtcatgtgacaccaaattcctttctccaaatcctctaaactcttatgaagacatggatgagagaggtcatcaaacatcagaaatgcctgtgcagagatgccacagcacaatctgtggcataaaatgacaaatgacttggagcatcaaaactagatattaatctttcagtcttgcccaccacagaaacataggccctgggcgatagattacagtggtgcatacttggcaacacgtgattatatacttatcctaaaccttcaaaagaagtttatggtgagcagaaattggaaattttagccctagaggcatgcttcagaaattcttgactcctggaaaaatatgaaatgtctcaacctcattttgtaccaaatctcaagatgcaacatttgagtgataaactactggggtgtcagcaaccttctggtattctttaacccagcacaactataagaaaatgcacttgattgaactctgaagtcaattactacttgattttctgaaaat

SEQ ID NO: 409184 - DNA, 592 bp, Homo sapiens
ggttaacctgaaagaatttgaagcaacatgtaagaggtgtgaaataatatatctatggttaccaccatcttgtattcaaatttcacttgtcatgtgacaccaaattcctttctccaaatcctctaaactcttatgaagacatggatgagagaggtcatcaaacatcagaaatgcctgtgcagagatgccacagcacaatctgtggcataaaatgacaaatgacttggagcatcaaaactagatattaatctttcagtcttgcccaccacagaaacataggccctgggygatagattacagtggtgcatacttggcaacacgtgattatatacttatcctaaaccttcaaaagaagtttatggtgagcagaaattggaaattttagccctagaggcatgcttcagaaattcttgactcctggaaaaatatgaaatgtctcaacctcattttgtaccaaatctcaagatgcaacatttgagtgataaactactggggtgtcagcaaccttctggtattctttaacccagcacaactataagaaaatgcacttgattgaactctgaagtcaattactacttgattttctgaaaat

SEQ ID NO: 409185 - DNA, 633 bp, Homo sapiens
ctatataacaaaaaatttcaaataaatgggaactttaataagaggtttattttctctcatgtawatgaaacccagagatacaggctattgaagcctaattagttgactgcacaaaatagttcagttcagttccttccagctttctcatctaccatctctaggatgtggtccttgcttcatatttcaagggtggctgctctagtactctaggcagccgaatggggactgaaagaaaaaaggtatcagtcctctcctttaagggaacttagcacaagtctcacgcatcttcagttttatattcattagccagaactccataatcaccagtggtagtaagtaatatgttcacccacaaatgtttacccctaatccctggaaaatttgaatgtattaagtttcatggcaaataaaactttgcagatataattaaggtcacagacctgaaaacagagaatcctggattttccaagtgagaccaatgtaatcatgtgagtccttaaagcaaagaactttctccagctgaaggtaaatgagaacattagtataaggggaagtcagagaaattccaagcataattcaacacctgtacttttgttgaccctgagatgtcaggacctacatagcaatgaccag

SEQ ID NO: 409186 - DNA, 443 bp, Homo sapiens
caacattttgaaatttacatttacaatttaacaaactaactcctatgttcattgggcttattctggaccaagggaaaataaatttgtctactgcctatttccgtatcacagaaaggtgttgttatggaatattatgtcctctttcttaagttggtggagcagagagaatcctaaaaaagggaaggcagacacaagttatatgtgcataaatgtctatcttgttttttggttctaacacatgtaacckttttggtagctcagaaagctgaagaatattagagtagaactactaaaaatcaacatatcatgttaattgcttagtaatctcctaatattagaagaagttcatattttttttaatttgtgtataaaacacttttaatttaaacatacctttatgacaagggttcttaacttggatcttatgaatagatttcataggg

SEQ ID NO: 409187 - DNA, 443 bp, Homo sapiens
caacattttgaaatttacatttacaatttaacaaactaactcctatgttcattgggcttattctggaccaagggaaaataaatttgtctactgcctatttccgtatcacagaaaggtgttgttatggaatattatgtcctctttcttaagttggtggagcagagagaatcctaaaaaagggaaggcagacacaagttatatgtgcataaatgtctatcttgttttttggttctaacacatgtaaccgttttggtagctcagaaagctgaagaatattagagtagaactactaaaaatcaacatatcatgttaattgcttagtaatctcctaatattagaaraagttcatattttttttaatttgtgtataaaacacttttaatttaaacatacctttatgacaagggttcttaacttggatcttatgaatagatttcataggg

SEQ ID NO: 409188 - DNA, 633 bp, Homo sapiens
ctatataacaaaaaatttcaaataaatgggaactttaataagaggtttattttctctcatgtatatgaaacccagagatacaggctattgaagcctaattagttgactgcacaaaatagttcagttcagttccttccagctttctcatctaccatctctaggatgtggtccttgcttcatatttcaagggtggctgctctagtactctaggcagccgaatggggactgaaagaaaaaaggtatcagtcctctcctttaagggaacttagcacaagtctcacrcatcttcagttttatattcattagccagaactccataatcaccagtggtagtaagtaatatgttcacccacaaatgtttacccctaatccctggaaaatttgaatgtattaagtttcatggcaaataaaactttgcagatataattaaggtcacagacctgaaaacagagaatcctggattttccaagtgagaccaatgtaatcatgtgagtccttaaagcaaagaactttctccagctgaaggtaaatgagaacattagtataaggggaagtcagagaaattccaagcataattcaacacctgtacttttgttgaccctgagatgtcaggacctacatagcaatgaccag

SEQ ID NO: 409189 - DNA, 507 bp, Homo sapiens
cccaaatcctataaaactgtcccacccctatctcccttctctgactccttttttgtactcagcccacctgcatccaggtgaaataaacagccttgttgctcacacaaagcctgtttggtggtctcttcacgtggacgcaggtgacatgttacatatattcactggaccctcagactctattgcatcttctcagggtttcactgttgatttacacaatttcttcagcttcttgttttgaaactcttataaaggctcaaaaacctgcctctcaggctggttgggaggtaataataaaagccagccttccctcccattgtcctcatttcctgtcccctttagagtccctgcctcaaaatgattctctgtcttcttccaggtgaaactgaaarccttatgggtttcagcagagttgaatatacttggcacagaggcagtgcttatctccttctgcccaaagtacccaggccacagatcttgctcaaagccaacgcgttctgttgcaaatat

SEQ ID NO: 409190 - DNA, 575 bp, Homo sapiens
caatagatggaagtacaaaaacagatgaagtacaaaaaaaaaggagaaagaaagatcatggtaaaaggtaaatatatgggtaaaaataaataatatacgcaaaagtgatagtgtaaaggaatgtcaaaaatatttgtagaattaaaattcatgtcaagaatagaggaaaggtaaagtgtgaacaattctcaaaccatatgaaaaatggtaaaaaaaaaatgtagatataaatcaagaagaaacatgtaaatttttacccatgcctatgtcccgaatggcctaggttgccttctagggtttatatggttttgagttttacatttaaatctttaattcatcttgaatgaatttttgaatattgtaaaagaaagaagtccaattttaattttctgcatgtagaagacagtgtggcrattcctcaaagacctggaaataccattccacccagtgatcccattactggatatatccaaagggatataaatcagtctactataaagacacatgcatgcatatgttcattgcagcattattcacaatagcaaagacatggaatcaacctgaatgcccatgaa

SEQ ID NO: 409191 - DNA, 468 bp, Homo sapiens
acaataggatgaggccagaaaacaaatgagtgaagctcagggataacacagtaggcagctgccaggactatggagaaatagtctcccctgactcagggtattagcaactatcaccttccagatgacggctgctgctggggaaggcagcaggtctagtcttgcaagaccttcaagagaagctacaagctctggatactcatggggcacttctcaacttctaaaagcagaaacacagcaaaatgtaatttaaaacaatcctatgtgggcyaagcaaaacatgtatctgtaatctcgatttgatcagcaaaatcgcagagttgacaccacccttttcttccaactctttaagcagctagaacactgcttcatatttagttgataaccactaagaatcacgaataaatttacaaaaactatacatgcatgtaaatatatgcatataaaatagaaacgtgtgtatatacacat

SEQ ID NO: 409192 - DNA, 569 bp, Homo sapiens
caggaactctatgtttttcggaggagagtttcccaagcacccatattatcaaaaccatctcgggtactttataaaaaaaaaaaaaaaaaaaaaaaaaaaaacagattaatggrcctcactgctataaggttagactctgtaactctgaattgctgcccataggatctatattttaaaagctcgccgtgttaatgtcaatgatgagttgagtttggtcaccggaagagtctcaggcaaatcaggtcaccctacttgtaggttgcagagtcggtgacccttaggtacatgggggcacaactcatttctattggccatgaaggtttgtgcaaaaattcagttgagtcgttcaaataacacaattatcaaatctactagtcccgttcccctaagtttcatcaatccaagtttaatccctttaatttttatgtttgaaaacctggaagtgattgcttttgactggagctttttaggttccacgcttttctttttgatacttactttatgtggatcaaattcattgaaccttagaatatcagactaataacaacatggagactaaatcaatagca

SEQ ID NO: 409193 - DNA, 593 bp, Homo sapiens
tacgcttacaaaggcacacaattcttttaactagaagtcacaagamgcagaactgaaatggaaactcaaaatattgggcacagttttttagcagggtctaaaagcagctggtactcacattgccaagcactttttgcagtggtggagagaggagttaaatttacaagaattataactaaaaaaagtttattattggtgcaaagttttaggttaaaagaaattaatgcaatataatgttaataacactaaattttaaattagaccatctgaatttcagattttatatactcatcccactagctatgttggccaaaagcaagttaattaaccctctgaccatgagactatcctgaaaagtaacacctattcccctcatagtagaaatttctcaaaagcagaaacttcatcttctataccttttgattttctatatcaaataagaaacttccatggctcctgagttgcacaacaaagagagagagagaaaagtttgcattgaagtttctgtgaattgcacacttttgatttgtgtatcacaaagccctgcagagcggccctgaatgagtgcatggcacacataggggattcaataa

SEQ ID NO: 409194 - DNA, 593 bp, Homo sapiens
tacgcttacaaaggcacacaattcttttaactagaagtcacaagaagcagaactgaaatggaaactcaaaatattgggcacagttttttagcagggtctaaaagcagctggtactcacattgccaagcactttttgcagtggtggagagaggagttaaatttacaagaattataastaaaaaaagtttattattggtgcaaagttttaggttaaaagaaattaatgcaatataatgttaataacactaaattttaaattagaccatctgaatttcagattttatatactcatcccactagctatgttggccaaaagcaagttaattaaccctctgaccatgagactatcctgaaaagtaacacctattcccctcatagtagaaatttctcaaaagcagaaacttcatcttctataccttttgattttctatatcaaataagaaacttccatggctcctgagttgcacaacaaagagagagagagaaaagtttgcattgaagtttctgtgaattgcacacttttgatttgtgtatcacaaagccctgcagagcggccctgaatgagtgcatggcacacataggggattcaataa

SEQ ID NO: 409195 - DNA, 593 bp, Homo sapiens
tacgcttacaaaggcacacaattcttttaactagaagtcacaagaagcagaactgaaatggaaactcaaaatattgggcacagttttttagcagggtctaaaagcagctggtactcacattgccaagcactttttgcagtggtggagagaggagttaaatttacaagaattataactwaaaaaagtttattattggtgcaaagttttaggttaaaagaaattaatgcaatataatgttaataacactaaattttaaattagaccatctgaatttcagattttatatactcatcccactagctatgttggccaaaagcaagttaattaaccctctgaccatgagactatcctgaaaagtaacacctattcccctcatagtagaaatttctcaaaagcagaaacttcatcttctataccttttgattttctatatcaaataagaaacttccatggctcctgagttgcacaacaaagagagagagagaaaagtttgcattgaagtttctgtgaattgcacacttttgatttgtgtatcacaaagccctgcagagcggccctgaatgagtgcatggcacacataggggattcaataa

SEQ ID NO: 409196 - DNA, 593 bp, Homo sapiens
tacgcttacaaaggcacacaattcttttaactagaagtcacaagaagcagaactgaaatggaaactcaaaatattgggcacagttttttagcagggtctaaaagcagctggtactcacattgccaagcactttttgcagtggtggagagaggagttaaatttacaagaattataactaaaaaaagtttattattggtgcaaagttttaggttaaaagaaattaatgcaatataatgttaataacactaaattttaaattagaccatctgaatttcagattttatatactcatcccactagctatgttggccaaaagcaagttaattaaccctctgaccatgagactatcctgaaaagtaacacctattcccctcatagtagaaatttctcaaaagcagaaacttcatcttctataccttttgattttctatatcaaataagaaacttccatggctcctgagttgcacaacaaagagagagagagaaaagtttgcattgaagtttctgtgaattgcacacttttgatttgtgtatcacaaagccctgcagagcggccctgaatgagtgcmtggcacacataggggattcaataa

SEQ ID NO: 409197 - DNA, 621 bp, Homo sapiens
atatgacctgggatagtatcatttgggttgtatttacttagtgatacttgacctttctgtacctggatatatctatttttctctgggtttgcaaagttttctttatttctgtgaatactctttcttctccttgctttctctcaaccccctcttgaaggaaaatgactcttacatttgctctttaaaggctattctctagatctcataggcgttctttgtttctttccattatttttctcctgtgactctattttyaagtagcttgtcttttagttcactgattctttcctctggttgatcagtcctgctgctgagactctctgatgcatttttcatctaattcaatgtattctttagttccaggatttctgtttgatatttttaatgactttaatctatttgttgaatttctgtaataaatttctgaattgcttttctgtgttttctgggagctcatcaaagagttttgttttttttttcttccagtaactcaactcataccatctcattagggtcaatcactagtttctttctttgtacatttgaggtggccacggttgtgttgtttcttatatatgtacatctatattcttgcattgaataattggttatttattgtag

SEQ ID NO: 409198 - DNA, 674 bp, Homo sapiens
taattacctttacattcaactatttgctatctaaatcattttgcttcgtcaaacattatctaaaataatatttgctactatttattaagcatttatttatagacactctggatagtattacatacatgcttcttcactaaagtctcacgtttaccttagaaaggaggtatatatctatccccacttcwcagataaagaaagtgaggcatcaaaattgtatcctggaaattgaggaatccaagtccaccatgctttgaaccccagaaacatttctactccaactattccatgcttatcagtacataatgcagtgactacgtttgctttggcttgaaattctcatatatttcaaaaggaaattcttcttggtagtagggacaactttaaattgagctttttcaagtcagtataatgtgcaaaatacaaacttagttacctgagttgaaaactatatcacattatcccatgaaagaagtcttaagcgatctgattcaaaatatcattttgattatggtgcagaggattactcatgaagttaaggctgggtgagggccttgatgctccggtcttgccgttatctgatggatgagttaggacacacaccacaggataattttgactaatttatctacaggcatcttgctcttgctttctcccactgttctctcaaatgt

SEQ ID NO: 409199 - DNA, 674 bp, Homo sapiens
taattacctttacattcaactatttgctatctaaatcattttgcttcgtcaaacattatctaaaataatatttgctactatttattaagcatttatttatagacactctggatagtattacatacatgcttcttcactaaagtctcacgtttaccttagaaaggaggtatatatctatccccacttctcagataaagaaagtgaggcatcaaaattgtatcctggaaattgaggaatccaagtccaccatgctttgaaccccagaaacatttctactccaactattccatgcttatcagtacataatgcagtgactacrtttgctttggcttgaaattctcatatatttcaaaaggaaattcttcttggtagtagggacaactttaaattgagctttttcaagtcagtataatgtgcaaaatacaaacttagttacctgagttgaaaactatatcacattatcccatgaaagaagtcttaagcgatctgattcaaaatatcattttgattatggtgcagaggattactcatgaagttaaggctgggtgagggccttgatgctccggtcttgccgttatctgatggatgagttaggacacacaccacaggataattttgactaatttatctacaggcatcttgctcttgctttctcccactgttctctcaaatgt

SEQ ID NO: 409200 - DNA, 646 bp, Homo sapiens
ggaattcacaggaaaacttgttaaatcactaataatggcatccattttcgcctgaaacccctaactactgattattgtttatacatttatcaaaaccaaaatgataaagtgctcttcaaaagaataaattgctatatctagtactaaatacatattcatagagggcactccgtccttcttgatggtagctacccaggatgacaaaattgaaagacgctgatgacacactaaacatctatggttcattaactcgcttgtttactgtggttacagtgaaagcaaggtcttaggtcagctcctcgtatcgaccagcacattcctttctcttctgtggccatagaatattccatgcagttttgactggctctctcaaaaaaaagtttgccattggtcacaccatggcctgagagaggaaattacatgaccattacaacaacaaaaacaatgcagatcccatttcttgctcartgatggccccagtgcattcttctcatacatgaaacactgcatgttgcttataaatcaacctagaaaaatgtatgctcgagccctgagattactctgcctgggtgtgaatcccgccccacctcttactagctattgaaccatggcaagttattcaatttctctgtctccatttcctcag

SEQ ID NO: 409201 - DNA, 608 bp, Homo sapiens
gatttcagtctgtgaaccaagagactttttattccttctgttactctctccccacaacttctttcttccaggaagccatccagtaatagtttttccaaaactataatctttcttaaattttcatactttgagtcttaaaaacagtatattgcctattcacagaggccccaatcccagaggtagctgatagtctacacgtcaccacaayttgtgagaacccagtgttaggattttactgttgcagggaccagacactcattttaaaactgctttctgctataccattttgtctctgtgcatatgttgaatatgtgtgccttaactggaatttaatttgcatctatcaagaatgttgacctatgtctttcaaatgatccttgcatagtttcatacagaaaaccttcttcttctaccactgccactacaaaagtttaggaataacgagaattcgagggtctctgtactctcagcaagtgccctgaggttgcctcagtgctccctgccatgagccagcagctgccataaccttctgccacgcggaagacccagggacaagcagcccgcaagctctgcttcctagtttgcctccaactgcatacataaagtcg

SEQ ID NO: 409202 - DNA, 588 bp, Homo sapiens
gttctaatacagtatggctcagtatggtttgatagttaatacttggaattagaaagtgaggtgacaagtataytgactaaatgagcaaaaaattaccacaatattcctgattgaccagactgtttttataggacagtatcaccaccaccaccatcactatgtagcatcacgacatgtattgagtgttgcctatataaaaggaagcactgtggttgccagagatgaaagtgccgtggtctctgctctgtagctgcatttatggatgggtggaggtggaagtaacaataacatacagttacataaaataactactgtaattcacccaacaaactcttacagagcacttgctctgagcaaggcactatgacaggcttgacaaaggaatccaagaaagaaagggaagtaaggactggaactaaggagaagaaaacatgctaacagtgacttgcacttcaaacacagttgtttctagttcttacctgaaccagaaatgatcaatagtggcagggtgccaagatcaatggcagcccagggtcagaatcactgacatcaatatgatcagtattactcagtctcatcaaattgagg

SEQ ID NO: 409203 - DNA, 552 bp, Homo sapiens
aaggtagagtctggggaattaccagagacagagcttctgttgtcctcaccatggagtcaggatatgtcactttccaggcatcgatgtgtgacagtatgaacagagcattgccagccaggggagctcacttgagcctttggtgtccagagtttttagtgggacttgactacatactgtcccctacatggctgacctttagtktccaaccccttttgaatgttggtgttgggctgaaagttttagtttctggccccttcgagaggcaaaactgatactgcttggcccaaaccacccactgtaaatcacattgttagactgttcagtggccaaagccttcagccaaacaaagacactcctatgacattttgagttcaggagatcatgttctcatagctgaaggcagatgcccatctctttggccaaggttaattcttcactccatcaatgaggagggaagggggaagatgaagacggtatactgtgtgtcagacagcatgctaggcgttgtctcctttaaacctttgaacaacattattagaaagacactacagt

SEQ ID NO: 409204 - DNA, 636 bp, Homo sapiens
gtttaacatattttaatgttatttatgatctttctcatttgggctttaattttatattcttctttctgtcttttaagaacttggattactgtcrgcttctagtgtctccatcattcataattgcactgtgttggtccacccactttactcctaaagaagaggtaagaaacagaagaggagatcacagtggctcttcaactattaatataccacagacttcaataacaaatgaagagaaacaagaaaagaaagcaatgcaaaaagaacggtactgccctctttctctcctgaaccatcaataaatcaagggtagataatagcctaaatcagtatttctccagttttttcactagcatcttccccagtgaaccattttaaatagtttttcctaattgtccaaatatgaaatgttaatgcactagatatactgtatatgtatatgtgtctttgctgtctacataaaaagagtaagcttttgttgtctcccaagaagcaattgttgcccctaaagtggcaatattgcctttagacaatatatggattaattcttaggaaaatagctttcccattattagaaatattgggtccaacataattgagaatgtaggctgaaattcactgttatagttgcatggt

SEQ ID NO: 409205 - DNA, 636 bp, Homo sapiens
gtttaacatattttaatgttatttatgatctttctcatttgggctttaattttatattcttctttctgtcttttaagaacttggattactgtcagcttctagtgtctccatcattcataattgcactgtgttggtccacccactttactcctaaagaagaggtaagaaacagaagaggagatcacagtggctcttcaactrttaatataccacagacttcaataacaaatgaagagaaacaagaaaagaaagcaatgcaaaaagaacggtactgccctctttctctcctgaaccatcaataaatcaagggtagataatagcctaaatcagtatttctccagttttttcactagcatcttccccagtgaaccattttaaatagtttttcctaattgtccaaatatgaaatgttaatgcactagatatactgtatatgtatatgtgtctttgctgtctacataaaaagagtaagcttttgttgtctcccaagaagcaattgttgcccctaaagtggcaatattgcctttagacaatatatggattaattcttaggaaaatagctttcccattattagaaatattgggtccaacataattgagaatgtaggctgaaattcactgttatagttgcatggt

SEQ ID NO: 409206 - DNA, 613 bp, Homo sapiens
aatctagatttgggcacaacttaaaatagttttgatatagataatgagattttaaatacatgagtggctctgcctgatttcattacaaaagcctctttgtttctattctgtgatctttcagtgagaatttagaacagaatactttctctaaataagaacaaaatttgagacaatttaaaacagtctytcactcttcctggccaggagtatgtcaagagggttccttaaatcagaactaaggttcacacccagagaatatatcaaatgaatttccatgaaaaacaaaaaccatcctctgtttttactattgctgtacaaggtatgctctgcaaatcaaaactccattcctagtttgcagcgttcaggtgactaaagctacctctggagaagacactgaaaaatgtacttcactttccccctcaacagaacattcaagctcattaggctgctattcaaaaatggtatagttaagatccccagcatgcagctctggcaaacaagcaaagttgccatttgtagaatatcgatattctggatttcccttccatttatgtttctaaaatacaataagtattggttggttcatgaaaattaatcagccacttaaatttgt

SEQ ID NO: 409207 - DNA, 573 bp, Homo sapiens
atacaatatggtgcagacgctatacaaggttcctgaggcaaagggtgtgagcacaagaagttacatgctcactgggctttcttactactttgaagtgtgtatttgctgccccttctgccttgaagggtcccagatcctctaacaaacctctacttaaatgatctagctcaaatatcacckcctctgtgaatgtctctgatttcttcaaagcagaagttgctgcttctggttcacacctgtaaccccagcactttgggaggccaaggcgagaggatagcttgaggccaggagttcaagactaacctgggcaacagagtgagaccccatctctataaaaaaataaaaattaaaagctgggtatgatgacatgtgcctgtattcccagctactcagaaggctgaggtggaaggatcacttgagcctagcagatcaaagttacagtgagctatgatcatacccctgcactccagccagggcaacagagtgagaatgtatccaaaaaaaatacaaaaaaaagttgctgcttcttcctcagtgttctggcaggactttgttcaaggtcttggtcttgat

SEQ ID NO: 409208 - DNA, 567 bp, Homo sapiens
taagttgaggcctgaactcaagcttacatctgtgtgatcccaaagtacatgttatttttatctctccattctgccttatcttatatgcaatatcttataataagtgctygagaactttttgttgagtaaatgaacagatgaatggttggatggtttctgttcaacaaatccccaatttaactcaaagcaatgtgcatgagggattggagccttatttaaatttcagtggcagaaaatacacttgaatagtaaaatatgttttaactaaacagagaggttagacacttaggtggtataactggaattgaggctgtttaatcatataactcttatgatcatgaaattggataaatgtgagtctcttaggttatgtagcctcttgagtatttcattaaatgcattcttattaaaattaaagattaaatagatagaagtggggaacttcaattttatgtcgctgaaatttgatgtttttagaagtttgaattattgtggagacaaaatagttgtatatgtttttaaggcacatgtgatatgtttatttgagcacacaatgtgtaataatca

SEQ ID NO: 409209 - DNA, 558 bp, Homo sapiens
agcttccgctacctagtaaaatagtaaatcaaaagcaatactgcattcctggaaagattgcagagattagcgctaccatcaagaacttgaaaggtgcagggrttgggatttccaccacttctccattccatctcctatttggcttgtgccaaagacagatggattttgaagaatggcatgattatcaagagtttaaccaagtaatgactctaattgcagctctgtaccagttgtggtttcattgcttgagcaaattaacatatctcttggtacctggaatgcaattattggtctggcaaatgttttttttttgtttgtttttttgtttgttttttcctccatacctgtctgtaaggtccaccagaagcagttttctttcatctggcatggccagcaatacccctccactgtcctcccccagaggtatattacctctccagccctattataatttagttaacagggatcttgatcattttttcccttccacaggatttcacactagttcattacattgatgccgtcaggctgattgaacaaaatgagcaaaaagtaaca

SEQ ID NO: 409210 - DNA, 503 bp, Homo sapiens
ccgggaactaaaaaataagaataaactaagcccaaaataagcaaagaaaaagaaataataagacttagagaagaagtaaataaaatggagaacaaaaaagtaaaaaaaataagaaaactaaagtttttttttgaaagaaaaacaaaattgacaaacctctagctaaagaaagagagaagactcaaataaataaaatcagaaatgaaagaggacacattgcaacagatgcctcagaaataaaagaatcatgaggaactattataaaaataatatgtcaatatattgaataacctaaaaaattgataaatttttagaaatatacaacctaccaaagttaaatcagaaagaaatggaaaatctaaatggaccaataataaataaggagattgaatcaataatcaaaaatttcrcatcaaagaaaagcttaggactttatggcttcatgggtaaattctacaaaacatccaaaaagagttaataaacttttccccaaaataggagaa

SEQ ID NO: 409211 - DNA, 581 bp, Homo sapiens
ctcttaactcttaattaaaaaatacttcaatgaataataaagacaatccttaaatgctactgaacgtataagcatgttataataaaatatgtcagagttattctgtctattacaaagaaataaaatccttgctagaagtactagttgaattgaaaactggggtaatgtgattcagtaaaaatagttttagaattcttgtaactattatgtgattatgctaacatgtatttttggatgcctcttttaatagaacaattaataccagtattatgattacctgtttataccaatgtagccacattacttacttttttgtggggggtattgccctttgagattctgatgtaagacctctgacacattgacttacctaaactttttgaggatatacaggttatattactttttccaagataggaatttctgcaccaagtcacacartctcaacctatgtcacttcagatttttaagatttaaaaaatctataccactgcagtcagaagcttttggaatctaccatttaaactaataattttcctgttactgaaaagggagttaggcaaagagcaaacagaccctga

SEQ ID NO: 409212 - DNA, 537 bp, Homo sapiens
tgtgtggatgggacagaggagagagattctgcccctagacagcttctcctatttgtgtgtggaaattcatggatatttgtaaagcagttcattagtagttgaacactcagtaattggatattttaaagtgttggagtactgrcaagataagaacaaatagacagtgaaggagtgaatccctgtctctgaatgagttgaattctgggcagtccttttagacaacttagaaaaaggaagggtagagtaaaggaattgatatgttgacattggaaagcattttttttaaaaaaattaaactttaagttctgggatacatgtgcagaatgtgcaggtttgttacataggtatacatgtgccatggtggtttgctgcaaccatcaacccgtcttatacattaagtatttatcctgatgctatccctcctgtagccatcccctacccctcgacaggccccagtgtgtgatgttcccctccctgtgtcaatgtgttctcattgttcaactcccacttatgagtgggaacatgcagtgtttggtt

SEQ ID NO: 409213 - DNA, 537 bp, Homo sapiens
tgtgtggatgggacagaggagagagattctgcccctagacagcttctcctatttgtgtgtggaaattcatggatatttgtaaagcagttcattagtagttgaacactcagtaattggatattttaaagtgttggagtactgacaagataagaacaaatagacagtgaaggagtgaatccctgtctctgaatgagttgaattctgggcagtccttttagacaacttagaaaaaggaagggtagagtaawggaattgatatgttgacattggaaagcattttttttaaaaaaattaaactttaagttctgggatacatgtgcagaatgtgcaggtttgttacataggtatacatgtgccatggtggtttgctgcaaccatcaacccgtcttatacattaagtatttatcctgatgctatccctcctgtagccatcccctacccctcgacaggccccagtgtgtgatgttcccctccctgtgtcaatgtgttctcattgttcaactcccacttatgagtgggaacatgcagtgtttggtt

SEQ ID NO: 409214 - DNA, 645 bp, Homo sapiens
  misc_feature (1)...(645): n = A,T,C or G
nnnnnnnnnnnnnnnnnnnnnnnnnnnnnnnnnntaacagtggattaagctggattcattcatcttgaaaggaagaaaaaacacagcttcaggtttcagtctgtggtacctaacaagcaatttgactctctcttgtaatgtcatgactcctttctgcttcttaggagctttcttgaaatgtcatcacttccagcatcactagtggcacttcatctgggtcctgtggtgttattcaaagtttgtggtatggcactaaccacgacaaaaaatacataagaactgggagagatccttttgctctgtgataggcaatttattgcggccatgaactgctcctgtggagataattagtgtcacgtggcattttaagtggatactccgcaacacctgaactcactataatagcaagaggaggtggcaaagaggttactacagtagtatagtatgtgctacagttaattttgtgcagttatgatttaacactatacatttttttccccctgagaccaggtctcactccgttgcccaractggagtgcagtggcatgacgttggcccactgcaacctcaacctcccaggctcaggtgatcctcccacctcagtcccaagtagctgggattacaggtgtgggcaaccacacctgg

SEQ ID NO: 409215 - DNA, 499 bp, Homo sapiens
catttaaagttacaaaactcgtcattgcaagattctaactaagacaacaaaaaagatttgctctaactgactccatcgtgcttctaacctccaagctgtccttgttcattccgggacttttggaggaacttagtttatagtttactttgaaacaaagttgataactgtcctttcccaaarcaaatttccttactgcctgtggacaagactgcctaaagccatgagattagaagttaccataattttactaaataattcaagaagtagctatcttcattaaaccaatatcaatgtcttacttatttaaaagtgacacaagcaaagatcattctgttttgagctgggtttatagttttgtaaccccctatgccaaattttgacaccttatagcatttggcagggataagtttgaaattgcttgatcaataaatgcaaacaaaactgtatgctggcaattcttaagacatttttaatattactttaccaatacttttaaagc

SEQ ID NO: 409216 - DNA, 550 bp, Homo sapiens
ctgcctaaagccatgagattagaagttaccataattttactaaataattcaagaagtagctatcttcattaaaccaatatcaatgtcttacttatttaaaartgacacaagcaaagatcattctgttttgagctgggtttatagttttgtaaccccctatgccaaattttgacaccttatagcatttggcagggataagtttgaaattgcttgatcaataaatgcaaacaaaactgtatgctggcaattcttaagacatttttaatattactttaccaatacttttaaagctagcttatttattaaagattttacttaagtcacagaaactagaaaaagcatttaactagtctttccttttttttgataaaatacttggtttaagtgcttttatttttctttaagccaattgattagagctcttttatatatttttagtagtgaaacattgtgtacacaacacataaatacatagatttattaagcataccaatagaagcacatattatagatccctaaaacctaccttttttcctatcatagacttgca

SEQ ID NO: 409217 - DNA, 550 bp, Homo sapiens
ctgcctaaagccatgagattagaagttaccataattttactaaataattcaagaagtagctatcttcattaaaccaatatcaatgtcttacttatttaaaagtgacacaagcaaagatcattctgttttgagctgggtttatagttttgtaaccccctatgccaaattttgacaccttatagcatttggcagggataagtttgaaattgcttgatcaataaatgcaaacaaaactgtatgctggcaattcttaagacatttttaatattactttaccaatacttttaaagctagcttatttattaaagattttacttaagtcacagaaactagaaaaagcatttaactagtctttccttttttttgataaaatacttgrtttaagtgcttttatttttctttaagccaattgattagagctcttttatatatttttagtagtgaaacattgtgtacacaacacataaatacatagatttattaagcataccaatagaagcacatattatagatccctaaaacctaccttttttcctatcatagacttgca

SEQ ID NO: 409218 - DNA, 567 bp, Homo sapiens
gagagacaggagaagtaaatgaagaaaacagaattcagtcaactgagaagaaaaacatttttgctcaaaaaaagagacaaggtcctaggagaaagaaaaaacaacaacaacatgaaggccttttaaataaacacacacacacacacaaacmcacatacatcttggatgctggcttttaattaagctgacttttaaccattgagctccttttaaaacatcttttaaaatctattaccatatttcagctagaaaaaaaaaatgctgttctttcagaagtgacaagtaccaaagcagaaagggcttgatttaggaaccaaacccaggctgttgtgatagagaaaaagaaggtagaaccttttgctatggaactgcagtgcagggcaacagccattgctctttcagcttggcctggctagcaaaaaggggcttcattatgtaaataaagccccttgagtagtcaaaaatctttcctgtttttatttttggtttttgtttttttcctttttctggctatttttctccccacgtcgcaccaccttttttctttttttttttgagatggagtct

SEQ ID NO: 409219 - DNA, 612 bp, Homo sapiens
tggcttagcccaaagaagttggaaaattgtgtgtgagagaatgtaagattcaagcatccatgagcgtgggagttgctagacaaaaactaaggtcctttccagccccaaaaggccacgattctaacctrtgaacctactcaatatttccttcaaggtaacacaaatccctaaaatttaccaccaccaagcagtagttccttttatggtcctaaataagatcctttatccaggaatgccctaggttcctatattctgagatttcacaaacatcctcattttagcttctgactaccaatttcaatggtaacttttcttaagccttattttcagaaagtagagtccttctatttttagtatcttgcaacgcccaagcccccgtgcacttctaacccactacagatactgtactgcaacattttctccgtgcataaacgcctacctttctttttttaaaggctagtatattgttccattatacaaacgtaccgtaattaatatttcaccagctcttactaatggacttccggtcgtttccaattatattataaatattacatacaatgctcaggtcaacaactttttacatgtgtatctttagcgtatgcaagagca

SEQ ID NO: 409220 - DNA, 449 bp, Homo sapiens
aagtgaagctcctctgtatgatatcacagtcgtagatataggaagctcctctgtgtgatgtcacagtagtagatatagtgaagctcccatgtatgatatcacagtggtacgtatagtgaagttcytctgtgtgatatcacagtggtagatttagtgaagctcccctgtatgatatcacagtggtagatatagtgaagttcctctgtgtgatatcacagtggtagatatagtgaagttccccatatgatatcacagtgatagatatcgtgaagctcccctgtatgataccacagtggtagatatagtgaagatcctctgtgtgacagcacagtggtagatatagtgaagatcccctgtaggatatcacagtggtagatatagtgaagctgctctgtgtgatatcacagtggtacatacagtgaagctcctctgtgtgatatcacagtggt

SEQ ID NO: 409221 - DNA, 528 bp, Homo sapiens
gccaggcgtgttgatgcatgcctgtaatcccagctactcaggaggctgaggcaggagaatcgcttgaactgggaggcagaggttgcagtgagccgagattgcgccactgcactccagcctgggccacaaactgagactccatctcaaaaaggaaaaaaaaaaaaaaawatatatatatatatatacacacacacacatatatgtatatatatatacatatatatgtatatatatacacacatacatacatacatacatatataaaagcagcagcccaaaaatgtattatgttgccagctaaatacagacctagttgtcttaacagcactcatggtgcattcgtatttttatcagaatgaaggaacctaatacctaaatataagcccatgtttccccttgtcctgaggcaggcagtggaagttcctaaaggcaggcctagaatcttcctcagaaaatcctttttaatccactctaggacataaagaaatgagtagttgatttcctaaagttctgttccttgcaactgaa

SEQ ID NO: 409222 - DNA, 528 bp, Homo sapiens
gccaggcgtgttgatgcatgcctgtaatcccagctactcaggaggctgaggcaggagaatcgcttgaactgggaggcagaggttgcagtgagccgagattgcgccactgcactccagcctgggccacaaactgagactccatctcaaaaaggaaaaaaaaaaaaaaaaatatatatatatatatacacacacacacatatatgtrtatatatatacatatatatgtatatatatacacacatacatacatacatacatatataaaagcagcagcccaaaaatgtattatgttgccagctaaatacagacctagttgtcttaacagcactcatggtgcattcgtatttttatcagaatgaaggaacctaatacctaaatataagcccatgtttccccttgtcctgaggcaggcagtggaagttcctaaaggcaggcctagaatcttcctcagaaaatcctttttaatccactctaggacataaagaaatgagtagttgatttcctaaagttctgttccttgcaactgaa

SEQ ID NO: 409223 - DNA, 493 bp, Homo sapiens
gaaatcatctaaagtggaggaaagaataatgtgaaaggattagaagggagagtacctgcttccaaaagcctgattggaaaaacttacaattcatttggcattggatagagtactcagatcttgcctcaatgatagagaataattaccctagactgagcactgcttcagacccacctaataaatcatggaaacaaaaataaagccaggtatctaacagcatccctgatcaaagctcaaaattaataggaataaaaaatatttagataaggtaaaattcayaatgtctagcatacgtgcagagatgaccagacaggcaaaaaaggaaaacatgacccaggatgaggaaaataatcagtcaatcaaaactgacccagaactgacacagatgttagtatgagcaaagtacatcaaaacagatataattgtattccatatatacaaaaagttagatagatacatggagattatttttattttatttttgagacagagt

SEQ ID NO: 409224 - DNA, 536 bp, Homo sapiens
ccctgcaaaggagaacagctctccaactacagaagcctgcaagtcctatggtgcagacttattaagagtagagaagaaagcacggacttctcaccgaggaccaaagggaaatggggtctctggggcctgcaactttcttaaaagtgcatcagtgaaaccctgcttatccagcggggtggttgttaatgctgtcagcaggggtggggggcctctcacccctttccctgggacgctcagaagaagcgagaataaaacatacaygtcactggctggaaatctagagaaccttccaataaataacctatacattgtcaggcagctgaggatccatatcgtcataactctattatactgcgtgttacacgaatagatgtgaatattaaattatgatgtcggaattattttaatactgtctataagaaattaattgtactctgttgtcaaagtagttttgttgcaactatagttccttattgactaccttttagctgagtgaggactcggtatttcccaagtatccttctagctcagaaagc

SEQ ID NO: 409225 - DNA, 575 bp, Homo sapiens
aaagattactgtttctatttcacatctacctatgtgacaagacaaactagccctagctacaaaatcaacctgaagatttccatcctttttcagctatgtatgcagacaagatcagacctccttacaaattatatcttgttttcttgcagtgcctttaaagagaaacgatggcttcagcagttagaaatagcaagagtcctggccaaaaagagcatttctaacttgactacccgaggaggtctgacagcgtgtgaaaactctctagaaactgtgctttgaaaagtcatgacaacytcagtttggacaaagacctgatcaaacagaatgtccagttctaatgttaacatttctaataacagttctaatgttatcatctctagtaacagttataatgccacataacttttaataggatatttaacaccatgttttctcagacttcatcacactaagtgaaactttagtgctatttttgcataaagaatatgaggaagaattcagaagaaacttagaatagtagttgtccacagggtaggggagctgagacaatggaaaacaaggaagtgggaattttt

SEQ ID NO: 409226 - DNA, 575 bp, Homo sapiens
aaagattactgtttctatttcacatctacctatgtgacaagacaaactagccctagctacaaaatcaacctgaagatttccatcctttttcagctatgtatgcagacaagatcagacctccttacaaattatatcttgttttcttgcagtgcctttaaagagaaacgatggcttcagcagttagaaatagcaagagtcctggccaaaaagagcatttctaacttgactacccgaggaggtctgacagcgtgtgaaaactctctagaaactgtgctttgaaaagtcatgacaacttcagtttggacaaagacctgatcaaacagaatgtccagttctaatgttaacatttctaataacagttctaatgttatcatctctagtaacagttataatgccacataacttttaataggatatttaacaccatgttttctcagacttcatcacactaagtgaaactttagwgctatttttgcataaagaatatgaggaagaattcagaagaaacttagaatagtagttgtccacagggtaggggagctgagacaatggaaaacaaggaagtgggaattttt

SEQ ID NO: 409227 - DNA, 593 bp, Homo sapiens
tgatggaagttcctttgtagaaaaaggactttgaaaagtggggtatgcagtggtcagtgataatggaatacttgaaagtaatcccctcactccgggaactagtgctcagctggcagaactaatagccctcactcgggcactagaattaggagaagaaaaaagggtaaatatatatacagacacttaagactaggggcttgcctagtcctccatgcccatgcagcaatatggasagaaagggaattcctaacttctgaggcaacacctatcaaacatcaggaagccattaagagattatcattggctgtacagaaacctaaagaggtgacagtcttacactgccagggtcatcagaaagaaaaggaaagggaaacagaatggaaccaccaagcggatattgaagccaaaagagctgcaaggcaggaccctccattaaaaatgcttatagaaggacccctagtatggggtaataccctccaggaaaccaagccccagtactcagcaggagaaatagaatggggaacctcaagagcacatagtttcctcccctcaggatggctagccaccgaagaagggaaaatactttagcctgc

SEQ ID NO: 409228 - DNA, 593 bp, Homo sapiens
tgatggaagttcctttgtagaaaaaggactttgaaaagtggggtatgcagtggtcagtgataatggaatacttgaaagtaatcccctcactccgggaactagtgctcagctggcagaactaatagccctcactcgggcactagaattaggagaagaaaaaagggtaaatatatatacagacacttaagactaggggcttgcctagtcctccatgcccatgcagcaatatggagagaaagggaattcctaacttctgaggcaacacctatcaaacatcaggaagccattaagagattatcrttggctgtacagaaacctaaagaggtgacagtcttacactgccagggtcatcagaaagaaaaggaaagggaaacagaatggaaccaccaagcggatattgaagccaaaagagctgcaaggcaggaccctccattaaaaatgcttatagaaggacccctagtatggggtaataccctccaggaaaccaagccccagtactcagcaggagaaatagaatggggaacctcaagagcacatagtttcctcccctcaggatggctagccaccgaagaagggaaaatactttagcctgc

SEQ ID NO: 409229 - DNA, 648 bp, Homo sapiens
aaaaaattagctatattgaactgagaaagccactaagaaaatctagtaaaaactactaagtgaacaaaaaagatgcccagtaatgcaatgagaaaatgaagggagtgtgttgatttatgaaatcaaaaacctgagcctcctttgacttcctctgtgtgtgtgtgtctttatctcccctcttctctaagtgataatttgccatgatgaaacaattattttctaaatcaaatgaaatgctatattcctgcttcatttaataaatgaataagcaaccattactttttgaaattaagaggaaarggtttattttagaagctcaaaattcacttcaaaagtattctttttataccatctaactatgtgcatgtgaaaatgtccttagatcttagaattcttatttcatgtataaccagatggtttgactctttattttgacaatgctatttctttatttatcctttgaaaaaggaactctgacctttgttttcgtttataaactgagggtgatactgtaacataagggtgaggaagtccagcacattgagccttaaccagggctttcttcacatcacaaaactgtgtaagtgttctgagaggaaaaatacactaagtggcactgagcttctttcctgcaaagaaagcaggcaa

SEQ ID NO: 409230 - DNA, 648 bp, Homo sapiens
aaaaaattagctatattgaactgagaaagccactaagaaaatctagtaaaaactactaagtgaacaaaaaagatgcccagtaatgcaatgagaaaatgaagggagtgtgttgatttatgaaatcaaaaacctgagcctcctttgacttcctctgtgtgtgtgtgtctttatctcccctcttctctaagtgataatttgccatgatgaaacaattattttctaaatcaaatgaaatgctatattcctgcttcatttaataaatgaataagcaaccattactttttgaaattaagaggaaagggtttattttagaagctcaaaattcacttcaaaagtattctttttataccatctaactatgtgcatgtgaaaatgtccttagatcttagaattcttatttcatgtataaccagatggtttgactctttattttgacaatgctatttctttatttatcctttgaaaaaggaactctgacctttgttttmgtttataaactgagggtgatactgtaacataagggtgaggaagtccagcacattgagccttaaccagggctttcttcacatcacaaaactgtgtaagtgttctgagaggaaaaatacactaagtggcactgagcttctttcctgcaaagaaagcaggcaa

SEQ ID NO: 409231 - DNA, 619 bp, Homo sapiens
taaattacaccataatgtaaccaatcccttgtgtcattggacatttagattgctttcactttttaaaaatggaaatatttcaagcatagactagagtatgagaataacagagcatcctgtatatctgctacctagaggttaatattttactatttttttgaaagaagaaataaaatattacagatactactgaaacatcctttttatcctaccatattctgttcccttacctcgctccttatagatgatcattatcctgaaacttatgtgtatctttcctatttatgttataaaacatacatatatatattttttctaccatatatgcatctataaacattgtgcttccatttaaattttctttgctgtggttttaaaacttgcttttccatctaacactatatttgaaatttttgttattacatattcctaattcattttaactgttgcatactgcattttatgaatatgccacaatttattttttcattcatttgctggtagatgccagttttttactttcttttttagtgaacatcttttaaatatgtctccttrtatatattataactagatgccaattcacactcatcaaattagtaaaagtaggagtctaaca

SEQ ID NO: 409232 - DNA, 580 bp, Homo sapiens
gtaaactacagactttgggtgataatgatgtatcaatctatgttcaccatttgtaaaaaaatgaaccattctggttcaggattttgatagtgaagaatactgtcatatgtggagggagggagcatatgggaactctctgtactttccacccaattttgctgtgaacctaacactactctaaaaaataaaataaaaataaaaataaaatctatttaaaagaaaaatataatgcgatgaaaaatattgtcctcacccttgacgcttaagtctcctccccacaggcgccaaattttccagttttctgaatgtatttccagagattttgaggtatatgcacaaaacagatttatatccatatmtatagatatagatatgatttttccctttttttccacaaatggcaatgtactgcacactgtattttataccttgcttttttcacaaaatgatataccttaaagatttttaaatagtggtacagaaaaaacttctttgttcttttcaatagctgtatagtcttgtatgaatgaaaaataatttgtttaatcagttccctattgatggacatgaaaggtgtttc

SEQ ID NO: 409233 - DNA, 580 bp, Homo sapiens
gtaaactacagactttgggtgataatgatgtatcaatctatgttcaccatttgtaaaaaaatgaaccattctggttcaggattttgatagtgaagaatactgtcatatgtggagggagggagcatatgggaactctctgtactttccacccaattttgctgtgaacctaacactactctaaaaaataaaataaaaataaaaataaaatctatttaaaagaaaaatataatgcgatgaaaaatattgtcctcacccttgacgcttaagtctcctccccacaggcgccaaattttccagttttctgaatgtatttccagagattttgaggtatatgcacaaaacagatttatatccatatatatagatatagataygatttttccctttttttccacaaatggcaatgtactgcacactgtattttataccttgcttttttcacaaaatgatataccttaaagatttttaaatagtggtacagaaaaaacttctttgttcttttcaatagctgtatagtcttgtatgaatgaaaaataatttgtttaatcagttccctattgatggacatgaaaggtgtttc

SEQ ID NO: 409234 - DNA, 580 bp, Homo sapiens
gtaaactacagactttgggtgataatgatgtatcaatctatgttcaccatttgtaaaaaaatgaaccattctggttcaggattttgatagtgaagaatactgtcatatgtggagggagggagcatatgggaactctctgtactttccacccaattttgctgtgaacctaacactactctaaaaaataaaataaaaataaaaataaaatctatttaaaagaaaaatataatgcgatgaaaaatattgtcctcacccttgacgcttaagtctcctccccacaggcgccaaattttccagttttctgaatgtatttccagagattttgaggtatatgcacaaaacagatttatatccatatatatagatatagatatgatttttccctttttttccacaaatrgcaatgtactgcacactgtattttataccttgcttttttcacaaaatgatataccttaaagatttttaaatagtggtacagaaaaaacttctttgttcttttcaatagctgtatagtcttgtatgaatgaaaaataatttgtttaatcagttccctattgatggacatgaaaggtgtttc

SEQ ID NO: 409235 - DNA, 489 bp, Homo sapiens
tatttttctaactttatttatccctggctttatatcaaattacttttccatgtagattttttttaaaaaaaagttgaattgatcaatgttttctttgacagctttaggaatttttgtcacagttagaaaggtcttattactcaagatgattgaaaaatctcatgaaatgtaagaagactaaagttttcatgattcaatttttcccatttaaatttttaaactcgttttagagtcatttttaatttctcctgctgtaaggtaaaaagtaagkctccagtgtttttttcaggtgactacctggttaatccaacactattaataatttatcttattttcccactccacctccactgattagttagatgtcacttttaccatacactaaattcttttatgtatttgaatccatttctatgctttctatttttacattgatttttctgactcttcatgtgcctgtaccatcctgttttaattactgtagcctta

SEQ ID NO: 409236 - DNA, 521 bp, Homo sapiens
tcacagagccagaataagaaataacttgggtatagtatcttccttataaayttcatataaatgttcactctaaaataaaaaattaagcaaaatatttagtttctgatcatcaaatatttaacttggagatggtcattcctatttgctaagcggcatttactgaaccatagttacatgatattcagtagattattatgatgattgaaatctaaatcttgtaacacaagggatcttaacctctatgttttattaacccctttggaagtctggtgatgtctatagactgcttctcagaatgtctttaaatgcataaaataaaacagatatgatagaaatgaaatttgttatattgaaatacattttccaatattaaaaagcaaatgtatgatatagtgacatgtggacttcctaattaacacattaactaacaagttctagcagctcatctaataactattattttcaaaatacagatcagtagaaataatattttgaaatatttgcaacaactataatgtgat

SEQ ID NO: 409237 - DNA, 521 bp, Homo sapiens
tcacagagccagaataagaaataacttgggtatagtatcttccttataaatttcatataaatgttyactctaaaataaaaaattaagcaaaatatttagtttctgatcatcaaatatttaacttggagatggtcattcctatttgctaagcggcatttactgaaccatagttacatgatattcagtagattattatgatgattgaaatctaaatcttgtaacacaagggatcttaacctctatgttttattaacccctttggaagtctggtgatgtctatagactgcttctcagaatgtctttaaatgcataaaataaaacagatatgatagaaatgaaatttgttatattgaaatacattttccaatattaaaaagcaaatgtatgatatagtgacatgtggacttcctaattaacacattaactaacaagttctagcagctcatctaataactattattttcaaaatacagatcagtagaaataatattttgaaatatttgcaacaactataatgtgat

SEQ ID NO: 409238 - DNA, 521 bp, Homo sapiens
tcacagagccagaataagaaataacttgggtatagtatcttccttataaatttcatataaatgttcactctaaaataaaaaattaagcaaaatatttagtttctgatcatcaaatatttaacttggagatggtcattcctatttgctaagcggcatttactgaaccatagttacatgatattcagtagattattatgatgattgaaatctaaatcttgtaacacaagggatcttaacctctatgttttattaacccctttggaagtctggtgatgtctatagactgcttctcagaatgtctttaaatgcataaaataaarcagatatgatagaaatgaaatttgttatattgaaatacattttccaatattaaaaagcaaatgtatgatatagtgacatgtggacttcctaattaacacattaactaacaagttctagcagctcatctaataactattattttcaaaatacagatcagtagaaataatattttgaaatatttgcaacaactataatgtgat

SEQ ID NO: 409239 - DNA, 608 bp, Homo sapiens
ttacttactttgggtccaggctctaggtgtgcaggccaggctctgggtgtgcaagccagggatgagaaccctggtctaatgctatatgcaaggaattaatattgttagtaatggtggaggcctgggagaatactaaaattgttttatagcttatagctcagcaagaaagatatatttagtctttaaaaaaaaacaggaaaatttcagaaggaaaattttgaaggaactttacaygtaaaccactgtggggtaatatttttaaaatgctatttttctctaccatttaattcctaatgtggcataaacttttcggctcagttgggatatgctgacacattatatgtacacacatttgtatcttatttatttgtattatataaataataaataaactttttttaatgtatagaagagtacaaagtaaaaagtaaaaatcttggccaccctccctggccccatctcagaggaaaccctattaagaatttcttatgtatccttctagaaactggctacccacatcaaaagtatatatataatgttaatatgtatttattacatttatttattagctcaggactcaaaggggcttggaaattatcatgacagta

SEQ ID NO: 409240 - DNA, 607 bp, Homo sapiens
aggctgatttggggagagaggggggaaacctaagttatacactaaaattcttccccctccctgaacatgcaataaggcgtttcaccttttaaaaatgtattcccgtcactagtattagttgcctttctcyttctaataccaaaatgaaaaagaagaaaagtatcttaataattttccccactgtcacgctaacccctgcatccagaggccactaacacagctggtctaagtctattcccttcttacaaaatagcgctttcaaaccgattgttaatctcagagagaagggttgtgcctaagacttacggctgaataaaagcagcacataaattagtggttatgtgtaatccatcttcttagtttaaagggagaaacaactataacctaaaactctacaagatttagagagcaaagagccctttacattttgttcttataacaacaacagaaatctaacgcaggtacacatatgaatcagaaaacgtcattctccaagtctttataaccaaagggaaaataaaataccattaccctgtcaagagctccgtaaacttattttaaacatcatataatggatttatctgacttgttcatactaagtttattc

SEQ ID NO: 409241 - DNA, 550 bp, Homo sapiens
acccctgtttttaaaaacatcagatctcataagacttattcactatcatgagaacagcacaggaaagacctgcccccatgattcaattacctctaactgggttcctcccataacacatgggaattcaagatgagatttgagtggggacacagccaaaccatatcaggatttatctggggcctttttaaataaagggactaattacctttataaaacctctgcttttatcacctaattacctcccaaaccctcatgtcctaataccatcaccttgggggttaaaatttcaacctatgaattttggggagacacaaacatttagatcatagcaattggtttgctggattaataatatttaacatacatagaatcttaccataaatattgatttgctatttatattactaatttaatttggttatagacagcgtatatgattccaaacttygaaatttgttaatatttgttttgtggttcagcacatagtttactgcatgtttcatgtactcttgaaaggaatgtgtattccacagttgttggaatagtgttt

SEQ ID NO: 409242 - DNA, 625 bp, Homo sapiens
tcctttctactctcttctaattattgttggagctagaaacaccaggaattaaaattttcaaattcctttcccaccagaattttgcagtaatttacattctaacaatgagaacttgcttgagatttgaaagagaggaagcaaaaatcaattatttttctggaatcaatgggcaccagtaacggcttctgcaaacatgtagtcagctgcgattattaacagcaattgtccaaatttctaataagttataacaaatctttctgattaaaataattagaggtgtttatgcttatgtttttctgatgaaagccttactagtcagcttccatgaaaaatactctggtttttattctgatccttctacaactcagtccgctctttatcagtgtcctttgcagcatctagttcctctctgcactccttaaatgttggtgattgttgatgctcctgttttctcatcctactacatcccctccctagtcaatatcactcattctyatacattattcttaagttccagattcatgtacaataataatgattatattagtcagattggatttgaggtaaaggataattccacaattttagtggcttacacaaacaaatgtttattagttacttgcat

SEQ ID NO: 409243 - DNA, 625 bp, Homo sapiens
tcctttctactctcttctaattattgttggagctagaaacaccaggaattaaaattttcaaattcctttcccaccagaattttgcagtaatttacattctaacaatgagaacttgcttgagatttgaaagagaggaagcaaaaatcaattatttttctggaatcaatgggcaccagtaacggcttctgcaaacatgtagtcagctgcgattattaacagcaattgtccaaatttctaataagttataacaaatctttctgattaaaataattagaggtgtttatgcttatgtttttctgatgaaagccttactagtcagcttccatgaaaaatactctggtttttattctgatccttctacaactcagtccgctctttatcagtgtcctttgcagcatctagttcctctctgcactccttaaatgttggtgattgttgatgctcctgttttctcatcctactacatcccctccctagtcaatatcactcattcttatacattattcttaagttccagattcatrtacaataataatgattatattagtcagattggatttgaggtaaaggataattccacaattttagtggcttacacaaacaaatgtttattagttacttgcat

SEQ ID NO: 409244 - DNA, 625 bp, Homo sapiens
tcctttctactctcttctaattattgttggagctagaaacaccaggaattaaaattttcaaattcctttcccaccagaattttgcagtaatttacattctaacaatgagaacttgcttgagatttgaaagagaggaagcaaaaatcaattatttttctggaatcaatgggcaccagtaacggcttctgcaaacatgtagtcagctgcgattattaacagcaattgtccaaatttctaataagttataacaaatctttctgattaaaataattagaggtgtttatgcttatgtttttctgatgaaagccttactagtcagcttccatgaaaaatactctggtttttattctgatccttctacaactcagtccgctctttatcagtgtcctttgcagcatctagttcctctctgcactccttaaatgttggtgattgttgatgctcctgttttctcatcctactacatcccctccctagtcaatatcactcattcttatacattattcttaagttccagattcatgtacaataataatgatyatattagtcagattggatttgaggtaaaggataattccacaattttagtggcttacacaaacaaatgtttattagttacttgcat

SEQ ID NO: 409245 - DNA, 598 bp, Homo sapiens
agcaaaagggaacaggtgggttacgaaaacttaggaactcagaaaataattaatcataaattatttggtcagtcctctgagaaagggctatatattattgtcacccttaaaggtggtatggatccccttcctattatagatatgaggtagaggctgcggacattccacacaccagataaacttgagaaaaagtttattactcacacagcaactcctaaggcaataagaacaggctgttatgctcagggttagggtcaagctccagctgaggtccaaggggtgtaggtagatgtggggcatggagctagaagaacacccagagacagcaggtaaatgagacatggctttattcagcggctctctcatcagcagctctcttacactgtcctctctgtcttggctgcttgagccagctgctcccatgcacagctgcacagccggctttcccttgccttcagggtcagcagcttaactctttctctttcttggcactagtgagctgagctgtatcctgacttycccttgtttgtctgcaagacagacagctctggctctctttctgggcacaagtgtaccccacacagtgtcagcagggcaa

SEQ ID NO: 409246 - DNA, 293 bp, Homo sapiens
ctgggcacaagtgtaccccacacagtgtcagcagggcaattatacctttaacagacaatagtggcttagagctaagtgatggccttccsatgttatggctacatggctatgataataagtggagttacacatctgcactctaaactcactgagacactctggatatttacctctgcctattctttaccaaagcactgtgatccttacacaggcacaagcaggttcatgctgatttaagtcaggcagaaggagtgggttaaaccataatgatggctagggagtgggaaggggga

SEQ ID NO: 409247 - DNA, 550 bp, Homo sapiens
gtcagcagggcaattatacctttaacagacaatagtggcttagagctaagtgatggccttcccatgttatggctacatggctatgataataagtggagttacacatctgcactctaaactcactgagacactctggatatttacctckgcctattctttaccaaagcactgtgatccttacacaggcacaagcaggttcatgctgatttaagtcaggcagaaggagtgggttaaaccataatgatggctagggagtgggaagggggaaaagttcctatccataggctggctacttgcaagatttgaattttccaccagtgccaaaggaggaggcacacaggctttcttatcggcatgttcagatgtggggccaaatgggaagggggaggtgaggctaaaataagttaaaagtcaaacgtaaaaaaatgaagtcagactctattacagggtgtctcctagctactttctgtacttcaggagtgcagaggagagaccccaggagatggtgctctgacctcttaacacagaacacaattggctgcagctgatc

SEQ ID NO: 409248 - DNA, 501 bp, Homo sapiens
ccattattctaagtgaagtaactcgggaattgaaaaccagatatcctatgttctcacttataagttggacctaagctatggataagcaaaggcataccgagtgatataatggatattggacactcagagaggggagagaagaaggagggtgagccatgaaaaattatctgttgggtacaatgtacactccttgagtgacaggtgcactaaaatcctaaacttcagcactatgcaattcmtccatgtaatcaaaaaccacttgtatccataaaactattgaaatttttaaaatgtttaaaattaaaaaactaaaaaataaaaatagtaatagggaagataggactcaccaaaaacaaaaaacaaacaaaagatgcagattcttgttttttcctgtcaaccatatatatgtgtttatgaaaactgatgtacatattttagaagtggtctacttgaaactattcaaatccatagcactctaaactttttagatatttgaggtag

SEQ ID NO: 409249 - DNA, 579 bp, Homo sapiens
cttattacggtttcaccttatatttttcttatgtactacatatactgtctccctccactagaatgtatattccaagaagccagaagtttcttctttgctttattccagtgtcaagaacactgcttggcacgcagtaagcaatcaacaaacaattgttgactaataagtattgagtgttctacctaaatataataatgctttatgtaagcaattaataaattacatttcattcttgttagtcgtcctacattaaaggtctttaatactctttttatgttatcaggaatgcattacgtcatccttattaagaggagttacttttacatttcccataagtcttgagatcagacattactgccgattgtaaaggagaaaaaaaatctctaaaaarttaaaggtgaaagtattgttaaaataattcccctttccattaagaattcttggggtgtgggaaaaaatggtgaaaatcgtacttaaaataccaagaatccagttttaaacccaactcttccttttaagcttttcctcccccattctcccagagcacttcgtaggattaagccagtgctcaccatggtc

SEQ ID NO: 409250 - DNA, 579 bp, Homo sapiens
cttattacggtttcaccttatatttttcttatgtactacatatactgtctccctccactagaatgtatattccaagaagccagaagtttcttctttgctttattccagtgtcaagaacactgcttggcacgcagtaagcaatcaacaaacaattgttgactaataagtattgagtgttctacctaaatataataatgctttatgtaagcaattaataaattacatttcattcttgttagtcgtcctacattaaaggtctttaatactctttttatgttatcaggaatgcattacgtcatccttattaagaggagttacttttacatttcccataagtcttgagatcagacattactgccgattgtaaaggagaaaaaaaatctctaaaaaattaamggtgaaagtattgttaaaataattcccctttccattaagaattcttggggtgtgggaaaaaatggtgaaaatcgtacttaaaataccaagaatccagttttaaacccaactcttccttttaagcttttcctcccccattctcccagagcacttcgtaggattaagccagtgctcaccatggtc

SEQ ID NO: 409251 - DNA, 534 bp, Homo sapiens
tccgttagttgaattccaaagaattccaatatataaatttgttttactttcttgttaccttaaaaacatacagtttatatttcattttgttcagatttcattgggttagttttgttttagtatttttttttttttttttttttagagacatgggtctcactgtgttacccaggtttgtctcaagctcatgaatttaagcaatcctcgcctctcagtctcccaaagtgctaggattataggcatgagctactacacctgkcccactaggttactttagaatgcaaatgttgtatttcacaatcctaaaaatctttcaatatgtgacaactttaagtgtagtgatttgcagtacaaaaattgtcattagcgcacatcacaatagcatttcttctgttaatcttgtctaattacttggttttatctattacttatgaacttcccaaatgtgatggttaatactgagtgtcaacttgattggattgaaggatgaaaagtattgatcctgggtgtgtctgtgagggtgttgccaaagga

SEQ ID NO: 409252 - DNA, 601 bp, Homo sapiens
gtaaaatgatattctctcccaaccaggagtgataacatgtgtacacaaataactattctaactaaaatctcctaaaaactgaaatcctatagctatttaattatatgtgtgtggaaattattttcaatccttttatgaatagagctgaatataaatgatcaaataaatgcctgtgctcaaccttatcctttaacgaagagtttagttgcctctctgatgtcaaaaaattattaaagataataatgtttttgtttggaaagaaaacaaggtgaatcacaatgtcctacccagagtgaatcacaactgacaaagaacttttcatactgttattactattataaataacataaatagtaatagttcttctagactgtggttccatatgttctagccccagactatggtggttacattcatctaatattttagataacattcaaaaatatgtgttatrccattcatgtcacgaaaatttttctcatacctgttgtacctttacattatttttcaaaggccagtccaagagccacttcatctgggaagtccctcccggttttccctcacatacagcatttcttgattctaggaaacactgtaatac

SEQ ID NO: 409253 - DNA, 622 bp, Homo sapiens
atgtaagcacttaatgtcttcccattggatcttttaatgtttatacattagcctgagaatcttggcttttgcctagttgtagaatcaaatatttttagtttaaaggtaaattacagattattagtagtccagtatcacattcaatgcagttatcctttgtacattttcctacatagcctctgaatttatcttcaatgataaatttatcaaatatcctatgttgtgtgtcaatattgcagagaatggctgtaacataataggaaattgaatacatattttatttataatgcatcacaatattaagatggctatcaacatgaatagaaacagaaaatgtagtatatatgcacaatgaaatacacttcagccttaataaagtgggaaatcctgtcatttttgacaccataaatgaacctagaggacattatgttaaatgaaataagccaggcacagaaagacaaataccacatgatctcatctatatgcggagtctaaatatttgaattcatagacgcagagagtagaatggtagttacctgggtcttggggaraggaggggttggggagatattggtcaaaggatacaaaatttcagtttgataggaggaataagttcaagaga

SEQ ID NO: 409254 - DNA, 605 bp, Homo sapiens
aggacttttatatactgttcaatgaagctattttaagtagtcaaatactgagtttataataaaatgacatttcrcatatcaaaatgcctacctagcaggatgcctgaaaaaatagacagtcaatgaatattatctatttagtttttcttttctcatttgttactttctctcatcttctccttccacttaaatttcaatatgagaatgatttaggttttgtaggtcctaaagcttatcttatgtggggttctccctcgaaaaaataaatataatgaaatgaaaattagatgcaaaattgagtatttagactgagaaaatataccacaacagtttaaattttgaaaagctgagaactatcaaagatgatacaactcaggaaaataatacaacattttaattaattgcctgatagcagcaagtctataaatttccttcccattattatggatatataatttttgaatgtctttccatatgacaacaattttattatacatttcttgtagagagaaatataattcagtctttcctgtagcatgattaatcaaagtgatcctttaatattttataacttggaagtgtttattttaggttaacagctcata

SEQ ID NO: 409255 - DNA, 605 bp, Homo sapiens
aggacttttatatactgttcaatgaagctattttaagtagtcaaatactgagtttataataaaatgacatttcgcatatcaaaatgcctacctagcaggatgcctgaaaaaatagacagtcaatgaatattatctatttagtttttcttttctcatttgttactttctctcatcttctccttccacttaaatttcaatatgagaatgatttaggttttgtaggtcctaaagcttatcttatgtggggttctccctcgaaaaaataaatataatgaaatgaaaattagatgcaaaattgagtatttagactgagaaaatataccacaacagtttaaattttgaaaagctgagaactatcaaagatgatacaactcaggaaaataatacaayattttaattaattgcctgatagcagcaagtctataaatttccttcccattattatggatatataatttttgaatgtctttccatatgacaacaattttattatacatttcttgtagagagaaatataattcagtctttcctgtagcatgattaatcaaagtgatcctttaatattttataacttggaagtgtttattttaggttaacagctcata

SEQ ID NO: 409256 - DNA, 498 bp, Homo sapiens
aataaaactataaattgtgataaatatagtctggatccaggaatagggcagctaagaagtgaaagaaagcacttggcatttggtgtgtcatttcacgcatgtcagggatttcagtgtgaagatgtagggagagtgacattccaagcagagggagctaagttagcaaaaagatggagtttagaaggtaggaggaggaagatcaaattactagaagcactcagtattggagtgaaagtgccatgtagcacaaatgtatgttgtagattaactttgagtatcaggctgagatgctttaagtttctaatttcatttttatcttaaaaagaactttcattctaacaagaaaacctacattcctggaaataacgtgtttttgtcataacccatataataacatttatttaataaagctrtgtacatgtacctgggctagacattacagcaactaccctcaagagtcttgcattgtagggatggagacagagatataaacaaaga

SEQ ID NO: 409257 - DNA, 474 bp, Homo sapiens
cttttgcttttcattgagctgtgggaagttgtttcaagaccatcaggaaaagctttatttctgtgaaaaatagctctatggtcatcagagcaaaaaggccttgaattttatatgtgaaagatttctactgaaaaaccrctaggtcctgactccattgacctcagaatgcaggaggatgtggaacacaaaattgaaattgtggcccatgaaagttactctttttcagtaatactacagtattacaaatattccatgttctttaatgaaacaccttgccactaacctgaatggatgtcagttttgtttctctttataacacagggctcactaacaatgttcagcttttcagccatttattaaactcagaaatttgtcttaataaaatcacttcaaaggagaaaaaaaagagctgtatgtctgaagatattctttgtagtattagctataatagtaaaagatggaaacaatttaaat

SEQ ID NO: 409258 - DNA, 594 bp, Homo sapiens
  misc_feature (1)...(594): n = A,T,C or G
atgtatgatttccaagcacagacaggtgtatgttggcaacatcctaatagaaggcaaggaaaatgcaggccctgaagctactgaaaatggatgtgggacccagagggaacccaggagctttctagatatgagcacaaacctatgggcctagccaagattcacttgggcaataagaaggattgagatctgtgacgttgttcagatcaagcaggagtctaacaccctaccatgcccgggggcctggaccttccargctgccagctgggcaaagcagaggctggcagatagaggctcatgggacaaacagctgggaggaggattaaataggcaagacatcctgaggaaagggagaatcccagctgtcatttngggaagcacacatcccctgcagcagttcaatgtggctgaatgaagacagtggatatatccttggaattctagcaatacagaacaagacacgtgaaaaagacacacgcacacacacacctcaggtccaaaagcaaggctgaatgcatttccatatgtgcatctggatggggtgaggggcattacttaacatcaactggtaattctatcaattaggaaaatattcac

SEQ ID NO: 409259 - DNA, 606 bp, Homo sapiens
aggtcatattgttatatgtgttacagctctctctgtctctctaatatatacatatatatatctaatatacatatatcagataaatattagatatacagaatctgtaggcataaaggcctatggagcttttatatttgacccaattaattgacctagaactccttggaagccacagtgaaaacaaagatatagtcatttacatacttactttttgattttggtacatagtacacttagccactccttaaagaaaattttcaaacatctcatagtgggagtatggagggacggcacacagtggaagagaatccaaaacaaaatagctcttttagcataaattattttttgactagagtaataagggggcatgttgtgtatttaagaatctagtaattttgcattctcttctttgtcatccagwttcattcattcattcagccaagttcattcactcattcattcatttactcaaaaaatatgtgttgtgttgagtacctactatgtaccagatgttcacctagatattggcaagaaatctgagaacaaatggagcttgcattctaaggaattaatcagacaattgttcagaaatatttagaagattga

SEQ ID NO: 409260 - DNA, 560 bp, Homo sapiens
aagacttgactctattattgaacaaagaaatgtttccaggccmactcttaaagtgagcaaagttatgtcatacttaagttaccttgtttgtcaatctttacacagcaagggctttttatgttttctcctttatcttcaatggttccctttttgattaaaaaatatgaaaaagtccctgaagtttgacttacttataaagtgaaaatgatgcaagcctgattatgtccttagaaagcattgatgatatcctgtatacttcaatatacctagtgaattctaacacacctgaatggccttgatgtagaccagaacatttagagagacagaggcaaagcacttggcatcagacggtggatcccagagacgttttaaggttcactagacatttgctgtaagtttctagggctagacttctggaattccactcttgttggttgagaagtagagtcttgataaccaggagtatattagagattttcatggaggtctgtctgactgcaaagactctaagagtcaaatcatcataagattctactcaataaagtataaagtatgacctt

SEQ ID NO: 409261 - DNA, 506 bp, Homo sapiens
aaacagttttgcaggaaatctccaagtagacattttcatactagcatctgcagtataatcaggaaacgattacaggaagtatgaggatttgaaacactgaagcctttgcactctaggattgcataagggctatagggaacagctttgggagggctgaggcacatatttgttakgttttaggtaagccctggatgcactgtactcagaggattacccctaatcctttcacctcagtcctttgagatcgctgaaaactgttgccccatgtgttgctaagtgcccaagctgaggtcacagtgcgaccttcggcagcatggagacatctgtgaagtcattacagagattatgtgtttaatatagggtctctcagaggtgtatgtcaatgtcaacttaatgccaggccacagtatctccacacatgaatagtgtcctccaaattcatgtgtacttcgaatctcagaatgtgaccttatttggaaataggctttctacatatataattaatt

SEQ ID NO: 409262 - DNA, 457 bp, Homo sapiens
gagacatcttccttctgcttaaggaaagaacaggggagagtaaagaaaactttcccttacaattgggataccagctcaaccactatagaatagagcaccagtcatgaggcctgcattccaggccctagctcccagatgaaatttttagacacaccctgggccagaaaggaacccaatgccttgaagggaaggacccagttctggcaggatccatcaccagctaactaaagagcccttggattgtgaataattagcagtggaggccacaggccttgggtgagacttaaagctgtgctggcttcaagsgtgtcccagcatattcccacatgtagtggctataggaagagactccttctgcttgagaaaaggagaggaaagagtaaggggggcttctcttgcagcttaggcaccaccttgaccacagtggagtacagcatcaagcaggttcccagggtag

SEQ ID NO: 409263 - DNA, 506 bp, Homo sapiens
aaacagttttgcaggaaatctccaagtagacattttcatactagcatctgcagtataatcaggaaacgattacaggaagtatgaggatttgaaacactgaagcctttgcactctaggattgcataagggctatagggaacagctttgggagggctgaggcacatatttgttatgttttaggtaagccctggatgcactgtactcagaggattacccctaatcctttcacctcagtcctttgagatcgctgaaaactgttgccccatgtgttgctaagtgcccargctgaggtcacagtgcgaccttcggcagcatggagacatctgtgaagtcattacagagattatgtgtttaatatagggtctctcagaggtgtatgtcaatgtcaacttaatgccaggccacagtatctccacacatgaatagtgtcctccaaattcatgtgtacttcgaatctcagaatgtgaccttatttggaaataggctttctacatatataattaatt

SEQ ID NO: 409264 - DNA, 612 bp, Homo sapiens
aaatttatgcataagaaaaattttcccatgtccatggatgaaactcatcatttttcttcaagytgtaaaacacttattcacttaataagtaaatttcccagctcaatataatataaacacttccttcgttattcaaaggttattcattccacactctcatccacaatcaggccctaactgtgacattcttgcaggaaggccaccaaaaattttagtcacccccactgcccaaaccaaccaccatgactgatatcttcaggactagttagactatggagagggaggagcaggaagggaaccagagaattgttacttgattggtacttcagtaagaatctgggggtagcgcttacctactgtagttaagggttttttagagacttccctttgtgggctctccaactgaaactctgtccggtcagtgatgacttctcaccttcaaaccacttttccatcagctcttggttttccactttctaccatatgtaggcttttcctattaaagcctcgtttcctcttaccctgttctcttgcattggagttttaaaagactctaggctggttcttttttgccatgtggcccacatctattctagaagtattatacactca

SEQ ID NO: 409265 - DNA, 612 bp, Homo sapiens
aaatttatgcataagaaaaattttcccatgtccatggatgaaactcatcatttttcttcaagttgtaaaacacttattcacttaataagtaaatttcccagctcaatataatataaacacttccttcgttattcaaaggttattcattccacactctcatccacratcaggccctaactgtgacattcttgcaggaaggccaccaaaaattttagtcacccccactgcccaaaccaaccaccatgactgatatcttcaggactagttagactatggagagggaggagcaggaagggaaccagagaattgttacttgattggtacttcagtaagaatctgggggtagcgcttacctactgtagttaagggttttttagagacttccctttgtgggctctccaactgaaactctgtccggtcagtgatgacttctcaccttcaaaccacttttccatcagctcttggttttccactttctaccatatgtaggcttttcctattaaagcctcgtttcctcttaccctgttctcttgcattggagttttaaaagactctaggctggttcttttttgccatgtggcccacatctattctagaagtattatacactca

SEQ ID NO: 409266 - DNA, 587 bp, Homo sapiens
caacattacctaagctctcatgtgyaccatgccttttatgcttaacttttatcacagaactaccattcatgataccaaaaaaggcctcatgtccgagtgcccttgacatcctgctacaagaggaaaccactcactgatactcaagtctattatcaccaagaaatctttccaggaaattagatgacattcaaggaaaacactgataatcatgcaggaacctgaaggttatattttaaatgatttgatcagcctctgacgataggaaatagatttggggaaatagctgagcatctttcattcatttattcaacagttattgattatgtattcacaatgccaggctccattctaagtgctgggatgcaggacccaacaaggtagacaaggtccctggtctcatggaacttacattcctttgaatgagtccatcagtgcctagctaaatacatcaataatttcagacagtggcaagtgctgtaatgacaacaaaataggtaacgtgactggtgatttggagcaacaggatagcgtctcagcttttgtgccaaaaggaaggtaagaataaaacgagaaggaacactcactgg

SEQ ID NO: 409267 - DNA, 526 bp, Homo sapiens
agtagaggattcaaatgcgaaaatacaatgaccattctaagtcgatatgtgtgaggaagagactggaatctygctgggtactgcacagacctggctccagcctacagaagagaagagcaaacaatccagagtgggattatcgactgcatctcttattttcattatgtgggagagttaaccacttttaacttttgtttattcactacaaaattagaggaacaacatcaaatttctaagtttgtagttaatattaattagtgtaaataaagcacttggtacatattagatgtccaataaatgccagttctctctttatcaggggaataagtagaatttacaaaatagggattacaaggagatatgaaacccagttataataatttattttataacacagctgacagtgcctcattcaaccttccagtaacccttcagaaaaggttttatcatctttctcttatggatgagaaaactgaagctcaaagagatcaagtgacatttgcaagatgattgctttgcatgggag

SEQ ID NO: 409268 - DNA, 526 bp, Homo sapiens
agtagaggattcaaatgcgaaaatacaatgaccattctaagtcgatatgtgtgaggaagagactggaatcttgctgggtactgcacagacctggctccagcctacagaagagaagagcaaacaatccagagtgggattatcgactgcatctcttattttcattatgtgggagagttaaccacttttaacttttgtttatkcactacaaaattagaggaacaacatcaaatttctaagtttgtagttaatattaattagtgtaaataaagcacttggtacatattagatgtccaataaatgccagttctctctttatcaggggaataagtagaatttacaaaatagggattacaaggagatatgaaacccagttataataatttattttataacacagctgacagtgcctcattcaaccttccagtaacccttcagaaaaggttttatcatctttctcttatggatgagaaaactgaagctcaaagagatcaagtgacatttgcaagatgattgctttgcatgggag

SEQ ID NO: 409269 - DNA, 607 bp, Homo sapiens
ctctggttaatctaattctgtgccttagtgatgtttactgaaaaaaaaatggtggaatttagaggaagaaaaacactttctcttgggaaataaaagaaaatcatatgaaaatttacctgttacaattcgttaacagaagagaaaatgaagtgtatgtatctggagatttccaatcatctttccagtgctaaatttgaacctcattctcaagggttttctaaaataaaacttaacatacctttccatcrtcacatcctcatgtcctcaaggctaatttgatttagggattattctagtgtttcgatttgctatcagtttgagagcctttgtatcaaaaagaagtgccaaattttgtgaggttcttaagagaataatgcaggtgaataaagcctcagtatactgggcttctcaggaatgtagcactgactgccatttataattaattaaagatttagagattctgtacctttcaaacgttccttctttttgtgtggaacattttctaatatatattcaacatttgcctgccttttcttttgattcagggttgtttctcctagttcttgcttatcttcatctgtttgggtagttgtagccaatggcttat

SEQ ID NO: 409270 - DNA, 541 bp, Homo sapiens
tcaacttcctgtgaccttctcttggtgaggaccctctcagagaaggagctgtgtctctgattaccccatcaatggtgcacaatagtaacacctcctctgtgtagagcaccacattctttgaactggaccttcaatatgcatagccatgcggaatccagaggtcttcttctgtgtccctgcagggatgtaaagactggagtggaatagctggcattctcatcttcttccaygcttatcacaccacttcaaggcctcctctatgatcccataatcaattatagcagggagcctgatttccaaatctcttcatcagaagtgggcaccattttctatgttctcaaaggccgaaaacatgaggtggcacaagtcacatttttacaagaacttcttaagcactccctactctgcctacaccaacaggactactgtttatcaagcacccagtctaaggataagatgctagtctcttcttgctgggcacttaagttttatgcataatattcttggagcttccttcacttagcttcaggcaggagggata

SEQ ID NO: 409271 - DNA, 546 bp, Homo sapiens
tttctctcttacaccttttgccatgaaaagaatatgatgaagagaataagagaarccctatttcattttaatatttaccaagaatccaaaatgtacaactgagacggtgttatggagaatataaaagtgagcacaacacttgctttgcagaacaatcaagtgacagggagaaaaaaatctaacagaacgcctgctaggtgttgaagtagagccaccagccctctgggtggccttaggcaggtcatgtctcctctgggagccttcctttcacatctgtcatagagcttgtaggcaactgactttgtgaagttcctgccaggttaaacagactctgctccatttttcagactgttattagaaaatgctcaaatacatctgagtttgtgtaggattggaggcagttaatatatttaaggagtcagacatataattaagattttgttgttggggtgggatttctcccccttttaagtctcacttttgagaaactggaacctgaattgagctgttcagagatgaagactaatatatcataatgtgcactta

SEQ ID NO: 409272 - DNA, 601 bp, Homo sapiens
gtaaaatgatattctctcccaaccaggagtgataacatgtgtacacaaataactattctaactaaaatctcctaaaaactgaaatcctatagctatttaattatatgtgtgtggaaattattttcaatccttttatgaatagagctgaatataaatgatcaaataaatgcctgtgctcaaccttatcctttaacgaagagtttagttgcctctctgatgtcaaaaaattattaaagataataatgtttttgtttggaaagaaaacaaggtgaatcacaatgtcctacccagagtgaatcacaactgacaaagaacttttcatactgttattactattataaayaacataaatagtaatagttcttctagactgtggttccatatgttctagccccagactatggtggttacattcatctaatattttagataacattcaaaaatatgtgttatgccattcatgtcacgaaaatttttctcatacctgttgtacctttacattatttttcaaaggccagtccaagagccacttcatctgggaagtccctcccggttttccctcacatacagcatttcttgattctaggaaacactgtaatac

SEQ ID NO: 409273 - DNA, 564 bp, Homo sapiens
taatattattttctctcttccttatgtcttgatttcttggaaagcaaatgcatctagttttaacttaatgtcctgaatgactgactgcaaacaggaggtagaaatggagctttggctcttttatgtggttcatgtaagtattctctctagctctgaggatctacttatatttgacccttttaggaaaaatgctgtaaggttttcyagttttgaggataaaattgctcattaaaatctgtgatgtgtagcactttaatgaatgttagccacattttaaggctattgttatatagctcttagtgttcccaggattcctaataaagagcaaaattatctaaactatttaatgattactagtgggtattggtaagcttttttatgagcttttatgaaagcctcttaaccatatgtcatgtaccatggcataaaaaatagaaacagaaatgcggcaacaaggatctcaatgctctgttgacatcaaatttggcagattttgaaaattctgtgatcatttttctctttatgtgacactactcttgttcattcttcaaaaacatttgcctt

SEQ ID NO: 409274 - DNA, 556 bp, Homo sapiens
tttaatgtcaccgtaaaacctactgcataaataggtaacagtcccatttgacagattttaaaaactaaggctcagagagtttatgtgtctcacttcattaaaaccagtcttcttgagcccaagcataatatcataatattctcatattattctatttcaaggttatttggttactgtttttttttgttttttttttttaatggagtctcactctgtcacccaagctggagtgcagtgatgcaatctcggttcactgcagcctccacctctcccggattcaagaaattctctgcctcagtctcccaagtagctgggattacaggcacctgccaccacgcccagctaattttttctcatgtatttttagtggagacagggtttcaccatcttggccaagctggtcttgaactcctgacctcatgctccacccrcctcggcctcccaaagtgctgggattacaggtgtgagccactgtgcctgtcctatttcaaggttattctaatagttccatcgctcccaccatttacagtacccaaactatcaaatgacaaataaa

SEQ ID NO: 409275 - DNA, 450 bp, Homo sapiens
tttggggagtgcaaagatatagaatctacctctctgagtttggaacgagagcaaaacttcagtgtggaggtgatttaagagctgggagttgtctacccaccagagttagagctacattaccttggtaaggttggtgtctgacttattttatgtgctgcgtaacaggtaaactaataatttgggttgtaactctaagaaataggcttacctggttttgagacctcaaggaagaaattaaagcaatctgtcagcagtagaatagatccactagttcaaatgaaatgcagcaggtaagtatccttctaatgaagacttgctaaaaatacttttactgagcaattatgctactgacagttctttgatctcaaaarattaaacttgctgctgcagtatgaaaagaacaaagccaagtgtaaaataacaatcagggttagttattaggcaacaaag

SEQ ID NO: 409276 - DNA, 446 bp, Homo sapiens
acatacttttaaaaggggcctctttgaaaaaaattagggttgtgatttactctagcttagctgaataaaagaagaaattaagtttgctacctaatttcatgcagattgaaagcagaaagagtgcagttgttggtgtttaaaatgaagtttgattaaaattaaaaattgagagcattctaaaaatagaatcccttatgaagcacctcttacagtaattatgcttaaacaggaraagtaaacacaaataactttaagttgctcttggagcttacagagcagaatacacgtaaattggaacctgaatatgactttccccctgtatagtgaaaaaagttagagaggaggcaaaaatacatccagtaagtttgaggcaatcaggttgcttcagtctgaagatcaggtgactcttttgttggcctctttgccctgttgttcatcttagctgc

SEQ ID NO: 409277 - DNA, 560 bp, Homo sapiens
tttcatttgctaatattgtatttagaattattgcatttgtgttcatgagtgaaattattatataatttctcttgtctccgtttggtacattaggtttatgacgttagttggaccgttcatctttcctcctttctctttctctccctcatcttcctctccctcttcttgtcctttttcttctcttaagagcttgtatgatgcatgaatgtttgtaagagcttactgatgctttctttgtgagaagacaaaatctacaaccatygatcgaattcattttaaggtaatgagaacagtcaagttttctgtcctcaaatcagttttggaaagttatacttttggggaacttgtctattttatcaaagcgtattggcataacactcgtaattgataatgggttgtgctccctagacactctctcagcacccccaggacagaagcacccattccttctgattccgggagtactggtggctgacagctctctcaggattgcccttggctgccgtgctaagttcaggctcacttctcagggcagattccatcctatgtctggccagtgc

SEQ ID NO: 409278 - DNA, 606 bp, Homo sapiens
aaaaaccaaggctgcattatgctgacatgacagctgggctgacagtgtgcattttttactcaagccatggacagagcagctgatctgctttagcatttaacccatctgctgcagggaggggagaggagggacccgaaagaaatcaggttcagagttttggtactcaagacacccagaacttcagctgccttccgttctatttgttccatttgggttgcaagaaacaggagcttgcttatgtgggcccaartaaagacgatgggataggaagatacaacaggcaagctcatggaaatggaaggtcctgaggccaggcccagcacaaccacagggagaacactcctgggtagtaaggagcagagaggacttcctcctcctcccagactccacacgacttctctcatctgtgcgcctttgatctaatcattgtctctctcaactggtttcacttgcttcctcctctggcttgctttttccaaggcattgagactccttggctcaaattcctaccacaaaatagttggcaatattttactttccgtcaaattagctcactaaaaattgatcatctctgcttttttatttgagctggaacacctaaattat

SEQ ID NO: 409279 - DNA, 579 bp, Homo sapiens
aagaaaccggcactatatcacaatactgtagtggactcgactttccttagaaatcaacatgcttaatgacattaatatctgaatagtaagtttcctttaagttgctagaatgtaagtttctagaggacagggattcttatctgtttgttcactgacatatcccaagagaccagggtagtgcatgcatgtgttaaatgctcaataaatatttgttgattgaataaagttagaagacaaggttcagctgtgtgcattagacatttgtgtttgggaagtgggaataaagaggcagttagaatcaactgttaaaagacatgccgttgacacctaatagatattaatctcttgggagggtttgcttttcaaaagagatttcccttttaagtgtaactgactcacagtaatgcaggctggcaaaggaaaggctgtagaagcaaaagcagtgaggttttaatctgcatgtctgaactattcttaaattcagttaactatggtctttccccmctttgcagaattttgagtttttctccaaaaacttttccttaaaaattgttgttttcaactacaacttgtgtatgt

SEQ ID NO: 409280 - DNA, 618 bp, Homo sapiens
tattatattgtattagtccattttaacgctgctatgaagaaatacctgagattgggtaatttacaaagaaaagagacttaattgactcacagttccacatggctggggaggcctcaggaaacttacaatcatagkggaaatcatctcttcacagagtggcaggagagagaatgagaagtggaaagaggggaaaagccccttataaaaccatcagatctcatgagaactcactcagtatcatgagaacagcaagaaggtctaatgatctaatgatctaatccccagatctaatgatctagtccccccatgatctaatcaccttccacgaggtccttccctcaacacatggaaattacaatacaagatgagatttcggtggggacccagacccagaccatatcatatatcttcactttttaagcagcttttcatagcatagacttcaactttattgaaaatatattagtttatcaatatgcatgatttttgcctatataaatattaataaaaatgctctgtacttttcagaggagggcctaaaactataaaacaaagctataaaagggattatcattacaataactattttgaaaaggatggcttcttttgtttgtttaa

SEQ ID NO: 409281 - DNA, 561 bp, Homo sapiens
gggggtaagtttgcagtcttcctaaaagtgaaaaggtaaacaagaataaaattaagcagtgattgaagacaatttactcacctggggaaatgtacttmacgtgtaaatatgatctgtattacttttaaattgttcgatattgtatcaagataaatttgccatataaagttactattaatgttttatcttctaaaccggttctagaaacatgataaaaaggcacccataaagtctcccattttacagctagagaaaatgaggttggtgatgaggcactgcacccaacttacggatcacagtcacaactggggtctgagggttgttttgctaaccctagggcagcggttctcacccaggggcaattttgcccccagcagggtacttggcaatgtctgcagtcagttttgtttgtgggggtgggaagcttggttgccactatcatctaaaggacagaagccagggatgtcctacagtacacaagacagcctccacgacaataaacaaatatccagccccaaatgctaaccgtgttaagaccagatctaaaccctggtctagagt

SEQ ID NO: 409282 - DNA, 586 bp, Homo sapiens
tgagaattctatactgtacttctgtgcaaaggtttaattctcccttaagccatggcctgcttcatattatcaaatgctttctcagccgggtgcagtggctcatgcatgtattctcagcactttgggaggccgaggcagacagatcacttgaggtcaggagttcaagaccagcctggccaatatggtgaaaccccatctctaccaaaaatacaaaaattagctgggcatggtggtgtgcgcctgtagtcccagctactcaggaggctgagtcaggagaatcgcttgaacctgtgaggtggaggttgcagtgagctgagattgcgccactgtaatccagcctaggcaacaagaagaatgaaactccatctcaaaaaaaaaaagaaagaaaaaaccaaaaaccaaaaactaaaaaaacccaaatactttctctattgctatactcggartataaggacagctagggagcagagaattgatatttaataaaattttgtttcttcatcagaaatatatcataaaattacagaaagttagaaaaaatgggtaaatatagctattagcattttgctgcattttcttgcagtct

SEQ ID NO: 409283 - DNA, 563 bp, Homo sapiens
ttaaacctagttctagtaactaggcttcttccactccagcaccttcctaaaataggtaccctgaattcacattagccataggctttccaaaattagcatctctaatcctcaaaatctaaccttcaggataaatccctgttaactattgaaaacttcttagttgttgactatgggcttctcaatattgctcactctggtttccccatcaattttttgtacacmaacctttaactgaatacttgctaagtcaaaaatatacatataactttgcatgaaaatatcacagaaatctcagtatgaagtataaatacctagaagcaagaaaggactaaagttaacaggaccatatcatgcaactttctcttgaatccagtattgaaaaattctaccttttaattccatgggttgacagaaatcaaatttatccactcagaaaatacctttatgccatcagctaggcaaatatttattaattgcaatgagccaagccctgtgccaggtaccaggagggtagtaggcactgggagggtagtaggctactaagaaagtccagtggaagaatc

SEQ ID NO: 409284 - DNA, 555 bp, Homo sapiens
agatttcactaaatattaatttaaataacatccagggagttaaaaaataaaagacagtcatccaagagtcccaagtcagagggaaaggcaagaaaatgtacagatgagaaacccagagaataggatgacaaacagaatttacattgtggccagttgcaagatcaacatacaaagataagtagcattcctcttagagaacaataactgagaaagaccccattctcagtagcaataaaactataaaatatctaggaataaactcaataatatatgcacagtttctgtatggagaaaataataaaattttactgctggccttaaaaaaawaatcaaataaaggaagacatatagcattataaaatgccaattcactcctaatttaatctgtaagttaaattcagggccaatcaaaagcaggtggtaacaaattttatataacatttaattatgagtcagttgctaagcattggagatataatggtgaatagcacagagtccctgctctccagattctaatgcaagggaggagagagaagataagtatatgaagcgaat

SEQ ID NO: 409285 - DNA, 649 bp, Homo sapiens
aacctccttatgttacaaatgcaaccctgagaaccagaactgctaaggggttaggctaatagtaatgggaacaatatttagactttgtcttccgattcccaatgcaatgttttttaataggtttttaaaattttactagatatgccttagtgtcataattttgttcaaaacataagattttggtaaattatgttgttataacaagaatagagaagtttttctgaaatagctgcattttattgttttgttgtgatatttttaatgcctcagtgtgtatctactcactaattattggtattctaaggaaaactaattttttcttagtaactatttaatattattatttacatatgtatatattatataatattatttgtttaatattagtaaactaattttttatattagtatattttaaaatttcaaaagaggatctgaaataaaaatgaagacttaataaactrtctgttgcattagttagaattatcaggaaaaagaaaaaaaaatgttatatggaatctgctgatactaattaacagttccagtctgtcttgttagtgatactgtgccctgaaacctttgcctccttggacttgatttgggaaaatacagggtaaagatgttctttttttcatagttccttacattt

SEQ ID NO: 409286 - DNA, 590 bp, Homo sapiens
gggtttcaccatgttggccaggctgtcctcaaactcctggcctcaggtgatcccccgcctcagcctcccaaagttctgggattacaggcgtgagccaccgcgcccggccttattgcaagctttgtgttctccccttgtctctgactccttcagccttgtggctgattggtgaatttgtcaaagtcaagcaccaggacttcagctacccatctttaattacagaaacaaatcaaaccaaaataatatcggtaaagcagaaattaattacgagataatttatgtgtgtgttttatgatccaaaatagagttatgagaagggattctggcatatttcaaatataaacaatttctatctttaagacaactctgccaggagaaatactgatttatttctagaaaggggcaaatcttccaaatagcctargaaggcattggtaaatcaggctcccaagttttattcttcagtcaacttgtcataggaaactttcttatgaaaccaaaagtgtgggatgagagcaagaagggtagtgcatccggtttaagcgtgtgtgtcaatcacttggttatgcaaatttcatgtgcctttagga

SEQ ID NO: 409287 - DNA, 591 bp, Homo sapiens
ttatttaatctagtttactttatataggtatctgttttcaattttctcatgctgaaaatctccttccttaaatacatcaatgtaattacttattcattttatcttaaacatacctataatagttttaaagtaacaatatatgtactactaaaacttgacacttgaaattttttaacctgatgtgacttttttctgtgttattatccaatggttgagtttatatttgtttttaattttttctttccatttatttttctttctattcatttctattattttttaaataaattttttaatttattaaatrttttctatttattttttcttatataaaacatttacatggtttcaatgtcaaaattacaacacaagtttatactgcaatctgtctcctgcttccttccctgatacgtaaccattatattggaagtttttagttactctgcaattgtttctatttgaaaatataacaaataacatgtttacctatataacaaaccttcacatgtaccctcaaacataaaataaaagtttcaaaagaagaaaatataacaaatacatgtgagatgtgtgtgtatgcatgtatctgca

SEQ ID NO: 409288 - DNA, 494 bp, Homo sapiens
tttattagccagtacatctaaactaaacctgatatttttgtataaaatctggatttcttcctcctacactaagtaatcacccagctggattcttcttgcctgctgcacagataaagtcaattcattaagacagtggcgttggagcagagaaagagtttaataactgcaggaccagacaagcaataggacaggatacatttctcaaatccacctccctgaaaactcagagactagggtttttaaggataattcggtgggcagaaggctagggaataggtgctgttaattggttggggatgaaattacaggaatgttcatattattttggcacgctgastctatttctagataagggttacaggactggttgaaccggttccttggtatgacttactggtctgagtagagtcagtcggttgccagaatgcaaaagtctgaaaaatatctcaaagaccaatcttaggttgtgacaatagtgatgttatctatctgaa

SEQ ID NO: 409289 - DNA, 552 bp, Homo sapiens
ttattttggcacgctgactctatttctagataagggttacaggactggttgaaccggttccttggtatgacttactggtctgagtagagtcagtcggttgccmgaatgcaaaagtctgaaaaatatctcaaagaccaatcttaggttgtgacaatagtgatgttatctatctgaacaataggggaagttgcaaatcatatgacctctgatgtagcaaacaattatagaaaggcaagctagggaacaatggctggttatcattgaactatgcatacatcttagcagaattcaggcccctcccataaccctaacctcatggccttttataagtcttacaaagttggttttggtccccaagcaaggagggggttagttttgggaagggactgttatcctctttgttttaaagttaacaaatgcagttagcttgtcaggttagaagcaagaatctaaatcagtttggatttgcctcactgttataattttgcaaagacagtttcaactaaagttgcttctaagcattactgaatatgttgattgtctttaattact

SEQ ID NO: 409290 - DNA, 552 bp, Homo sapiens
aaaatgctcagaagtccggaaggaggaaatgcaaaaggaaaaacacactcaagttaatcatagacatactaaccaaaagcaaatataaaaagaaatgtttgaaagtgccacagaaaatttgttcaggagaacartaacataaataacaggtgatgtctcatcagaaaaaaagtgcacaccagagataattaaacatctttaaaatgctgaaaggaaaagttttaaacccaaaattttatatcagtgaaaagatccttcacttaaaggcaaaagaaagacatattaaattaaatgaaaagaaagtagaaaaaagtatcaccagcagacctttcctaaaggaagcattaaaggaagttcttcgaagggaagtaacacgagatgggaattcagatacgtaagaaagaataaaaaaatacagattgtagatatgtaaaatattttaaaagacaactaacagtttaatatatatgctttatatgcatatatatgtaaaacacagttgatctttataatatatgcagataaaacagatgtgacaataatagcaacaaa

SEQ ID NO: 409291 - DNA, 552 bp, Homo sapiens
aaaatgctcagaagtccggaaggaggaaatgcaaaaggaaaaacacactcaagttaatcatagacatactaaccaaaagcaaatataaaaagaaatgtttgaaagtgccacagaaaatttgttcaggagaacagtaacataaataacaggtgatgtctcatcagaaaaaaagtgcacaccagagataattaaacatctttaaaatgctgaaaggaaaagttttaaacccaaaattttatatcagtgaaaagatccttcacttaaaggcaaaagaaagacatattaaattaaatgaaaagaaagtagaaaaaagtatcaccagcagacctttcctaaaggaagcattaaaggaagttcttcgaagggaagtaacacsagatgggaattcagatacgtaagaaagaataaaaaaatacagattgtagatatgtaaaatattttaaaagacaactaacagtttaatatatatgctttatatgcatatatatgtaaaacacagttgatctttataatatatgcagataaaacagatgtgacaataatagcaacaaa

SEQ ID NO: 409292 - DNA, 551 bp, Homo sapiens
agtcagtacttctatgtgtgtatagtgcccattgtggccgagtagagataaggtcactgsggaagaaaataaatcgctaaaatctgttagaatacgtcagcttccaggtttgtctgaggatgcagtggaaaccacgttctgtggccagcatgtcagtagcttttgatgatcagagccttccattttgatactttaaaataatgtaatctaagttcacatcaactgaatccagacagtttcaccatccaccacattattaattccagatgggaaaattcattagggctcaaattttgtttgagacccaactgttttttaaattattattacaattattatctatttattttatttattttttttttttacaactgatgggaagggaaatttaacagctgtgtgattagcagggcatgaaattaaaaacgttttgcacagaatcaagaggttgtttactacagaatttgtcatctgagaattaagtgtcattaagactgcccacaggatgatctctttcaccattcaagctttgatttccacgcccggttttt

SEQ ID NO: 409293 - DNA, 533 bp, Homo sapiens
gaaaactccctcccaaaaaaaaaaaaaaaaaaaaaaatactatgtacttgttcctttgggcaagatgttggcagttttctgcagaagcgtggtcaagcacattagctggactgtcttggtcgaggtttgaaggcaatgccatttgcttgggcaagttacatggactctctgcagttcatttgcctcatcatcctccaacttaatgaaggtaatgacagtatctacctcagggattactttggggattcaragttattaccaaaaatgtttaaggccctgcccgactcattgtttatgctcagttaatgttagctatctccatgcttttcagtcaatatattgcattgtgtttggaagtcttcatatctagtttcatacctgacacagacttgcttaacttctgccctggaatctttttgctatccctgtcttactgtctttaatagagcctttcttatttgatacttatttatatacttgccttcgttcgttttttagacaaattttattttcatatttgttgaattaaacca

SEQ ID NO: 409294 - DNA, 526 bp, Homo sapiens
ttcatctcatggcgataactgtaaacaccatcttgatgtagtgaatctgtctgcctgaaataagacagagagataaaatgtggcgggtgaccctctctttcacacacacctcttcctttcaggtaaaccagttttcaaagtgaatagtatcaaaggactgacccgaggtagatgaagttctttagaaaagaagacattcgaggtcctatagagggtcttctcaccttgagcataaaatgttcctaatcatggctttcatctgttctctctctctctctctctctctctctstgtgtgtgtgtgtgtgtgtgtgtgtgtgtgtgtgtgtgagagtgtgtgtgtgtttgtagtataacagttataaccaaaagaaacagttaacctctttctttttaacagagtgtacaaacaaaagaggcattgaacaggtaaatgacaggtaagtaagagaccttgactttagttctgattttgtcagtaactaataaaaagacttggaaagattactaaagccttctggccctct

SEQ ID NO: 409295 - DNA, 414 bp, Homo sapiens
atatttaatttaaatcaacaacagttaattgtcaattaaatattgacatttaaataaagagtttcctagtcttgatctttcttctaatctccagctttaactataaggcgattcatttgaaaagctctcaaaagtgaaaagctcaaacaactctcacgctacccccaaccgatataaaagtgaagcttccttcactatttcatmtttcaatgaatgacacaatccagtcccccgaatcggaaagtgggtacctactcctgtgtaccagtgtaaagcactggcttcgggtactttgctttccccaaccttctttcatgtgtggtaactcctttgagaaccttctagagtaaagagatgttggccacagaagagctggacagtccattttagtaacatgaaaacacacaattacca

SEQ ID NO: 409296 - DNA, 389 bp, Homo sapiens
ttcccctctcaaaaacatctgcatctcagaaaaagtccaagcattcataatctccatgatctgctcccaacttatatttctaacttcaattcctgtaacattccctacagggccctagtcagcagacaccaatagtctactttcgagcctttcaaacacagagccgtggctttcttacaaaggttaatctcttagctctccctaatgcatcattttggggtaaacttgcttctattcttcaccaatcaaaagcctacttatcatgctgcaacatagatgaatcttgaaaacytaactgaaagaaacaaagtaacaaaagactacatattgtatgatgttgtatgatgtttatataaatgtatggacatttatataaaatgtccagaatg

SEQ ID NO: 409297 - DNA, 485 bp, Homo sapiens
attccacatcccatcccagatcattagggaccagccccttcagtgtacagaagagtaaacagacaacagagagggacagtaacttgtccaaagacacacagctaattggtggcagttctggaggccagatccccaaccccctaaagcaatggtcattcattcctgtgaaagccaccgaggacagatgttctcctacttagaaacaattgttgaggacatttgtctgttgacttcctggayattctcatcagcttccaacgaattcagacttcttactgagcttatgaaaccaggaagcaccagcagtcttcggatctctttctctggaggcccaaattcccctaactgagcagctcaggctgccgtggctcacctgtccaaagtcagagagtttcctgcccaagcctgggttttccaggaccgcagtggacatgctggctccccgggagtgaggtctctggctttttagggcctcaggtacaggc

SEQ ID NO: 409298 - DNA, 485 bp, Homo sapiens
attccacatcccatcccagatcattagggaccagccccttcagtgtacagaagagtaaacagacaacagagagggacagtaacttgtccaaagacacacagctaattggtggcagttctggaggccagatccccaaccccctaaagcaatggtcattcattcctgtgaaagccaccgaggacagatgttctcctacttagaaacaattgttgaggacatttgtctgttgacttcctggatattctcatcagcttccaacgaattcagacttcttactgagcttatgaaaccaggaagcaccagcagtcttcrgatctctttctctggaggcccaaattcccctaactgagcagctcaggctgccgtggctcacctgtccaaagtcagagagtttcctgcccaagcctgggttttccaggaccgcagtggacatgctggctccccgggagtgaggtctctggctttttagggcctcaggtacaggc

SEQ ID NO: 409299 - DNA, 503 bp, Homo sapiens
gaaatgcattaaaatttagtacagttcttccacataaacactcagtaaatggaagatattgtttaaaagcaaatccacataaatttgacaataattactgagacctgtaccgtgtgcttggtggtgttctagtctttgggaatacagcaatgaacaaaacagactctgcctccccagcyatgctgccattctggtgggcagaaaataaacatataaataagtttaggtagggctaagtcttttgaagaaagtaaagtagggggatggtctatgagtgagctggtgggatttggccagtggtcttcaaatagtcaggaagatgccattaaccacacttttagagaagactgagggtgaggcattactgaccaggaggtaaaacaaagtataaaagaatgctggaaagcaggttcagaggttcagaaaggatgtgaaaactcaggggcctcaagccttgagtgcctgcttaatattttcccaagagaaagtaatgggctgtaaga

SEQ ID NO: 409300 - DNA, 503 bp, Homo sapiens
gaaatgcattaaaatttagtacagttcttccacataaacactcagtaaatggaagatattgtttaaaagcaaatccacataaatttgacaataattactgagacctgtaccgtgtgcttggtggtgttctagtctttgggaatacagcaatgaacaaaacagactctgcctccccagctatgctgccattctggtgggcagaaaataaacatataaataagtttaggtagggctaagtcttttgaagaaagtaaagtagggggatggtctatgagtgagctggtgggatttggccagtggtcttcaaatagtcaggaagatgccattaaccacacttttagagaagactgagggtgaggcattactgaccagsaggtaaaacaaagtataaaagaatgctggaaagcaggttcagaggttcagaaaggatgtgaaaactcaggggcctcaagccttgagtgcctgcttaatattttcccaagagaaagtaatgggctgtaaga

SEQ ID NO: 409301 - DNA, 503 bp, Homo sapiens
gaaatgcattaaaatttagtacagttcttccacataaacactcagtaaatggaagatattgtttaaaagcaaatccacataaatttgacaataattactgagacctgtaccgtgtgcttggtggtgttctagtctttgggaatacagcaatgaacaaaacagactctgcctccccagctatgctgccattctggtgggcagaaaataaacatataaataagtttaggtagggctaagtcttttgaagaaagtaaagtagggggatggtctatgagtgagctggtgggatttggccagtggtcttcaaatagtcaggaagatgccattaaccacacttttagagaagactgagggtgaggcattactgaccaggaggtaaaacaaagtataaaagaatgctggaaagcaggttcagaggttcagaaaggatgtgaaaactcaggggcctcaagccttgrgtgcctgcttaatattttcccaagagaaagtaatgggctgtaaga

SEQ ID NO: 409302 - DNA, 527 bp, Homo sapiens
tatagtttgcctaaaactatattggatttctagttgaacataaatgaaatgtccttcagctttattctttctatttcattccttctggaaagagagagaaacaaaaattaattcagcacttagttattcagtaccaggcacatcggaaaggttatctcacttgatactttctacagtccaatgagataygcttttattttaaaattttttaatgtttaatatatgtgggtacatagtagttgtatatatttgtggggtacatgagatattttgatacaatcatacaatgagtcataatcacatcagggtaaatggggtatctgtcacctcaagcatttatcctttctttgtgttacaaacaatccaattatacttttagttatttttaaatgtacaataaattactgttgactgataggtttttagtattctcattgtgtggatgagaagtctgagatattgtagtcttctgggatagaaagcaaaatatcaggtatggtgatgtcagggctggagaaagtccccat

SEQ ID NO: 409303 - DNA, 527 bp, Homo sapiens
tatagtttgcctaaaactatattggatttctagttgaacataaatgaaatgtccttcagctttattctttctatttcattccttctggaaagagagagaaacaaaaattaattcagcacttagttattcagtaccaggcacatcggaaaggttatctcacttgatactttctacagtccaatgagatacgcttttattttaaaattttttaatgtttaatatatgtgggtacatagtagttgtatatatttgtggggtacatgagatattttgatacaatcatacaatgagtcataatcacatcmgggtaaatggggtatctgtcacctcaagcatttatcctttctttgtgttacaaacaatccaattatacttttagttatttttaaatgtacaataaattactgttgactgataggtttttagtattctcattgtgtggatgagaagtctgagatattgtagtcttctgggatagaaagcaaaatatcaggtatggtgatgtcagggctggagaaagtccccat

SEQ ID NO: 409304 - DNA, 527 bp, Homo sapiens
tatagtttgcctaaaactatattggatttctagttgaacataaatgaaatgtccttcagctttattctttctatttcattccttctggaaagagagagaaacaaaaattaattcagcacttagttattcagtaccaggcacatcggaaaggttatctcacttgatactttctacagtccaatgagatacgcttttattttaaaattttttaatgtttaatatatgtgggtacatagtagttgtatatatttgtggggtacatgagatattttgatacaatcatacaatgagtcataatcacatcagggtaaatggggtatctgtcacctcaagcatttatcctttctttgtgttacaaacaatccaattatacttttagttatttttaaatgtacaataaattactgttgactgataggtttttagtattctcattgtgtggatgagragtctgagatattgtagtcttctgggatagaaagcaaaatatcaggtatggtgatgtcagggctggagaaagtccccat

SEQ ID NO: 409305 - DNA, 516 bp, Homo sapiens
aaacaatggggaacttggttgaagatgcgagtggaaagctccttggggtagaccatgtcaaccatggcaaggaacttttatctttatcctgagaggtggagtgcccttgaagtgtgtaatcagaggtggctccattagatgtgcgttttgacaagaccactctggctgcaaggtggagagtggaatggagggtatcraaagcagctaataggtgattgcacttgtccaggtgagaaatggccatgatgccttggactaaagtggtactgagggtggagatgaagaaaataggatgaatttgagaaaaatttagaaattttaaaaagaggagtcagtttagatatgagccagcatgagaaacaggtcaaagatgactcttaggctgctaagtagatggagagaatgccattctcagagatagctccatctctgcttttgaaggaacaaagagatctattgagttgtgctcttcagtctaatcattgagaagatatctctggaactgggactcattga

SEQ ID NO: 409306 - DNA, 434 bp, Homo sapiens
caaagcaggtttttcactcttacgggaacttcaaaggcagtgggttcttataagaataatgggaggctactgaaaggtttttcattattttaatttttaatttttagttgttgtgagtatgtagtaggtgtatatttatggagtacataagatattttgatacaagcatgcaatgcttaatggtcacattacacattgcaygcttatactcatggaaaatagggtatcctgtacctcaagcatttattctttctttgtgttacaaacaatccaattatgctctttcattttaaaatgtacaagaaattatcattgactatagtcactctgttgtgctgtcaaatactagacgtttttcattctatatcactatatttttgtaccattaaccatccacgctttcaccaccacactatccttctcagcctctggta

SEQ ID NO: 409307 - DNA, 566 bp, Homo sapiens
aaaccaataaactttggaaaaatccaggaagacagaaagaacagatagtgacttattggtctaaacgagtggggaagagggtcccactcagagggtagaacacgtgtgaaggccttgatgtgggaaagagcatggtgtgtttaaggaattaaagcaagaccagtgcactctgcagcatcataggaaggccagagtgagtcagcacagggctggacacatagacagagctggatcatgtaaagccttgtggactgtgctaaatattttggacaatagtctaatagcaatgagaagcccttgaagggcttttgaagaggcaagtggcctcaccagacttgcactttataaatataatttgggmtgaagtggagggggtgagaggccacttacccagcagctacaatagtcaggcaagaaatggtggtggtcgaatgcaggtgcagcagtgagaatgaagtaggaaggacagactcagatgtttgaatggtagaatgggcagaaattgattgctggatgtgaaggaagagagaagggggaagtaaaacaataactcctggcttatgggc

SEQ ID NO: 409308 - DNA, 586 bp, Homo sapiens
ggatctcttgcaccagtggacctgcttctgaatgtccttcatttrtatctctgtaatgccagaggtgtttttcttggtacagcaggaagtgttggcagttgcacatgttcctttcagttaggctaaaagaataactagagctattctgttgcctataacaaccttcctaatggagttgagagatgcctgctgggttgctaaggcagtagcagaggaggaaacaatacatgccatggttagggacagatttcttgcaatttttttaatgggccctgactcctatgtatgatagcaaagatctcataaaggacataagtccatagtcaattacatatcttggcaggttccttgtaaagctggtgtacagctataagctgttggccaacagtgcatctcattcccaggagtgatatacatgggcactgtcagcattctcaacatgcaggattccagcatacaccaactttccaggcatgacattgtttaccccctatttggatcatccctgactaccttcagtgaaagatgtagccctcaagtgcacacagtacacacttcccttgttttagtgttcagtgacccattc

SEQ ID NO: 409309 - DNA, 612 bp, Homo sapiens
tttctaagttaatactcaacacaatctgtgttgtaattcctaccattgcccccattttacagatgatgaaactaagcctcaaaagagttaagtgacttttctaaagtcacatagcccatgagtggacacagaatttgaccccaggcmgtcctcctttttaactgctctattgtgctggctcaatatctggctaaaagacacaacaaaatagtcataggctttacatgctaacatggctacttggactgaattgactcatcagcacagcaactgatctgattgatttgagcatgctgcatctattggaagtataggtgtcctatagaccagagcttctcaaccctggaagcatacgaggatcacttggggagcttttcaaaaagcaccaatgcctgtaccttaatgaaagagattctcatttaattgctctggggtggaatctgggcccagaaaattttcagatctcccaaaaagttctaatacatagccagtgttgagaatcactggtgtagactcttctcgtccttgatggtgacacttagtcacagagcttcttggagttctttagaggttggttttgtttatcttgacatttcgttcagaactaattag

SEQ ID NO: 409310 - DNA, 558 bp, Homo sapiens
tgctccccttcttctcatcaactgaccccacgcctgggctcagtgccttggtgcacctcctaagactactgaggcatgccatcttctctatcattgccatgtattatgccatgtagccacaacctactagattacaaaatgcatgggtctaggcaccatgtctgtctttttcactattgcatcctatcatgtggctgacaccgagtgggcactcaatcaatatcggtagcataaatgatcaactgaattaggagatagatgtgaatgagagaggaagttggcaacgctgactctgtgctgtttgagaaggagtastaagagaaggaagaaaatcccaacagtcaaggtttttaaaaagtaagggccacataattcataacatgctaaggaaagagagaattcctgggggatatttgtatcaaatgctacaaaaatgtcgaagaggatgaaaaaaagagaggctattggttttgagtattgtcagaatggtacaagagaaaggaagatgagaagaaaaaagggaaagaagaaagaaggaagcaaggaggaaagaggatg

SEQ ID NO: 409311 - DNA, 514 bp, Homo sapiens
ccacctctccagtctcctggtgtcctgtctatcctcaacctctccagtctcctggtgtcccatctacactcagcctttctagtgtcctggtgtcccgtctaccctccacctcttcagtctcctggtatcctgtctaccctccacctctccagtctcctggtgtcctgtctacacttaacctctccagtctcctggtgtcctgtctatcctcaaccccttcagtctccttgttccctgtctaccctccagtctcctggtgtcctactctaccctcaacccctaccatctcttggtgtcctgcctctaccctcaactgctaccatctattctcayacagcaggcagaaggagtgcttggtaacacaagtgagatcatgaccatctatctgctcattaccctgcaatggctcctgtttcactgaaaggaaaaactcaagccctaaaacatctaaaaatattctacatgatctggctctggatccctctttgatatcacctgccactgccccctcact

SEQ ID NO: 409312 - DNA, 514 bp, Homo sapiens
ccacctctccagtctcctggtgtcctgtctatcctcaacctctccagtctcctggtgtcccatctacactcagcctttctagtgtcctggtgtcccgtctaccctccacctcttcagtctcctggtatcctgtctaccctccacctctccagtctcctggtgtcctgtctacacttaacctctccagtctcctggtgtcctgtctatcctcaaccccttcagtctccttgttccctgtctaccctccagtctcctggtgtcctactctaccctcaacccctaccatctcttggtgtcctgcctctaccctcaactgctaccatctattctcatacagcagscagaaggagtgcttggtaacacaagtgagatcatgaccatctatctgctcattaccctgcaatggctcctgtttcactgaaaggaaaaactcaagccctaaaacatctaaaaatattctacatgatctggctctggatccctctttgatatcacctgccactgccccctcact

SEQ ID NO: 409313 - DNA, 589 bp, Homo sapiens
cttcccttctctgtgcctcaatttcctcacttataaagtgaaaacaaagggccaagtgagggtggaaggatccccctaccctggagatctgtgattctataacatatgggcaggaaagacttgataacacactcagggtctatgtgggctgttctgaaggcatctggccacccatcacctttttatggccaagtactaggttggttctgtggttccaattacaggaacagaacaggttctattttcccccaattacaggaaattggccttgcctctctgggtgcacctgatgaatacattgaaaagctcgccacagtaagtcccttctctccctgggtggatggtggagtgctatagkctatggccctcaggtctttgaaactttcctactcccctggaagccaggttatctggggaaaaaaatcagaatgtggtgggttacatttgcacaagtgaaacttcacattttgatagatttctccttaataatttgattttgaaatcagctacctacagatgtttacatctcttaaattttaagcagtatcttgaacccaccaacaggctataatagtagcccttgaaaacc

SEQ ID NO: 409314 - DNA, 699 bp, Homo sapiens
cttacagaaaaatggcaatgagcaataagagctggggttgagccattcgccagaagaaaagtagcttggtagagcagggggactgtggtgtgcatagtctactcgggtgtttacatctctcccaacatctttgtgaatgaaatggagaagcaagccatagatgaaaatacggaygagacctttaagctgtgcagtttacaacacatttctggaccctataaaatgaaattaaaggaaataagtggcaaaacaaatgaaataatctagactatactttagagcagtgtttcccaaataatattctgtcaaaatctgtatgatagtaggtattttatcagaaaagaattccaagggtcattatatctgattttattccacatctaggttttagagagccatagtgcacatgaacttattaaagactctgagaagttctgtagggaggaaacctgttcaatgtaatctcactcagcatttcctatatgtatttaccatgggaccctgtttagggaagatctcttaatatcttccaggcactagtgttccactaaactcatgctgttttagagttatgaactccaaactatcagtgataacctaggtttggggtcctgagggatggaatggcattggggttaaggatataccatctagagtcaaaccgtttggattcagaacccagttgcacaacctgtgagc

SEQ ID NO: 409315 - DNA, 699 bp, Homo sapiens
cttacagaaaaatggcaatgagcaataagagctggggttgagccattcgccagaagaaaagtagcttggtagagcagggggactgtggtgtgcatagtctactcgggtgtttacatctctcccaacatctttgtgaatgaaatggagaagcaagccatagatgaaaatacggatgagacctttaagctgtgcagtttacaacacatttctggaccctataaaatgaaattaaaggaaataagtggcaaaacaaatgaaataatctagactatactttagagcagtgtttcccaaataatattctgtcaaaatctgtatgwtagtaggtattttatcagaaaagaattccaagggtcattatatctgattttattccacatctaggttttagagagccatagtgcacatgaacttattaaagactctgagaagttctgtagggaggaaacctgttcaatgtaatctcactcagcatttcctatatgtatttaccatgggaccctgtttagggaagatctcttaatatcttccaggcactagtgttccactaaactcatgctgttttagagttatgaactccaaactatcagtgataacctaggtttggggtcctgagggatggaatggcattggggttaaggatataccatctagagtcaaaccgtttggattcagaacccagttgcacaacctgtgagc

SEQ ID NO: 409316 - DNA, 562 bp, Homo sapiens
aattatactgagccagagatgattactgtgtaggtagttcagaacagatgatacatttatcttgtttcacattaatcttcaactgatctgatatggaagtaaataatagttgtcagctttgttgtgattttgatgaattttaagtgctttggtaattaattctcatagtgtattctttgcaggctgagatgctgactatatttataacactcatatattcactgaagacttagatttgatgatgtgtgaaaatgaatctgaggaacaaatttgaaaatgtggctttgcttgttttttatgacctgcctgatttaatgaagtggctaatagcacggtttgctaatgctttcttcctagatgttaccttgtgttatattctggktttatttagaaaaggtagatatatacagttaccacaaaggcagcatgaatgaaggagtttgccaagttatagttataacaagtgaaattttcatgcaatttctaaaaataaaagaaaatacattcctgtaaattttcctgttttctatgatgaatatcttcttgctcctgaactttcatt

SEQ ID NO: 409317 - DNA, 553 bp, Homo sapiens
gttgagctcttttttgactatctaaaatatataagagcccaagtaatccaartaacagtaagtctggtaccagcctcttggggccaatgttgttctgcctaagttatctaaaaactttcaaaacttgatcagaccaaaaaggaatttttttgtttgattgtttgtttttgttttttgtttgtttacaattcatgaaaagataactggaaaatgtgataaagtaacaagtgagtaaatttttaaaaaactgctattgcatatttttagccctcaaagtatcacttttgaaacaagtgttccctcaaaatccaacaccatccatgcaccactgcaataacccactgtcatacaggccaaattaaaccatcttatgccaataaatggcctagtttttccaaactagttccaccagcagtagtgacaacctctaccaaagtgattcttcaggaagaattttccattctccaagttttaccagttgaagtttaggttcatactcatgttcccaaattcatcaagatgactgagccaggaaggtctttcagattccatg

SEQ ID NO: 409318 - DNA, 515 bp, Homo sapiens
actaattgagttggggatgaattaaagcaaaacatatttgggggagaagcacgttctgaacacagattttaaacatattgagtttggaaagtctgtttgacagccaagtgtgaaaattgtattgcagttgaatgtacaataatatataagttaagatttaaacttttaatagagataaaaattttaggaatatatattttggtaggtgagaaagacaacaaacatattttgtaaatatataatatggcaggggtgaaaggcctttctgataaagtaacaattgaagagagttctacaaagacgttattagtcatctttgacgaccccctacttcactcyacaggtgatctcatccaatgttatagctgcttgcagaaaacatccatatattcactattctttactgtgggcttatacaatagcttgcctgacacctttattttgacatctaattagtcatttcaaacattgttttcaaaacccagtccaggattttgccccatcctaaccacaaa

SEQ ID NO: 409319 - DNA, 558 bp, Homo sapiens
agaggactgaggaatccatcgaaaatgtaagtgaaatcatgtcactcctctgctcaacaccttcctatagttttcatatcaccttgagcaaaagccagtcttaaaatgatctcaagaacacacatcatatttccatctatatccactcccaccctcttgctttatttagtccagtccattctagctacaatggtctccttgaaaatcctaaacccacttgtgtcrctttgtctttgatctttctgtttcctctgccagaaaactgcatgatttatgcttgtattgcagggtttagctcaatgctttcttttcattatcaattcccctagtataagcttgacccaaatactgcatgtgacatcattacactcaagtttttcattgtttattgaaaattcaaatctaactgtacatcctatatttcatctggcaaccctagctgtgaggatattgaacaaacaagcaaaaattatccattacagataggaatggctttatctgaattaccgggtttgtgatgacagagtaacagtttacttgcacagttttacatgttac

SEQ ID NO: 409320 - DNA, 591 bp, Homo sapiens
aaatttttattacaataaaaaaacagaaaaaaatgaataccatgtaacatgattaaatcaaaacgtgtatacaagggcaatatcatgagactttatgtttattgtaagaacattcattcaataaatatttataaaaacaacaataatawcacttatggattccctacaacatgtgaggttctcttgtaagtactttatatattttaactgattttctttttttcatgaataacatttcagactgatgttgcaaacatcattactttatagataggaaaattgaggcagagcgtagttgagcaactggtttaatttcagtgttagtaagtggtagaaccagaattctaccgcacaaatcataatcttaatcagtactttatactgtctacttggtggataccaagcaatgttttggatgtcaagggcatatcagtaaccaaagaataaactgctttccttaagggtcttatattagaaatatataagttaaaactatttttatatactgataaattcggtgaaataaatttcacctctatagaaggagaatattgaaaatgcaattgacattcaattttaaactgttttttt

SEQ ID NO: 409321 - DNA, 591 bp, Homo sapiens
aaatttttattacaataaaaaaacagaaaaaaatgaataccatgtaacatgattaaatcaaaacgtgtatacaagggcaatatcatgagactttatgtttattgtaagaacattcattcaataaatatttataaaaacaacaataataacacttatggattccctacaacatgtgaggttctcytgtaagtactttatatattttaactgattttctttttttcatgaataacatttcagactgatgttgcaaacatcattactttatagataggaaaattgaggcagagcgtagttgagcaactggtttaatttcagtgttagtaagtggtagaaccagaattctaccgcacaaatcataatcttaatcagtactttatactgtctacttggtggataccaagcaatgttttggatgtcaagggcatatcagtaaccaaagaataaactgctttccttaagggtcttatattagaaatatataagttaaaactatttttatatactgataaattcggtgaaataaatttcacctctatagaaggagaatattgaaaatgcaattgacattcaattttaaactgttttttt

SEQ ID NO: 409322 - DNA, 382 bp, Homo sapiens
tccattttaatattaaccaacatcattatattatctgaatctctgctatttagacatgagtagacaaaatagcatgtgaaaaaacacattatcactatcaaataatttcattttcaggggtaattttttctttgtacttaygtgaaggaaattagaaacaacgtataaacctaaaactcaggaattttagttatagttctgactttaactgtatccatttgaacagtttttttttccttaaagagatagacaagaaccactagaccaggtatcagcaaacttcggtaaaagtccaactagtaaatatttttggctttatgagccagatggtctctgtcacaacttctctaccattgtggagtgaaaacaatcatagacaatg

SEQ ID NO: 409323 - DNA, 514 bp, Homo sapiens
ttgaaagtcatctgtttattaaacaaatgtaagctaatctgtaagcwgagagttaaatttgttctttaaatattttttaaatgtctcccttcacttctgagtagattaataatagaacaaagcatataatttttaaatggcctggtactttgtattagcatttctgttagtcatagatgttttcttagtggaatgtcaacaaatgatacttgaatattttaaaatttataattcataaaatctcatgtatcaattgtaatatttatgcaaaaagcaataagttaagagtgtaatataaaaatgatatatctaggagctattttattcttcttgtcattcctttgatgtaatctatttccatgttgactaatgtgaaaagaatgtttctgaagttttttttacactccaaatctttatcttttgttattttttgaattaatcaggtttagattctttgttttcccatatccatgtattatttaattcaacacatttttagtgaataccctgcaca

SEQ ID NO: 409324 - DNA, 536 bp, Homo sapiens
tcaagatccattctgtgttctaacactayagagaaggccaattgaatattccctcagatagaaatgaaagttctctctctgtccatctatctatttttctatctctttttcttattattacaatctttcttttgtatgtatccacttaacccattgtaacattttccccattataagacctagcattcctcctcttattaagaataaacaccttagcagtattggctacatggctgatgttgaattaagcgaattaagttgttggaaacacacaattcaaatttactatgtttgtgaatccaaagataggtttactcgtggagttttaggagttataaggtcagcctttggaaaattctgaattcgttttttaattatttcctgcgaatattgctttgtaggatatttctagaaacgcaacccactgaaaatagccaatctaaacattacaatctcagcataaacatttgcctcagtggaagtccttaattaccaaatggagagaaatgcatgcaggctgtcagcatcatgtttct

SEQ ID NO: 409325 - DNA, 536 bp, Homo sapiens
tcaagatccattctgtgttctaacactatagagaaggccaattgaatattccctcagatagaaatgaaagttctctctctgtccatctatctatttttctatctctttttcttattattacaatctttcttttgtatgtatccacttaacccattgtaacattttccccattataagacctagcattcctcctcttattaagaataaacaccttagcagtattggctacatggctgatgttgaattaagcgaattaagttgttggaaacacacaattcaaatttactatgtttgtgaatccaaagataggtttactcgtggagttttaggagttataaggtcagcctttggaaaattctgaattcgttttttaattatttcctgcgaatattgctttgtaggatatttctagaaacgcaacccactgaaaatagccaatcwaaacattacaatctcagcataaacatttgcctcagtggaagtccttaattaccaaatggagagaaatgcatgcaggctgtcagcatcatgtttct

SEQ ID NO: 409326 - DNA, 628 bp, Homo sapiens
ctgtcagcatcatgtttctccttggtagtgtctctcaccattttgccaccacgaatgtttctaaatggccaacatactrcttcttctcatttgaatgtttatgtttgagaaaatgcaaaaataagagcactaagtgcaaacagaggtttgctgaagtttgtgtatttagctcctatggcgttctggatgccagattcacattcattagacataaattgatgttaagcagccttgactgcaggaggaaaagcaacaacaaaaatctcttcatacctctaagactttcagtcagattcttttcttacagaaccccattctgccattccagcacactgttttctgttcagtcttatcagtcttttcctgctttattcttgttttttgactgctgtttatgccacttaggcatttgcttatactggtccccatagattttcctcctgtttaacatcacaatggactcaactttctttgaagcatacctcgtctatggaagcaaatgacatcctaatttgttaactctaaggcattacagaactttattccttcaaggcctctaactttacttttggccttatcttctgccatgtcccatctgaacacaatgctgctttcacctgttccttta

SEQ ID NO: 409327 - DNA, 512 bp, Homo sapiens
tttaagaagtgtgtttgaatttaattatttagcatgattgcattgtacttttatttatagtatgtaaacgttatttccaaggaatccctgttggttactaaattrtctcttaagatacaagttgaatctacagacctaattctttgaagatatcattccatatctgaacatagaactcctgtattttgggtgccaaattctatttaataaaaggggtaagtgctgctacgaatatgtgggaatgttggagtgcatactgcagttcattaatcacatttccctttagagtctgtattcccctttctgctggaaatgttgctggttgaaggatcagagctgaacatttctctgggaattgctcttagagggagggaattgtgaacttctacagtacacaactatctgtacactgaactcagaaaggccagtttataatcattaggcagcacccaagatctggattagggaagatgggtggaaccaattgccagtcagttatttccaaatttgag

SEQ ID NO: 409328 - DNA, 619 bp, Homo sapiens
aagtctacaagtaactagaccaccataagatttattagaacttctaccttctcacattgagaaattcctctagtcaactttaaaaaggcaattgtctctatctttctctgctcttttaattttgattctctcagctatttctccacactctcacattgtttargttattggacttacagtacttcttgccatttgcctgcatttcctttctctgtgttttatctttctcactgctttcatgatgctttctgttcttctcattcttctatagtccattctactctatgtgtcatttgcattcctaaatatcatgaactatgcaatattgtgcaataaaaatcacagggcttaagggggtaatgaagtttatggcacaacactaaaaactttatcagtgtcacattaaaataaaagtaaaaaagctaataaaaatggtagcacaattttacacctgttaaatagttggagatagcacaaatacagtgataagtatttttttttccccgagaaagagctgaagtttgcttgtagaagtgttagaagacttaaaggctttcatttcttgtgaagtggtagaaggaaaggtatctgaaatcagaaagttgtaacacaggtgtcg

SEQ ID NO: 409329 - DNA, 619 bp, Homo sapiens
aagtctacaagtaactagaccaccataagatttattagaacttctaccttctcacattgagaaattcctctagtcaactttaaaaaggcaattgtctctatctttctctgctcttttaattttgattctctcagctatttctccacactctcacattgtttaggttattggacttacagtacttcttgccatttgcctgcatttcctttctctgtgttttatctttctcactgctttcatgatgctttctgttcttctcattcttctatagtccattctactctatgtgtcatttgcattcctaaatatcatgaactatgcaatattgtgcaataaaaatcacagggcttaagggggtaatgaagtttatggcacaacactaaaaactttatcagtgtcacattaaaataaaagtaaaaaagctaataaaaatggtagcacaattttacacctgttaaatagttggaratagcacaaatacagtgataagtatttttttttccccgagaaagagctgaagtttgcttgtagaagtgttagaagacttaaaggctttcatttcttgtgaagtggtagaaggaaaggtatctgaaatcagaaagttgtaacacaggtgtcg

SEQ ID NO: 409330 - DNA, 266 bp, Homo sapiens
ctaatcacctttaaaacagggagtactatcaccactttaaagatgcagaaaatatggttctaatgcttaaagtaattcacctgaatyacatagttagtaaatgcctgagccatttcccttttcttggatgtattcatttcttctaatctctccttttaaaatcttttctccaggttttggttaatcaacacttattccaagaagcatacatttgtatctatccatggaattagatggatttgcacctgcactgatatgtctgttgt

SEQ ID NO: 409331 - DNA, 585 bp, Homo sapiens
tctcttccctgtttcttatctggggatttattttctttctattgagttgtttgagttgtttatatatttcrgactttagctgtagggcatacttctgaagacatatttttagaaaaccctggtttctaagcagtcctttcggaaagaagaaaaatcagctctcaaaatatttaacccctttcaacctccttcctgtgagttgtgtgcacacatgattttatgttaatagcaatatagaaataaaaacttttctatactatatgtttgttccagctaggtcagattcacagcaggaataatctttgataaaaaatatttggtaagttattcttctgggcatcattgaaaataaaacttaaaaatttacaagggatcttgaagaaaaattttaaaattgtacaccttataggtccttacccattaattaaaaataatgtatggtgttatatcatagcattgtaaattaataataaattatatatctaatttataaaatagtagctaacacttaaatgtttaggatacatcaatgttttatgctatgttttatatatagagagagcatagcatagcatatttcaaata

SEQ ID NO: 409332 - DNA, 585 bp, Homo sapiens
tctcttccctgtttcttatctggggatttattttctttctattgagttgtttgagttgtttatatatttcggactttagctgtagggcatacttctgaagacatatttttagaaaaccctggtttctaagcagtcctttcggaaagaagaaaaatcagctctcaaaatatttaacccctttcaacctccttcctgtgagttgtgtgcacacatgattttatgttaatagcaatatagaaataaaaacttttctatactatatgtttgttccagctaggtcagattcacagcagraataatctttgataaaaaatatttggtaagttattcttctgggcatcattgaaaataaaacttaaaaatttacaagggatcttgaagaaaaattttaaaattgtacaccttataggtccttacccattaattaaaaataatgtatggtgttatatcatagcattgtaaattaataataaattatatatctaatttataaaatagtagctaacacttaaatgtttaggatacatcaatgttttatgctatgttttatatatagagagagcatagcatagcatatttcaaata

SEQ ID NO: 409333 - DNA, 589 bp, Homo sapiens
cttataggtccttacccattaattaaaaataatgtatggtgttatatcatagcattgtaaattaataataaattatatatctaatttataaaatagtagctaacacttaaatgtttaggatacatcaatgttttatgctatgttttatatakagagagagcatagcatagcatatttcaaatacatctattaaactgtttgaaaattactgatctaccttcatattttaatgtcaattaacagtttccttagaaacttagtttttcggcaaaactagttcttttcagaatttcttatttctcactgtgaaagcagtgtcagtttaatttctttaagtttattttaaattttaaattaaagatgaaaattcttaagtgccatttctttttctatttctgcagcgtttgtccaatggttctatagactcaaccgatgaaactagtcaaatagttgaactacaagaattgcttgaaaagcaaaactatgaaatggcccagatgaaagaacgtttagcagccctttcttcccgagtgggagaggtggaacaggaagcagagacagcaagaaaggatctcattaaaacagaaga

SEQ ID NO: 409334 - DNA, 621 bp, Homo sapiens
tataaaacccggatgatcacatcattttagaaatctagattgaatgccaatcactattttagctagacattttccattagtacataaaataaaccaaaatagggaaaatgttttgacaaaaagttagtttgattaatttacccattagaaagtaataagacatgacttcctctcatacaacttcaaatacatggcccctatgcaattactacactcttagtttaattttattctataactttgaaaaagaatacattattttaaataatgycttatagtacttgtgtgttttgtagaaaaataaataatttttaacaacaaaaataattttctggcaaggtttattttaagtatctatgatgccaacttatttccactgactttgtgacatgtaatattaggtttctgaatagctagagtttgttatttctctaataatttaagtatcattataaattgttaattccacattgcagtagatgtccagaaagtgaaattttaaaaaatatgatttcatgatttcttctttcttcagacaatagaagtgagttcttctgaattttttataacacctctaagatttagcttgttgctcactttttcttacttgaagaataacca

SEQ ID NO: 409335 - DNA, 621 bp, Homo sapiens
tataaaacccggatgatcacatcattttagaaatctagattgaatgccaatcactattttagctagacattttccattagtacataaaataaaccaaaatagggaaaatgttttgacaaaaagttagtttgattaatttacccattagaaagtaataagacatgacttcctctcatacaacttcaaatacatggcccctatgcaattactacactcttagtttaattttattctataactttgaaaaagaatacattattttaaataatgtcttatagtacttgtgtgttttgtagaaaaataaataatttttaacaacaaaaataattttctggcaaggtttattttaagtatctatgatgccaacttatttccactgactttgtgacatgtaatattaggtttctgaatagctagwgtttgttatttctctaataatttaagtatcattataaattgttaattccacattgcagtagatgtccagaaagtgaaattttaaaaaatatgatttcatgatttcttctttcttcagacaatagaagtgagttcttctgaattttttataacacctctaagatttagcttgttgctcactttttcttacttgaagaataacca

SEQ ID NO: 409336 - DNA, 621 bp, Homo sapiens
tataaaacccggatgatcacatcattttagaaatctagattgaatgccaatcactattttagctagacattttccattagtacataaaataaaccaaaatagggaaaatgttttgacaaaaagttagtttgattaatttacccattagaaagtaataagacatgacttcctctcatacaacttcaaatacatggcccctatgcaattactacactcttagtttaattttattctataactttgaaaaagaatacattattttaaataatgtcttatagtacttgtgtgttttgtagaaaaataaataatttttaacaacaaaaataattttctggcaaggtttattttaagtatctatgatgccaacttatttccactgactttgtgacatgtaatattaggtttctgaatagctagagtttgttatttctctaataatttaagtatcattataaattgttaattccacattgcagtagatgtccagaaagtgaaattttwaaaaatatgatttcatgatttcttctttcttcagacaatagaagtgagttcttctgaattttttataacacctctaagatttagcttgttgctcactttttcttacttgaagaataacca

SEQ ID NO: 409337 - DNA, 616 bp, Homo sapiens
aatgtctggtaactgaaagctaagtggatagaagagttgataaatgaagacaggaacattatatattacatctgatttaatctcaacaagaactctttcaggaagaattatcctcctcttacaaataagtagaatctatctcctggtagttacaataacttggccaactttaaacaagcataaagacattatttgaacttagaaatgataaaactaatctatctgaaacaaatccaatatgcttttccactcttctactcttccccaaatagaaaagctatataagaattataaatttggagarcatcttttccttaattcccacaatccatgtggaaaaaatataatatctttaaaaccatttaaaccatgagatacaaaaaaaaaaatttggcatgctgggagtttaaggtctttccaagtatatgatgtgctggtatagtggaaattcaagaaagagttttggtaagagatgatcaaatgtgagaaaagagagaaaagagtgagactctagaaatctatttggggtagaagttttaggctttggtgatatactggatgtactcatgagaaaaatgaatgtagaatgactcccagatttctgatttgaaaaata

SEQ ID NO: 409338 - DNA, 606 bp, Homo sapiens
ctgtgtcttttccaaaccaatttaattgaaaggcctgggaaaggaaaaattatggaaaaggaaactgagcagtgctcatggaaggtgaaggaaactctttagaactagaacttaggttatatttcagaacatcaaaaaagacaactatgagggycaggtgtggtggctcatgcctgtaatcccagcattttgggaggcagaggcaggcagatcacctgaggtcaggagttcgagaccagcctgatcaacatggagaaaccctgtctctactaaaaatacaaaattagctggacgtggtggcgtgtgcctgtaatgccagctactcaggaggctgagacaggagaatcgcttgaacctgggaggctgcagtggcagtgagccgagatcgcaccattgcactccagcctgggcaataagagcaaaactctgccccaaaaaaaaaaaaaaaaaaaaaaaaaagacatcaatgaaatagggatgtcacttaaagactaacatggggaaggcaggagaccctttttctacttctgtctctattatgggttcctatgttaactcatataccaaaagtgtataagaaaactttgccctaatgaagagacaatt

SEQ ID NO: 409339 - DNA, 600 bp, Homo sapiens
aaatatgctatattctacacggcaatgacattattgtctgccatgcttttctaacatatatatatatatatatatatgttagaaaacatatatatatatatatgttttctaaaagacccatacatatatatgtcattttgctctttgtagttgtgactgatctaattctcttatctcactgattcaaacacacttctacagattccttttaattcagacatggtgaagtatgaataaagtttccttctaagatttctcactgctttaaccttctgataatactctgtattatatattgtattctgtttcttacctttttcactcatatatatgtatgtatgtatgtatatgtgtgtgtgtatatatatgtgtatatatatatatacatatatatatatatatatatawaatatagcgattacctggaaactgccaaattcaacaaattattcagaaaatcttctctgatcctggtagtttcttcaaagagatctgcagtatacctcccacctaggaataggctagctctagtgctgaagctcactattatgaaagcataattttgtgatataaatatttgtgttgaatgcaaagatacta

SEQ ID NO: 409340 - DNA, 600 bp, Homo sapiens
aaatatgctatattctacacggcaatgacattattgtctgccatgcttttctaacatatatatatatatatatatatgttagaaaacatatatatatatatatgttttctaaaagacccatacatatatatgtcattttgctctttgtagttgtgactgatctaattctcttatctcactgattcaaacacacttctacagattccttttaattcagacatggtgaagtatgaataaagtttccttctaagatttctcactgctttaaccttctgataatactctgtattatatattgtattctgtttcttacctttttcactcatatatatgtatgtatgtatgtatatgtgtgtgtgtatatatatgtgtatatatatatatacatatatatatatatatatatataatatagcgattacctggaaactgccaaattcaacaaattattcagaaaatcttctctgatcctggtagtttcttcaaagagatctgcagtatacctcccacctaggaataggctagctctagtgctgaagctcacyattatgaaagcataattttgtgatataaatatttgtgttgaatgcaaagatacta

SEQ ID NO: 409341 - DNA, 671 bp, Homo sapiens
actttgtgttataatatgttatatcaatatacagctaagaagtttatcactggggggtggggggtgaaagcattaaataacagagtaaaagaagcaaaccatgagagagaaatctggaaagactcttctarccactctctctgtgaaagtacatcccagcctaagaattgtagttgtctggcaatagaggcgtatgagagttctggaattgttaggacacactaacatgacacggtgtcatcaaatgttcaaataatgtaacatgctctaattccatagatactgagggatattttttaattactcaattttttatgtcatttactgtagagaaggagcttgcccttgtcagcctagtttggatactggctcacttgacaatgcatttctctctgcaaattttaaaaactgacactttgattatttctctatttactcgacaaaattttattggatgcctaatatgtaggagagcctgtgaaatttttcagacaatacaatgtgtacaatggtgaaaaagacatcgtaaatagaagtaagtgaacaataattacaatgaaatgtgataaacgctgtgatggggttatatccagggtgccccgcatgcacccctgtaggagggtatgtgcgtgaagggggcatctaagatgaaatgtgaaaaatgagtaaga

SEQ ID NO: 409342 - DNA, 558 bp, Homo sapiens
tacacttgggaacttataacattataaatgtaatcatttcaaagtattttatagaatcacccttctcccccctcccttttttttgggtttggtgaccgataaaagtaaattatttcttgcccttgtgcagaagtttgaagtatccctcggggtaggaatcacttttaaaatgtcctactgtttcactgatggtgctgtattcttaaaggacactgacaaaaaaataatgtggcattacctgggcgaaggtcatttccttattaataattctacaatatcctggtactttcagagtttcatttttctgccctatgaaagaccaaataaaaagcctaaaatgctgacagaatagaagtcaaaaactcttgaggtggctgtaatggacaaataaaaaaaaatagtccmcactattttgagtctggcactatgctagacactttggaagaaggggtggttttaaccacagtgatgctgattacctagtggggaaaacaaagcacgtaaatagttatatacaatgagacagaggctagtgatgaagatgtgtgcaaagtgttc

SEQ ID NO: 409343 - DNA, 558 bp, Homo sapiens
tacacttgggaacttataacattataaatgtaatcatttcaaagtattttatagaatcacccttctcccccctcccttttttttgggtttggtgaccgataaaagtaaattatttcttgcccttgtgcagaagtttgaagtatccctcggggtaggaatcacttttaaaatgtcctactgtttcactgatggtgctgtattcttaaaggacactgacaaaaaaataatgtggcattacctgggcgaaggtcatttccttattaataattctacaatatcctggtactttcagagtttcatttttctgccctatgaaagaccaaataaaaagcctaaaatgctgacagaatagaagtcaaaaactcttgaggtggctgtaatggacaaataaaaaaaaatagtccacmctattttgagtctggcactatgctagacactttggaagaaggggtggttttaaccacagtgatgctgattacctagtggggaaaacaaagcacgtaaatagttatatacaatgagacagaggctagtgatgaagatgtgtgcaaagtgttc

SEQ ID NO: 409344 - DNA, 612 bp, Homo sapiens
tcattgggatataataactttctaacattacagcctagtgggggtaacatttgattcaattcaatccaagaattgtgctctcacctactatactgtgaggtttgctattcatttcttgggacttttgcttattatcagattgcaaacmtggataatgtgagtctacgtttgagagattgatccactgttagtgtcctgaacaaaatcaaatatttaaccccaaaagattgcggggaaggcactgatctagggaatattcagtaagaaaatgttacatcttgagattccttttagccagccagttctcttctcccttagagctcatcttttgttcagattgaacatttgcagaggtcagacatggggcaggccaggcatggtgtcaggccctggaaaaattggtaaaacgaagaactcattaacagtctaataggaagaagggattcttaaaatacgtcttgatatgcactctaattgaggcatgttgacattagaatacgtggtctgtagagaacatctaagtttaccaagagttataagggaggcatctcaggtattaggttagatgagtaagtggtccacaaaacattggtgtgaagggcaagagggaat

SEQ ID NO: 409345 - DNA, 605 bp, Homo sapiens
tatgcccttgtgagagaaaaatggatttttgatgcagccactaacactgaagttatgaaaaggctacttgtagaagttgattgaacatattacatccactgttaaattacccatgaaagaagtaagaaaatgtttgcatccatttgccaaagcttccttgcatactactgcagatagatcttggcaaagacagtgaattagatcaatcatgctttmcagaaaaaaaaaaaacagtaaagcaatatctcatgtctaagaaatgaaatgtagggtaatttggagtagctgagacagtcctgtatagctgggaaggctccagacacctttctgatggacagatcacaagccccgagtaaaaagcacaggacccaggctgatgtctgtgtaaaacaattttatgtacctcagtaatcccgagatacagattgcaaatatcctaacatatctgagatcatagcgtgtcttttgatggcctctcacaattgctgttttagaattgttacatagttgtcattactgtttgtgtgcaaacttggctatattttcattatttcagtttagtttcattcattgagtttaattgccatttacaatgatttcccggt

SEQ ID NO: 409346 - DNA, 500 bp, Homo sapiens
ggaaacttttttcacatagaaagttcaccaggatggctctgttaccaagccttaaaatttgaattacaatggttatctaaaatggccattttacactttaaaatacgtctcttattttaaaaatttacattaagtccttgcttatcttgggcttctagttaaagaaatgtcctgtgtaaaatccatactgatgtattgagcattgaagcactcaaaactatcattaacctatttttacttctcatcagcaaaattagaatattaggtattttcttcaatttcaaagcttastactttggtcagtgaaagaaatacaacacacacacacacacaaagtaatattttgtccgcaagagtaaatagacttaattgtctcatttatttattcaacaaatattcactgatgatctatctgccagacgctggactcactattgggaaacactgagttgaacgagacgtcactgtatttagcatataatcataacatagggcgatat

SEQ ID NO: 409347 - DNA, 611 bp, Homo sapiens
  misc_feature (1)...(611): n = A,T,C or G
gaactacacctggccaatcttcctatgcttttctcttttatgtagggaatatttctttatctgtgaaattcaaatctgtctcaatgatatgattttataaggtggcctaataaaaaggggtttcacaaactactcataatatctgaaataggatatatttcaggtacatattatgagtactatagaaccactgctcaaggcttctttcctaccatataacacattaagctcatttcatatttargagttatcttgactattccccttgtctgaagtgctttttacctaaatttttgcaagattggcttttgctcatcatttaagtctcaactcaatgtcacctccttagaaatgttgttactgacttcccagtctaaattaggccgtccacagtatggtatttctgattccattatcctaaattattttcttcatagcatgtcttaatatttgaaattaccttactaatttatttgcatgctttatattcatttcatcttcttcctatagaacataagtttaataaggaaggaacttagaatttgaatgaatgaatgaaatagctagtaagacacatacatanaatagttttatatttacaattagttttg

SEQ ID NO: 409348 - DNA, 638 bp, Homo sapiens
ggataaggctcaactttcaagtgttcatttacatttcaaaagaggaaataatcaactcaaaagcatctctaattgtgctgtgagagaggaaaatatattaaaacattttattagaacagtaatgtagtcccttatatggtgagaaattttgagacatttacttcctttgccatttgctcatttcaaattctactattactctatctgtccctccacctacaacaccctctttcaaaggaataaaatatgtgtggctaatactgcacctgcataacatcaacctttrccctttataaacagatgtttataaaaacaaagggccagtccttgaagaaaactggtaggtatatcagattgtaaatcacatctctgttagaataaaggaagtcttgtctgaactaccaggctaccattgccacccagcatagcctggatagccctaacataactgataaaccccttctagatctagacaccttttctcggatgaactgtgtttcttcacgtatttacaatccagttgattgttacaactttattttatctcatctttcactctttgtttcctagaaccgctctcagaactctagtaaaattgattttatttcagtcaaagcctgatcttgagatcggcataa

SEQ ID NO: 409349 - DNA, 566 bp, Homo sapiens
tttaagtgtgggcagttattattgttgttgtgcagccttctttcccagtctgtggcagtgaactttcattttgacttaacagctctgaggtccatagccctcggcatgaatttcagtccagtggccatctcttatattctgagcagacacttggaatagctaaagaatattaygagagtttttatccttccatgtaggcttcctccctttttccccaaattttgaatatatttttctctcttatatgattacctttcctttatttttgttattcaattaccccataaatagatattctatggacatgagaattacatgatgatagcaagacagtcatggataaggttttatgcctttcaggcatcattgtacatatttgatgatgatggtgatgataatgataatatatatatattttttgagacagagtcacgctttgtcactcatgctggagtgcagtggtgcaatcttgtttcactgcagtctctgccttctgggtttaagaaattctgctgcctaagcctcctgagtagctaggctgacaggcatgtgccaccacacctggc

SEQ ID NO: 409350 - DNA, 591 bp, Homo sapiens
accccataaatagatattctatggacatgagaattacatgatgatagcaagacagtcatggataaggttttatgcctttcaggcatcattgtacatatttgatgatgatggtgatgataatgataatatatatatattttttgagacagagtcacgctttgtcactcatgctggagtgcagtggtgcaatcttgtttcactgcagtctctgccttctgggtttaagarattctgctgcctaagcctcctgagtagctaggctgacaggcatgtgccaccacacctggctaatctttgattttcagtagagatggggtttcgccatgttgaccaggctggtctcgaactcttcacctcaagtgatccaaccactttggcctcccagagtgctgggattacaggagtgagccactgtgtccagctggatgatgataataattaatactaatattcacatctatcaaatatgttatgaggaacttctgcttctagacacaatggagtaagaagaaccgatttgcttttccaccataaacaacttaaaacaaacaagcatacaaacaaacatataatccacagtaattagacatt

SEQ ID NO: 409351 - DNA, 486 bp, Homo sapiens
taatttttcttctctagattacaggctctactaattctacttcaaaagtaggtgacttactgtatkcattttggcaaattacttaatatttgctaatcctgagttgccttctcagttattatgaagattaaaagtacttatcacagtaattgcctgggataaagtcagtgctcaaaaaaagtgccatctgtaagtactgctctgggtggtgtcatgattatcaataaaggtagctatgtggtttcccagcccacagcaaattagaaagagagacagcctgggattggtattcttaaggcagaaagaaacatcaatttaacttctgctcattcatgaaaacacaacctacaaaaaaacaaaaaggataggtattttaaaagtttaagagtttttaatacaaatattttgtttaaaaaacaaaaggacaagtattttaaaagtaagaatagtgaggaaccatggaagaccagagaaaggagctgacat

SEQ ID NO: 409352 - DNA, 580 bp, Homo sapiens
tcactggctgaacttcccttgacaacaggtaggcaggagagtgagaaggatatttggaggtggagtgataagggargaagtgatttgacctggactgaagccgaaaagatgccaattacaatgcacagggctgtaaatgactcctcagggtttttgcagaatgttagttgctagctgtctccttagaattttgtttcagtgatttcctctgatctcttttttatttcccttccttcccaaagtcttgccgaaagaaaattctaacttcgtgaaacaagcaatattcatttatgctttccaatggaggaaagaaagcaaggggaatttagaggaaggataataatgtttgtacattccagcaatgcaatgtactccatctaaaatcaaaattcaaattgtgctgagcagttttttataaagttaaacatacacctgccattcgactgggcaattctactcctaggtatttacccaagagaaataaaaacatatgtccacgtaaagacctgtacgggaatgtttatagcagccttattcatattacctaaaaacaggaaacatccaaacatccatcagggga

SEQ ID NO: 409353 - DNA, 580 bp, Homo sapiens
tcactggctgaacttcccttgacaacaggtaggcaggagagtgagaaggatatttggaggtggagtgataagggaagaagtgatttgacctggactgaagccgaaaagatgccaattacaatgcacagggctgtaaatgactcctcagggtttttgcagaatgttagttgctagctgtctccttagaattttgtttcagtgatttcctctgatctcttttttatttcccttccttcccaaagtcttgccgaaagaaaattctaacttcgtgaaacaagcaatattcatttatgctttccaatggaggaaagaaagcaaggggaatttagaggaaggataataatgtttgtacattccagcaatgcaatgtactcyatctaaaatcaaaattcaaattgtgctgagcagttttttataaagttaaacatacacctgccattcgactgggcaattctactcctaggtatttacccaagagaaataaaaacatatgtccacgtaaagacctgtacgggaatgtttatagcagccttattcatattacctaaaaacaggaaacatccaaacatccatcagggga

SEQ ID NO: 409354 - DNA, 519 bp, Homo sapiens
aatgggcttttttatttggttaaaagatcacacatatgagagggatgggaaataaacatagcaaggtagtgtttaagcattcattaatagaggtctgtctatattgtggtgtatccgcactggagaatatgatgcagtaattctttaggatgaggaagatctaaatgagcacacctccaggatatactaacaaagggaaaaatatagcttcccattaataaatacagcttggccccctttacattaagtaaaaaccagatatgcaaatgytcgagaatgaatgcaaaagatctggaaaagctttatcccaaactgataatacggaaccaaataaatttgtcaaagagcagtgagaatggggcaagctgcagtaatgaagtggagatgttgccttgacattgacacatctgtgttgcttaagctatgatttttcacaatagaaacttacctacatgtgacttgcttaataaagaaatattttttacataaataaaggttttctgctaggcgcagtggctg

SEQ ID NO: 409355 - DNA, 629 bp, Homo sapiens
atttttccccttagaatttgtataacattaacaactgtgtattcttagattactgtagcattacctgtgtaggtcctgtgtggttttaactttactaattttataatttagggacacactgatattcttttctaattagtctctatggctcttcaaagaattattttatctcagataagatcaaataaaactgcttacaattttttatttgctttatwgttctttaaaggatacaaagacatcatttgtgaatagctgatcaaatgttagaatttctttttggatccaaaagtcctgttatactgagaatatatttgaagttcaatctatttaaatatcctgctttaagactgacccatgagaggtggtctagagaaaagactgatcaagataacatttttttctttccctcctgggttacaaaaaaatgtacttttcgcggatgttggtagaagatcaagtactggacgaaagaaagcatggttgtctgtcctatttggggaggagatcttggaactacaaaagcaaagacacagtcaagatgacaaagaacttgacaattaggagatgaagaggaaaatgactacatgtagacaaatgatgccccttccctcaagagaaagacagat

SEQ ID NO: 409356 - DNA, 514 bp, Homo sapiens
gttatttctgtaatttgtttgtaaaataaaataaattgagcttgcaaatgtactaaaagctcaatatctttaacaaagtaatacttcacrtttacaagaagatgatatattctttcatctctacgctacaattttgggagggtaagaaatagtatctggtctactgtctctaattttatgtcatttttttcccctttagagagttttctagcatattttagttaagcgaaggccttatagtaatcaaatactaaaaaaactctatctggatgtcagctagttttttaaaggtaaagttgatcctctaggataaaattaattttatagggtaatgaagagtattttttcaattgcattttctaatgacagttttatttattttgggaatttttctcttcaaaatttttaatttgaaaatacgaaaaccataaaaacataaaattacaaacttatacacaaatgttcataaagcttcatttgtaatggtcgcaattggaaaccacccaaatatcca

SEQ ID NO: 409357 - DNA, 521 bp, Homo sapiens
agaccagcctgggcaacatacaaagaccccattcctacaaaaaaagttttaattagccagccatggtggcatgcaccagtggtcccagctactcacgaggctgaggcaggaggattgcttggacctgggaggttgagactgcagcgagccatgattgtgcygctgcactccagcctgggtgacagagtgagaccctgtctcagaaaaaaaaagttttctagtaaaataagggtcaatttacaggccccaaaaggagtatggactttaaaaaattaatattatcattatttttggttgtcaatgtggaggttgctaatacatgaaggcttacacattagtaagaagaacatgttgcaagtgggaatatcttaaggctaataaacaaataggcaggtagaactctttagaggccattccaaatataaatgtataataaaatacataaaatatacaagaagtgaatatatatgagtgaacaatatggattaaggggagataatcattcttttttaagtgcaggg

SEQ ID NO: 409358 - DNA, 612 bp, Homo sapiens
ttaatttagcatttgaccccacatttctgctgatggtagaaaacaaacttgcaaatccaatctctcagtcttttctagcttaaaaaagagggttttggagcaaaataattccycccttgctttgctcctgggtagcacacctactacatggtaacccactgtcattgctggtggtcttcacttaagtagagcactttctgctagcctttgcaatgatcccttttcccactgcttcttctcccaatgtctaaaaccttgcattgcctacagcttatatcatgtctgtagtatccactaatggcatctctaataatcatcaggacccctattcctgtttgctggtcctcagcacttctctcaagcttgaaggaagtttgggattctctacatgtgtccttacaatatatggatctcaaatctttccatctagatgcctccatctaccactggtactcggacaccatgttggatgcagaaatattctataagtcttgaaatttactaatgtatttctaggaactcgacaacagtctattctgttctagtattttccccagattatctggggattttagtgtcccaattttttccaggattaactgaggcaataat

SEQ ID NO: 409359 - DNA, 557 bp, Homo sapiens
attgcacatcaatgcctcagcttagttgcataaaatatatgtgcagaagtattaccrtgcttttttacaaatgaggaaaataaaggtcagaaaagtttaaataatttggtccaaagtcacccaggtagtaaacaacaggaccaggtcccaagccaggtattctgatcctaaatccagtacatcttctatcatagactctgctttgaaatctacttgaagatggctaaccaagagcccctcatctgcactcattacaacaaataaaattaaagaagactggaaaagtttgggcaagccaatatagctggggtatttttaaacctattactcattcagttggattccctaaacacgagcttcagcacagtcatggtgattttaacgagaaagaggacttagttatgaaattagatgaagattcagaagccaacttatctgtagatcacagtgattaaatagttcaaaatgaattacaacttagtaatattgcttcattcatatttatgagataaaagttggagttcagctcccataatatccagtaatttaagatacaa

SEQ ID NO: 409360 - DNA, 557 bp, Homo sapiens
attgcacatcaatgcctcagcttagttgcataaaatatatgtgcagaagtattaccatgcttttttacaaatgaggaaaataaaggtcagaaaagtttaaataatttggtccaaagtcacccaggtagtaaacaacaggaccaggtcccaagccaggtattctgatcctaaatccagtacatcttctatcatagactctgctttgaaatctacttgaagatggctaaccaagagcccctcatctgcactcattacaacaaataaaattaaagaagactggaaaagtttgggcaagycaatatagctggggtatttttaaacctattactcattcagttggattccctaaacacgagcttcagcacagtcatggtgattttaacgagaaagaggacttagttatgaaattagatgaagattcagaagccaacttatctgtagatcacagtgattaaatagttcaaaatgaattacaacttagtaatattgcttcattcatatttatgagataaaagttggagttcagctcccataatatccagtaatttaagatacaa

SEQ ID NO: 409361 - DNA, 533 bp, Homo sapiens
gtcaaagggttgagtttttggaatcacacatacctatatttgaaatctggactcattagatgttaatcttggtcaattgcttaacattactgaaactcagtttccaaagctataaataaaaaatcataatggctactttggttgcttccccatcctccattcttccattcttcttaagcaatctcaattttgttcaggaatccacacatctcagggcagtcatgcatttccagggtgactccatcacccatctcagaagttggaagaattctgactggtttaacccaataatggtcccactgcccttgccaatgataattttaggcaacagatcattgattattttaggcaacaaataattttggacaatgagacatgagaacccatctgctagggrcttctagtaaaggtttttggggtttttgtttgcttcaggagaggtgagttggttgttttactttgctttgtttttggatcattggctcctttaagatggttcacaaaaaaagatagtctcctattttggataccat

SEQ ID NO: 409362 - DNA, 584 bp, Homo sapiens
taacataaaatttataatacccagcatacagtaaaaattactgaagaaagaagaagcaggaaaatatgatccataaccagaaggaaaaatcagttggttaaaaacagaaccattaatgacaaatatagaatttatagtcagggtatcaaaacaactattataaatctgtcctatatgctcaaagatatagaggaaagacaaacataaagagagagatgaattacctagaaataaatgaaataaaatttttagagaaatgcartacctaaaattaaaatttccctggatagtattaacagcaggttagacaatacagataggaagagcagtgaatatgaaaatgtagcaacagaaactatccaaagcaaaacacagagacaaaaatattgggagaaataaaacccaaccttattgacctgtgggacaatatcaggtcatctaacatagttttgaaggagaggagagagatggaacatggaaaaatatttgaagaaataacaactaaagatcttccaaatttgatgaaaactataaacttacagatcccggaatctccaataaccccaagcaaggcaagcatggtg

SEQ ID NO: 409363 - DNA, 584 bp, Homo sapiens
taacataaaatttataatacccagcatacagtaaaaattactgaagaaagaagaagcaggaaaatatgatccataaccagaaggaaaaatcagttggttaaaaacagaaccattaatgacaaatatagaatttatagtcagggtatcaaaacaactattataaatctgtcctatatgctcaaagatatagaggaaagacaaacataaagagagagatgaattacctagaaataaatgaaataaaatttttagagaaatgcaatacctaaaattaaaatttccctggatrgtattaacagcaggttagacaatacagataggaagagcagtgaatatgaaaatgtagcaacagaaactatccaaagcaaaacacagagacaaaaatattgggagaaataaaacccaaccttattgacctgtgggacaatatcaggtcatctaacatagttttgaaggagaggagagagatggaacatggaaaaatatttgaagaaataacaactaaagatcttccaaatttgatgaaaactataaacttacagatcccggaatctccaataaccccaagcaaggcaagcatggtg

SEQ ID NO: 409364 - DNA, 611 bp, Homo sapiens
tgtttcaaaatggttaaggcttacctagatctattgcatttctacacatgcctgctgctgggatttttattgggattgcactgaatacataagtcatttggcagaggattgtcatgctaacagtattgagtcttccgatgcatgaataaagtatgtatctccattaatttaggtagtctttaacttctctaagcaatgtttcatagcttttagtgttcaggcctcacatatacttccttaaatctcttcctcagtatttcatgggttttgatggcattgcaaagcgtatcttcctctaattgattttccagttctccctcccttccttccttcttcccttctttcccttcctcccttcctctctttgtccatcttacagctctgctcatttgtgattcttctttgcttcttggccacattctctcctgccatgaacaggttctctgcaaaagaaatgatggctactgacattcctaaacctaattccttaaaacccatgatccaaaaagggaagattcttccccaatatctccattaccaaattaccaaagaagtctattcttgaacttttytgaatggccagatgtgccaggttttaaggaatggggaag

SEQ ID NO: 409365 - DNA, 588 bp, Homo sapiens
cccctgcctcccagtcagcagcacctttgcccccaacttcttctattacaattattttgcctgttcttatataaatgggctcatagtgtatattcttttatttatatctaactttatttgtccaacgttttgtctgaaagattcatttacattcttgtgtgtaccggtagttcaaaaattgctttgtagtactccatgacaggactacatatgtgtatgtacccaacctattcttgaggaacatttaggctgttcccagtagttggatattatgactgaagctgatatgaacattttttggttgacataaacactggggaggaagcccagaagtagaaataattgtagaatgggaagacttttagctttaggtggatactgcctagcagttttccagaatggtcccaatttatacatccgtcaagactgtatgagagttcagtcactctgtgctgttgtcagcatttagtgttttcaggtgcaatattgttttaatagattkgagtgcctttattgactacttgcacagaaaatatacttggctctagaatatgtcttttatgtacaactgagcctgtatgatggata

SEQ ID NO: 409366 - DNA, 588 bp, Homo sapiens
cccctgcctcccagtcagcagcacctttgcccccaacttcttctattacaattattttgcctgttcttatataaatgggctcatagtgtatattcttttatttatatctaactttatttgtccaacgttttgtctgaaagattcatttacattcttgtgtgtaccggtagttcaaaaattgctttgtagtactccatgacaggactacatatgtgtatgtacccaacctattcttgaggaacatttaggctgttcccagtagttggatattatgactgaagctgatatgaacattttttggttgacataaacactggggaggaagcccagaagtagaaataattgtagaatgggaagacttttagctttaggtggatactgcctagcagttttccagaatggtcccaatttatacatccgtcaagactgtatgagagttcagtcactctgtgctgttgtcagcatttagtgttttcaggtgcaatattgttttaatagattggartgcctttattgactacttgcacagaaaatatacttggctctagaatatgtcttttatgtacaactgagcctgtatgatggata

SEQ ID NO: 409367 - DNA, 588 bp, Homo sapiens
tgcaaatctctaatgtctggtttaatagaagatggctggattctcatatctgcttcttcattcaatccactgagataaattgttttgattgaagtttgtgaagcaaatctggctttacwcagataagtgttttagtaacccttttcaggtaattatgtctttcgtattacaccaaaaattgattgtgttaatttcttgaagttctgttttaatatggtttttgaaaccatatggataacctttggtactccattatgttaaaatctattggtctgacttacactctgagtggatctttacccacgcatggttttgtgacattttgcattggccatttggaaaatattggctcactgagttaggcatatctttctaatgttaacacccttcattatatatcaaaaattcatgtttgttaatgtcaccgatgatctcggaagtttttaagtattcagaagctatcattctcatggtggcaatacaaattatctaaaattcaaatttttgcttgcaagcttgaattttatcatcagcaatgaatactcttttccttgaaatggaaggatcccttcattttcaagaaaaggt

SEQ ID NO: 409368 - DNA, 588 bp, Homo sapiens
tgcaaatctctaatgtctggtttaatagaagatggctggattctcatatctgcttcttcattcaatccactgagataaattgttttgattgaagtttgtgaagcaaatctggctttactcagataagtgttttagtaacccttttcaggtaattatgtctttygtattacaccaaaaattgattgtgttaatttcttgaagttctgttttaatatggtttttgaaaccatatggataacctttggtactccattatgttaaaatctattggtctgacttacactctgagtggatctttacccacgcatggttttgtgacattttgcattggccatttggaaaatattggctcactgagttaggcatatctttctaatgttaacacccttcattatatatcaaaaattcatgtttgttaatgtcaccgatgatctcggaagtttttaagtattcagaagctatcattctcatggtggcaatacaaattatctaaaattcaaatttttgcttgcaagcttgaattttatcatcagcaatgaatactcttttccttgaaatggaaggatcccttcattttcaagaaaaggt

SEQ ID NO: 409369 - DNA, 588 bp, Homo sapiens
tgcaaatctctaatgtctggtttaatagaagatggctggattctcatatctgcttcttcattcaatccactgagataaattgttttgattgaagtttgtgaagcaaatctggctttactcagataagtgttttagtaacccttttcaggtaattatgtctttcgtattacaccaaaaattgattgtgttaatttcttgaagttctgttttaatatggtttttgaaaccatatggatracctttggtactccattatgttaaaatctattggtctgacttacactctgagtggatctttacccacgcatggttttgtgacattttgcattggccatttggaaaatattggctcactgagttaggcatatctttctaatgttaacacccttcattatatatcaaaaattcatgtttgttaatgtcaccgatgatctcggaagtttttaagtattcagaagctatcattctcatggtggcaatacaaattatctaaaattcaaatttttgcttgcaagcttgaattttatcatcagcaatgaatactcttttccttgaaatggaaggatcccttcattttcaagaaaaggt

SEQ ID NO: 409370 - DNA, 535 bp, Homo sapiens
cctctcacaccggccattcccagaaggctggctcgttctcaggccagctctcaccaccgctggctctctgcctaccgcaaacttgctggtctaatttaggaacaattgggccgaaaggtatcagcgagagcaacagaccccggtgttgtgccgcacagggagccgcatccgcagacgcccctcgctgcccctgggctcgggccaaaccctgcataaggtcccctggacagccaggtaatctccgtcccgcctgcccgaccggggtcgcacgagcacaggcgcccacgccatgttggcygcccaaagggctcgccgcccaagccgggccagaaggcaggaggcggaaaaccagcctccggtggcgggcgaaagcaaccgctctttctgttctctcttcgccctccctcgtggaaacgcagactcgaccctaaacgcttaacccacagagatcaacaggttcaagcggaatattcgcgatcctcggtttctattggttgctcaaagccttttcatgcaaccagcagctcggatgttt

SEQ ID NO: 409371 - DNA, 541 bp, Homo sapiens
aattgacactatttgggagactttccttccctctctggttggaccatatttcagtcaaagagcatagtcatgcctttttatatattcagtccacaaacctacttactgtttttctcattctgtacccaattaggtaggaagagaagcatgggatgatgggatggctggggtagtgtggggctagaggatgggattagggagtgagacaaggctaaacccatctcactgtgccactaatctcaggagttatcatgttatccagaaattcctaaccccacttgattctatgagcagctctctggtgaacagagttcatggtatgaaagagrtaatcaactcagtgtgcagatccattgttttgtcactgatacaatggcagacattccaaaaatgaatcttcaccttgcctgtcaaagcctatctattctaattccccaccctgatcttggaaaactacaaaaagaaccaattaccctctgagttagtcagagccttatttgtactcaatgaggaatcacatacaggtacacaacccttccaa

SEQ ID NO: 409372 - DNA, 548 bp, Homo sapiens
aagaacaaagagaataaaacaagacaaagatttccattgccgactcactttttataaaagaatatacataattttgcagatttcctctataggaggcttcattttataatgagagatttgtgggaattctgctatatggcatgtagaaatctgtatggctgagtaacagcgtactcgagggtatggctaaatatcttggccctgagttttgaggggactcttgctactgaacactyagaaggtcccctggcattaaaaaatgacaagaagctcttacacatataaacaattcagaaactgcctacatttgttttctattgctgctaccacacattatcataaatttagtgtcttaaaacaatacaacttgattattttgcagttctgtagcctagaattcctacacaagtttcactgtactaaaatcacggtatagaaagggctgcattccttctgcacactctgggtgaatttcttgccttacctttttcatcttctagaggccacttgcactccctgcctcctccagcttcaaagccagaaacttt

SEQ ID NO: 409373 - DNA, 610 bp, Homo sapiens
aaattttctgtaccaaaataaacttgttctaacttgttataacatgtctgaataggatctagtctgaggtagaaagaaggatgatttatctatttgaaaaaggccccaatcagagcaacatgaattgtgctaaaatggaggtaagaactaacatcaaatttatggtaaagcttgggtcgaagaataatggtgaaawcattgatgcttcatgtaaagttaatggaaacaatgcctccaacccctgaaaatcagcagtttacaaatgggtaacttgttttaagaagcaagacaatgttgaagattaagtccatagtatccattgcaggagaccatccgcatccatttgtgaggaaaaaaaaaaatcatcttatttgtgttctgattcaagaggaccaacgatgcacagcacaaataataggaaacaccacagacagcttaactgattcagctcgtacaattctgactgaaaaattaaagttgagcaaactcctctcaatgggtaccaaaattattgcacccagatcagcttcaggcaagagcagagctttcaattaatttttttttaagtgggatcaagatcttgaagtatttcttgaagaattgtaacagg

SEQ ID NO: 409374 - DNA, 610 bp, Homo sapiens
aaattttctgtaccaaaataaacttgttctaacttgttataacatgtctgaataggatctagtctgaggtagaaagaaggatgatttatctatttgaaaaaggccccaatcagagcaacatgaattgtgctaaaatggaggtaagaactaacatcaaatttatggtaaagcttgggtcgaagaataatggtgaaatcattgatgcttcatgtaaagttaatggaaacaatgcctccaacccctgaaaatcagcagtttacaaatgggtaacttgttttaagaagcaagacaatgttgaagattaagtccatagtatccattgcaggagaccatccgcatccatttgtgaggaaaaaaaaaaatcatcttatttgtgttctgattcaagaggaccaacgatgcacakcacaaataataggaaacaccacagacagcttaactgattcagctcgtacaattctgactgaaaaattaaagttgagcaaactcctctcaatgggtaccaaaattattgcacccagatcagcttcaggcaagagcagagctttcaattaatttttttttaagtgggatcaagatcttgaagtatttcttgaagaattgtaacagg

SEQ ID NO: 409375 - DNA, 492 bp, Homo sapiens
tttttgtgtttggcaaaatgacaattgtcaggccttaggataagcaggaactccagctagcaatggcagaggatgtactatgtgaaatgtaatatgctgcaggatgggaaacaatcatctcacagaaactcagttaactgaattccaaaatttagaaaactgagctttttcatggctttactataggaaatggaacccccagatttagacactcacaggttaaagggagagttaygatagttccactgaactaataagatggaggccaacttaaccttcaattcggagaagactaatttgatttttaggtggtttatttggaagctgtctttactgcattagtattacatgttagaaatgttgactctttcatcaaagaaaagaaactcaaggtggtagacttttaaggagaggataagtatatgtatgaagcagttacttcatcattaagcttggtgtgctaggatccttcataatgaatatcacctaaaa

SEQ ID NO: 409376 - DNA, 457 bp, Homo sapiens
agacaatgagatgtcagactctttattcatcatgattgtttccctgccccttcctcattcttatttcttgtacattgttgcatttcttctcccatataaacccctggttttagtgggtcagagaactggatttgagcctgagctcctatgtctttggttgcagcaccctaataaagccttcttccttggcaataatcattgtctcagtaattgactgcctgtgtagcaaacagcaggacytagaccaaacccctgaagtttcagtgacagattttggtttcctgaccaggaagacattgcctatggctcggctgctttgagctaggattctcaggagccctccaaagcagctggtcacccaattttgggtggaggtgagtttcagtcgctctctgacactaccaaaactggccccaactacattcctgattgtcttagaactgcctttgaaatttga

SEQ ID NO: 409377 - DNA, 457 bp, Homo sapiens
agacaatgagatgtcagactctttattcatcatgattgtttccctgccccttcctcattcttatttcttgtacattgttgcatttcttctcccatataaacccctggttttagtgggtcagagaactggatttgagcctgagctcctatgtctttggttgcagcaccctaataaagccttcttccttggcaataatcattgtctcagtaattgactgcctgtgtagcaaacagcaggacctagaccaaacccctgaagtttcagtgacagattttggtttcctgaccaggaagacattgcytatggctcggctgctttgagctaggattctcaggagccctccaaagcagctggtcacccaattttgggtggaggtgagtttcagtcgctctctgacactaccaaaactggccccaactacattcctgattgtcttagaactgcctttgaaatttga

SEQ ID NO: 409378 - DNA, 561 bp, Homo sapiens
agctctcattcaaatttcttatcatagacaatgccctggggtgtccacaagttattaatggcatgcagtctaatgtaaaggttgtgattttgccactgaaaacaacttcacacattcaaccaataaggcacaatagctgccttcaaatattatttasacgaaacatttgtgcaggcaattgaagcaactgaatgtggccaaacactgatagttttggagaggttttaacattctaaatgtttgtctgaaacatggctgtagtatgggaagaagtaacacaacaacacataatcaacattaggaagaaagatttgaagacatgtgaacacattcaaaggctttaacaaagattctgctattgataaaatagtaaatagcaagatattagtggctgggaaacagaactgggcattgacgaagaggatattcatgagcttgttggcattgaggctgaaggattttccagtgaagcactgttcaaactgaagaaagaagtaaagaagttgaggtagaggaagaataaattatacccgaggcactaagaaagttcacagagaagaa

SEQ ID NO: 409379 - DNA, 497 bp, Homo sapiens
acttcacacattcaaccaataaggcacaatagctgccttcaaatattatttagacgaaacatttgtgcaggcaattgaagcaactgaatgtggccaaacactgatagttttggagaggttttaacattctaaatgtttgtctgaaacatggctgtagtatggraagaagtaacacaacaacacataatcaacattaggaagaaagatttgaagacatgtgaacacattcaaaggctttaacaaagattctgctattgataaaatagtaaatagcaagatattagtggctgggaaacagaactgggcattgacgaagaggatattcatgagcttgttggcattgaggctgaaggattttccagtgaagcactgttcaaactgaagaaagaagtaaagaagttgaggtagaggaagaataaattatacccgaggcactaagaaagttcacagagaagaaattggtgaaggtgtttgctactgtcagtggtagcataccg

SEQ ID NO: 409380 - DNA, 561 bp, Homo sapiens
agctctcattcaaatttcttatcatagacaatgccctggggtgtccacaagttattaatggcatgcagtctaatgtaaaggttgtgattttgccactgaaaacaacttcacacattcaaccaataaggcacaatagctgccttcaaatattatttagacgaaacatttgtgcaggcaattgaagcaactgaatgtggccaaacactgatagttttggagaggttttaacattctaaatgtttgtctgaaacatggctgtagtatgggaagaagtaacacaacaacacataatcaacattaggaagaaagatttgaagacatgtgaacacattcaaaggctttaacaaagattctgctattgataaaatagtaaatarcaagatattagtggctgggaaacagaactgggcattgacgaagaggatattcatgagcttgttggcattgaggctgaaggattttccagtgaagcactgttcaaactgaagaaagaagtaaagaagttgaggtagaggaagaataaattatacccgaggcactaagaaagttcacagagaagaa

SEQ ID NO: 409381 - DNA, 567 bp, Homo sapiens
ttggtcatggtatatgatcctcttacattgtagtttaattttgttcactagtattttgttgaggayttttgcatctgtgttcattgggatatttgtcctgtgctatggtttagatatggtgtgtttggtcccaccatgtcgcttgttgaaatatgatctccattattggaggtgggaactggtgggaagtgtttaggtcatgagggacagatccccttctgagtgactttgtgcccttcttgtgggagtgagtgagttcccagtcttagttcctgtgagaactagttgttgaaaagaacatggcacttcctccactccctctgtctttcttcctcttgccatgcgatttgcacatgtggctctcctttaccttctgccatgagtggaagaagcctgaagttctcaccagaagcagatgctgctgccatgcttcatgtactgtctgatgaaccatgagcaaaataaacctcttttcttcataaattatccagcctcagttgttcctttatagcaattcaaaacagactaagccacttaccttttccattttctgaaagaatttgagaa

SEQ ID NO: 409382 - DNA, 593 bp, Homo sapiens
aggcccgcctctctcatcaaatttctcgtgttaacgtgaacttcgcagaaaaaggtcagtttcaaaacctgtgaacttcccagctgcgcacttttttcatcttagttttttaaataagtatacctcttctttctgctttgccttcttagcgcatttttwaaaacacacatttaagttggtaactccccccagtctctcgagaatcgtctgggttgtttttccatatttttaaatgtataaaatactttaattttaaaatttgtttttgctccttggttctccaatttcagcttctgccaaatagcagttaagaaataagttcccttcctctttttctctcccgtttgtctttcgatttttttgtttgctcattttttcattgttaacaagatttttttttctatgcaagagtccatcgttgcagctttgcggtgagccaaactccgcggttccagcactcccctgtccagtctctctccagactcccccaaacccgctcctacaaaacccaattctaggccctcgagtaggaaaacgggcaggagccacggagcctgcgtgcctcgtgagatccctggtcctgcgtggagtct

SEQ ID NO: 409383 - DNA, 593 bp, Homo sapiens
aggcccgcctctctcatcaaatttctcgtgttaacgtgaacttcgcagaaaaaggtcagtttcaaaacctgtgaacttcccagctgcgcacttttttcatcttagttttttaaataagtatacctcttctttctgctttgccttcttagcgcatttttaaaaacacacatttaagttggtaactccccccagtctctcgagaatcgtctgggttgtttttccatatttttaaatgtataaaatactttaattttaaaatttgtttttgctccttggttctccaatttcagcttctgccaaatagcagttaagaaataagttyccttcctctttttctctcccgtttgtctttcgatttttttgtttgctcattttttcattgttaacaagatttttttttctatgcaagagtccatcgttgcagctttgcggtgagccaaactccgcggttccagcactcccctgtccagtctctctccagactcccccaaacccgctcctacaaaacccaattctaggccctcgagtaggaaaacgggcaggagccacggagcctgcgtgcctcgtgagatccctggtcctgcgtggagtct

SEQ ID NO: 409384 - DNA, 511 bp, Homo sapiens
ctgcgcacttttttcatcttagttttttaaataagtatacctcttctttctgctttgccttcttagcgcatttttaaaaacacacatttaagttggtaactccccccagtctctcgagaatcgtctgggttgtttttccatatttttaaatgtataaaatactttaattttaaaatttgtttttgctccttggttctccaatttcagcttctgccaaatagcagttaagaaataagttcccttcctctttttctctcccgtttgtctttcgatttttttgtttgctcattttttcattgttaacaagatttttttttctrtgcaagagtccatcgttgcagctttgcggtgagccaaactccgcggttccagcactcccctgtccagtctctctccagactcccccaaacccgctcctacaaaacccaattctaggccctcgagtaggaaaacgggcaggagccacggagcctgcgtgcctcgtgagatccctggtcctgcgtggagtctg

SEQ ID NO: 409385 - DNA, 470 bp, Homo sapiens
ttcccttcctctttttctctcccgtttgtctttcgatttttttgtttgctcattttttcattgttaacaagatttttttttctatgcaagagtccatcgttgyagctttgcggtgagccaaactccgcggttccagcactcccctgtccagtctctctccagactcccccaaacccgctcctacaaaacccaattctaggccctcgagtaggaaaacgggcaggagccacggagcctgcgtgcctcgtgagatccctggtcctgcgtggagtctggctttccgagtccaagatgcgataggggacgagggatggtcagtgaggcgggaagagggccggctcccgaggtctcaaaggggtaacggagaagcagcggggcgcggagggcgtgcaggctgagtgccgcgggacaggcgcgacattggtgctggcgttggcgtcacagacccagggctgcggcgtgctttttgg

SEQ ID NO: 409386 - DNA, 546 bp, Homo sapiens
caaactccgcggttccagcactcccctgtccagtctctctccagactcccccaaacccgctcctacaaaacccaattctaggccctcgagtaggaaaacgggcaggagccacggagcytgcgtgcctcgtgagatccctggtcctgcgtggagtctggctttccgagtccaagatgcgataggggacgagggatggtcagtgaggcgggaagagggccggctcccgaggtctcaaaggggtaacggagaagcagcggggcgcggagggcgtgcaggctgagtgccgcgggacaggcgcgacattggtgctggcgttggcgtcacagacccagggctgcggcgtgctttttggctttcagtctgagatcggcgatgctggagttcttgctggtggtcttggcggctgctgcggccgccactaccgaggcggcggaagccgaatccgcggccagcgtggcgagcggcagtccgaagggcggtgctgggaacatcatgtagggcgcgtgcgcggccaggtgcggatgcaggtggtggtgcgcgtgcgcc

SEQ ID NO: 409387 - DNA, 573 bp, Homo sapiens
tgggttgtgtttgggcacggggagagggcatttggctgtgcatcttgttccgacagtgaccttctcagcctgttgctgaatctggggttccacatggatactccagtgtcccctgggtctccgaaactcgcttagggtaggcttatttccccggaccccgggaacccccttctgcaggaatgtggccgtctcccctgggaactgggctgaaatggtatattggaaagactgcgggtgaggacccttaccctcttctcttgatgcwgccatgcatctcttaccccactaccaaaacaacggagtatcaacaagcaaactacgcaactttttaatgtcattcagggaagttactccatcttcaccacaataggcacaattgtgagtcggtacttctaacctttattgccataacaattacccagggatctcgttaaaattcagattctgattcgcaaggtctaggttggggcctgagattctgaatttctaacaatctcccagacggtgttgttgctgctggcccaaagattaccttttgagtagtaaaggtctccttttaaagtcacccctccc

SEQ ID NO: 409388 - DNA, 591 bp, Homo sapiens
agtctctagagcagccgtgtgcctgacacctacatttctgctggatgatgatgatgattttaacagtgtacctgaggaaggtgagatamaagtggacttggctttctaaagccatgctgatagcccaatcctagagtgaaccaatgagactagacaagagaggatgattcttctagatctgagtgttacctgttatccctttcactttgcattactccatgtttgtgttgctaattctcatttaaaaggcctaagcatttaaatctatattagcttgtcagtttcacacatggaggaacccaaggtccagactccctgcctgtcattctgtgctgctgttagttctatgccatgacactaaggcttttgacatttatatgatggtgatagggaaggctttcaaccaaaacttacagtgccacttcagacataggctctaggggtgtgatcagagcacctgcttcacttttaagtactttcaaatttgacatgtttcttacttctgatggctgaggaaaacaattcagggttatgaataactaatgctggcattgtgcctagggagaataatttctaggacttcataggtga

SEQ ID NO: 409389 - DNA, 575 bp, Homo sapiens
agcctgcatttaggtctctccgaatggggcaaaatttcctcctataatatctagtgaggaaarggggtcatggagacaggtggttttcggggcatctgctagagcatgcaatctgcagctggagaaatgtgggaatccctgatatagcaatagtcactgcaagaagaaatgtaagaggatcacagactctcttcccactacacacccaatttctcttggttgctgtttcctgtcagaaatgagagtcccacagaacttgtaggactaccagcaaggaacatgtagagtttacagatgtgttttttctgtgtttttattttattttttaacaggggatttaatcttcttaatgaggtctgtggcagggtgatattaaagttggtcctcactttgcctgactgtggagtgacaggcattgaaagaagggggactgagatgccctccaccaaggaagctggctgggcttgaagcccagcctgaataattcaccaagtggagaaaggagaaggaaggatagattatgttaagctgcggcaagagcagaggggccccatagagaggaggatggttgcaaa

SEQ ID NO: 409390 - DNA, 541 bp, Homo sapiens
gctcacgtggcataatcccagaatatatgcctgtatcaaaaattcctccttttgtaaggacatcagttgttagatccaggggccactctactccagtactgcagtgatactgtttccaaataagaccaaaatctgaggtattggaggttaagacttcagcatatgaatttcagaggcgtcataattcagcccatatctgggagggggatgaggggactatacctggccagatcttcctccttggttccttctgtgacaacaaatagccagaagagattaaaggatgggtggaaaataaaatggggtggggatagcagaggtaaattgtgaggaaagacaggtaaaactgcaggaagcrgatgagaacaaaagaacaattctagaaaacttaaggcaataaaatcaaaggcaagttctcaaaggccgtcagtttatgttccttctgatctcccttctgtcctcatttcatcgcaatctacagctcatttaatcatggaatgtttcctgagcacctaccatgcactaggcatgttgcttacgt

SEQ ID NO: 409391 - DNA, 544 bp, Homo sapiens
ctctttttcttaaagtttttacatgtctttaagctgttttatctcaaaacatgagctgcctgcacgtttcaggccttgcagaaagaaaggtgtgatgctagagatgggactagagaagtcacctcaagtttgatgacagatcttctcatgtgatgctagagatgggactggagaagtcacctcaagtttggtgacagatcttctcatgtgatgctagagatgggactggagaagtcacctcaagtttgatgacagatcttctcatgtgatgctagagatgggactggagaagtcacctcaagtttgatgacagatcttctcatgtgatgctagagatgggactggagaagtcacctcaagtttggtgacagatcttctcatgtgatgctagagatgggactrgggaagtcacctcaagtttggtgacagatcttctcatgtgatgctagagatgggactggagaagtcacctcaagtttggtgacagatcttctcatgtgatgctagagatgggactagagaagtcacctcaagattggtgaca

SEQ ID NO: 409392 - DNA, 554 bp, Homo sapiens
tgcctcccaagtttcatcccactcttctccaaagatagtgttcttccttgagtagtcttctcttttgtctactgtgcaacaagatgtataaccatcaccttccccaccagayaacatgctaggatgctttctgttaggatatgaagaagagtgatactgacatgctagtgataatactcttggagctgggaaacttgcagagtaaccaggcgtctactgacccaccacatttttaccttatgaccaaagacaagccctgtcataatagactgtcatcataggaggtagcatgcatccattcatccaacagatatttacacagtgggtcctaagtgcagatattgaaatgatcagggttataagacactaacaatgccaacggagtgggttgatatagaaatttattctaagtgatttatgtgccttttcttcttgttctgaatgaaaaacatgtgaggtattttctgttatgacgtcactgtagaagtaaagaaacggaagctaaatggctgagtaacacagctgtcaatagttaatagttagtaaggggcaga

SEQ ID NO: 409393 - DNA, 630 bp, Homo sapiens
atcataggaggtagcatgcatccattcatccaacagatatttacacagtgggtcctaagtgcagatattgaaatgatcagggttataagacactaacaatgccaacrgagtgggttgatatagaaatttattctaagtgatttatgtgccttttcttcttgttctgaatgaaaaacatgtgaggtattttctgttatgacgtcactgtagaagtaaagaaacggaagctaaatggctgagtaacacagctgtcaatagttaatagttagtaaggggcagagctggaattttcacccagcctccagaaccccatgactttagccactatatgtactgcctgtatggtgagaaataaaatagacatgatctctgtttccatggctaggagagaaagaaggacatgacaccaattcacacataaatatgattttaaattgtcataaggcctgcagaaaaatataaacaagctaccaagacagcaaacacaaagcaaagtcattatttatactgagagttaaagaagccctctcttcccctctctcaccccaaaaatgtgacatttaagctaaaacctaataaacagagcacattatcttgttgaataatttggggaggggaagtgagactggt

SEQ ID NO: 409394 - DNA, 554 bp, Homo sapiens
tgcctcccaagtttcatcccactcttctccaaagatagtgttcttccttgagtagtcttctcttttgtctactgtgcaacaagatgtataaccatcaccttccccaccagataacatgctaggatgctttctgttaggatatgaagaagagtgatactgacatgctagtgataatactcttggagctgggaaacttgcagagtaaccaggcgtctactgacccaccacatttttaccttatgaccaaagacaagccctgtcataatagactgtcatcataggaggtagcatgcatccattcatccaacagatatttacacagtgggtcctaagtgcagatattgaaatgatcagggttataagacactaacaatgccaacggagtgggttgatatagaaatttattctaagtgatttatgtgccttttcttcttgttctgaatgaaaaacaygtgaggtattttctgttatgacgtcactgtagaagtaaagaaacggaagctaaatggctgagtaacacagctgtcaatagttaatagttagtaaggggcaga

SEQ ID NO: 409395 - DNA, 630 bp, Homo sapiens
atcataggaggtagcatgcatccattcatccaacagatatttacacagtgggtcctaagtgcagatattgaaatgatcagggttataagacactaacaatgccaacggagtgggttgatatagaaatttattctaagtgatttatgtgccttttcttcttgttctgaatgaaaaacatgtgaggtattttctgttatgacgtcactgtagaagtaaagaaacggaagcyaaatggctgagtaacacagctgtcaatagttaatagttagtaaggggcagagctggaattttcacccagcctccagaaccccatgactttagccactatatgtactgcctgtatggtgagaaataaaatagacatgatctctgtttccatggctaggagagaaagaaggacatgacaccaattcacacataaatatgattttaaattgtcataaggcctgcagaaaaatataaacaagctaccaagacagcaaacacaaagcaaagtcattatttatactgagagttaaagaagccctctcttcccctctctcaccccaaaaatgtgacatttaagctaaaacctaataaacagagcacattatcttgttgaataatttggggaggggaagtgagactggt

SEQ ID NO: 409396 - DNA, 635 bp, Homo sapiens
  misc_feature (1)...(635): n = A,T,C or G
gcctcagcctgagatagaaatgggtttggcaaaggaggagagaaacaaacaacggtgtaactgtgctattgctgcaacaatgctgggtaacagacaaccctagtctcaagtataggtctgttccaggtgtttcttcatttttcatgcaagcagttactgggtacagcatgttctttacatggagaatggcaacagcataagaggaacagacagaagcttttcagtaacccttaagaatttttcttgcaatcagtcacttctgctcacatttcattgaccaaaatacaaggcccagccaagcttccgtgggaggaattgcaaactcacttcacacagggtatagattctaatgtagagaagaataaaaatttaggagcaataatcccatctacctgtggcccaaggtgttctgaaaagatggctatntttgtggctttgggatatgttctttgggccaggaggcaagaaggaaggagttaatcaatgaaagaattaatctggagaartatgggaaaggcctcatgctatgtctaggggttgggttttatgctatcagccctggaaaagtacttatgaagccttcctgaacagcttccttaaagagaatgtttgtttgtttgttttgttttgtgttg

SEQ ID NO: 409397 - DNA, 574 bp, Homo sapiens
tcttatcttgaattcccatgtattttggaagggactggtaggaggtcattgaataatgggggcaggacttttccatactcttctcatgatagcaaataagtctcatgagatctgacagttttaaccaggggagttttcctgcacaagctctctctttgcctgctgccatccatggaagacatgacttgctcctccttgccttctgccatgattgtgaggcctccccagccacattgaaatgtaagtccattaaaccctttttcctgtataaattactcagtctcgggtatgtctttatcagcagcatgaaaatggactagcacagtatcccaagtggacaatattttccaatgttcaagttgttaattacagagcagttacatggaactctaatcttggaacaggttctatgtgattatgaggcaatcagcaccaaacagctatgaggaagcagttcagagagcaggaagcagttcagagagcaggcttccctcatggtgaatgctaagcgtgctgcaagctgggttcagttccttttccccrgcttccttcttccctggttcattttctaaag

SEQ ID NO: 409398 - DNA, 535 bp, Homo sapiens
cctgcctagtgatgtatggacttcagagtaatgtggcctatagcagttttccaggattgttcttctgtttgctgttgtttttctcccttcctcctcctattttttcttcayaggacatgagacttcacaaactgctaaaaccattttagccatgaaagatcagaaacaacctgagaccagactcattattttctaaaatgctttctctgaaaaattttatctttaaaattttatttattattattatttggtgtgtttcagaaagatgaaacatctttaaaagaaaagggagaagaaatgtgaatgaaaaataaaaactcaggaacacaattcaccatgccacaaggaaaaaaaaaagttaaaatcttgagtcatgccaggagacccactttcccttttgttcctaagcagacagctaccagataaaaggttaaatatctccagggtaggtactctatgttcgctttattctatttaaaaggcttgatttactgaggcgcagatgaatacaaattgcctattcccctacctgctg

SEQ ID NO: 409399 - DNA, 524 bp, Homo sapiens
tttgctggtgaacctactaagcccaggaacataatccagctctccatggttgtcctttgtaccaacagaactccagtaacctcagtgagaagagtcatggccctgcagttgactatccacatttctttaatgtaagtcaaagcccatcacaatgcatcctgttacaatggaaatcttatttttggaagtccacttaattattttgagcaacattatatacaacccaacagatacaattaattgacaacttgttgaaatgttagagytaaaccacaaagagtaactgagtaatgttgacaaccccaatatttattctcatactgtgctcaacattagatgatctataaaattcaactggcaaagggagatcaaagaattgtgcttcatcttgagcttgaattggatgacaaggagattaggaaatcctaagtggaaaaatattcaaatcattgtgctttctatatatttttcttaccacctatttccagttataaaccttacatctgtgcctctgcataccattt

SEQ ID NO: 409400 - DNA, 539 bp, Homo sapiens
gcccttgacagaatctcaccttatccagaccttcttagtcctgactctgaagtaaatagtcaaagatagagcagtcagatatatgtaatctaactagtatttttgtaaactggtgataattttataagtttgttgactttaccaaaaaagagttgaaacataagaatttaatcttaccatatatacgtcctttctagagaatggctagaatttaagtataataatgcaracatttcaacttgttcttggttagtttgtggggaaaaataaattttatatatcacttaattttaatggtttttcacatgataagattaacctttcttcctagagagctatattcttagctcattacaaacaactaaaattttatatttttaaaatctgatatcaaaagtgaattttgataggcagaatatcccctcttcttttatttactcttctactttaattttatattgtgaaaaatataaaactgcctattaccagaacttacaggctccttaagaggagaaacttaatattttctttcgaattct

SEQ ID NO: 409401 - DNA, 539 bp, Homo sapiens
gcccttgacagaatctcaccttatccagaccttcttagtcctgactctgaagtaaatagtcaaagatagagcagtcagatatatgtaatctaactagtatttttgtaaactggtgataattttataagtttgttgactttaccaaaaaagagttgaaacataagaatttaatcttaccatatatacgtcctttctagagaatggctagaatttaagtataataatgcagacatttcaacttgttcttggttagtttgtggggaaaaataaattttatatatcacttaattttaatggtttttcacatgataagattracctttcttcctagagagctatattcttagctcattacaaacaactaaaattttatatttttaaaatctgatatcaaaagtgaattttgataggcagaatatcccctcttcttttatttactcttctactttaattttatattgtgaaaaatataaaactgcctattaccagaacttacaggctccttaagaggagaaacttaatattttctttcgaattct

SEQ ID NO: 409402 - DNA, 539 bp, Homo sapiens
gcccttgacagaatctcaccttatccagaccttcttagtcctgactctgaagtaaatagtcaaagatagagcagtcagatatatgtaatctaactagtatttttgtaaactggtgataattttataagtttgttgactttaccaaaaaagagttgaaacataagaatttaatcttaccatatatacgtcctttctagagaatggctagaatttaagtataataatgcagacatttcaacttgttcttggttagtttgtggggaaaaataaattttatatatcacttaattttaatggtttttcacatgataagattaacctttcttcctagagagctatattcttagctcattacaaacaactaaaattttatatttttaaaatctgatatcaaaagtgaattttgataggcagaatatcccctcttctwttatttactcttctactttaattttatattgtgaaaaatataaaactgcctattaccagaacttacaggctccttaagaggagaaacttaatattttctttcgaattct

SEQ ID NO: 409403 - DNA, 524 bp, Homo sapiens
cacctgtaatcccagcactttgggaggctgaggttggcagatcacttgagatcaggagyttgagaccagcctggccaacatggtgaaaccccgtctctactaaaaatacaaaaattagctgggtgtgatggcgggcacctgtaatttcagctactcaggaggctgagacagcagaatcacttgaacccaggaggcagaggttgaagtgagccaagaatgtgccattgcactccagcatgggtgacaaagcaagactctgtctcaaaagcaaaaataaaaacatcacaaatttaaatctgtgttattaatactttttaactgctttaggtataaaaataacaataagttttataatcaatatgtttgtgttttttagcttgttagatgtgtatatactatttaagataatctattagacttgtgattttaataattatgaaacttttattatgtgcttcaatgtttacattaatcaataatgtttacatttaatttgtttttagtatcatatagtaactcatgtt

SEQ ID NO: 409404 - DNA, 524 bp, Homo sapiens
cacctgtaatcccagcactttgggaggctgaggttggcagatcacttgagatcaggagcttgagaccagcctggccaacatggtgaaaccccgtctctactaaaaatacaaaaattagctgggtgtgatggcgggcacctgtaatttcagctactcaggaggctgagacagcagaatcacttgaacccaggaggcrgaggttgaagtgagccaagaatgtgccattgcactccagcatgggtgacaaagcaagactctgtctcaaaagcaaaaataaaaacatcacaaatttaaatctgtgttattaatactttttaactgctttaggtataaaaataacaataagttttataatcaatatgtttgtgttttttagcttgttagatgtgtatatactatttaagataatctattagacttgtgattttaataattatgaaacttttattatgtgcttcaatgtttacattaatcaataatgtttacatttaatttgtttttagtatcatatagtaactcatgtt

SEQ ID NO: 409405 - DNA, 524 bp, Homo sapiens
cacctgtaatcccagcactttgggaggctgaggttggcagatcacttgagatcaggagcttgagaccagcctggccaacatggtgaaaccccgtctctactaaaaatacaaaaattagctgggtgtgatggcgggcacctgtaatttcagctactcaggaggctgagacagcagaatcacttgaacccaggaggcagaggttgaagtgagccaagaatgtgccattgcactccagcatgggtgacaaagcaagactctgtctcaaaagcaaaaataaaaacatcacaaatttaaatctgtgttattaatactttttaactgctttaggtataaaaataacaataagttttataatcaatatgtttgtgtttttyagcttgttagatgtgtatatactatttaagataatctattagacttgtgattttaataattatgaaacttttattatgtgcttcaatgtttacattaatcaataatgtttacatttaatttgtttttagtatcatatagtaactcatgtt

SEQ ID NO: 409406 - DNA, 362 bp, Homo sapiens
actgcataatttattttcttagtggtttctttgtttgaaattatgatgaggtctaatttatcagttttttctttcatggttattgcttyctgtgacttgtctaagaaatctttgccaagactcaagtcatagagatattttcctatttttcttccaaaacctttacaatttagctttcatgtttaggtctataatctatctcaaagtcgtcatctgtatgtatggtgtgagataagagtagagattcattctttgtgaatatttatttctttccatgccatttgtcaaaaagactctcctttcccccactggattgctttggtgcctttataagaagtcagaaggctgtataagggtagcag

SEQ ID NO: 409407 - DNA, 395 bp, Homo sapiens
ggcagacagatgatctgcaaaggtcacactaacagtgtttacatttatgtctgactccactgcctactctctttaggtcagaatgcctcctaggccctcaaaagcggaggcagccagaaacccagcattattctttctaatcctcagtcctgtaaatgagaaaatgatgtcttacttttataaagtactactaataatagggtctgcatagggtacatgagtggcaaagcaccttcacaaacatatcatttggtcttctcttatcaccccaggaagtggtgaagaagcaggcaagtgggaawctgaggctcggaaagctaaaatggcttgtctgaggacccacagctcaaaaacagcagtgttgtgcctgaaacttaacacttttagactgtggt

SEQ ID NO: 409408 - DNA, 581 bp, Homo sapiens
tgtcccttttctaatcagcacttctacccccacaccactgtgttgctattgtaaacaatgcagatggttgttcaagtattctgtgaatgcaagcgaaacataagctaacatggagagatgtttctggaaaggtrtgaacaaattgagtcaaacccgcatgtactcagagcatgcattacataaaggaaactcgaggtgggctctcttataaaatgtacagtcttctcatatctgtcatataaagacaattcacttgttttacagcttcatatagttaaagaaactcatgtaatttgtctcaagtgtttaagaaagtcttcatttaattaaaaagaaaagtacagttcataatataacagagccaggtctgccatttctttgttcatatttcatcgtttcgtgccagtcaaactacctgtcctgtgacaagtggaatggagcttgcatgttccctattaattgataatggtgttaacaagggtttattatatctactctagaaactttggaaatacagtgattcttagctattccctggcagatctcaatattctctaaattagactaacattttaccacaa

SEQ ID NO: 409409 - DNA, 581 bp, Homo sapiens
tgtcccttttctaatcagcacttctacccccacaccactgtgttgctattgtaaacaatgcagatggttgttcaagtattctgtgaatgcaagcgaaacataagctaacatggagagatgtttctggaaaggtgtgaacaaattgagtcaaacccgcatgtactcagagcatgcattacataaaggaaactcgaggtgggctctcttataaaatgtacagtcttctcatatctgtcatataaagacaattcacttgttttacagcttcatatagttaaagaaactcatgtaatttgtctcaagtgtttaagaaagtcttcatttaattaaaaagaaaagtacagttcataatayaacagagccaggtctgccatttctttgttcatatttcatcgtttcgtgccagtcaaactacctgtcctgtgacaagtggaatggagcttgcatgttccctattaattgataatggtgttaacaagggtttattatatctactctagaaactttggaaatacagtgattcttagctattccctggcagatctcaatattctctaaattagactaacattttaccacaa

SEQ ID NO: 409410 - DNA, 544 bp, Homo sapiens
ttaaaggaataacccttaggagttcacataatttttttccactgcttcctaggcagatctcatttagtgtagctggcgtgttgccctgcccacacgaacagtggacttctccaaacatttctttaaatatttttctcacaaaatgagaagttgaatcaaaacgttggtgttaattcagtgtctcaaagacattagacccaaggcctctgtcttttcctcatggttgctgatgaaggccgaagctatagccatratggtaatattccagttggagagagaagaaactactcttttgtatactaaaaatacaaaaattagctgggtgtggtggcatgcgcctgtagtcccagctacttgagaggctagtacaggagtcgctatgtttttagccagcccattcagtttttgtaaagctccatcattacatttttcatcatactgacctaatacctagctatatttagcttgctcacgctctgccttctggggggaaaatatatatgtctgtgcattctctatatctacctagtatcaattagagttt

SEQ ID NO: 409411 - DNA, 545 bp, Homo sapiens
aacacaactaactcttgaagggcatacaactcgaatggtgagagaagtatacaagaccactaaccacaagcattcagcatactaacactgccaacagtcttcacgttttagagagggaacaggagtaggagtagttaggtaatttggcaaatgacttacataatgtttatgggagaatttactagaaataatagatgttattaaacatttattcagataccaaacattcatcaaagactatcagccctgaggtgggtattattatctccattttacaaatgaggaaatggaatcgtaagagaggttaaatacttacccaaggttatatgattactaagtgatgaggccaaaagttgaactaaggcagtctgatcctagagcccacaatctyagccactgtataataaatgacttatttttaaggccatgatagatgaccggtgaaacctgctttgagattcctcccagccacattcttgggcacagacctttgagcctattatcacccatgtattatgcgagtttgtaataaaagaaaattggta

SEQ ID NO: 409412 - DNA, 587 bp, Homo sapiens
gttgcccaggctggtttcaaactcctggtcttaactgatcatcttgccttagcctcctgagtagctgagattacaggcatttaatataytagaagttgggtatagctcagatgacagaggactagagaatacctctcatgttacattgacccccttccctggagtagacctttttcattttcttagatattttggggcaccgggaatgatattcatatatagattacacctggatattaacccagactcccttctctactcttccaagatgattaattttagtaggcatggttccctgccaagaagcacttggcagcagtcatttcaaggaagttgtaactgaatacccagggatctaggatgtgcgttttcactagcggctaaggatttgcctcagcagcccatgaaaagctctgattcacatcagagggctccatacctgcagggctcacactctatattaaagaccaagaggccattggtatagagggtgtgcttaggacattccaacccccctcccaaagaatgatattctacttatttaggattaagattattttgaggagcagatctcttagaatgatgtc

SEQ ID NO: 409413 - DNA, 587 bp, Homo sapiens
gttgcccaggctggtttcaaactcctggtcttaactgatcatcttgccttagcctcctgagtagctgagattacaggcatttaatatactagaagttgggtatagctcagatgacagaggactagagaatacctctcatgttacattgacccccttccctggagtagacctttttcattttcttagatattttggggcaccgggaatgatattcatatatagattacacctggatattaacccagactcccttctctactcttccaagatgattaattttagtaggcatggttccctgccaagaagcacttggcagcagtcatttcaaggaagttgtaactgaatacccagggatctaggatgtgcgttttcactagcggctaargatttgcctcagcagcccatgaaaagctctgattcacatcagagggctccatacctgcagggctcacactctatattaaagaccaagaggccattggtatagagggtgtgcttaggacattccaacccccctcccaaagaatgatattctacttatttaggattaagattattttgaggagcagatctcttagaatgatgtc

SEQ ID NO: 409414 - DNA, 485 bp, Homo sapiens
atgtgttgaaggagagagatgattggatcatggggtcagtttcccccatgctgtttttgtgatggtgagtgagttctcatgaaatttggtggttctatacgtgtctggaagttcctccttcactcttctctctcctgccaccttgtgaagaaggtgtctgcttgcccttcaccttttgtcatgattgtacgtttcctgaggcctccccatacatgtggaactgagaatcaattaaacctctttcctttataaattacccaggctcagatagtgtctttatagcagtgcaaaagtgggactaatacagctgcttagtgcagcttatgacgctctacatgagggctattttattaggaatgctggagaactcagcctgtgcaaaaaccaagcctsaatgtgtgggtaagacaggaaatcgagtggactgatgcttctggaagcagccctcaaccaatgatggtaggaagttagtggataatgcccct

SEQ ID NO: 409415 - DNA, 573 bp, Homo sapiens
tctgattcagaactcccttttctgccatcgtgtaatttccccatccatgaaacaattgaaattgaaattgcctgataattttttctcaagtctcaactgaacgtcatgaaattggtaactactaatttcattttagcactggaattgaacccacgacctgatgtgcagtaggcactcaggaaatttttattgtgtaaataactgataccaatgtaatccagagcttgatgaatggtcagaggtccccacattttgttgaatggatgggcaaaacaccaagttaaatggcaagtggaagaagcccagatgctgagggagaaccttctatttatctgctcattcatttattcargcattcattttttaaataagcatttgttgcatactgattgtgtgtaaggtccatggactccacctttgagcacgcccatcctgtgttattttgaggtgtgatagattctatgtcagaggtgagctcagaaaacataaaactaactcacctgggaatggaggcagcaaagtcttcccagaggagctggtacccccgaagtcctctgttctgtcctctcccca

SEQ ID NO: 409416 - DNA, 570 bp, Homo sapiens
tgagggaggtgtcattatcttttgctagagaacaggaaactaggggaccaggagacagagagaggcagacaacatccttggctgttattcttctgaacaagggacatggcagtatggatcttcagcaagctgccgcctttgcctcatgtcctgactactccaacttctccagtcgggttccacaggccctggggacagccatactggcctctcccacctgtcacttgggcggctgcctggaagccttcrctctggagcttcatgggtttgtcaggaagaaactgtgtttaaaaactatatgaaggacaacaccagcgccatttgggaaaaaaaatctcggtttgagtaatttgaaccaaaataaataaaagagaaaatttaaaaatttaagtggtgacagtgttggggatgggagtgggagtgaggagtgaaatgcataaaataattcctgaaactttactctgccctggcagggacgaccccgtgggaagccaaaataagccaggcgcatctcccagttcctgttgtccagtgagtctggtgttgctcaaccctctaccaaaaagcatg

SEQ ID NO: 409417 - DNA, 613 bp, Homo sapiens
tcttctgcctttaggggaggggcacagtcagaagagagtcagggcagaatcctttagagcacagggaccstgttaaccaggactaagagtggcactgcccaacatggctggacccatgtgcatgcccccagagcccgtcactgtctgcaaattttgccgtgggtgctttccaacacatacagtgtatccactctctgaggccttagccatgctcagctcctgccattaccttttcctctgggagcaaattctgcaagaaactcaatctgctgtgtgcagaattatgggttattcttggctccagccttaccctcacccttggtgcaaacacagacatccacacagagcagaccaggctttgcaggagtgccatggggtttggagttatgctggggaaactgacctcttgtttctccctctctggggctggaaacctcccagcaccaaggaggaaaaacaaaagtattcagaagcagatttgagggaaactcacctcattgttctctggtttcccccaaagatacggcttgtcaggcacccctgaaaaggtctccctgattcccttcccaggccagagtacagctggtgttgttgaggtgatccctgcatacac

SEQ ID NO: 409418 - DNA, 530 bp, Homo sapiens
gcagaaggcgaaagggaagcaggtaccttcttcacaaagtggcaggaaggagaaagcaaacaagcaaagtggggaagagctccttataaaaccaacagatctcttgagaacttactcactatcaggagaacagcatgggggaaaccacctccataatccaaayacctcccaccaggtcccgcccttaacacttagtgattatggggattacaatttgagatgagatttgggtggggacacagagccaaaccgtatcaccacccaaagatatcaaccgttagaatgctaccacttctaggtttctatgttttctttttaattttgcaatgcatattttcataagtcattatctttttttctttcaagattggatagtctttcataaagatagcatctctgtttctgattattaaacattacactcatccccactaacaatgacaaaacatccattaaaatgatgtgatactatttggggccctacaatattaacagcaaacacttaaattctttatattactatattgagt

SEQ ID NO: 409419 - DNA, 584 bp, Homo sapiens
ctctacaaacagtaccaaaaaaaaaaaaaaaaattagccaggcatggtgrtgtattcctgtagtctcagctacccaggaggctgaggagggaggattacttgagcctgggaggtcgaggctgcagtgagctgagatcctgctactgccctccaccctggacaacagagtgagacccagtctccaaaaaaaaaagaaaagaaatttttggagggcaatttgggagaatttataaaaaatgtatacatttgtttcacctagcaactttgcattttagattcaacatctagatcatagatatccaccaaaaaatacacacacactgtcaaggttcactgcagcatagtctgtatagggaaactttgaataattaaattagtgaatatatgccatgaaaaattgatggctaaatcttgacaaacgtatcaaaacaaagaactcaggtataaagaaaaggactgatgctcagtgctgtgcccatttaaaaacaaaattaagattaaagaactgtgctaagagtagatattaagtgttctcacttcaaataaaagataagtatgtgaggtaacacatatgttaataatta

SEQ ID NO: 409420 - DNA, 516 bp, Homo sapiens
cttgtgttccaaataagaaacaataaagagacttactgcattgcctcttagaatggcaaaggttaagatacgttttactacccagtgatattaaatatctaaagaaataaacaccttcaaagatgaatggtggatatgcaaattgggacaaatctttcttttttttttttcttttctgtttttctttttttgagacagagtttcgctcttgttgcccaggctggagtgcaatgagtgatcttggcttattgcaacctccactttctgggttcaagtaattcccctgcctcagcatcccaagtcactgggattacaggcacccgcyaccacacctagctaatttttgttatttatttatttagagacacagtctgtctctgtcgcccaggctggagtacagtgacctgatctcggctcaatgcaacctccgcctcccgggttcaagcgattctcctgcctcagcctcctgagtagctgggattacaggcgctggccactgcacccagctaattttta

SEQ ID NO: 409421 - DNA, 599 bp, Homo sapiens
tttgttcacatgaggatctagatctttatccacactrtgcatttaattgtttgtccctgaagtcttttttatcctagagtagtgttctttttcagacatatagtttttaggatgaaaacatcttcaagtcaaagtgggacttttatatactgattaagggaaacataggtcaagatgctgtaaagatcattaactatatactcacaaccttataaaaactgacagaactctgaggagttagtgatcactgataattgcctaattagatattttaacatacccttttcagaatttgcaaccacagaaatacagaaagtaaacaaaaatatgtaaatattgaatacaaaaattataatggacatctagaaagctgaacactgaacaaatagaaagtagatattatttttaagtagatatggagcagaaaagtcatctatgtcccagatacacagaaagctacaataaaaatctaagaatctataccatatatctcatgttccttaaagataagttagtgctatcatatatcaatgacaaaagaaccacagatttatatattagataatagaagaaaaaaactcataaagaaaattatgaaa

SEQ ID NO: 409422 - DNA, 547 bp, Homo sapiens
aattaatcataaaaataaaaaatgataaaggaattgcatgaactactgataatatgtgtggcgacttgaggaatatgatgaactcaacttcacaaagctgaagtcccaaaatactgagataaaatggagccttaaaaaatcagaaacatcccttgctgattcatattcaaattcataaagcatcccttataaccatgactttgtatgacattcaactttgctggactccatttgctgtcctggtaaaatgagaatcataacatctctaagatacacaatggggatataactacctaggagctactgaaacatggaagcaagctgccctaggaagcaaagtgggcctctccttccctgcttttctctaatcaygaaagctgagcctgcagtgaagatgacagaggaataaaatgccctccttaggagaatgatgcagaagatggcttaggattttgaaatctgaagctataactcattacagaaatgcaaaaccttgcttatttgaagatgatccattaggcctgattggatggatctggtgagccct

SEQ ID NO: 409423 - DNA, 550 bp, Homo sapiens
gaccctgttaaccaggactaagagtggcactgcccaacatggctggacccatgtgcatgcccccagagcccgtcactgtctgcaaattttgccgtgggtgctttccaacacatacagtgtatccactctctgaggccttagccatgctcagctcctgccattaccttttcctctgggagcaaattctgcaagaaactcaatctgctgtgtgcagaattatgggttattcttggctccagccttaccctcacccttggtgcaaacacagacatccacacagagcagwccaggctttgcaggagtgccatggggtttggagttatgctggggaaactgacctcttgtttctccctctctggggctggaaacctcccagcaccaaggaggaaaaacaaaagtattcagaagcagatttgagggaaactcacctcattgttctctggtttcccccaaagatacggcttgtcaggcacccctgaaaaggtctccctgattcccttcccaggccagagtacagctggtgttgttgaggtgatccctgcatacactt

SEQ ID NO: 409424 - DNA, 589 bp, Homo sapiens
agatatataaaatcattttgcatctcctaatggaataacagaagtaggcaatacttagcaatgactgataaaataattcaatgaaaatttgattgtaaacttcataatagatgagtcagacttttaccaaccagacagtaggtatttggtatttctgatgtaatcaaccagtaatatataataccacctatgaattactcttgtcaaaaaataaattaagcttgggactagtcaagtttcacattcagactttggatcctgataaatagacgggacaaaggaaacaagaatgcaatcaacctagtccagaatgcagaaaatttagaataaatgacttggttccttataaatgcatgacattaaagagaggaagaggaaagaaaattattactgattaaaagagrcttaactgacatattaactaaataccacatgtgattattttatagattctgactcaaataaataaaccatagaaaggcattttagattaaaaaacatatttgagtattaaatgagagcaaaatagagggcagttagaactctcatacatggctcatagaaatgcaaaatggttgtggaagacagt

SEQ ID NO: 409425 - DNA, 552 bp, Homo sapiens
tcggttcacagcatgggagcatctgtgctataccaagattactcataggataaaattagacctccagacccacgcaaatactaatctgctttctgtctccatgaatttgcttttcctgagcactgcatataaatggtatcatactatatgaagtcatttgctattagcttctttcactcagcataaggttttagagattcatccatgttgtagtatgcatcaattttttttttttttttttttttttggctgagcagtattccatggttggatatactaaaccaaccacattttatgaatccattgaccagctgatggacatttggattgtttttaaaaatgtatttataattatgcaattttaattatatttgaaaaacactagtatttttatatatgcrtatgtgacccagaatataaagatttcttcaaatatgtaaatgctgcaaaacagattccctatctgtctatctatctatctgatctttccacattttcaggaaaatctcaatggtttagaattctttaacttggaagccatatggttattta

SEQ ID NO: 409426 - DNA, 572 bp, Homo sapiens
ctaatcacctttaatgtgcactttagaagctgactttaaagcaggcgagataagcagrtcagacaaacagacaaagaaaacaaaataaaatcatataattgtctctaggcagctgattttggatgaggaggaggcgatgcgctggattaagaatttactagggcagagtcgtccaggcttccgtgagtgcttttgtttcaataactagcagaccctcaatccccaacccactgcccagggggtcccagaattctgttcctgagagttaacttggtagagtggagagcaaacgttagcatgggagtcagcaaagtccagctccgccgtcttgctagctgggaggcaagtctctttctttgcccaaggctcagttttctcctgggtaataagtccttcatgtcctttgaagggttattgtggggatctaaacgcagaggaagagatagagagacagaaagacaaaaagagataggaaggaggagaagggggaggtggaggagggggagcaggagaaggagaaaggagaaaaaaggagagaagaaagaggagaaggaggaggaagagaaagaata

SEQ ID NO: 409427 - DNA, 571 bp, Homo sapiens
cctttgcagggacatagatgaagctgaaagccattatcctcagcaaactaacgcaggaacagaaaatcaaacgccacgttctcacttataagtgggagctgaacaatgagaacacatggacacagggaagggaacaatacatgctggggactgtcgggggaggatggggtggggtgagagcattaggaaaaagagctaatgcatgctgggcttaacacctaagtgatgggttgataggtgcagcaaaccaccatggcgaacgtttgcctatgtaacaaacccacacatcctgaacatgtaccccggaacttaaaaaataaaattagataaataaataaataaaacrtactatggtttaagaagatccttttcaaacagctggggacactggtcactcaagtgactttcccggtgtctcacacaaatcctcagtggtggttatgtgggtgttgattttgcagtaggtcattgagctacacattttctgaatatatgtatttataatttttaaagaatattttttatagtttaaaagaagatttaaaaaaaaaatcaaagagaccaggtattc

SEQ ID NO: 409428 - DNA, 527 bp, Homo sapiens
ccaacgctgacctcgagaaggagagctgcctgaccccgcctggccggcgctcgccttcctgacatctcccctccaccccctactcatcacccctactctcaacgactctggggtgaaggcagggtgaaggtgcattgggatgggggccgagatcaaagatgctaagaaatcgctgcgggccctcaccccccacccagtggggccaccagacgtcccctgctccaggtgtacacaaggcagtgcccagttttattaaaataatcaaacagtcactggggactggctagggttttcatctccactggtctcctctccttgccctttccctctctgagatgtattttttttttttarggtgagttgaagaggtcaataaaagcacaaacacagtcagtaggtctcagtctgagcagacccagattgggacaccgaatattggtgcttggagtaaatgtcaggagtcctgttctgtttcccatccttacctcctgtacccccatcatactgatttttctagggttctgata

SEQ ID NO: 409429 - DNA, 527 bp, Homo sapiens
ccaacgctgacctcgagaaggagagctgcctgaccccgcctggccggcgctcgccttcctgacatctcccctccaccccctactcatcacccctactctcaacgactctggggtgaaggcagggtgaaggtgcattgggatgggggccgagatcaaagatgctaagaaatcgctgcgggccctcaccccccacccagtggggccaccagacgtcccctgctccaggtgtacacaaggcagtgcccagttttattaaaataatcaaacagtcactggggactggctagggttttcatctccactggtctcctctccttgccctttccctctctgagatgtattttttttttttagggtgagttgaagaggtcaataaaagcacaaacacagtcagtaggtctcagtctgagcagacccagattgggacaccgaatattggtgcttggagtaaatgtcargagtcctgttctgtttcccatccttacctcctgtacccccatcatactgatttttctagggttctgata

SEQ ID NO: 409430 - DNA, 619 bp, Homo sapiens
ccctgcctcgggagttagccattctggaggagaaacagacagtaagcaagttaaaatatatatattatgtaaatatattatatatgtcttatttatttatataaaatagatatttcttatttatatataaatatattttagttatataaaatatatttcttatttatttatataaaatatattatatatttcttttttttttwaattttgttagtatttattgatcatttttgggtgtttctccgagagggggatttggcagggtcataggacaatagtggagggaaggtcagcagataaacatgtgaacaaaggtctctggttttcccaggcagaggaccctgcggccttccgcagtgtttgtgtccctgggtacttgagattacggagtggtgatgactcttaacgagtatgctgccttcaagcatctgtttaactaagcacatcttgctccgcccttaatccatttaaccctgagtggacacagcacatgtttcagagagcacggggttgggggtaaggttatagattaacagcatcccaaggcagaaaaatttttcttagtacagaacaaaatggagtctcctatgtctactcctttctacacagacacagtaac

SEQ ID NO: 409431 - DNA, 608 bp, Homo sapiens
aacataagtctcttcacctttctcagcctcagtttctcaatccatataatgggtttcataagaatgtcggcttcaggtggttgttggagaggaaaaataatacaatacaktacagtcatatgccacataaagacatttaggtcaatgatgggccacatatacaacagtggtctcataagattataatgctgtatttttactgtactttttctatgtttagttgcacaaatgccactgtgttatgattatttatagtattcggtacagaaacatgctgttcaggttggtagcctggtagcaataggctataccatacagcctaggtgtgtagtaggctgtaccatgtaggagtttacactacaaccaaattgcctagcaatgcatttctcacaacatatcactgttgtcaagggatatatgactgtatatgtaaaacatctggcacaggtttggagtaggtcttgagtgcactgtgctgaagaacgctgatcctctcgagacaagcagaggcaggcttcaccagagtcccagcccacggtggggagaggaggcaggagaaggattcagcagccatatgtgtaattgatctcttggaaaacattaatacc

SEQ ID NO: 409432 - DNA, 613 bp, Homo sapiens
aaaaaaaaaaagaaagaaagaaagaaagaaattttgaggttccagttgcaaacattcagcctgactttaatttccagggttgactatttaaagcatcagaaatagagtggtgcttctggcttcaaaattgtggaaactggagctgacaagaattccaagactaggtttacactgaagcaatttcctggttcatctaaatcacacagacctgggtttagtaaggccaagtgagtggaagccccttctgaaatctatggcaggtttttctgtagcacaagtcatgcaatagtggacagcatccatttcctcctctggtgacagcatcctgagtttcccttcctagctctcattacccagtagatggccaattagcatattctatcctccagctgcaatgattggttcagctgtaggcatgtgtttaaattctatccaatcagaggttatcgtggaacatctgctagaaatgtggggaagagaaggcctctctactggccttagagtgttaaggrtggaaagcttagtgatactggccaccatcttgttaccagaaggggacagtttgcccaaacacgcaagtgatgtgacatccctaaggctcagtatttttcat

SEQ ID NO: 409433 - DNA, 571 bp, Homo sapiens
ccactgttttcatagtgattaaaccatcacgcatcactttatgtgaaaaatggtaagtaacaccacatgcctcaccatgccaactgcatgcatagctcattgggaataaagtatatagaaatgggtatataacaataattataaaatgtttttgaaattcacaaaaccttataaaaaatctagttggtagttggatgaaagatgtgaaggggtatgaggtagtgaggtgggaaagttaatgacaatttccaagagagagaagctgaaaacagattctgagatgaacgttttctcaagcctgataagccatttgaagcatcagacaacawtaactgcatcttgaagcatgaatctgggtcagaagctctgcagaattcattgctcagtacccaagtgacagaaccattcataccccaaaccttagcctcatgcaatatacccaggtaacaagcttacatatgtaccccctgaatctaaaataaaagttgaattgagtacatatggacacaaaaaggggaacaatagacaccagggcttacttgagggtggagggtcagaggagagtgaggat

SEQ ID NO: 409434 - DNA, 601 bp, Homo sapiens
ccccttcttgcacaatacatgtctgtgaaattttcactgcatttgcatttaagaacatttgaggacaatggaagtgtgaatggatttggagagggaatgccacctgctctagaagaagccgccttgggatctgcatttctgtayctcgaattgcccttcagagcagcttcttccttgcccggctcatatcccccagaatgaactaactacactgccatccaaaaacagctgttttttagccagtaacaacccaggcatgtactctgtgtaccagagcgttttcaataagccacagatccttaggctgagaaagaagccactggaggttcagagccaggcacgggggatgaggcagacagaaaacataagacgagaaactgggaaacagggaatgtcctgatgctgcctaaaattccaggaaaaaaaagacacacagtggttagaggaatgggtgctgcagcctgagaaccgtggagaggaaacgatgctggttggttccccattcatagcctttggtatctctagggtatttgtttttggagaagaaacatctgtgagggtaaaacacttcctgagtgaagcaactgtgtaccacagaagt

SEQ ID NO: 409435 - DNA, 596 bp, Homo sapiens
acattgtttttaatgctttaaattacctctagaatacttataatacctaatacaatgtaaatgctatgtaaatagttgatataccatattgtttaggaaataatgacaggaagaagagcctgtatgtgttcagtacaggcactttttatattgttgttttgagtattttccatctgcagttggttgaatccctggattcagaacccgcagacagggggctgactgtatttaatacaaccattttccagaagatggcagtaaggtgtcttgttttaatgacagcatattatgacaaaattccaatgtggaagtaaggtgacttgagggaagggtgccttcttctaattgcataaagacacagtatgggtagtgaccctggctatgatcattttcacattcacagctgggcacactgaaaagtggagtgcctgacttacgttcacagaactggttagaaggtaagtcagccgtcaaacaagcccatagtctgggcttccacccactatactggrgctcctaggaggttgagaaacaatttggaatcacccaaatctgggtttaacctcttcctctcctgtttaaagctgttgtaaaaa

SEQ ID NO: 409436 - DNA, 524 bp, Homo sapiens
taaaacaaaaccaaatgctctcttctcccgctgcaccccctttccctgagtatctgtcaaagccagtggggaaatagaaaccagaatctccaaacaatacacttccccacagataataaataaaatctccaaagaaggagggaaaaagagcgaggagtcccacaaaggctagggggtaggggcggcttgggtgcaccgttgcacattctgcaatgagccaagcagctaccagcagacccggggtaaggaaccaattgagataaaaaaatggatgtccatattacatatgccgtgtgcacttaagagtgcggatgccaacagggaatgcaatccaratcaccccctttgctgttttgcacacagataaatacacatgttgcctcgtgtggagcagatgctcagtgaattcctatgcaatgcatcaaagtaccaatattcatttgcgaattttccaaatacacatgtttacgggcaatcttttctctcctctcacaaatatgggtccaacaagagcttttaaaaaa

SEQ ID NO: 409437 - DNA, 548 bp, Homo sapiens
atgttcactcactgcctgggggctgagtgtgtcctcagctcagaagctctgggagacctccgaggtgctgcaggtggaagccgtcagccgcctgcactccacgcagctgcgcggctagctccttcttgaagtttaatccaagccgtgtatctccacggttgccatatttgttgggtattcacttgctctaagcactatccatctcgccactcattaattttaaagatgattctgaaaggtacggtaggaaacagaggcacagtgaaaaaaatgagtaaattatcttgcccaagatgggaccgtgagtagcagagtccgttcagggccagccaggagawctgactcccatatccaagctctgaatttccacactaccccatggtatggtggatgtattgttttacgcatagaagacagtccggaaacacatccaccaaactctcacagtgaccaatctcagggtgaaggtgaagatttgagaggaactttccacgtggcagactttgatctaatttatatcttattgtacagcaagaatcattaacttt

SEQ ID NO: 409438 - DNA, 401 bp, Homo sapiens
attgttttacgcatagaagacagtccggaaacacatccaccaaactctcacagtgaccaatctcagggtgaaggtgaagatttgagaggaactttccacgtggcagactttgatctaatttatatcttattgtacagcaagaatcattaactttgtaataataaacaatataaagtgattgtggaaaaaacagaaaggttccaagtttggcaatctgccagttgtgggccacaggtgttgtcaggtgtaayggggacagaggagaaggtacctgagtcctttgttattgttgggagtctaagtcctgtgggtgcctggggaccaagactggtggaaggtgagcaggtgaggttgttactgtccactttctactccatttccaccgctaagtgctttgagca

SEQ ID NO: 409439 - DNA, 548 bp, Homo sapiens
aaaaatgcatgcttttgacaaatttattccacagattcatgcagtgactatttaatgtgtgcctgctccatgccaggcaccattcaaagaactggaaatatggcaataaacgaagagacaaaaatccctgctcttgtattgccattagtcaagctcattcaaatttaaccaaatttcaaactcactactgtgattcacgacagaaatgcaccttgattttcttcatgtttagctgaaaaaagtgcttcctaaccattttgaaaatctggcataaaagcagctaagagttttgaaggttgttgccctgggaacaagaagtgacaggggtggggcagagagctacctcctttctctttctcattctgacatttgtagccccaccctatttctgccttttaaaatcttacagatgtgttactttactaaattaaaaaaaaaattgctcccaggttttggcccccgcaaaaaaaaytttttttgaagggcagtcactgttgccagttggatccgtggccactgcccagatccccacaccatgctgtcagaga

SEQ ID NO: 409440 - DNA, 578 bp, Homo sapiens
agaatgaggatacactggacattgaaggatgaggagggcggagaagaattttattgagtgatgaaaatgatttttagcagagaggggacatggggttgttccccctacccaaaggcaggaaagttccccccgtgtggctgggtccagggccttttgtggacttagaatggggagtgtgtgctgattggtttgtgagtaygcaaaaaagttaaaagtgaagacactactcaaaggtaggcatgacagtgtagaaaaccaattaggaaagggtaggtgtatgtaaagtaagtgaagggtggggatcagtcaggggcaggtgctccaaacgggaagacaagttctcaaccctgtctggggatttaacttgcagcttggctttcaggcttttaactgtcttctgcttggaggtggggtttcacttggcacctgcccgtatctgcctcctgttgctatcaatagaatgataccagggtgagaaggagcttcctgtcctggataaaacaaagttccttgtacctgatcacgtcaacatgagtgaactcaccaagataattaaaaggtgcttacggctcaatgct

SEQ ID NO: 409441 - DNA, 607 bp, Homo sapiens
aagccaaactggaaagtttctgttaaatgaatgttctagataataccaacgtataaagcaatcattttataccagctatggtcaaacagggaccagagccttgacttttttttgcctcaacacagctctgcagaacccactcagtaccccatgtcctactgccattcctttggtttccagaacattgagatgtacaaatccaaaacaccacagtgtttcagagagaaatggcatgactctactggttgcaattgtaatggagttcaccttgttctggagtcatacagaagccatgttgtagacttagtgtcccacgcaatactcctaattacaatgaaaatctactgttaggtagaaggagaaattcctcacaatcaggcaacagcgcctactagtgggaagaaactgatacttgaggtagggcacctgggagatagctctgtgcatcttgagagagtgctacactgagagcccaaaggctctcaggtctcatctctcctgacagcttgctatgacatcttaatcaatgaattgcctctctcttaccctttgttatwgagtctgtaaatgaagagtttggaatggctactttctaaattttctacac

SEQ ID NO: 409442 - DNA, 522 bp, Homo sapiens
taatagtgtcttttgaagtacaaaagtttttaattttaatgaggttaaatttatcatgctttttttatggccctagctgttatggttatgtctaagaactctttgcccacaccaagaacacgagaactttctccttttattctagaagttttatagttttagctggtacattatgtctgtggtccattttgagctaaattttgtgtgtggtgtgaggtaatgatctaaatttayttattaaaatatgaatatccacttgtcccagtaccacctgttgaaaagactatcttttcactcttatattgttttaatacctttgtcaaaaatcataagtgattattacaaacccttaattctgttccatttatctgtatgcctatctttacacaaataccacactgtatccattattatagtattacaaaatgttttgaaattgagtagtaaaaattttctaaatttgttcttcctttttcaaaattattttgtttattctagatcttttgcatttctttacaaatt

SEQ ID NO: 409443 - DNA, 522 bp, Homo sapiens
taatagtgtcttttgaagtacaaaagtttttaattttaatgaggttaaatttatcatgctttttttatggccctagctgttatggttatgtctaagaactctttgcccacaccaagaacacgagaactttctccttttattctagaagttttatagttttagctggtacattatgtctgtggtccattttgagctaaattttgtgtgtggtgtgaggtaatgatctaaatttacttattaaaatatgaatatccacttgtcccagtaccacctgttgaaaakactatcttttcactcttatattgttttaatacctttgtcaaaaatcataagtgattattacaaacccttaattctgttccatttatctgtatgcctatctttacacaaataccacactgtatccattattatagtattacaaaatgttttgaaattgagtagtaaaaattttctaaatttgttcttcctttttcaaaattattttgtttattctagatcttttgcatttctttacaaatt

SEQ ID NO: 409444 - DNA, 522 bp, Homo sapiens
taatagtgtcttttgaagtacaaaagtttttaattttaatgaggttaaatttatcatgctttttttatggccctagctgttatggttatgtctaagaactctttgcccacaccaagaacacgagaactttctccttttattctagaagttttatagttttagctggtacattatgtctgtggtccattttgagctaaattttgtgtgtggtgtgaggtaatgatctaaatttacttattaaaatatgaatatccacttgtcccagtaccacctgttgaaaagactatcttttcactcttatattgttttaatacctttgtcaaaaatcatawgtgattattacaaacccttaattctgttccatttatctgtatgcctatctttacacaaataccacactgtatccattattatagtattacaaaatgttttgaaattgagtagtaaaaattttctaaatttgttcttcctttttcaaaattattttgtttattctagatcttttgcatttctttacaaatt

SEQ ID NO: 409445 - DNA, 522 bp, Homo sapiens
taatagtgtcttttgaagtacaaaagtttttaattttaatgaggttaaatttatcatgctttttttatggccctagctgttatggttatgtctaagaactctttgcccacaccaagaacacgagaactttctccttttattctagaagttttatagttttagctggtacattatgtctgtggtccattttgagctaaattttgtgtgtggtgtgaggtaatgatctaaatttacttattaaaatatgaatatccacttgtcccagtaccacctgttgaaaagactatcttttcactcttatattgttttaatacctttgtcaaaaatcataagtgattattacaaacycttaattctgttccatttatctgtatgcctatctttacacaaataccacactgtatccattattatagtattacaaaatgttttgaaattgagtagtaaaaattttctaaatttgttcttcctttttcaaaattattttgtttattctagatcttttgcatttctttacaaatt

SEQ ID NO: 409446 - DNA, 566 bp, Homo sapiens
atattgccatttccttcacgtaagtcagcagtgactttggagracaaattttctgatacataaaaaactggaaaagcactccattcttagttttaaatcttctaaaccgagaatatatctgtaagagaaaccattagtgtccaccaaatacccattatctcctttctgtttcctacttgcttttagttagggtgggtccatgtgactagttttccagtaaatggactatatgaagaagtgacatgtgttctttcagatgaagaaaattaagaaccagtgtggttctgacatttttctccacccctgctacagggattttgtgtattccagatgatatattaaggccaatataatatagcataatgtagtttaatatagtataatataatgtcattatataatatacaaaattatagtcaatatattatatagaatacataatactacatatttataatattaattgtatatattttatatgttatatgcagttacacataatttaatatataatcatgttatgtaatagccaaataagactgactgattcacattgaaacatgatt

SEQ ID NO: 409447 - DNA, 533 bp, Homo sapiens
taaagcaatcaaatgtgtaaacatttgagtttggtgctggcagtggcagaatgtgagcgaattgtcctagcctactgtgaagaagtaaacgttggtcccaatataaccaattggcatagcacatacctatatttgtggacatacacacacatccaggatgcaaattgccatcctgatatcctgcactcattatttttcatttgttgcccagatccattctctgtattctctgtcttcttttgtcccccaggaagatgaccactctccagagtacactccaggcttccttatcctctggcttctgtgtgtcactagctggagatcaggggtgagaggacagaaaggttgggatattgattctttctgctccttactgcctcactgttcctggcagtggctgcattctgttcagagctgttgtctctgcagcatctccatgacygctccattccttttcccttccagaatagtggtgtctctggcattctgctcttgctaatccctcagtgtctcactctcttatgttgattccc

SEQ ID NO: 409448 - DNA, 526 bp, Homo sapiens
cactgcacccagcctgattaactttaactgtataaatggtcacaccttcccttcagcagaaaatagattttctaagagttagatgtatcctttcatgctacaaggagtacttactcratttctgctcaaaaaagtattaacaactctatttcatttgacttttatgtgctagtctagtattcagttcactgtttgcaacaacatatatcaattcacaataacaggcagttaaatatgattgactataggaagcactgttctgatgttctatagctttcctataaatatttatttgtggtaattctgctccatttctccatacagttctaaaaatttctttaaaattatattattaaacttaaaatactcagacatggaattcctactggaattgcagacataaggaactaacatttctagttccttccaataaatctgtgacagcacttcaaaatataacagctcattgaaattggctcccaggaagaaaagttgataatcagctagaagaatgaagcctttggca

SEQ ID NO: 409449 - DNA, 507 bp, Homo sapiens
tctgtttaccaccagtagtaagtgctatatttttggaaacactgatttaaatggtttctactcccttctcccatgtcaaatactagcttaaccaagctatcaatcaatcaattccaaactaagggtccactctccataattctggccctacccctgcccaagtcaataggcttattaactttctgaggcccagggtatagtaggaccaggcacacccctcactgcttacttcctaaaattattggatccaaatttatctcaaaggcttcacatctttcttgtcaatgtcacacttacttccactcaagtcaaggaccattaataaccccagggaaaagacttcatatggaaaatccattcatttcatttttaggagacaaatgtcagtttcagacttaattttctttactttsatatattgagttccaaaaaataagacctttttccccttgactaactcaattacttacagagacatttcatttttgaaaggatgttaaacttttt

SEQ ID NO: 409450 - DNA, 630 bp, Homo sapiens
agaattgataatggaagtagtcataaaaacaagcaatgaccacatgaccagttacagacatgargactgaaattgtccttatgagtgtttctacttcttttgttatgaatatgtttgtgtgtatgaatatgcatgtatacataaacatggacatatatacacacacatacatatatactaaacatctttattttcttctgtctcttattcctttatcatgtaacataagttgaattgactttatgtcatagtatttaagtatttttgatacattaatataagtatacattatattaatgtatttaagttatgcaataccaggagaaaaataaacatcactcaaggactttacctcctcttctggggaagaggttagcacgcttttggttgtacacatgatagttgtatcatgtaaattgaattataaccttgttattatctatatttggagattaactatgtttaaggagatccctatgggtgccatattgacaacgagtgaacttgtgatgatttattttatgtgtcaacttggctaggccacaggcttcccagatatttggttaaacatgtttctaggtgtgtcagtttctggatgagattaacattagaattggcaaactggtaaac

SEQ ID NO: 409451 - DNA, 630 bp, Homo sapiens
agaattgataatggaagtagtcataaaaacaagcaatgaccacatgaccagttacagacatgaggactgaaattgtccttatgagtgtttctayttcttttgttatgaatatgtttgtgtgtatgaatatgcatgtatacataaacatggacatatatacacacacatacatatatactaaacatctttattttcttctgtctcttattcctttatcatgtaacataagttgaattgactttatgtcatagtatttaagtatttttgatacattaatataagtatacattatattaatgtatttaagttatgcaataccaggagaaaaataaacatcactcaaggactttacctcctcttctggggaagaggttagcacgcttttggttgtacacatgatagttgtatcatgtaaattgaattataaccttgttattatctatatttggagattaactatgtttaaggagatccctatgggtgccatattgacaacgagtgaacttgtgatgatttattttatgtgtcaacttggctaggccacaggcttcccagatatttggttaaacatgtttctaggtgtgtcagtttctggatgagattaacattagaattggcaaactggtaaac

SEQ ID NO: 409452 - DNA, 630 bp, Homo sapiens
agaattgataatggaagtagtcataaaaacaagcaatgaccacatgaccagttacagacatgaggactgaaattgtccttatgagtgtttctacttcttttgttatgaatatgtttgtgtgtatgaatatgcatgtatacataaacatggacatatatacacacacatacatatatactaaacatctttattttcttctgtctcttattcctttatcatgtaacataagttgaattgactttatgtcatagtatttaagtatttttgatacattaatataagtatacattatattaatgtatttaagttatgcaataccaggagaaaaataaacatcactcaaggactttacctcctcttctggggaagaggttagcrcgcttttggttgtacacatgatagttgtatcatgtaaattgaattataaccttgttattatctatatttggagattaactatgtttaaggagatccctatgggtgccatattgacaacgagtgaacttgtgatgatttattttatgtgtcaacttggctaggccacaggcttcccagatatttggttaaacatgtttctaggtgtgtcagtttctggatgagattaacattagaattggcaaactggtaaac

SEQ ID NO: 409453 - DNA, 633 bp, Homo sapiens
ctggcttgggagcccaaccatggaccacctagtgaaagatgttacttaggccatagacttggctcactaacgggcatgcattacaatttggtcaagtgaccaaattggcatgaagttaggtttcatgggagttctgggaaagacattttctcatttcaaaaagaaagccaccccaaatggccttttttcctctgaattttctttgtgcattttaagtcctaaagctcttgtagccatgtcagtacttgtatgaggaagaagccagctyaggcaggaaggcaaaatataaagaatcccaaagaaggagagccaccaattcaaccatatctgaccactgacaaacatctacactttctcaattttgttatccaatgtatttcttcattttgaaggaaatttgagttgggatttctaccacttgttactaaaagttttctagctaagacattcattcaattgattcaacaattgcatattttgtgcttactaacaactagactctgctttaggcattggagctgctgcaatgaccccaaaagaccaaaagtgacaagcagagttatgtgtttaattttcagatcatctctaagagctagatgtaagtgtcaaatgctgatagaattctcagctgag

SEQ ID NO: 409454 - DNA, 621 bp, Homo sapiens
actcagactacatactcccaagataatgcaagcagtttctcctactggcaattgcatctgaagagagttttcctttatgagcagycagcattttatcaggtgaccacaaagaagttgacatctgtcctgacgcaaagacttggcttcatcctttttatgtacctcatatggacatacttttgttacaccccaaagaatgagagtggccactggtacctaggaggtcctcacatctactgtgtatcgatagttgggagaacaaaacaaaaacttgtcaagattctccctgagggaggagactgataaacatatcccattacagatgttacagagggaatgatataagcataaatagagccaaataggaaagaaaaagaaagggtcatttatgtttctaggacaagaaaagaaattgtgtctttgagtaggtgacactgggcaccagtttagaaagatgactgagtagaagacttccaggtggagggttcaacaaggaaagcatagcatccggggaagcagaagagcaaaagttgttaagacataaaactcaaagaaaatgcaatatagaaacagtaattaatcacatcaaatgcataggaatctttctaagagtttactgga

SEQ ID NO: 409455 - DNA, 485 bp, Homo sapiens
aggctcagttcacatggaccctgctcgaactcagtgcaaaagatacgagagaaagaacagtatgtaagtctctctaagaacgacaaggcactttatcaatacattatagaacatgcagggaattttcctcattttggttttgtcaaagagaaagtagagaagagaatacatgttacagagagggtgacggtgtcaatatgaataccaccaagagcaggagttcrcagcaacttagaatgccagtgaacatcatggcagaaacctggcacccatacacacagcaatggggcaggaagagaaacactggttctacagaaattcaacaacaacttctcactgacaagagcagaacaatctttaattcttgaatgaaatacagcctcaaacacattttgacaaaatataatctatccacttcccaatccaatctcttatagaaatatgttttggaaagtacaatggaagtcaaataaaaagaatatttt

SEQ ID NO: 409456 - DNA, 585 bp, Homo sapiens
tctcttccacctttccctgccatcttctatgccccagcactttaactaaattcccaaatatgtaggctcattagtaccacatgtcccagaaaagagatagataacagaatagagattaaatttatatgttggtgtgtaggctcacactattagcattagttaaataatagtcctgaaatacggacactttcagaatgctgagaaaaaaaagaacattcagattaactatttttttactgcctggcaattgcagtatttttttactgtacaataaagttactgtamtagttcacacaagtgtccatttttaagtttgctaatgcatacggtttgtaaagtagcttatatggaaattttaaccatgacttgaattggtgcttaactgccttttcttttgtggataaaactatacccaggcttttcctcatgccactaattgagatttggctttttcaaataagtattatatgagctgacttaacatacatttcttcatgctgttctttttggcattctttcaagtgctgagctactaataatcattctcattatcagatgaagtctattcacttctcatgaaaggat

SEQ ID NO: 409457 - DNA, 562 bp, Homo sapiens
gatttttcaagtagtttggggaaaataacacaggcctaagaaccctgacctcctggctgcctgacactaacaaattcactgttcacaactaagaaacttcaccttctttttcctcagtaataaaatgaagctgttgtagagttaagtcaccaatgtcctcctgatgttaaaattctgtgattttaaatattcatgtttatagtaaaggagaagagtagtggcatcagctatacataattcattttaaattggttttgaatactctcagtgacttaagtttaagtaagagaggaaagattcagtttagcacaatgctaagaaaggttctgatttttcaggaaaagccttttggcaaaagaagactrttttttatctgtcacctatgattttcaataccttgaaaaatattatacataaactaagaccctgccccatgcttaaggtgtcctacagtgaggctctctttttctgtatgtatgcctgtgtaaaatgcgaacaccccctccttttctgacactgaataaataataagacagtaaatgcatacaactgccactctaat

SEQ ID NO: 409458 - DNA, 560 bp, Homo sapiens
acaatgtatattctgcagcagttgaagaaaagttctataaatatgttttaggcccatttggtctattgcatagattaagtccaatgtttccytgttgattttctgtctggattatctgtctaatgctgaaaatggggtgtttaagtctccagcagaaaggataatcactataggcttccattcagccatgttgctttgcctactctgtaatctagatcatattattttattcattccgccaatctatatctttttaaatggtacatttaatccacttacatttaaagttgatattgacatgttaggatttgtttttcataccactaatttttatttagttctttgccacttcatttttgtaattgttttataagatctgtaggttttatacttttatttgtttttatgatagcgagtattgtccttttgtttccatgtttagaacaaccttgaacatttcttgtagggccagtcaagtgatgatgaatttcctgagcattttcttttctgaaaaaggctgtatttctccttcatgtataaagcttattctagcagaatgc

SEQ ID NO: 409459 - DNA, 605 bp, Homo sapiens
tctttcttttttttttgtctcactggattcattcagaagaactgttttcaatttctgagattattgcttcttcttagtctagttgactattgaagttttcacctatagtttgtaattccttcaatgaatgtttcatttccaaaagttatgttggtttgtttgttttcaataaaaatacctgccttttggtaaatttctcattcatatcagaattaattttctgatgtctttgtatttgttttcaaatttgtcttggatgtcattgaccttctttaaaatcagtattttgacttctttatctagtattccaaaaattttattttggttagggtccaatgctagagagttagtgtgatccttttggggtgctgtaacaccctgttttcttatacttcctgatatagtttggatttttgttcccatccaaatctcatgtttaattgtaatccccagtgttggaagaggggctggtagaagttgattgaatcatgagggcagamctcttccttgctgaacacttgtgagtgagttctcacaagatctgattgtttaaaagtgtgtagcacctctatcttttctctctttctcctgcttcagctatgtaa

SEQ ID NO: 409460 - DNA, 568 bp, Homo sapiens
tacccatttgccattgattctgtaaataaagaataaacactaaaattttatagagattcctttgtcaattgtgaatgccttattttacctcttaaaacttttctgcactttaatttattttattttattttattttwtttttttttttgagacagagtttcactcttgttgcccaggctgaagctcaatggcacgatctcggctcaccgcaacctctacctgccgggttcaagcgattctcctgcctcagcctcctgagtagctgggattacaggagaatgccaccatgtccgactaatttttgtattattagtagagatggggtttcaccatgttggctaggctggtcttgaaatcctgatggtgatctgctcacctcggcctctcaaactgctgggattacaggtgtgagccaccatgcccggcctgcacttttaaaattgctacacaaactatttttttaagtttatatcatatcaattaatatgctgattttcttttcactaaatgatgctcatttaaaataaatggagttttatttcacactcaatttttggaagaaagcgaa

SEQ ID NO: 409461 - DNA, 568 bp, Homo sapiens
tacccatttgccattgattctgtaaataaagaataaacactaaaattttatagagattcctttgtcaattgtgaatgccttattttacctcttaaaacttttctgcactttaatttattttattttattttattttttttttttttttgrgacagagtttcactcttgttgcccaggctgaagctcaatggcacgatctcggctcaccgcaacctctacctgccgggttcaagcgattctcctgcctcagcctcctgagtagctgggattacaggagaatgccaccatgtccgactaatttttgtattattagtagagatggggtttcaccatgttggctaggctggtcttgaaatcctgatggtgatctgctcacctcggcctctcaaactgctgggattacaggtgtgagccaccatgcccggcctgcacttttaaaattgctacacaaactatttttttaagtttatatcatatcaattaatatgctgattttcttttcactaaatgatgctcatttaaaataaatggagttttatttcacactcaatttttggaagaaagcgaa

SEQ ID NO: 409462 - DNA, 573 bp, Homo sapiens
ctgagttgggaggatcccttgagcctggtaggtagaggttgcagtgagccaagatcacaccactgcactccagcctgggcgacagaggtgagactctgtctcaaaataaataaatatataaataaataaagtttatggcaataatcttgccccatatttgaagagaaaattatcctagccacaaaagaaaaagaagwtgtatagagggttggaaaattattgctcatatattgtacaatatgtattttagaatctttggaaaattcttatgtttcctgaatgtatgattcatcttaaacctctgattcctttgcatctgattccagactccaaagatattctttgcctaaagctgctggctgactctacagaacataataaatgcaggccataaaacacaactcaatattttagtcataaaatttgaaagacagcaaaaattattacctgaacttatccattatttcaaattcaagaagggtatgtagaagtacataaaattactaatggtggtatttttataatattacatttccaaggtaaagtatgctgctagtttcctgaaaatgtcag

SEQ ID NO: 409463 - DNA, 519 bp, Homo sapiens
cagatccaggcatcagaatgttttaaatcttccaagataatcccaacgtgcagccatattatatacaaagaggctactactaactttgaaatggcaaattttctttctctttccattttacatagctgatattccccaacatacaataaggatattatatattttcatatttactgcatgtatttgtctcaatttgctgtttgctttkatgactttgccatatatacacatatataggtatgtatgtagatgtatgcacacatatatgaacgaatatgaatatgaatgtatgaatatatgaatgtgtgtatatatgcctcatatacatatatgtatatataatacaaatgtgtgtacacacacatacataaatacatatacttcctttagttttcttttaatagtggaaggagtgagcagaattgcaactcaacagagctaatagcagcaggtattctgagtgaccccttgatactatgactcttacatctagaacgatagcgcaagttcattcatgga

SEQ ID NO: 409464 - DNA, 541 bp, Homo sapiens
tgtcatccaaatcatagaaaaaactcttaaagtcaacagcaatgaaacaaacaacctaattaaaaagggggcaaaagatctgaacagacatttcaccaaagaaggtatccagatggcaaataagcataagaaaaatgctcaacatcatatgtcatcaggaaattgcaaagtaaagcaacgagataccactacacacctattagaatggccaaaatctaacagtgacaaccccaaatgctggcaaggatgtggagcagcaggaactctcattcattgctgaaggggatgcaaaatggttcagccactgtggaagacagtttggcgggttcttacaaaagtaaacatatttttaccatatcatccaggaaccatgccccttgatatttactcaaatgagctgaaaacttatatccacacaaaaacttgcacatgaatgtttatggctgytttacaattgccaaaacttgcaggcaaccaagttgtcaaccaagattcattaggtgaatgtataaataactgtgacatattctgatagtagaat

SEQ ID NO: 409465 - DNA, 562 bp, Homo sapiens
atcttttatgtttctgtgttatcagttgtaaatttctcctttttgatctctgattttattgatttgacatttattctttttttcataatctagctaaaggtttgttaagcttttcaaaacaccagctcttcatttcattaatcttttgtatggtttttctcatctctatttcatttatttccactctgatctttattatttccttctttctactaaccttggttgagtctgttcttgtttttctaattccttaagatgcagtgttagaytgtttatttgaaagctttcttcttttttgatgtaggcaccatctttggccagtgggagtcccttctggttggttcctgtgtcctttggataaggtcccattattctttgatccctttgtttctggttcatatccagccccaggcctagaattaaatcacttctccaaggagctctcattccctttagtggaaagaagtgtttagagactaaaacccagaggctagaagtgctctttgctactggattctcatggtctctgaagggctttacaaaggacaggacaacttacaaa

SEQ ID NO: 409466 - DNA, 261 bp, Homo sapiens
aaataaaagtataacttaaagccaaagaccaggtagtattttcaaggagagaatatgcaaatacttccatagtcttctccttacaggctgcttagctacaaaccatatttaattaacagcagtcacaggagatsactagccaaagtgtctaggaaaatcactgccaagcagctttactgtaactgttttactggaaaagacctcaaagagcccatgttatttcacaatttcaattttggtttttcaaattacaagttaatc

SEQ ID NO: 409467 - DNA, 556 bp, Homo sapiens
accatattttattcttggcatttagcataatttgcaattctaagtttacagatggatggtccatttcccccacyggggcagggattgtatctgacttgctcatgttttatttttagtacctaacactgggccctgcatttcataagctttcaatgaactattgagtggataaaggtttaagtttcttgcttcatattctctcttacctagagagtgccagcctgacactggacactggagagtcctgactctgttatgcctctgtgctgcatggttttgtttctgtgacttcaagcagtttctctctaggggcgttgtgcaagagggacaggagctcgccagcaccttcagtgtttccgacctggcagctcctgcagaacccctgctgacacagcatgctccttactcacacccggcaccttttctaactgttgcccaccttccctcctaggcacaagtgacccctgacagtgacaagaacaagacatactctgtggagtatctgcccaaggtcaccgggctacacaaagtaagatgaagcagcatggctgtggct

SEQ ID NO: 409468 - DNA, 556 bp, Homo sapiens
accatattttattcttggcatttagcataatttgcaattctaagtttacagatggatggtccatttcccccaccggggcagggattgtatctgacttgctcatgttttatttttagtacctaacactgggccctgcatttcataagctttcaatgaactattgagtggataaaggtttaagtttcttgcttcatattctctcttacctagagagtgccagcctgacactggacactggagagtcctgactctgttatgcctctgtgctgcatggttttgtttctgtgacttcaagcagtttctctctaggggcgttgtgcaagagggacaggagctcgccagcaccttcagtgtttccgacctggcagctcctgcagaacccctgctgacacagcatgctccttactcacacccggcaccttttctaactgttgcccaccttccctcctaggcacaagtgacccctgacagygacaagaacaagacatactctgtggagtatctgcccaaggtcaccgggctacacaaagtaagatgaagcagcatggctgtggct

SEQ ID NO: 409469 - DNA, 562 bp, Homo sapiens
gggccaggtgggagtcccattcaggctgttaaacttggttccagggctccttattctagacaccttgtgtgtgccatcatgggagrgtaggagaggtgatcatcaatgtatgtggcttgatgtcagtcttgctgggcacagagaagtgattatgtatttctcacctatctgtcacctataggtcacagtcctctttgcaggacagcacatctccaagagcccatttgaagtgagtgttgacaaggcccagggagatgccagtaaagtcactgcaaaaggtccagggttggaagctgtagggaacatcgccaataagcccacctactttgacatctatacggcaggtaacgtgcctctcctccatggatctgacctttgcgctttcttccagaggctgaaatataatcctcggggacttgaaggcctgaccttttgtcttttaaatcaaataaataatcacaaagacaattttttcaaatgtgttatattagatttttcaaaaccagcttttcttctctaaaatactcaggcttcacttgaataagacatacttcttgaattg

SEQ ID NO: 409470 - DNA, 514 bp, Homo sapiens
gtgtttttagctttgaaataatctcccaggctttgaggggagaggtcccatactctggggcagcccacttggtttttatgtatggtttatgttttgttcagtgtggctgcctctctgttcttgtccttttgattctcattttgggcctaggattgtgttggaaagattatctccttccttcccacagagggtctggaggagctggtgaagcagaaagactttctggatggggtctacgcattcgagtattaccccagcaccccggggagatacagcattgccatcacatgggggggacaccacattccaaagaggtgaggctcctgctgcagaggggtcttctctggagggtrctcggcccagggcggactcatgggtagttgcttcccgggctgcaggagggaaagagatctgctttgttgaaaactttttttttttttttttcggagcagcacagacatttggcctgttctcaaaagcagcagaaagttgctgtggttttagctgacttgct

SEQ ID NO: 409471 - DNA, 514 bp, Homo sapiens
gtgtttttagctttgaaataatctcccaggctttgaggggagaggtcccatactctggggcagcccacttggtttttatgtatggtttatgttttgttcagtgtggctgcctctctgttcttgtccttttgattctcattttgggcctaggattgtgttggaaagattatctccttccttcccacagagggtctggaggagctggtgaagcagaaagactttctggatggggtctacgcattcgagtattaccccagcaccccggggagatacagcattgccatcacatgggggggacaccacattccaaagaggtgaggctcctgctgcagaggggtcttctctggagggtgctcggcccagggcggactcatgggtrgttgcttcccgggctgcaggagggaaagagatctgctttgttgaaaactttttttttttttttttcggagcagcacagacatttggcctgttctcaaaagcagcagaaagttgctgtggttttagctgacttgct

SEQ ID NO: 409472 - DNA, 620 bp, Homo sapiens
gctccttcttggtgatgaccctctagcatccttggcctgacaagaatggcctagcaaagcctgggtgtggaaagactggctgggtgaggagctagcccccgggtggctggggtctcatggcttttgcctgcctccacctcttcctcttccatctccacctaatccatgtggggctgctggctcgccccacagcaagatccactgagagggtaggcaggctaygctggcttggccgatagcaaactccctctccagaccatggtgactggttcagggatggcaggtgactcaaaacaaaccaatcaggattttctctgagacttctcagccagagactctttccactagggccagagctggtgagatgtgaacttggggagtctagtggacaccttggtagccgtggaagaagcaacatccaagctgactgatcagtgctgaaagggcagagtcctgctgatacgtggctcagcgacacgagccagaaacttcccttttttggaattgctttgctgtcttgactaatagggtctctcccactgggctgggaatttcctgttcttttctcttatcccggagcaccacgccctgctccccatttaagagcctggaagaggagc

SEQ ID NO: 409473 - DNA, 620 bp, Homo sapiens
gctccttcttggtgatgaccctctagcatccttggcctgacaagaatggcctagcaaagcctgggtgtggaaagactggctgggtgaggagctagcccccgggtggctggggtctcatggcttttgcctgcctccacctcttcctcttccatctccacctaatccatgtggggctgctggctcgccccacagcaagatccactgagagggtaggcaggctatgctggcttggccgatagcaaactccctctccagaccatggtgactggttcagggatggcaggtgactcaaaacaaaccaatcaggattttctctgagacttctcagccagagactctttccactagggccagagctggtgagatgtgaacttggggagtctagtggacaccttggtagccgtggaagaagcaacatccaagctgactgatcagtgctgaaagggcagagtcctgctgatacgtggctcagcgacacgagccagaaacttcccttttttggaattgctttgctgtcttgactaatagggtctctcccactgggctgggratttcctgttcttttctcttatcccggagcaccacgccctgctccccatttaagagcctggaagaggagc

SEQ ID NO: 409474 - DNA, 472 bp, Homo sapiens
ggttgctaagtctcttaagtctcatttaatctccggctgtctctccaycacttccttttcctagctaccaatctgttaaagacactaggtcatttgttactatactctggatttctattcatttcccaataatttagtttaagaaaaaatggccgtagactgttatataataagataatctttctgcctaaaaagaaaggtaaaaattataaagaactacaaataaattttaaaaggtagccttcccacactgctcagtaagaaatgcaaagcaaagaagatacacagtttaactcagcatagaaaaaaggctagaaataaatacctgaaactttgaaggcaggaatgagattggcagttgggaagtgagtttcaatttttatttcatatatttttcttttgcttaagatttacataacactcaggttatgtaactgatataagcaaatggatttaaacatacacctaatag

SEQ ID NO: 409475 - DNA, 624 bp, Homo sapiens
gttgacagggttaattccttctgcagaccctgagggagaatctgttccttgcctgtctcctggcttctggaggctgctggcaacccttggcattgcttggcttggggctccataactctgatctctgcctctattttcacatggtcttctccttttctgtctgttgtaaggatatttaccattggatttagggcccatgctaatctagaatgatctcaatttgaggtcctttaccttaatcacatctacaaagactcttattccaaaaaaggtcacattctgaggttcctggtggacagatcttttgggaaccataattcaaaccactacatctctcaagtgtcacctcctcatgttagcagtggcaaatctgtataggtctgcagcatcgccaattcttgcctcttcggaagaaagaatttgactgaggggcaaaaggcaagaaggagagaccgaggcaagttttagagcaggagtgaaagtttattaaaaagtttcagagcaggaacgacaggaagtaaagtacacctggaagagggccaagcagrcgtcttgagagatcaagtgcacgatttgacctttgatgtggggttttatatgttggcgtgcttctggagtcttgca

SEQ ID NO: 409476 - DNA, 661 bp, Homo sapiens
acgagacactgactgtgccatgtcagttgtgttgtaggtgttcagaggagagagtaaagctggaacgacccagrgaggacatggtctggccttggaccttgaagaggaggtgagacttggattagtgcattgggaggggtgtggtttcaggtggggacaaaggtgtggaagtagggctgggtggggccccacttagaggcggtgtctggggtaaagtcaggggcagggagggcggctggccagcttccaagtggaattgaggcataaagcagggctgaggcccaggccaggagccgagcacctccttttcctgttagcctcatttcccttcctcagggacccacagaataagctcttaactagaagctattgtccctgccccctcaaaatcccagtttggaggcccaaatgtcaaaggggagcgatggctctctgggccagtggcgtgggggtaaaataatttaccaagacagttgtaggcagaaaaaggctgatttattggagaaagtagaaaaataggttgcaaggagacagggcagcctgcatgagagatgccgactgcaaagaaacaaaggctggctggagattttataggacggtgctgacactgtgtgctgaagagggctgtgcgcagcaccacgacgccaagcttgcagtgagc

SEQ ID NO: 409477 - DNA, 620 bp, Homo sapiens
tataacagaatatatcctagccattaaaaattaatagtttatagatatatttatatgtttgccacagaaatattttccccatatactgtaagcgaaaagcagattttaaaacagaatctagcaatgttgtgaagggaaaaaaatgactatacaaatatctgtatccttgcccagaaagaaggctggtaggacacctggcagttaaatctagtaagaggatgtctctggtgagtcaatctgggggtgtttttacacgctgtttgcagattctgatttctgcttcattttgggaaaacaatgtgcaggattgaactgaggctggtggaaaggagtgtgtcgtgaagagctcacacagggagatggcagcagaggatgcacgtgttctatgaatgagaagaggccggygctgtggccagcacaggggtgtgcttgttttgagggttttctttgttgggggaggagagtgcttgatgagattcagagagagtccagatccagaaggattctccatctgtgtgatctatgagtttacctcacattcctaaaaactgctcaggccccaggcttgctttcattccagttcagggacctatgattcatcccctgaaaccctaattata

SEQ ID NO: 409478 - DNA, 620 bp, Homo sapiens
tataacagaatatatcctagccattaaaaattaatagtttatagatatatttatatgtttgccacagaaatattttccccatatactgtaagcgaaaagcagattttaaaacagaatctagcaatgttgtgaagggaaaaaaatgactatacaaatatctgtatccttgcccagaaagaaggctggtaggacacctggcagttaaatctagtaagaggatgtctctggtgagtcaatctgggggtgtttttacacgctgtttgcagattctgatttctgcttcattttgggaaaacaatgtgcaggattgaactgaggctggtggaaaggagtgtgtcgtgaagagctcacacagggagatggcagcagaggatgcacgtgttctatgaatgagaagaggccggtgctgtggccagcacaggggtgtgcttgttttgagggttttctttgttgggggaggagagtgcttgatgagattcagagagagtccagatccagaaggattctccatctgtgtgatctatgagtttacctcacattcctmaaaactgctcaggccccaggcttgctttcattccagttcagggacctatgattcatcccctgaaaccctaattata

SEQ ID NO: 409479 - DNA, 559 bp, Homo sapiens
gatgataaattaatgagttctctatccctagaagggtttgcgcggttgggaatgccacctgccartgatgacaagaaagggacttctccatggggtggagaggtttggcctggcaagtgttaagattcttccaactccaatagcctgtgatactgttaactgaatgataaatgccaaatctccttgcttagaagaacttggcctagtttatttggctgcctcacattctgctagtggcttcgttacattggaaccttactgtgacactattggctacagtggaatttgatttgtatttacctgaggatggtacaactgcaggatttctggagatgacagtattatagtgataacaaaaacatgaatatataggtaagagttgtttatgtggaaaattacatgatatccctccatgaagagtttgggggagtcgtgatgaaaatgttctcaaatcaacacatacccttagtattatggttaattttccaaaacaggcattgccaaactgtggttttggctaaattttaaaaatggaccttctgatttttgtgtttatgag

SEQ ID NO: 409480 - DNA, 427 bp, Homo sapiens
gtcccttggtgcatatagacttgcaaatttcttatatgaaaactgttaaaaacttgtgcctgcttgctgctttatgttactattaaagaacagagtacgacttgcccattaacctattcaaatcaggtgttgaagagccttggatgctctcacaagcaatgtttctgccctgagagagggaacaaagagcccttcctctcagaagccactctaaagccaacttctctgatcccttatccaaagttcaattcttctccaaggtggtggttaggaacacagattctggagcgagactttcctatttaccagctgtgtgtctttgggcaagttacataacctctctgtggctcaaytgggaacactaataagagctcctatttctaagtgttgtttagggtgaccggccatcccgatttgcctgagatta

SEQ ID NO: 409481 - DNA, 535 bp, Homo sapiens
tactatgggaattggctcatgaaattatggagggtgtgaagttccatgatatgctgtgtgcaagctggagaaccaggaaaactggtggtgtaattcagtctgtgtcctaaggccagaaaattaagggagtcaatgatataactcccagtccaaggccaaaggcctgagaacctgggtatggcrgtgagctggggggagggatgtaagtcccagagtctgaaggccccaaaaccaggagctctgatatccacaggcaggagagaatgcatgtctcagtgcaagaagaaaaagcaaatttatctttcctccaacttgttattctatccaggtccccaatagattgcatgatgcccacccacaatggggagcatggatcttcttcactcagtccactaattcaaatgccagcctcttccagaaacacctcacagacacatgcggaaataatgctttcccagctgtctgggtacccattagcccagtcaagttgacacataaattaaccatcacataaaccaaactgtctgaattaatt

SEQ ID NO: 409482 - DNA, 541 bp, Homo sapiens
attttgctgtattgaccattgtgttgccagagctacaaggtgcttggcacacactaggctctctaaataatacatatcaattgaagaagtttaaaaattctatcattttctggatgttaaaatcggaagcaaaggaacttgttgaaggtcagtggcggaactagaactgatacacatacccttgcgatatcagggttgtcacaaatgaatccggtacttccctcctctgggcccaggagaggatcacatttccctgtctactgaagcaaggctggccatgtgacttgcttcagccaatgaaatatgggaggggatatgtgtcactccaagaggaatcttttaaaagccagtgtactattctctgcaatttctcttttcctctaccatgatgatgatgattgtaggagcaaaagttgaaattgagttgccagaagatgaaaacagcctggaattctgagccaccacatggagggcttctgctctagagagccacccagtcccaccacacrttttgtatgagaaagaaacatctgttgttttg

SEQ ID NO: 409483 - DNA, 332 bp, Homo sapiens
ggttccccagcacatgtcggggtgggggtggggtttgctgttggaagtgcctgtcaccggaggcagctagagcagggctgcagacagttctgctgaggtcccccagcctctgtaatgtcacactgggccttctttcctttcaccctgggctgcggctctgaggctgccgtggccatggagctctggaagctgggctgggggaggaagcctggtggctctgacctcccctggaggcgaaggaggcccagccatgacactcytaacggatgccacgccgctggtgaaggagccccatcccctgcctctggtcccacgtccctggttcctcccta

SEQ ID NO: 409484 - DNA, 585 bp, Homo sapiens
cctgctccctgtcactggcatccagcattctactctcatgaggcaccaagccagtcatgagggatccacccccaaggaccaaactccccaccatgccctaccaggccccaactccaacactggagatcaaacatttacataagatttggaggagacaagtatccacactgtatcagctggggactcgggagaaaacggcaataagctggcattagtaagagcttgagcctgactttctacagatctagtttcgaattctggctctgtcaattcttaaccctgggaccttatgcaagggwattcgccattcaatgtggaaagaatggccagagactttgtaatattcacagagctagaaattgagctgggttctggtcttgcttctttcactcttgagtgtcagacctcattatccccctacccctcagtgcagaaccatcatgtaccatcaccatgtggaatcactcttttctttgtgccctctctttatcccctgcaaactcctatgtttacatttattactttccatcttagtctcccccattagaatataagtttcttgaatgcagctgtgacttattccat

SEQ ID NO: 409485 - DNA, 403 bp, Homo sapiens
tattggattgtaccctattggcactaaggaactactgcctaccccccgccccggcttctcatgcaggactatgacctagaattggagttatgttatagaaagatggcttcaagttcccctttgaggagctccacagtaaataagccatttaggagagagggtccccatttctctggactcaccattgcctccaaaaaaaaaaaaaaaaggctaaaatctccccaaaagaatggcaaatgaacaagggcaaggaaggagctatttcttagtgttctttagactttaacagagtattatgtactgctattattattttttaggttaacaaaagtaatacattktctctagtgactccctgaatgctcctttgtagcttaatagttgaggctgaatgtagctattc

SEQ ID NO: 409486 - DNA, 594 bp, Homo sapiens
tcatcaatatcacaaaactgtggaaggttgcttgataatagactcaatgtccaaaaagtactcgttggctgggatgtaaaaatgaaacttacaaataaaatttaataaaattatatattcaaccagttaactaattaatgtcagttaagattaaatcaattgcatatctaatttatgcccagcttctcatggaagaagaagcatgagctaayagaatgaggaggctgctaagaaatttaacaaaatattaaaccgtaatagtagaagcgttttgtccaaactgaagcaggaaaagataacactctttgtagctgtagtcttttcatgcctgaaatattatgagtgaaatctggatacccaactgtatcagtcagttctcgtactgctataaagaaatgcctgagactgggtaatttataaagaaaagaggtttaattggctcacagttcctcaggctgtacagaaagcctagtggcatctgcttctggggaagcctcggggagcttttaatcatggcagaaggtaaagcaggagcaggcgtcctacacggctgaagcaggacctagagagagggggaaggtgcaaccagatctc

SEQ ID NO: 409487 - DNA, 575 bp, Homo sapiens
ttctcattacaaagaaaaggtatgtgtggggatggaaatgttaattagctcgatttcatcattgcacaatggatgcacacagcgaaacactaagtgatacaccatacatgtatacaatctttaaatttgtcaagcagaccttaataaagctggaaagcagagtatgaacctcagctgcacyttttaccaggttctgggccttgaggaagtcaactcctctgtgcctagtttgctcatctaggaaatggggctgataagagcacatttgtcattgtgcaggttaaacgagataatccacatttgtatctgcagagcaagcattcaacagatgctagccatcttccttatgatgggtcttgttttctgtgtttttttcctcccagaacatgttagcctcagtctttggggtgaaaggaggagcacccagtcacacagttgctccccggttcttcccgggccacaattcccagcctccctagcagcaggtgtgatgtaactgggttccagccaagggagcatgagcagagaggggcgtgtgctccctccagcccaagtcacacatacctcccatggtg

SEQ ID NO: 409488 - DNA, 575 bp, Homo sapiens
ttctcattacaaagaaaaggtatgtgtggggatggaaatgttaattagctcgatttcatcattgcacaatggatgcacacagcgaaacactaagtgatacaccatacatgtatacaatctttaaatttgtcaagcagaccttaataaagctggaaagcagagtatgaacctcagctgcactttttaccaggttctgggccttgaggaagtyaactcctctgtgcctagtttgctcatctaggaaatggggctgataagagcacatttgtcattgtgcaggttaaacgagataatccacatttgtatctgcagagcaagcattcaacagatgctagccatcttccttatgatgggtcttgttttctgtgtttttttcctcccagaacatgttagcctcagtctttggggtgaaaggaggagcacccagtcacacagttgctccccggttcttcccgggccacaattcccagcctccctagcagcaggtgtgatgtaactgggttccagccaagggagcatgagcagagaggggcgtgtgctccctccagcccaagtcacacatacctcccatggtg

SEQ ID NO: 409489 - DNA, 483 bp, Homo sapiens
cctgccaatactcaaccgcgttcacagcttgcagcrctgcgcactaggggaagccgtggaatatggaaagcacttatgtttaagtgctgggatcagcccacagcaggattcccacccggtgcagagcactgagaacccagggagaaattcccgtctcactcttacttcgagttacgttctacttacggatttggggaggccactggccaacattatgtaacatattacttctctcttatgttttaaaagtgttttaacgtaacatctgtaattcttggaagttcaacgcatccaggatgtgtaagcaccagcccgtgcacagcacacagtaggtcctcagcatgaaatccgagatgcagatcctgctgcgttgattggatttccagttaagcccagaggaaactcgggacaaagcatgtgtgaactacattggaggtgaatgcaaaacttatgtggattttgttgctttgtttttttagacag

SEQ ID NO: 409490 - DNA, 483 bp, Homo sapiens
cctgccaatactcaaccgcgttcacagcttgcagcactgcgcactaggggaagccgtggaatatggaaagcacttatgtttaagtgctgggatcagcccacagcaggattcccacccggtgcagagcactgagaacccagggagaaattcccgtctcactcttacttcgagttacgttctacttacggatttggggaggccactggccaacattatgtaacatattacttctctcttatgttttaaaagtgttttaacgtaacatctrtaattcttggaagttcaacgcatccaggatgtgtaagcaccagcccgtgcacagcacacagtaggtcctcagcatgaaatccgagatgcagatcctgctgcgttgattggatttccagttaagcccagaggaaactcgggacaaagcatgtgtgaactacattggaggtgaatgcaaaacttatgtggattttgttgctttgtttttttagacag

SEQ ID NO: 409491 - DNA, 583 bp, Homo sapiens
tctactgcatgctgttaacaaaagcaagtcaagcgaccaggctgtgttttccacttaggcatgaggaaatagacaacgaagtcctaggcatggagcccaggcaggggaggtgataaggctgcaaaaataacctcacttccttgccactgcactcattttgtggccttaccccctcctctgccccagctttgcacctaggactttgttgattgcttcaataaaagccaaaggctagaaaggaacaattaaactttcaccagtgctatyaagtgaaattattcattgacatctgaaaaattcaaactattcaggtccaattttattgtttgctcttattcccattgaaacagtcatcaaaggaagctgaagttagaagttgaaccctgtcaggagttaattctatggattgcataccttaaaggtaataggaaaacagtgaataaatagccttagctgaggcggaagttcggcactatatgaagaccatcaccctctcagaaggcttttcccaccttcctcctagaatgtgtggagttgtgtgaatctaacatgttaacatgcagaacagtgcttagaaaaaagg

SEQ ID NO: 409492 - DNA, 583 bp, Homo sapiens
tctactgcatgctgttaacaaaagcaagtcaagcgaccaggctgtgttttccacttaggcatgaggaaatagacaacgaagtcctaggcatggagcccaggcaggggaggtgataaggctgcaaaaataacctcacttccttgccactgcactcattttgtggccttaccccctcctctgccccagctttgcacctaggactttgttgattgcttcaataaaagccaaaggctagaaaggaacaattaaactttcaccagtgctatcaagtgaaattattcattgacatctgawaaattcaaactattcaggtccaattttattgtttgctcttattcccattgaaacagtcatcaaaggaagctgaagttagaagttgaaccctgtcaggagttaattctatggattgcataccttaaaggtaataggaaaacagtgaataaatagccttagctgaggcggaagttcggcactatatgaagaccatcaccctctcagaaggcttttcccaccttcctcctagaatgtgtggagttgtgtgaatctaacatgttaacatgcagaacagtgcttagaaaaaagg

SEQ ID NO: 409493 - DNA, 583 bp, Homo sapiens
tctactgcatgctgttaacaaaagcaagtcaagcgaccaggctgtgttttccacttaggcatgaggaaatagacaacgaagtcctaggcatggagcccaggcaggggaggtgataaggctgcaaaaataacctcacttccttgccactgcactcattttgtggccttaccccctcctctgccccagctttgcacctaggactttgttgattgcttcaataaaagccaaaggctagaaaggaacaattaaactttcaccagtgctatcaagtgaaattattcattgacatctgaaaaattcaaactattcaggtccaattttattgtttgctcttattcccattgaaacagtcatcaaaggaagctgaagttagaagttgaaccctgtcaggagttaattctatggattgcataccttaaaggtaataggaaaamagtgaataaatagccttagctgaggcggaagttcggcactatatgaagaccatcaccctctcagaaggcttttcccaccttcctcctagaatgtgtggagttgtgtgaatctaacatgttaacatgcagaacagtgcttagaaaaaagg

SEQ ID NO: 409494 - DNA, 589 bp, Homo sapiens
ttgtagaatgaatgaatgaatggttatatagccactgtcaaacaggataaaataacccccccaggaaaatgggaatatttccacatttcctgctggagactcagttctgtacctcaaaacagaatggcttggagagtcagacagtcagaggttgactttcatccactgagctcaggggctgaaatcttgactgtgcrtaggatatgatgtgcagggctgtacatatgcgatcagacgtgccgtgcgtgtggggagttttcaaggagaatgttgactatacgagattttggttttaaatgctacctctagaacctacactctgcacaagatggaattccattttatctcatttttaatgtcaattcttgatttgttttagtcaagctctgactcatggatcccttcagaagagatttctatttcccaagaccctccaacaggaacaacaatgtacttagtcattcagggtagtcataaaaacatttacaagggccaaaattaggccgggttcagtggctcacacctgtaatcccagcaatttggaaggccaaggcaggaggatcatttgaggtcaggagttcgaggtcag

SEQ ID NO: 409495 - DNA, 529 bp, Homo sapiens
ttgtttgaaactgcccactggcctgacttgctcaaagacacatgactagaaagttatcaatctgtaactagaaatcaggtctatcttatttcagacttcagttttatgggccaccaaattgtcartgagtcctgagactagcagcaatgtgagcttgggaattggcaggaaatagtctgaagtagagatcctaaattagtcatctattgctgtgtcacaaattacccaagacttagtggaaggaagtcatgccatgccagtgttggtctaaaggttaagaaagatgggaaattctgctgtggtgctctggggaaagctccacaccacataaggctttgaagtatcctgaaaccattgtgtgctgtgataaagataatctagccccataaagcaaccatgtgagtgaagccatctgggaagtgtatgttcctttgcttcccctaccacaaaatgagccaccctcgctagcatcatggccagcagatacaaattgcataactaagtagcataacactacaaacatgtatta

SEQ ID NO: 409496 - DNA, 529 bp, Homo sapiens
ttgtttgaaactgcccactggcctgacttgctcaaagacacatgactagaaagttatcaatctgtaactagaaatcaggtctatcttatttcagacttcagttttatgggccaccaaattgtcagtgagtcctgagactagcagcaatgtgagcttgggaattggcaggaaatagtctgaagtagagatcctaaattagtcatctattgctgtgtcacaaattacccaagacttagtggaaggaagtcatgccatgccagtgttggtctaaaggttaagaaagatgggaaattctgctgtggtgctctggggaaagctccacaccacataaggctttgaagtatcctgaaaccattgtgtgctgtgataaagataatctagccccataaagcaaccatrtgagtgaagccatctgggaagtgtatgttcctttgcttcccctaccacaaaatgagccaccctcgctagcatcatggccagcagatacaaattgcataactaagtagcataacactacaaacatgtatta

SEQ ID NO: 409497 - DNA, 529 bp, Homo sapiens
ttgtttgaaactgcccactggcctgacttgctcaaagacacatgactagaaagttatcaatctgtaactagaaatcaggtctatcttatttcagacttcagttttatgggccaccaaattgtcagtgagtcctgagactagcagcaatgtgagcttgggaattggcaggaaatagtctgaagtagagatcctaaattagtcatctattgctgtgtcacaaattacccaagacttagtggaaggaagtcatgccatgccagtgttggtctaaaggttaagaaagatgggaaattctgctgtggtgctctggggaaagctccacaccacataaggctttgaagtatcctgaaaccattgtgtgctgtgataaagataatctagccccataaagcaaccatgtgagtgaagccatctgggaagtgtatgttccwttgcttcccctaccacaaaatgagccaccctcgctagcatcatggccagcagatacaaattgcataactaagtagcataacactacaaacatgtatta

SEQ ID NO: 409498 - DNA, 622 bp, Homo sapiens
ctttttgggtactgttataggataagcctgaactcctgatttgaataaatggttaaaagagtgaaataacttacccaatttcaaatatcaaagttactattatatgggccaagtcctgttctatgcattcagaacaaataagtgaacaaataataactactacctgattggggcttcctttttgatagggaagttacaaaatgaaatgaaaataaaatgaaaataaatgtgaattctatagtatgtgagaaggtaataaatgctatggaaataaaggtagaatacagtgaagggtattaagtatcaaggtggaagggagggataggatgcagtgttaaactgggtggtcatgttagaccttctgtaaaggtaactgaagaaacaactgcacaatgtaagggaaaagtatttcagtcaaagaraaggcaggagcgaataagtgtgcgagtaatacaaaatgaagaagaagaagaggaagaggaagaagaagaagacaaagaagaagtagtagttacagtggtggtgacgatgttggagaatgttcttgatggcctcatgtgcctcttaagaattttgagatgtttatttatttatttattttttaatgaaaatgaggagccat

SEQ ID NO: 409499 - DNA, 590 bp, Homo sapiens
tatctatatttttattctaatgtatatcagatgatttatatttatactttagtaagtagtgcctattctcatgacatatcttcctcaattattttctataatgactagaataaataagtagatatgaaattagagtttggtatgtttatgctcccaacattaagaatgtattcctatgacattcattatacgaagctgtgarctctaatctccacaggcaggtaacaaatcactaggtaagtctctgtattgtctgaaaattctgattctttaatttttatttttaatattgaataaaaatctgcttctgtaaaacttctactcactaggaggattctgtcatcttgtagttgaaacaagtaaataccattctttttcttcaacatggcccttcaaatgtgccactagtgaccctcaacactgagtttagacatccacctctccatccacggtgcctatgagacctaatttccagattctttatctccatggtcatccttctctagatgttcttgaatgcctttcttaaaatgccaagaaccagactcaatgcttcagagtggtctaccagaatggaagtagacacagtg

SEQ ID NO: 409500 - DNA, 536 bp, Homo sapiens
tttagcacactcgtccctcctttttctcggtaatagtaattctacttttattctagtattttcttttctctatggagctcctataaatgtggggaagataatttctgttttaggtatgttctaactgaactaatgtaataggcacaacccatgttcctggcttcagggatgagaacatgacccaaatcaggccaacgtgatgggaggagatgttttctgagggtttttgagaaagaactttcttwttctcccaagagagctcctcagaaaaaaaagaaaattctccttctgcttactatgaatgcaaagtcttttaaccactggcagatgacagcggccatcttgtaaccccaagagaaagaagccttagattgaaagagcactgagaaaggtgccaaggagacttggaaaggaattgagtcttttgtgatgtcatcacaacattgggttacatattacctaaaatctgacgtgcctctggtcttcagttacttgctccattaagttctgctgtttaagcctgagaatgagtcaag

SEQ ID NO: 409501 - DNA, 549 bp, Homo sapiens
actttcttctgagactattaagccaagaaaaaatcagctgtgattcattrgataataacactatcaggaagaatgtgctctaagttatcccttagtaatgtttttttgtggctgtaaaacacacaggcctggcctaaaaaaaaaaaaaaaaaaaagccttttcattttaaatttaatagaaatatatataattaaatagtaatggtagatatatatatatatatataaggccaatggccctattaaacagaatgtaaaagttagataaactgggttccattcataatttagattgcttcactatatgccatagtaaaactactattactcaatacttagcccataaagtcaagccaactttgtctattaagggatgtggtgcaattttcacataatatttgcatgttatagaggactagagggactacacagaacttaattcttcagcattttcttggactccaggaaacctccaaatgctctcccctcatcaaaatttactattaactccaaatttttgcaaatgactttgtcactaactatgtggaa

SEQ ID NO: 409502 - DNA, 549 bp, Homo sapiens
actttcttctgagactattaagccaagaaaaaatcagctgtgattcattggataataacactatcaggaagaatgtgctctaagttatcccttagtaatgtttttttgtggctgtaaaacacacaggcctggcctaaaaaaaaaaaaaaaaaaaagccttttcattttaaatttaatagaaatatatataattaaatagtaatggtagatatatatatatatatataaggccaatggmcctattaaacagaatgtaaaagttagataaactgggttccattcataatttagattgcttcactatatgccatagtaaaactactattactcaatacttagcccataaagtcaagccaactttgtctattaagggatgtggtgcaattttcacataatatttgcatgttatagaggactagagggactacacagaacttaattcttcagcattttcttggactccaggaaacctccaaatgctctcccctcatcaaaatttactattaactccaaatttttgcaaatgactttgtcactaactatgtggaa

SEQ ID NO: 409503 - DNA, 596 bp, Homo sapiens
gtttgacagtctcttacaaaatgaagcacaagcttcacatgcaatccagcaatcattcttctatgtacttacccaaatgagttaaatttttgtctacacaaaaacctgcctataatttgtaaatcagttttattcataattgctaaatattggaagcaaccaaatgtccttcagtaggataatggttacacaaaatatcatatatccatacaactgaatatcaytcaacaataaaaagaaatgagctatcagccacaaaaagaaatggaagagccttaaatgtatattgctaagagaaagaaaccagtctgtaaaggctatataccaaatgattccaaccatatggcactctgtgatagacaaaaaactacagagatggtaaaaagatcagtggtgtccaaagattcagggagagggaaacaggaatgagtaagtggagatagttttacctatgcacggggcatttttaagatgttcaaactattatgtatgatactgtaatggtggatgcatggtgttatgcattcatcaagccccttgttaataacaggagaaactatgtgggaagagaatatatagtaatatgtacagaatat

SEQ ID NO: 409504 - DNA, 596 bp, Homo sapiens
gtttgacagtctcttacaaaatgaagcacaagcttcacatgcaatccagcaatcattcttctatgtacttacccaaatgagttaaatttttgtctacacaaaaacctgcctataatttgtaaatcagttttattcataattgctaaatattggaagcaaccaaatgtccttcagtaggataatggttacacaaaatatcatatatccatacaactgaatatcactcaacaataaaaagaaatgagctatcagccacaaaaagaaatggaagagccttaaatgtatattgctaagagaaagaaaccagtctgtaaaggctatatwccaaatgattccaaccatatggcactctgtgatagacaaaaaactacagagatggtaaaaagatcagtggtgtccaaagattcagggagagggaaacaggaatgagtaagtggagatagttttacctatgcacggggcatttttaagatgttcaaactattatgtatgatactgtaatggtggatgcatggtgttatgcattcatcaagccccttgttaataacaggagaaactatgtgggaagagaatatatagtaatatgtacagaatat

SEQ ID NO: 409505 - DNA, 554 bp, Homo sapiens
tttagctaagttcacatgactcagtttgtcacttttcactacaccaattgactgatctggtggtatgaaagagtcaatgatgtagaatcaccaagcataaggtttgttgaacaatggtgaaaatataaatgggcatttcctaaatgtttttggtctttttaatatcatccatattttgaaaataggcacacaaacacatgcatgcacgcatgtgtgtatatatatatatatgtrtatatatatatatatatatatatatatatatatatatatatatatatatatatatatatatatacacactcatatatgcaataccttctatcaggagcttttggtatgtttcatatgaaaaataaagatgaattcttagagcaaggtataatctgcttattttgtatgttcattgaacaatatttctttcagttgctggactgctttcttggagggggttggggagtggcatttactgaagaattcataacttgtataaatctcttcttttcaaaatctagcatctgtgtaaagttttgtaatttggcagatcctgtatc

SEQ ID NO: 409506 - DNA, 554 bp, Homo sapiens
tttagctaagttcacatgactcagtttgtcacttttcactacaccaattgactgatctggtggtatgaaagagtcaatgatgtagaatcaccaagcataaggtttgttgaacaatggtgaaaatataaatgggcatttcctaaatgtttttggtctttttaatatcatccatattttgaaaataggcacacaaacacatgcatgcacgcatgtgtgtatatatatatatatgtgtatatatatatatatatatatatrtatatatatatatatatatatatatatatatatatatatacacactcatatatgcaataccttctatcaggagcttttggtatgtttcatatgaaaaataaagatgaattcttagagcaaggtataatctgcttattttgtatgttcattgaacaatatttctttcagttgctggactgctttcttggagggggttggggagtggcatttactgaagaattcataacttgtataaatctcttcttttcaaaatctagcatctgtgtaaagttttgtaatttggcagatcctgtatc

SEQ ID NO: 409507 - DNA, 409 bp, Homo sapiens
tctttactgacttagcaaggagctgtaaaaagcatatctcaaaaaggaattagtatgcataccatagttaagtaaatttcacagttagaaacgaaaggaaaatgtattttattcaatatgctttaaaaaaatrtatcttctagtagtatgcatcttcttcaaagcctcaaagctattcaacagataactcacgaccaaaactccaggtcttccttgagataaaagatggcagggttcatgttgccagaaaaagaaggaaagaaaaagagagaaagagaaagagagaaaaaatagaacgagcataccaaataaattttacataaaaattattatatgttatgcaattttatctctagatcaaggtaagtattagtattatgatgttaccagtgaaagcatgaccactcaa

SEQ ID NO: 409508 - DNA, 409 bp, Homo sapiens
tctttactgacttagcaaggagctgtaaaaagcatatctcaaaaaggaattagtatgcataccatagttaagtaaatttcacagttagaaacgaaaggaaaatgtattttattcaatatgctttaaaaaaatgtatcttctagtagtatgcatcttcttcaaagcctcaaagctattcaacagataactcacgaccaaaactccaggtcttccttgagataaaagatggcagggttcatgttgccagaaaaagaaggaaagaaaaagagagaaagagaaagagagaaaaaatagaacgagcataccaaataaattttacataaaaaktattatatgttatgcaattttatctctagatcaaggtaagtattagtattatgatgttaccagtgaaagcatgaccactcaa

SEQ ID NO: 409509 - DNA, 486 bp, Homo sapiens
atgttaccagtgaaagcatgaccactcaaagaagtgaaatgcactctctgaactagcgaatagttgacttaaaaatctacttcaatcttctgcgtcaaattatacttagctgcctctaaagcaatgaagaagagatgttatgaaaatgtgttttctgtttaatcacataccatgacactatcttgttccatctgaaatttttaggtggatgaaacaatttaaatgtaccaaccatttcacatagaaggagaytgtaaataaaatttactgatacagagagaaactattgacaaatattttatatttcataaatgtttcctattatattcagagttttctattaaagacccccaaaaagagattaaatactacttgtgttcccaaaaatatatctttgggagagactgtagagaggagaatgtgatgatgttttggatgctggtctcagagttgctggtatcagaaatgacacaagagaatcacaca

SEQ ID NO: 409510 - DNA, 268 bp, Homo sapiens
caaggcttaagcaatcctcccttctcagcctcccaaatagcttggactacaggcacactccaccatgcccagctarcctggtttctttatcgtttggccacaaacttatagtctctttattaatcctttaaattcaatactttgaatatgcagtttctgttcaaatcccaacaaatacgatgtaataataatagctaataagtattaccatatgccacatattatgttaagaaattaaaatgacttttctcacacaaaatttatggaa

SEQ ID NO: 409511 - DNA, 268 bp, Homo sapiens
caaggcttaagcaatcctcccttctcagcctcccaaatagcttggactacaggcacactccaccatgcccagctagcctggtttctttatcgtttggccacaaacttatagtctctttattaatcctttaaattcaatactttgaatrtgcagtttctgttcaaatcccaacaaatacgatgtaataataatagctaataagtattaccatatgccacatattatgttaagaaattaaaatgacttttctcacacaaaatttatggaa

SEQ ID NO: 409512 - DNA, 268 bp, Homo sapiens
caaggcttaagcaatcctcccttctcagcctcccaaatagcttggactacaggcacactccaccatgcccagctagcctggtttctttatcgtttggccacaaacttatagtctctttattaatcctttaaattcaatactttgaatatgcagtttctgttcaaatcccaacaaatamgatgtaataataatagctaataagtattaccatatgccacatattatgttaagaaattaaaatgacttttctcacacaaaatttatggaa

SEQ ID NO: 409513 - DNA, 634 bp, Homo sapiens
cttcaagagagaaaatgtatcattagttcctaagtgttagtagctagcttttccaagaaagtctaataatactggagatttatcttgtccactaaaaaatattttttaaaaactgatacaattttattttaaccttgcccacttattaccatagggagtgtaataattagatgttgtctgttagggtcttgtcaaaatatgttattgttataagatataaggatgaatttgtattgggaacaatacagtaaaaatcatgactaccaagttggggtactaaaaattttttattatagatttcaggcagtttcatctcttttgattgtgttattctgtatcaggggaaaaaagaaggaaacacgagttttgagagatacaggcacagttraattacattctatgttgttcattttaaaacatgaacaccatgctcaaaatcaaattcagtcttatccattttacctcatattttctcaaaaataaaaattactatacatatgaaggaaggaaccaatgataaaatgaacaaacaaatcacctattaaactaaacattattttgccctacacattggaagctaattaatttaacaattaccttgtataattggttaaaatctctagtttatttgatt

SEQ ID NO: 409514 - DNA, 458 bp, Homo sapiens
tggggaggggaacatcacacaccagggcctgttggcaggtggggatctaggggagaggtcgtattaggagaaatacctaatgtagatgacaggttgatgggtgcggcaaaccaccatggcacatgtatktctatgtaacaaacctacacattctgaacatgtacccagaacttaaagtataataataaaaaaaagaaaataaagtgatggaacatatatgtcagatttattgtcaataaaacctagactggaagatgtggcttaggtgaatgaccagttggatttgataatactgtctgtttgtcatatccattcctattcccactttaggtgttagaatagcccactcaagaaatgtttgaaatctgcagaggacaaacacatttaccaatgatcactgcctcctccagctctgagataaaaagggagggaaatatgatgaaataaatagagaagca

SEQ ID NO: 409515 - DNA, 458 bp, Homo sapiens
tggggaggggaacatcacacaccagggcctgttggcaggtggggatctaggggagaggtcgtattaggagaaatacctaatgtagatgacaggttgatgggtgcggcaaaccaccatggcacatgtattyctatgtaacaaacctacacattctgaacatgtacccagaacttaaagtataataataaaaaaaagaaaataaagtgatggaacatatatgtcagatttattgtcaataaaacctagactggaagatgtggcttaggtgaatgaccagttggatttgataatactgtctgtttgtcatatccattcctattcccactttaggtgttagaatagcccactcaagaaatgtttgaaatctgcagaggacaaacacatttaccaatgatcactgcctcctccagctctgagataaaaagggagggaaatatgatgaaataaatagagaagca

SEQ ID NO: 409516 - DNA, 622 bp, Homo sapiens
cattctgaacatgtacccagaacttaaagtataataataaaaaaaagaaaataaagtgatggaacatatatgtcagatttattgtcaataaaacctagactggaagatgtggcttaggtgaatgaccagttggatttgataatactgtctgtttgtcatatccattcctattcccactttaggtgttagaatagcccactcaagaaatgtttgaaatctgyagaggacaaacacatttaccaatgatcactgcctcctccagctctgagataaaaagggagggaaatatgatgaaataaatagagaagcactctcagtgcatatatacttgaaatacttgaattccttctaactgtgcacaatgccaggaacacatttaatatgtggtagttactattactacaaggcacgaatgttctaatttttctaatcagaaaactatgtcttcaatagataatgtgatttgtccaagtatcagataaataaggattcaaatctggatcagactctgtggtaggcacacaaatggtctccctaaagatgcctatgctctaatccctggaaactgtgaatatattacatacatagaaaagaggaaataaggtagcagatgaaattaagg

SEQ ID NO: 409517 - DNA, 622 bp, Homo sapiens
cattctgaacatgtacccagaacttaaagtataataataaaaaaaagaaaataaagtgatggaacatatatgtcagatttattgtcaataaaacctagactggaagatgtggcttaggtgaatgaccagttggatttgataatactgtctgtttgtcatatccattcctattcccactttaggtgttagaatagcccactcaagaaatgtttgaaatctgcagaggacaaacacatttaccaatgatcactgcctcctccagctctgagataaaragggagggaaatatgatgaaataaatagagaagcactctcagtgcatatatacttgaaatacttgaattccttctaactgtgcacaatgccaggaacacatttaatatgtggtagttactattactacaaggcacgaatgttctaatttttctaatcagaaaactatgtcttcaatagataatgtgatttgtccaagtatcagataaataaggattcaaatctggatcagactctgtggtaggcacacaaatggtctccctaaagatgcctatgctctaatccctggaaactgtgaatatattacatacatagaaaagaggaaataaggtagcagatgaaattaagg

SEQ ID NO: 409518 - DNA, 622 bp, Homo sapiens
cattctgaacatgtacccagaacttaaagtataataataaaaaaaagaaaataaagtgatggaacatatatgtcagatttattgtcaataaaacctagactggaagatgtggcttaggtgaatgaccagttggatttgataatactgtctgtttgtcatatccattcctattcccactttaggtgttagaatagcccactcaagaaatgtttgaaatctgcagaggacaaacacatttaccaatgatcactgcctcctccagctctgagataaaaagggagggaaatatgatgaaataaatagagaagcactctcagtgcatatatacttgaaatacttgaattccttctaactgtgcacaatgccaggaacacatttaatatgtggtagttactattactacaaggcacgaatgttctaatttttctaatcagaaaactatgtcttcaatagataatgtgatttrtccaagtatcagataaataaggattcaaatctggatcagactctgtggtaggcacacaaatggtctccctaaagatgcctatgctctaatccctggaaactgtgaatatattacatacatagaaaagaggaaataaggtagcagatgaaattaagg

SEQ ID NO: 409519 - DNA, 585 bp, Homo sapiens
attttgatcagcctttgttttcttcatggtaatacatagcaatgtattctaagtttgtccatgccatatttttttttcattactttttaagaaatagtttgtggaagatgccatgctatgctttgacccagaattttggatcctcagaacacgtcttgcccactcacttactcacatctgaccacctttggctctcctttgtgtctgaggctagaacttacgcagaattcaaaagagcttctgcctcctaagaccagtaccatcgccctcagtcacgacgtggagtcctgaggtggtgacttaagggtctgagatttgtttccctaccaatatttctaagagaagcaatttataaaacacatctggaacacatgcttctatgaaatgcaaattccctgaagtgagtgcatgtgatcagcaataaatattttcttatgcattcattcactgagtcgcttcaaaaaatttgagtaatcatccaggaaaaacacatgcagtataaataaaggtagtattaataaayagaagaggttgttttcacaaaattacagctatttctgaagaactgaaatttaaatatggcct

SEQ ID NO: 409520 - DNA, 632 bp, Homo sapiens
agagtagctgtacctcattagccttgtaaaaccaatgtacacatatttgcagtggttaaaagagagtgaggaaacagatacaaaatcagatttaataatcttgagtgattaatgaatattatcctcattgataatgttaaccatgccatgtagaatatgtagctgtcaacagattttgctttaaatgcatgaatgtgagaataattaggccctaaagaaattaatttccataacagtaaacttaattaagtgtctggcagagctgttttatggctattgcaatttcttatgttcatagatggaaattctcttaaaacaaatgaattactttctgcaagctatttttttcttaagaataaaaattacttctgaatgctaatcttcatccacactataaatcaaggaattttgtgttttcatgtcaaccagaaaaaagcagcttgaawaatatttacagttatcttcggggtataatttaatacaagtgaaaacatgcagtaatgcattcctccaaatacataaattatgtgtctttatgattcatagctctatattccatgcaacattatgggaaaatgaatttcttttagcaaacaaccaggttttttaatcaataattacatacaaaaaac

SEQ ID NO: 409521 - DNA, 594 bp, Homo sapiens
gaatgaaaattagattagttaaaaatgtatattgaaatctctaaggaaatcattaatttawatatatatatatatatatatatatattctaagacaggagattaaatggaattatataagatgctcacttaaaaccagagaaagtgggaaaggaaaaaaaagaaaaaaggcaacaaaaagacaaagttacaaacatattagatcttaacccaactatattaataataattctcaatatgaatgatcaaaaaaccacttaaaatacagattgtcagagtggataaaaaagcaagacctaactttttgttgtgtaatataaaccaactttaaaaataaatagatcggttcaaagtgtgggcatggatgaagatatatcaatgccaacaataatcaaaagaaagctaaggtagctgaattaatttctaacaaagtatacttcagaacaagaaaattatcatggataaacgagggcattacataatgataaagtccattttaattttttctaaatgtgtatataccccaaaacagtgtcaaaaaaacatgaggcaaaagctgacaaaattgaaaggagaaatagacaaatatactatt

SEQ ID NO: 409522 - DNA, 599 bp, Homo sapiens
taaatttaatattataaaaattcttcctacagggttataagtcagttaattaaatgagacgagcccagcatatgttcaggtcatgtttttctcacctagaattaatttttgcattgctctctttgtgataattaatcaagatgtatacttatgattcatgacttwaccatatgcaggtttacttcaacaagaaatattttcaaatatataactcttggaaataaataatcaaaactgattttatttatgtattatgctgtctggtgtatacaaaatctaaaaaatctatagataatatatacaaatagtttgtggagtttgttggttacaagatcaatatataagaatttttttttctaaaaataaatatttgcctgggcatggtggctcaggcctgtaaccccagcactttgtgaggccaaggagggtagatcacttcaggtcaggaatttgagaccagtctggccaacatggtgaaaccccatgtctacaaaaaatacaaaaaactagccaggtatggtggggtgcacccgtaattccaggtcctagggaggctgaggtgggagaattgcttgaacctgggaggcaaaggtttcagt

SEQ ID NO: 409523 - DNA, 591 bp, Homo sapiens
catcttttatagtccagtggattttctgcctaacaacagaagaaatcagctaagctatgatatagtttggagctagataagctttcgtttaagccttgactttgtgttgttacataacagcctggctttctttatgcataacattttattgggctccaagtccagctgaaatccattcatggactttataaggaaacagagactccaggttaagaatttctactctgagcagtaaagtagaaatgggaatagagacagggaaaggataagtaatgaattaaaatagattaaaaagtatcaaggagatattcagttccttaatttcctgactyttcttgaatgctctggggcatctcttttgtcagttgtaattaattaaaagattaattattatttccataatattgattagtttgtacttggacagtaaatcaacacttattgaatatccattagtctgcacaaggtacatacctctctgttaaatacaaggaaatttacaataactcatcaatcaattaatcaaaaaatatagactgaggaaccactgtgggaggaagtgttataccaggccccatggaagataccaag

SEQ ID NO: 409524 - DNA, 410 bp, Homo sapiens
aaacttataatgtataattcccggccaaagtaaagtatgatgtaattaaaataattgtcttagaaagtcagagaagggattgagggatggatcactttacatttgagtggttaggtaagtgtttataatgaacaaggtacaatttgagctaaatcytgagggatgaaaagaatatgcatggagagaaaagaaagaaatggctttttatgttggcaaaatgacactaacaaaccttggcaatgggaaagcagaagacaataaataaatcaatgtggcttaagcagatactttctttcaaagaagccttgagttcctttatttctttgaacattcagtaactctcatggtatctgacatgtcaaagtcacacaataaattaatgtcccatgtttatggaaataactaaaagg

SEQ ID NO: 409525 - DNA, 410 bp, Homo sapiens
aaacttataatgtataattcccggccaaagtaaagtatgatgtaattaaaataattgtcttagaaagtcagagaagggattgagggatggatcactttacatttgagtggttaggtaagtgtttataatgaacaaggtacaatttgagctaaatcctgagggatgaaaagaatatgcatggagagaaaagaaagaaatggctttttatgttggcaaaatgacactaacaaacyttggcaatgggaaagcagaagacaataaataaatcaatgtggcttaagcagatactttctttcaaagaagccttgagttcctttatttctttgaacattcagtaactctcatggtatctgacatgtcaaagtcacacaataaattaatgtcccatgtttatggaaataactaaaagg

SEQ ID NO: 409526 - DNA, 554 bp, Homo sapiens
ttttacacacctatttgacaaagctggaaaatgagatgttatggtaggctgcccaaggagaatccaacccacaggccaaggttataattaacaatatagttaaaacctactacccactgttaccaccaattattatctcattgccaacaagaaaaaatatttgacccagctcaaaatgtcctcctaggtttgagagcttgacactgtagtctcaaaatttaatatgtattttctctgttgctatttagatacttattggtgattggaatcctaccttgcatatttttttgaaaakcttaaataaaagaacataggaaacacacatagctagtggctgccttatgatagatgataaataagtgttagctaatcattgattttctaaaatttatgcttaattgcagaaagctgtctgatctcttaggactgagacttgggccttcaatggaccatttgtttagtaccttttacatttccattgatatggccttggagttctagtagatgatatatatcaagcctgaacactgattagtcagtgttaagattttgtc

SEQ ID NO: 409527 - DNA, 554 bp, Homo sapiens
ttttacacacctatttgacaaagctggaaaatgagatgttatggtaggctgcccaaggagaatccaacccacaggccaaggttataattaacaatatagttaaaacctactacccactgttaccaccaattattatctcattgccaacaagaaaaaatatttgacccagctcaaaatgtcctcctaggtttgagagcttgacactgtagtctcaaaatttaatatgtattttctctgttgctatttagatacttattggtgattggaatcctaccttgcatatttttttgaaaagcttaaataaaagaacataggaaacacacatagctagtggctgccttatgatagatgataaataagtgttagctaatcattgattttctaaaatttatgcttaattgcagaaagctrtctgatctcttaggactgagacttgggccttcaatggaccatttgtttagtaccttttacatttccattgatatggccttggagttctagtagatgatatatatcaagcctgaacactgattagtcagtgttaagattttgtc

SEQ ID NO: 409528 - DNA, 554 bp, Homo sapiens
ttttacacacctatttgacaaagctggaaaatgagatgttatggtaggctgcccaaggagaatccaacccacaggccaaggttataattaacaatatagttaaaacctactacccactgttaccaccaattattatctcattgccaacaagaaaaaatatttgacccagctcaaaatgtcctcctaggtttgagagcttgacactgtagtctcaaaatttaatatgtattttctctgttgctatttagatacttattggtgattggaatcctaccttgcatatttttttgaaaagcttaaataaaagaacataggaaacacacatagctagtggctgccttatgatagatgataaataagtgttagctaatcattgattttctaaaatttatgcttaattgcagaaagctgtctgatctcttaggactgagacttgggccttcaatggacmatttgtttagtaccttttacatttccattgatatggccttggagttctagtagatgatatatatcaagcctgaacactgattagtcagtgttaagattttgtc

SEQ ID NO: 409529 - DNA, 514 bp, Homo sapiens
aactgattggatcaggcccatccacattatggagggtgatctgttttactttacttaaagtcaaatgattataaattttaccacatctacaaatatctttacagcgacatcgagactagtgtttgacaaaacacctgggcaccctaggctagtcaagttgatataaaaataactagcatgagcagattccaatttgaactaaattctgtctgctcaagaatatgagtctagtgattgatttttttcctatttccaaagagcagtgatttttraaatttaggatgactgaagttttaatttgctttaagactcagttgaccagtcatttgaggaaaatctttcaacagtatatttgcaatgtatttagccattctaatcagtagttttgcttaacacaaggtggcttgtgaagtgattctgaattatttcatgatggttgaaaggaggccaactataataaaacaatgcaaacaaattagtgaagctaaacaggaaacacactggtgaactcact

SEQ ID NO: 409530 - DNA, 577 bp, Homo sapiens
gcactcaggtcagggttgcactgtggtttccaccttcattcagttatcaggaagacaaatctgtgttttgcagtcattgagctatgctagcgatttatgactgcatggttctgctcttgaattgtactcataaaccgaaaargtgccaggtgcggtggctcatgcctgtaatcccaacactttgggaggccgaggtgggcagatcacctgaggttgggagtttgagactagcctgaccaacatggagaaaccccatctctattaaaaatacaaaatgagccaggcatggtggcgcatgcctgtaatcccagctacttgggaggctgaggcagaagaatctctcaaacccgggaggtggaggttgcggtgagccaagatcgagccattgcactccagcctgggcaaaaagagtgagactctgtctccaaacaaaacaaaacaaaaacaaaaaccataactgaaaaggtaccagaggtcattgagtcccgtggttttctaacctttatttttttttttggtagcataaaaacccttaagattcttaattgtaaacccaataaaaaccaaacaggaaaag

SEQ ID NO: 409531 - DNA, 577 bp, Homo sapiens
gcactcaggtcagggttgcactgtggtttccaccttcattcagttatcaggaagacaaatctgtgttttgcagtcattgagctatgctagcgatttatgactgcatggttctgctcttgaattgtactcataaaccgaaaaagtgccaggtgcggtggctcatgcctgtaatcccaacactttgggaggccraggtgggcagatcacctgaggttgggagtttgagactagcctgaccaacatggagaaaccccatctctattaaaaatacaaaatgagccaggcatggtggcgcatgcctgtaatcccagctacttgggaggctgaggcagaagaatctctcaaacccgggaggtggaggttgcggtgagccaagatcgagccattgcactccagcctgggcaaaaagagtgagactctgtctccaaacaaaacaaaacaaaaacaaaaaccataactgaaaaggtaccagaggtcattgagtcccgtggttttctaacctttatttttttttttggtagcataaaaacccttaagattcttaattgtaaacccaataaaaaccaaacaggaaaag

SEQ ID NO: 409532 - DNA, 543 bp, Homo sapiens
cacacacacacacacacacacacacacacacacaccatcccatacaatgtcttgcacatagcatttaaatatattaattgattttaatttctgcatacaacctaaaactttcaaggcctgaggataagggacagaaagacttttaagcaaggagttggtgtagtcatctcctcttacctaacagatccacagctaagagcaggggggccatgctgcctcaaatctcatggagatgggaggcaaagaatgaaccagatcaatgggtcagccatgagttctcctgagatccacttgtccaattagcttctcaatcctagtacttatccccaaatcccctaaaattagctaccatccaagagtaytatcaactgagcaattcaacaaactgccttcactgattggttttgttattcaccagcctgagggcatgggggacacctgggtaataactttatgtctcttcttgctttattttctatgagcccattaataaacctggaacaaattctgtgtgcatttcaaaatccactaagtaaagtcact

SEQ ID NO: 409533 - DNA, 510 bp, Homo sapiens
aaacttcttccagaggggaagaaggatgtggccaaagccactcagccttctggtagcagagctgggtatcaaattcaggtcatctctgtctttttctttacatcacrtttcctgaggtggcattttctaataccttgatccaaaaggaccactcagttcaactcaatttatttcccaactggtgatgttggtagcctaaatggtgtgccaggcactgcatcctctaagtgtattattgtcaccacccttacatcacctcagtgaggcaagtcctattatcattcccattttaaatgttaaaaaaaaaaatggggactcaaagagttagacagtttttaccaggccacatgatcagcaaagtgcaaagcaaagctcaaattctctgactccaaagcccaggctctcatgcactttactgcacacgacttaaggaacacatttataacaaacactggtgtccattgaaataaaatttaagggcattaaaggcagccctcggcagtgtcagcg

SEQ ID NO: 409534 - DNA, 557 bp, Homo sapiens
ctttatataattgatgtgtgtgaacaatatgaatgcatgtggacactgaccaactaaagtaaaggtagttcagaaatcctgggcagttcccattagggctgcctgaacggaggctgggagcacagaaaggagatggagctacaaaacacataaatgtaagctacacagaaaaagggtcaattaaacaaatcttgttgactctggagtctggctctgcatcccttttaagtgaaggccaggggcttcccactgggtttaggttggagctggcctgcaggatagattgtgtactggatatcatgcaatcaaatcctatctggagacctattaacgggcctcatgtggtgtttttcataaggaaaatcaccctctgttatttaatggaggtctgtagactttgagtctgttttatagtggggatgttctttgtagatgacaactacagggattggagacattactttaacccaaacactgtggcagctgggaaaggaagatttttggagsaaatgagacttggagaacacatcacatctcatcatataaaaagctgttca

SEQ ID NO: 409535 - DNA, 602 bp, Homo sapiens
cagaatattatacataaaatgataaaataagttagccaattataaatataaatcaagagcaggagcaagggtacggaaggaagaattgtctagcaaggtgagggagcaatgagctcagacctgagggactgttgtgaacagtcatggaaggaggctggaggctgccacatgtagtgggagtaaagaaagatttggactttcaacaaagcattttcaacgctaaggaataatcgctgttggtagggcaaaatcattctgtaaagtacatctgcacgggtgttgacaaatctagatgaaagttgctacatagatatcaggtgtggttacaaaatctaagctccttgatgracgggactttgctttattcaccattctacccatagaactcaaactactgcctggcacagagtaggcagtcagtaaacatttgttggtggataagtgagtgaacaaatgcagagacagaggaatgagcagagaattgcactttggaccaaggacagtaataaatagacccctctagcttacctctctggaatgcaatactaatcacccaaaagcaggttatcatcaatttcctttgcctacctggagagccaaag

SEQ ID NO: 409536 - DNA, 541 bp, Homo sapiens
gtttttacatggatagattctttattgttgatttctgagattttggcgcccctgtcacctgagcagtgtacactgtacccaatgttagacttttattcctcacccccttcccacccttctccctgagtccccaaagtccattatattattcttakgcctttgtgtcctcataacttagctcccacttataagtaagagtatacaatgtttgttttttcattcttgtattacttcacttagaataatgatctccaactccatctagattgctgtggatgccattatgttgttcctttttatggctgagtagtattccatggtatacacacacacacacacacacatatgtattacattttctgtatccactcatttgttggtgggctggttccatatttttgcaattgcaaattgtgctgctataaacacaaatgtgcaagtgtctttttcacataatgacttcttttcttctgggtagatacccagcagtgggattgctggatcaaatggtaattcttcctttagttctttaagaaatctt

SEQ ID NO: 409537 - DNA, 541 bp, Homo sapiens
gtttttacatggatagattctttattgttgatttctgagattttggcgcccctgtcacctgagcagtgtacactgtacccaatgttagacttttattcctcacccccttcccacccttctccctgagtccccaaagtccattatattattcttatgcctttgtgtcctcataacttagctcccacttataagtaagagtatacaatgtttgttttttcattcttgtattacttcacttagaataatgatctccaactccatctagattgctgtggatgccattatgttgttcctttttatgrctgagtagtattccatggtatacacacacacacacacacacatatgtattacattttctgtatccactcatttgttggtgggctggttccatatttttgcaattgcaaattgtgctgctataaacacaaatgtgcaagtgtctttttcacataatgacttcttttcttctgggtagatacccagcagtgggattgctggatcaaatggtaattcttcctttagttctttaagaaatctt

SEQ ID NO: 409538 - DNA, 511 bp, Homo sapiens
ctggcacttaagtactttggagctgacttcagtcataatttaagtataaagagattgggggaagacagaacaaatagcccatgaaaactagttttagagttctttattcagtatgtgtttggggaaattgcaggatagacgactccaacaaatccaggttttagtgtctcttgggctcctgaagcctgggaaaggcaaagtgggccaaagctggcctcagtgtgtgtgggaactgcaggggatgggggttaggaggacagtttataaagaaaatggttcaaarctctattttgattcctagggtaaagtaggctaccaggaggaacacagagttcattcaaggcacaaagctcagattaaaatgtttcatcagctttctaacttccagcacgctcacacttgggcacatctagcagcctgtgtacacccagaattctgttgctttggggcaccaacaatacactgaaaccagtctatgatgattttcattctcaatcatgttagcgaaggc

SEQ ID NO: 409539 - DNA, 581 bp, Homo sapiens
tctcccttgccttctgttcgtatcagcaacatcagtaggatatggaattatgttcccagacgacttctgaaaatacatgatmtccatcagggcataagacttcacaagaagtacataatagaaatcatccctagcattgagaagaaagaaatgaagtcagctccatccactgcaggccctgaagccatgggacaacaaggaggtaaatgcaacagctcatgttccttcagagtagcaggttttagcggggaagagcatagccagtgatcaaagaaactcattagaaaagatgacaagaaaccttcctgtttaatactgctgtaccttttccacttattactgagatttcctcttctgaaaaaaaatcatagtgattcggacattgtccggcgtgagtaaagcttaagacagctctgcttcaaattcttctttcatccacccccatttatttctgattgacatgacacttccagcctgaagaagctgacaatcattggataagaggtagcacaagaggttcacctgagaggaaataaacaggagctcaatggggaaaaaacagtaataccacatttcagtgg

SEQ ID NO: 409540 - DNA, 581 bp, Homo sapiens
tctcccttgccttctgttcgtatcagcaacatcagtaggatatggaattatgttcccagacgacttctgaaaatacatgatctccatcagggcataagacttcacaagaagtacataatagaaatcatccctagcattgagaagaaagaaatgaagtcagctccatccactgcaggccctgaagccatgggacaacaaggaggtaaatgcaacagctcatgttccttcagagtagcaggttttagcggggaagagcatagccagkgatcaaagaaactcattagaaaagatgacaagaaaccttcctgtttaatactgctgtaccttttccacttattactgagatttcctcttctgaaaaaaaatcatagtgattcggacattgtccggcgtgagtaaagcttaagacagctctgcttcaaattcttctttcatccacccccatttatttctgattgacatgacacttccagcctgaagaagctgacaatcattggataagaggtagcacaagaggttcacctgagaggaaataaacaggagctcaatggggaaaaaacagtaataccacatttcagtgg

SEQ ID NO: 409541 - DNA, 581 bp, Homo sapiens
tctcccttgccttctgttcgtatcagcaacatcagtaggatatggaattatgttcccagacgacttctgaaaatacatgatctccatcagggcataagacttcacaagaagtacataatagaaatcatccctagcattgagaagaaagaaatgaagtcagctccatccactgcaggccctgaagccatgggacaacaaggaggtaaatgcaacagctcatgttccttcagagtagcaggttttagcggggaagagcatagccagtgatcaaagaaactcattagaaaagatgacaagaaaccttcctgtttaatactgctgtaccttttccacttattactgagatttcctcttctgaaaaaaaatcatagtgattcggacattgtccggcgtgagtaaagcttaagacarctctgcttcaaattcttctttcatccacccccatttatttctgattgacatgacacttccagcctgaagaagctgacaatcattggataagaggtagcacaagaggttcacctgagaggaaataaacaggagctcaatggggaaaaaacagtaataccacatttcagtgg

SEQ ID NO: 409542 - DNA, 601 bp, Homo sapiens
gatgacttttgttcatttaaaaatataggtttatgttgagaatatttcaattcaaatacgattatattatagataatttatatacaagaaactattgttaactattgtctccctactgtactatagagcattagaacatattgcttctgactaactgtatttttgcacccattaaccaacttctcttcatgccctctccatagcctgcccagcctctggtaaccgccattctactcagcacctccatgagatccatttttgtcagcttccacatgaaagagaacatgcagtatgtgtctttctgtgcctggcttttttctcttaacataatgacctcsaggtctatccatattgcaacaaagatgaatgtctggtgtgatgggtttcccaattaccctgatttgatcatcacacaatttacacatgtatcaaaatgccatctatcccccaaaatatgtataactattatattttaaacaataaaatttttaagagcaaatagatgaagaatagatttaactttatctaaaaaaggtacaaatacacacacaaaataagccaccaataatccaattttgaatatgaatatagatgcaacaca

SEQ ID NO: 409543 - DNA, 541 bp, Homo sapiens
gcagtatgtgtctttctgtgcctggcttttttctcttaacataatgacctcgaggtctatccatattgcaacaaagatgaatgtctggtgtgatgggtttcccaattaccctgatttgatcatcacacaatttacacatgtatcaaaatgccatctatcccccaaaatatgtataactattatattttaaacaataaaatttttaagagcaaatagatgaagaatagatttaactttatctaaaaaaggtacaaatacacacacaaaataagccaccaataatccaattttgaatatgaatatagatgcaacacacatacaaatgytaatgtgtgcatgtgtaggcaggtagatagatggatagacagatgaataataggaaaatagatataagaatgtcatatatgcaggaagattgtcttcccctttgccttctatccaagattaaaaatgtattgtatatattttatgtttatagattttttaatttaaattataaaccaaccagaatttcctttatgtatagcatttaatatcaaaa

SEQ ID NO: 409544 - DNA, 493 bp, Homo sapiens
ttaacctattcacacttcactagtcgagaagttgatttgtgagccaccttcccgcttctccattctctggccatcaaaaaaaacttgctcttactgacattcactttcaattttgtgtattggctctgcaacactgaatgtggaaagatcccaccttttggagctaccaagcttctggtaacagtaccatacccagctctagtctccatgggcaaggtactggtggattcaggacatgctacccaaaatctggcayctgagaaaacagtagaagggtagcttttaccttccccttgcccttctcccctgaagcaggttataagccctcttcaagtggtaccctccctatacccaaaggaaatgaacagccttatctctgaagacacagggatacaaggaagaaactgaacaaacagactttgctgagttcctcccagcatattatcattagattagaccctttgtcctctgtcacatttccccatgactgcca

SEQ ID NO: 409545 - DNA, 493 bp, Homo sapiens
ttaacctattcacacttcactagtcgagaagttgatttgtgagccaccttcccgcttctccattctctggccatcaaaaaaaacttgctcttactgacattcactttcaattttgtgtattggctctgcaacactgaatgtggaaagatcccaccttttggagctaccaagcttctggtaacagtaccatacccagctctagtctccatgggcaaggtactggtggattcaggacatgctacccaaaatctggcatctragaaaacagtagaagggtagcttttaccttccccttgcccttctcccctgaagcaggttataagccctcttcaagtggtaccctccctatacccaaaggaaatgaacagccttatctctgaagacacagggatacaaggaagaaactgaacaaacagactttgctgagttcctcccagcatattatcattagattagaccctttgtcctctgtcacatttccccatgactgcca

SEQ ID NO: 409546 - DNA, 525 bp, Homo sapiens
tgggagaaagccttcatgcttcccagcctctccaatcctgcgtagagcttctcctcttcccttcactcagawctttacacccataattctcacagttctttcacaatgatgccgaaattatccaggaaaaatttatttcctagatttaagttacctaaatttggaattatctagaacaaactgcagcctgcaggccaaacccagctgccttcttttacaaatgcagccatgtgctgcataacatttttgttaacgacagaccacatatgtgacagtagtcccatgggatcataaagccatgtttttactctatctttcttatatttaggtatgtttagatgtacaaatacttaccattgggatacagttgcctacagtattcagtacagtcacacgctgtatggatttatagcctaggagtgatagtctacaccatacagcctaggtatgtagtaggcttgtttaagtatactctgtgatgtttgcaaatgattatatcacctaagatatgtttctcagaatgta

SEQ ID NO: 409547 - DNA, 499 bp, Homo sapiens
aattcatagcatggtgctgatttgatccataataagcacatgttatctaaggaccttcttcgttacgctttgtcagctcttgttactaacaaatgaactatcttcagaccttcctctcacggttatccagaaagaggatatttatggttctggcctcaattgtcttactatcaattcattcattgacacctggctgttttgttttacaaaagcccttgactattttgggttcctctaaccttggagttctggctaagtcttgcctgataattttctctaatgttctggtttgagtccactttccttcctttttctccccttgatattgtgctcaccctgatggcttcaattactttcattagaacaattccaaaatctatatgtgtcactcggactctcatccttaatctcaatactatgcttacaactcttcattattttattaggaatgttcctcrgatatcttaaatttatcaggcttcactccagacttacagtc

SEQ ID NO: 409548 - DNA, 496 bp, Homo sapiens
ctgagttcctgtgtgtccctgttgccccttagaactgctgcctgtgactgtggatccagcttcttccaaagcacattgaaaagaacaatatttgtatatcactttatagtttgtaaggcactttataaactgacaagaacaatatttgtaccgcactttatagtttgtaaagcacttaatagcctgggcagtaacaggactctttatacctccatgtgaaccagtcaagaaaataatttaagcttagctctttctgcagatgaatgaacagaggcctggaagagtgagatattttgcggagccggacatggatcctgagcagcctgctctcctactgcccaggcctcattctgagcagtgtggaaggcttctggtaccccagtttgcattccgaggcaggttttggaatatgtgggctgagaagcagagrctggcagcaagatgtgggctgaggaagcggtaggagccacgcagagaacgggggtgggggaagcca

SEQ ID NO: 409549 - DNA, 406 bp, Homo sapiens
agactctgtctcaaaaaaaaaaaaaaaagaaaaaagaaactgaagctgaaggtagagccttggctattctctgctgttggctgttggagggacactgatggcagctagacaggagtacaacccttcytccctcctcctgccaatctttcagctgtgcctcctagtaacagaagccagcagagagccaggcatcaagaaattctgggaaatgcagtgtgcagacctccagccccagaatcacagagtccagcaagaggctggcaaagtacaccacagaccacatgactcctgtttttgtatgacccagtatttaagaaaagctctcacatttttaaatagttacatttttttaaaaagagcgtaatattttatgatgtaaaaattctacaacatacatatttcagtg

SEQ ID NO: 409550 - DNA, 272 bp, Homo sapiens
gtactggatccagggcactgtcctgaggcccagatgaggattatgactaactgtggctctggagttgaaaagacgtggggcttaaatccagcttggtcagtcacttctcgtgtggtctcggataaatgacctaagtcttctgcaaatcagtgttcttatcgatgatatggaatgctaatagtagcaatttcatagggtgatggtaaagactggcrcataatttttgcttcataagtgttacctaataccctcatgcttctcactgatattgt

SEQ ID NO: 409551 - DNA, 550 bp, Homo sapiens
caatgagcttgccactataccaacggagcagctgaatgtcctgaagaagctgttgaatatttgcatatctttaaatcttgctctaaatggtatcatttcttttaaatagactaagcggctatgaataattagcagttaataattattatgcctcattaacttaataaaggattatgtcttgatagaaaatgcagagataattggaaaagaaagttaacccatgcttcctcrgcttccgagggaaagagctgtccagttggaggagtagcccagagtctggaagactctactcccctggggccagttcccaagctgctaacctatgaccaagtgggacctagagagccggcttcgaaagagcacagtcactcaccaaacagaaatcccagaaaacaaaacatagtgagcacggttagcagcagcttaccagggtcgcacacctgtgacccagaacacagcgagcctgggaaggtgggtagtgctgaaatctcactcagagagctacaatttacggaaccgctactctggaaagataaatataggttagata

SEQ ID NO: 409552 - DNA, 418 bp, Homo sapiens
aaattctaaagctctctaggggattccaatgtgcaggcaggttgagaattacagctctaaagttcaagagctccctactctcagcaytttgcctccctccctctgccctgtcctttgcagctgactccagctcttctgttagctctcaactcaaatgactcctcttcagtgaagccttccaggagcatctttgtttctttcctagaatttgtcatactctgtaattttcctatttatttatatgtgtgtttattgtctgtttcctacagtttaatgttagtcccataatgccaagaaccatgtctggtgtggtttgctgccatacctaacatgtaacatagtgtttgatccatagtacgggcttatcaaatggttggtgaatgattgaaaggccattcaatcattctttatagaacaa

SEQ ID NO: 409553 - DNA, 595 bp, Homo sapiens
ccctgcttatactaacgagtgatctccatgggcagagttaatgccaagccccgttcagccgctaggccatccccagtacagggtgagcacacagactaatttaggtggaataaaaacacatttttacatggtgccctgacaccaagacaggcatttcctccccacaaaacaagcccaattatcatggcacgctctgtggcctctgctgttctgtgaaaagagttgcaaattcttttaaccctttataacacagagaacaggaacaaaggggagcaggaagttgattctggacacgtgcaccatgcagcgtcacactgagagctcaagtgtttgaccccaggaaagtactcagccatttggtgcctcagtgtctcccccggatacagggctgttgtgccaattatataagttaatgcaggtgaaactctaagaacagtagctgacatayagcatatgctcaataaaacttacctattagctgtttttattaaatagaagccagaaaataccatgcaatatatgccatattaagggatgggttaaaccaagatctggcttgctgatgtgtggagaatacactgggcaggacaagaag

SEQ ID NO: 409554 - DNA, 571 bp, Homo sapiens
tctgctggttcttagaaatgttataggacattaaaagatggaagagccacagactggaaggagtcagtctctgaatggtcctgtgcagataagcctccctgttgatttgaacactcaatcaggactgttacataagtaaataatacacatcaaatgtgttaatccattccacatttgagtctacctgtgattrcaatacagcctaatctactccaagtagcacgcatgccaaaccatgactgaaaataagatgaaagcatgaatatgcccaggagaattcaaatttggagcctcatttttttaatgtttatgattttgatttttggagaactttaaaataaatcagtaatatttgcacaaagtaaacgtgactgcattacaaaagcatatgcagtaaaaactgagtttcctttctaccctgaacctcaagttccccaattcccccttcaggaaagaaccacaataactaaattcttggatattcttttagaaatgttctacatctgtacaaatatacagtatagatccccatgtactttgttatatatatatatatatatgtatagtgtgt

SEQ ID NO: 409555 - DNA, 538 bp, Homo sapiens
ttcgccctcccccgactcccaaccttatttcttcaacttagagagtccactgggctccgcccaggtttcccttctctgtgctgtggaccataaatgccctcccggcagtaacctctggcctcctgctcagccttgtgtgacccagtcagcccatttggcttcragggatcctcctgtgtatgtgcgcaccctgagagtcttgggtttcatcctataaagactgtgccaggtctgccatcccaaggatacagcaagtaacatctccactacgtggcctgaagggtgttagaatggcagcctttctcagatcttcactggggaattaaggaactatgagtctaaagaagaggtagaaagaaggaaaactcagcaggcaagagtcagcacacatgagctagatcatctctgttgcagaaaagggaaccggggagtggctgctgggaggcaggggtggaagcattggagggcagagtgccaggagcctgcaatatcacatgtaaaatgaaatgccagtatcaaggctctgaagggctctgac

SEQ ID NO: 409556 - DNA, 538 bp, Homo sapiens
ttcgccctcccccgactcccaaccttatttcttcaacttagagagtccactgggctccgcccaggtttcccttctctgtgctgtggaccataaatgccctcccggcagtaacctctggcctcctgctcagccttgtgtgacccagtcagcccatttggcttcaagggatcctcctgtgtatgtgcgcaccctgagagtcttgggtttcatcctataaagactgtgccaggtctgccatcccaaggatacagcaagtaacawctccactacgtggcctgaagggtgttagaatggcagcctttctcagatcttcactggggaattaaggaactatgagtctaaagaagaggtagaaagaaggaaaactcagcaggcaagagtcagcacacatgagctagatcatctctgttgcagaaaagggaaccggggagtggctgctgggaggcaggggtggaagcattggagggcagagtgccaggagcctgcaatatcacatgtaaaatgaaatgccagtatcaaggctctgaagggctctgac

SEQ ID NO: 409557 - DNA, 538 bp, Homo sapiens
ttcgccctcccccgactcccaaccttatttcttcaacttagagagtccactgggctccgcccaggtttcccttctctgtgctgtggaccataaatgccctcccggcagtaacctctggcctcctgctcagccttgtgtgacccagtcagcccatttggcttcaagggatcctcctgtgtatgtgcgcaccctgagagtcttgggtttcatcctataaagactgtgccaggtctgccatcccaaggatacagcaagtaacatctccactamgtggcctgaagggtgttagaatggcagcctttctcagatcttcactggggaattaaggaactatgagtctaaagaagaggtagaaagaaggaaaactcagcaggcaagagtcagcacacatgagctagatcatctctgttgcagaaaagggaaccggggagtggctgctgggaggcaggggtggaagcattggagggcagagtgccaggagcctgcaatatcacatgtaaaatgaaatgccagtatcaaggctctgaagggctctgac

SEQ ID NO: 409558 - DNA, 583 bp, Homo sapiens
ctgaagggctctgacaggcaatcagtaccccagctgagatgggagcaggtgtctcctccccaggaagggccacagggatggatgtcaagaggarataggaagcaggaggaagaaagagtgtcacatgctggctggaaagttgagaattcttgccccatgtctgaggagtgcagcgagaaccctgtagttttgcctgctcaaccttcatcccttcacctcttctggaaatacattttgattttcctttgggggctccctccctcactctcagtccatgtagttctaaggagattgacccattgccaggctctacatgtgggcatgtgactcaagccagccccagcaaagccaaaccaggaacttttgtgagagccataagaagatactgtttttactaaggttgctaagttggtaggatataaacatgacattgcagacaaccaactaggcactctgcagtgaaattctccatgatactaaagtcaacgtagagggaagcagaaccagagggtagaggaagattcctgaggacatttttgaacacctagacccagccatacctgaacccatagcctcctaaatg

SEQ ID NO: 409559 - DNA, 583 bp, Homo sapiens
ctgaagggctctgacaggcaatcagtaccccagctgagatgggagcaggtgtctcctccccaggaagggccacagggatggatgtcaagaggaaataggaagcaggaggaagaaagagtgtcacatgctggctggaaagttgagaattcttgccccatgtctgrggagtgcagcgagaaccctgtagttttgcctgctcaaccttcatcccttcacctcttctggaaatacattttgattttcctttgggggctccctccctcactctcagtccatgtagttctaaggagattgacccattgccaggctctacatgtgggcatgtgactcaagccagccccagcaaagccaaaccaggaacttttgtgagagccataagaagatactgtttttactaaggttgctaagttggtaggatataaacatgacattgcagacaaccaactaggcactctgcagtgaaattctccatgatactaaagtcaacgtagagggaagcagaaccagagggtagaggaagattcctgaggacatttttgaacacctagacccagccatacctgaacccatagcctcctaaatg

SEQ ID NO: 409560 - DNA, 595 bp, Homo sapiens
tgttcaaacagctgtccaggtcccataagagacctttgtttaaccaagtaaatggctttcttcatttattaaaagcattttacctttccctcaaataagaacagattgtgaggacaaaatgacattatagatgtgaaaatggtttgagagtaaaagttgaattccaacattattacaatgatgaccctatcagtaatataggctttacatatatcctccaggcacttgtaaaaaatgaaaaacaggccaggcacagtggcccrtgcctgtaatcccagcactttgggaggccgaggcaggtggatcacctgaggtcaggagtttgagaccagcctggccaacacggtgaaaccccatctctactaaaaacacaaaaattggccaggcatggtggtgggcacctgtaatcccagctacttgggaggctgaggcaggagaatcacttgaacctgggaggcagaggttgcagtgagccaagatcgcgccattgcattccagcctgggcaacaagagcgaaactctgtcttaaaaaaaaaaaagccagaagttatgtgaaaagctgaatttagatcaagacactgtgtgtgtatatatt

SEQ ID NO: 409561 - DNA, 538 bp, Homo sapiens
ggctgaggcaggagaatggtgtgaacccaggaggtggagcttgcagtgagcaaagaccacgccactgcactccagcctgggcgacacagcaagactgtctcaaaaaataaaaaataaaaaataaaaaaataaaaataaaggagaagatgctctgctagatcaatggttctcaacttgagctgctcatgagaattactgcatactgggtatgcagtagagacagaaatcactactctaggataaagttacataagaggtatttatttaaaactccgaaagtcattaaaacaacaaaacctatctcattagactatttttttaatcctcaaaaatacagagaacccaacctctctattraaagtcattagcaagtcaatactgaaaacttactatgcactaaacattctagaaatcaagctgaaaataccatttatatattttatatatatattttttctttctttataccatcaccttctttatagaaatggtccatattacatatttaaataatctgtgtccaaattgggttatttca

SEQ ID NO: 409562 - DNA, 590 bp, Homo sapiens
gggggatggaccacctaggaagtacagattccaaagaatggaagccagtgttccaaagtgtaggacttatctaagctttaatgcctcgcttacaatgatctgattagctaaggtggtctttttcccttgagaaaggtacatttaacattccacatggaagacgtaactgttatggggtcctgagcaccatctagtctgagttagatacaggacaaaggaggcagctaatctataacaaagatcagtgattggaaggaaagatctgkgctctgatctgtcttactcatttacagaacaagaacagtgaggaagacagttaagctataatgtaagaagcagaattccaaacatatgacgtgactcagtctccagggcttaccttccctgttggcataataaattcagagggtcctaaaattttattttcttttataaactctataccaaggaagttcaaaggggattccagatcagctggggggctctctgtcctgttctatgcactctttcaagaagccaggctgatactggctttgacatctttgacatgtgactttcaaaaatactggagtgtcaccatcccaatgaat

SEQ ID NO: 409563 - DNA, 595 bp, Homo sapiens
ataggcggaagggactagccttgtttcagatgagactttggactgtggactattgagttgatgctgaaatgagttaagaccttggggaactgttgggaaggcatgattgattttgaaatgtgaggacatgagagttggcagggaccaggggaggaatgatataatttggctctgtatggttttatcaagggtctccacttttgcgtcttcctcattctctcgttgcctgctgccacccatgtaagacgggacttgctcctccttgccttccaccatgattgtgaggcttccccagtcacatggaactgtaagtccaattaaacctcttyctttataaattgcccagttttgggtatgtctttatctgcagcgtgaaaatggactaatacgttaagttgataccagtagagtggggtgcttctgaaaagatacctgaaaatgtttttctcaaaagatcaatatcattttatattttaattgattttaaaaagctttcctctaggttgtctctggacagttttaaaaatgactaaggctaatgggtgttccctcacttacatgagagaaataaaccaggaattttggtttatgaatt

SEQ ID NO: 409564 - DNA, 488 bp, Homo sapiens
cccatacccttgtgaaaagcaaacctgctatcgttcaatatctcttcatatttttaaagataaaatttacataactgaagtgcataaatcgtaagtgttcaatttaatggcctttaaaaatttacataattataatattacatacttacatacttataatattacaaatttacatacttataatattacaaatttaacctcttgtttgaagactgctttggataagctccccatgcaactttaacatctctttattacaaaacttattgcaatgatttctctgtagagwcatccattctttagagaagtccactgtgttcactagaatattaactcattaaagaaagggactatgccttttcagtttggggtctctacttttggacagtatctggtatacaacaaggtaccaatgaatgtttgctacataagtaaagttccattggaacaaataccctgcagctttaaataggggagctgtgtaattt

SEQ ID NO: 409565 - DNA, 488 bp, Homo sapiens
cccatacccttgtgaaaagcaaacctgctatcgttcaatatctcttcatatttttaaagataaaatttacataactgaagtgcataaatcgtaagtgttcaatttaatggcctttaaaaatttacataattataatattacatacttacatacttataatattacaaatttacatacttataatattacaaatttaacctcttgtttgaagactgctttggataagctccccatgcaactttaacatctctttattacaaaacttattgcaatgatttctctgtagagtcatccattctttagagaagtccactrtgttcactagaatattaactcattaaagaaagggactatgccttttcagtttggggtctctacttttggacagtatctggtatacaacaaggtaccaatgaatgtttgctacataagtaaagttccattggaacaaataccctgcagctttaaataggggagctgtgtaattt

SEQ ID NO: 409566 - DNA, 577 bp, Homo sapiens
ctgtctactatggtagtcaatagctacatgtggctatatattgagcatttgaaatgtggctagtggtattaacgtaatacctgtctgtcaacacaggaactaacttcttaattttgtttatttttgcttaatgtaaaaataattttaaaatagctacacatggctagcaactaccgtaatgcacagtgtagcacttgattttgagctcggtgagggcaaataccatatcttactcacttttatcctatgcctagaacatagcagatcctcaaaaaatatatggagaatgagtgaatgaatgaataaatattttacagtggtagaatagagaaaaatctacttatcataagcaccagggaactattacayagaggtactgtgaaaactaataagcactgatttcttggtgaataaaaacttaatgcaaataagtttctaaaatgaaatggagaagtaatttctatcgggtcaacccactctcaggtaacaaaaataagctccatacaaaatataaaatataattggattaatctaaaggcactctagaagacatgaaagaaattggaggtaaacttat

SEQ ID NO: 409567 - DNA, 529 bp, Homo sapiens
cagtagattaaaatgagaaagtcaataaatttgaagatagagcaatagaaagtagctaacctaaaaaaaacaagagaaaagattagaaaaaagtagagtctcagtgatctgtggaaacaatgtggaaaggtctagcatatgtgtagttgtagtctcaaaagaggagagagagcaaaaatatttgagaaaataattggaaaatatttcccaagtttggtgaaaggcatacatttacagatataactataacaaacccagtgaagcccaagcaggaaaaatacaaagaaaaccacatgtatgcacattagaatcaaacttctcaaaccatggttaaagagaatctcttgaaaacaaccacagattaaccacagattaacatattccataatgtagaatgatatgaaataacaataatttcttatcagaaacmatggacacaaggagacagtggaatgacatttctaaaatggtgaaaggaggaaaaaagtcaactaaatgccaaaaaaaacatttgaggatgagggcaaaa

SEQ ID NO: 409568 - DNA, 401 bp, Homo sapiens
gcatgtgtgcacttgttaacacctgcatttatggatgctttcattcactgacaactggctatgtccgccatgaggccaggcgctatgctaggcaggcatcggggtactagccacagggccaggacttggagggacacttgcccaattcagggtacagccatggcagccaggatagtggcaggtccaggtggcaycatgccatacttcaaccataaatgccatcaatttcctctctgcagcagctcatgcagtgggagcagccagattctctaaggccatgccaattaattcttcaagagccttaatggcctctaaactcattacaatttgcttttgaggacaaacaataaatcacattcaacagcatttgagcatactccccctacacacacacacacaca

SEQ ID NO: 409569 - DNA, 630 bp, Homo sapiens
caagtctcaaatgagcagagtggaaacaagggygtctcctgatgcttctcctggaaacaaagccccagcatctgcctacaatgcacctggggccatgtgggccagattagagtgtgccatgaacacccgcgggtatggcagggcctgggagaaccctgccattatcctcaccatgcacaaattcccagaggcaaacaccacaggccactttgcacttgcaaacacataaaaacaagattgctcagattctcaggaataaaggtgttggaggctcactctgctcccagctgctcctgagctccaactctttcaagcctgtcttctggctctacaaccacccactccaacccacctcaccccagcaagctccccacctggaagattccaattcctccttccaacccgctcagacactccctcctccaggcagtcttccttgccttccctctgcctggcatcccttatcctcatgacctgctcaacacacagtgggttcagattctgctgcttgcatgtctcagtcccctaccaagggacaagtttgtgagaacagggctcatggcagattcacgctgtcacctcctcctttttgcagggcacctgacacatagtggcaatggagcagggatt

SEQ ID NO: 409570 - DNA, 624 bp, Homo sapiens
gatgtttatttcctacgagcacggaaaatccgctgactatgttttccatgccttaccaatcactctggtcctagtgaggagaacaacagattgaaactgggcaggagtgagtggacttggggagaaaaatgaggaagccaatttggttttccatgaaaaaatgaaggacacaactttaagactaggatcagagcaatggaaacggaaaagcatggatggatttaaagacaagaggcagcctcgatgtgcacagggtagcagatgagagatgtgcggcccaggatggcaagaggaatgcagcagccgcatgccagcagcttgccagccatggggccgtctcccggggagtccagagtgcccartctgtgtctgttcttgtgttccctgggttctcctaataaacctcccttcttgcttaaaatagaaagcaaaaaagcatgagctaagtaagggagggagaagacggataaatgaggcagggagctgatgagtggactgacaaatgactggcaggtgaccaggggaattcattcatgtccccaaatgctcaagtgaggagaaactggactcacccagaagaaaaagaaagcctcctcactgggtatccctcagagggacccctcc

SEQ ID NO: 409571 - DNA, 557 bp, Homo sapiens
acacagaaaacttgcacacaaacatacttagcagtgtaattcaagatagccaacaggtgaaagtraccagatacccctcaaagggctaaaggataagcgaggggtaggacatccgtacagtggaatgctacttggcaagagaaagaaatgaactttgatatgcgcagcaactttgatggatcaaaagtaatcataaccaagtgaaagaagccagattacaaatgcacaccatatgatcccgtttataaacaagtctagaaatgcaaactaatccttctagaggcaagagggaaggattacaaagaggcatgagagaatgtttgagggcatggatatgttccatcatgagtgtgtttcacatgtgcaaatatatgctaaagcttattaaattgtacacttttaatatgtccagagtattgtgtgtcaattttaccttgataaagctgttaaaaacaacaacaacaacaacaaaaccagcttcaggacacaaatgaaagtttccctttaatattgagaacaccaaatctcatttttaattaagactcatgcagtgcagg

SEQ ID NO: 409572 - DNA, 546 bp, Homo sapiens
aaaaagcccattaaaatccgagtgtgagtagggctttcaaaatttaaatgacttgggtgctggctgcctgcttttaactgagcacctaaacaatctgaacaactgttttatctacaggacccacccatgctatcttaccatcattatgtcaaccgtgttgccctatttcacattatgagactagtccattgagcctatcagccaatggctgtcagaaggaacactcttgttttgcaggtactggcttaccattcaggtatctggaagtccttctagaagtagttgatttgagaaattattgccccaaattaaatgtaatcgtagaatcatattcaygttgtattttgacagaagtagatatttgacaagcccaaactacaaagcattccaggctatgaatgcctgtagaacttgggagctctaagtttgagtctaaacaccttcacggacacttcatgcggtggccatccaccacagtgagaacacaagcaaggctcttccatcttccactgtctaaatctgtgggatggtttgaacttcccactc

SEQ ID NO: 409573 - DNA, 525 bp, Homo sapiens
agttattcagctaatcagggagggaccagagaaaggcaaagcccaatccaaggaaatccagaaaatgataaaagaagtgaagggagaaatattcatggaaatagatagcttaaagaaaaaaacaatcaaaaattctggaaactttggacacacttttagaaatgtgaaatgctctggaaagtctaagcaatagaattgaacaagtagaagmaagaaattcagagctcaaagacatggtctttaaattaacccaatccaacaaagacaaaggaaaaagaataagaaaatatgaacaaaacctccaggaagtctgggattaagttaaatagccaaacgtaagaataatcggtgtacttgaggaagaagagaattctaaaagcctggaaagcatatttgggggaataatcgagaaaaacttccccggtcttgcaggagacttcaacatccaaatataagaagcacaaagaacacccaggaaattcatcacagaaagatcattgcctaggcacattgtcatcaggttat

SEQ ID NO: 409574 - DNA, 476 bp, Homo sapiens
accagacaggaggctgcgatgggaatccaggtgatagtgtaaggtgaaatcaacaagaattgctagtaattggatattggcaaggactggagcaggggaagaattagctgtctaggaagacttccaagcctctgccataagtgcctggaaggatttggtgcccctcactgggatagggaataagggaagaagactcaggtttggaagggcaggggaagggagagcctgggaccagttttgaaggtaagattgacttgcctttgaagaattatccaagaagacgtattatataggcagttatttytacaggtcagaagctaaagaggtgtcctgactaaagttaaaaatgttgaactcgttttggaggtagtagttaaaggacaaatgtcgtcacatggatcgcaaggaaagagaggactttaagaaaggagatgcgactgccctatcatgctatatgttgttgtgatcccagtgag

SEQ ID NO: 409575 - DNA, 542 bp, Homo sapiens
atgaactgaaactacccttccatttgaaacaaccaaaagttctcaaaataaagaccatgaaaaaatgatttccaagacacaggctatcagtgaaggatagtaatgctagaaggaaacatagagaaaagctccatgacactggcttacactagggcttctcagatacagccctgaaagcacgacccatacagaaaacaatcatcaactggacttcgttaaaattacaaactcctgctcttcaaaagacattgctaagagaatgaaaagatcagccacgctgggagaaaatacttacagtcatatatctggatttgtatccagaaaatataaagaacyctcaaaactcagcagtcagaaaacaaattatccaattatgaaaaatgagccaaagagttgaacaggcacttcaccaaagaagatataaagataaatgagcatatgaaaagatgttcaccatcatcaatcttttcgtaagtgaaaaccacagtaagataccactatgcagctattagaatggctgaaagtaaaccgactaaccacgc

SEQ ID NO: 409576 - DNA, 485 bp, Homo sapiens
ggcaaatacttgtacacatacatacacaaagaacaactatttatcagatgtgtcttatcatacactttgcacagactagttcacttaaccctgacaccaatattatgacataactgttatatcattctcattttacagatgaggaaactgaacactggaggctgaatcacttgcccatggacacaataaaaaaaggcagagaaggggtggtattcaacttaggtctgtctgtttccaaagcctgcctcttaaccacaatgccacattgccttgtggctggtcatccaagtgtttatgaatcctaacttgccaatayttcaagatagtaaaatatattttgattttccaggataactgaagagccatagacaatctaggttggggctagaattagaaatcaacatcctcattctcaagttcagatattaaagacattcgggggaactggccatctacgaaggggaggacgctgcatacaaagaagc

SEQ ID NO: 409577 - DNA, 549 bp, Homo sapiens
  misc_feature (1)...(549): n = A,T,C or G
nnnnnnnnnnnnnnnnnnnnnnnaatccattgcatctcctgggtgacagagccctgatctccctccagcttcttctccactacattttgtctttatgcctctgggtagaaaggatgtctgtccattgatcctcagcctccaggcatagttcccatttggcatgagccaattatcatatcccaccccgctgcctggccatatggatcagtcagggatgtgctctggaagcaatcagagccaaataaatgcacagaggcactgctggggcttctgggaaagggaagatggcttcaccctcaagctccacagagagtctcccatgcttcagccatcgggggaaggactggagcagcgtargagactctgtggagcctgaggatgaggtcaacactgcaaaaggcagaaagagagagagagaaacagtgttggtgtcatgggttggcctgctggatcacatatcctgcctaaagcaggtagctctgacactttcagttctatgaaccaactaatggtctaggttaagatgcttgtcttttacaaaacagagat

SEQ ID NO: 409578 - DNA, 565 bp, Homo sapiens
cactcacccccaccctgagacctgagcaactgtggcaggacactattttaggagcactgctgtcactggactacatcttgttctgggaaacacagcctctgtatctccacacmctgggagttcccactgacattccccagcatctactgggatggctttagcagcatagtgttggccgtacccaaagttgctacagggtccccagttctctagcacagttgtccccaaactcctggctgtggactggtactggcctgttaggaactgggccgcatagcccagatcctggcctgttaggaactggactgcacagcaggagatgaataacaggcaagggaacaaagtgtcgtctgtatttatagccactccccatcactcacattgctgcttgagctccacctcctgtcagattagattctcgtaggagcacaaaccctattgtgaattgtgcatgcaaggcatctaggttgcatattccttatgagaatccagcaaatgcctgatgatccgaggtagaatggtttcatccccaaaccactccacccccagcctgtgaaaaaactgt

SEQ ID NO: 409579 - DNA, 565 bp, Homo sapiens
cactcacccccaccctgagacctgagcaactgtggcaggacactattttaggagcactgctgtcactggactacatcttgttctgggaaacacagcctctgtatctccacaccmtgggagttcccactgacattccccagcatctactgggatggctttagcagcatagtgttggccgtacccaaagttgctacagggtccccagttctctagcacagttgtccccaaactcctggctgtggactggtactggcctgttaggaactgggccgcatagcccagatcctggcctgttaggaactggactgcacagcaggagatgaataacaggcaagggaacaaagtgtcgtctgtatttatagccactccccatcactcacattgctgcttgagctccacctcctgtcagattagattctcgtaggagcacaaaccctattgtgaattgtgcatgcaaggcatctaggttgcatattccttatgagaatccagcaaatgcctgatgatccgaggtagaatggtttcatccccaaaccactccacccccagcctgtgaaaaaactgt

SEQ ID NO: 409580 - DNA, 595 bp, Homo sapiens
acagggtctttgttgatttcattaagtgccagattttggtcacccagcttgcctctgagtagacacacctcatttccatgagtattctaggaggacagcatatgtcatttgccaacacaccaggcaacatccacataataaaatgcaaccgccattgaaactgggctaaaaaccaatccatccagtgtttaatgagtaacattagcacrctcttaaaaaacactaataacaaatttactgttgattttagtgttgatggcaggtatccaaaacctaacttcctactaaattcattttagtaaaagcaaaaaataatgaatgaaataaatgaatgtaatttcaagttattgccagaagttagacttttattatcatggcattaactcagaagagaaacatcttacttttcccaaattacaattttattttagggaacccttttcctcctactctgaatttcaatctaatattgttttcaaattagcttttattgttttacttttaaagtaatattattgtatgcttttaaagttttactccaaaaggaagaaaaataaaaaaaagttgcagctttaaaaaatttctaaaatataga

SEQ ID NO: 409581 - DNA, 612 bp, Homo sapiens
gtactggggcttatctctgaaaatatagcgtggaataytgtaggacatatgggtggagtatggagacaagaagaaaattggagagacaaattcagaagctattacggtggcctagactatgccagtgatttgacctaaattgctaaaagaagagatagaaaaaagtggatggatcccagttatagcttggcagtggatgtcagagtgagcatgaggaaaaggtagaagggaggcatgtctcctagattcctggcattagaaaggatgccagaggatggcggtattcttttttgggatggagcagaaatggcataggagtcaaagattccatttcagacatgtttatggaggtgctagtgagacatacagatggtgagctcaaacaggcaggggaatatttgagtctgcagctcagagcagagggctagatggagacatttatttgaaaagtggtaacataaagataaccttgaagtctggagtaaaaatgaagttgctaagtaaagaatataaatagaaaataaaagtggcccaagaagtagcccttaaaacaacagcaacaagatttagaggtctggaatgagaggagaagcaaatagtgaaactaaactc

SEQ ID NO: 409582 - DNA, 658 bp, Homo sapiens
gcttttcttatttaggtatttataacagaaaaaaaaatctagtctctacagatgaaccctaaacaagacagcatttaactctgacccataagttgcattattttggtaattaaatgagatagttacatrtaaaatgtttagtccaatgcttatcacagagtaagagctaagtattagcttctccttttccccttatgatagtttacatgcctaatgaagtttgatgtgaacttgcctgaagatagaaaaattaaatcattttgatatactctttaattatgttggtggctacatatgacttaatacagaaagacatagagatagtgtgttataatgatagagacatagaagagtgaacaatatttagagcaaaatgatctaagcttatctaagtttaactctcagaactacttaatcatttgcccttgagcaatgttttctgggatttatttgttccatctgtaatgagagatggattaggttatatatatttaatgttcaacaagtcattaaacacaattctgagactcaaattccagcttcatttactcccaatttacagtagtgatttaaaacatgaggagtgttcactttagatgattcattgttgaaggagtgtgatggcaaactatgaagagactttcttttaaaaacgtgc

SEQ ID NO: 409583 - DNA, 658 bp, Homo sapiens
gcttttcttatttaggtatttataacagaaaaaaaaatctagtctctacagatgaaccctaaacaagacagcatttaactctgacccataagttgcattattttggtaattaaatgagatagttacatataaaatgtttagtccaatgcttatcacagagtaagagctaagtattagcttctccttttccccttatgatagtttacatgcctaatgaagtttgatgtgaacttgcctgaagatagaaaaattaaatcattttgatatactctttaattatgttggtggctacatatgacttaatacagaaagacatagagatagtgtgttataatgatagagacatagaagagtgaacaatatttagagcaaaatgatctaagcttatctaagtttaactctcagaactacttaatcatttgcccttgagcaatgttttctgggatttatttgttccatctgtaatgagagatggattaggttatatatatttaatgttcaacaagtcwttaaacacaattctgagactcaaattccagcttcatttactcccaatttacagtagtgatttaaaacatgaggagtgttcactttagatgattcattgttgaaggagtgtgatggcaaactatgaagagactttcttttaaaaacgtgc

SEQ ID NO: 409584 - DNA, 636 bp, Homo sapiens
agctgcatggcacgtttccacatgtagtagagcaagatctcagtcattattctgctatttcaagactgttaaactaacctcatgcaagattgctttatgaagatctcttgacaacatctatattttctaccttgataatttccttctaaaagcaaaaatacatttggatatgttttgtaaactctagtaatcatasaaatgtaaattgtgcatgccttgtaggtagcagggtctctcttataattctcactcatcttaggtacaggagggaaaaatgtagcttttaaatattgcctgtaactatctgcctcctacaaccccattttcaggttattcacataacttggggataggtggtcaaaaaaataaaacttaaaccaataactagtcaaggacttttaaaaatggcttagattatttaaatataatttcctgctctctctcagagattgctctacctcaaacatctctgcttatccgctaaagatggcatctgggtagaaggggagtaggtgtttatacttcttgcgattcctgccttaccctgacctccaaaacaatgtcctttgaccaccttggggtggttagccctgctggcatttaggactgtggtcagcatctttttttttttttttt

SEQ ID NO: 409585 - DNA, 574 bp, Homo sapiens
catcatgttgacagtcaaaaagtttcaaacttctgaacatcagattagggagactcagtctatacattgtgtaattttcaggggaccagaggaattgaacttagtttagtttgtcatatcagtgggattttccatggtgacaagtggtaattattctaagattataaaccttaatacacctgtttgttgttgttgtatttttattttttacaattataaatcttgagtatagttaaaatttagaaaatttttttcaaagtactgtgtggaatcgaaagatatctaagacaatagtctttcaaaggtgcagaaagtagattcaatctatgcagagaaaagcagatttcaaaaaatataacagaagaaaaacagttggctgaacttactataaatacatatagctaaaaggggaaaaagcagaggagaaacagttatcttctggtcttgtagaagtttaaggtcttggtagatatyaggaacatgcaaaaggtaatgtttgtgtgttctctctctctctgccaatgctttaaaaatctctagggatatatcaaagctgtttaaatagagttttaaa

SEQ ID NO: 409586 - DNA, 561 bp, Homo sapiens
aatgtctgcaaagcacttaggatggtgcctgtcacaaacgtgagctattattattaatgcatgttgagctttcatcacagtgcttgacacctggcaatcattcagtcaatagtaactatttttatacacagtcaggtatcattattaatagaaacaaagaactatatggatttatggcaagggagaatctgaaaaatgagctaggaaggtttgttgttgcctaaataagcatatgcttagtgataatggttaggcttagtgggaagccatcagttaagcaggaaagatgaggcaaatgaagaaggcttttcagtaaacatgagygtcatactggtaaattggatggagttttcgctggagacacaacttgaaaataattgaacactctgtgaatatttgtaaagtagacttaccttaatactgtaaatggctcatatacattttctggcacaaatttacactgtataggttttctgcacatttgtgaatccccttgcagggttaaaccaaatgaacagaatccttccatcatgctcatttctaatgcaacctatattgcta

SEQ ID NO: 409587 - DNA, 562 bp, Homo sapiens
tgcttagtgataatggttaggcttagtgggaagccatcagttaagcaggaaagatgaggcaaatgaagaaggcttttcagtaaacatgagcgtcatactggtaaattggatggagttttcgctggagacacaacttgaaaataattgaacactctgtgaatatttgtaaagtagacttaccttaatactgtaaatggctcatatacattttctggcacaaatttacactgtataggttttctgcacatttgtgaatccccttgcagggttaaaccaaatgaacagaatccttccatcatgctcatttctaatgcaacctatattgctaccataagcagcaaaataaaattctttgcatgcatctgtacctcacaaagcaaggagagaggcattttgagacagattgtktaaatgatgaaatggagatcttgagattacatagtggttttaatgacaatgatgcctcatgttggcacaagattccttttttcaaaatgtattcttgtaactaatctcctaggatctgcacaaccaaataaaatataagtggagttaaataaaa

SEQ ID NO: 409588 - DNA, 560 bp, Homo sapiens
tttagactaaatttgctttaatttttgtcttttaagggaaggaatacaaaactgttacctcctcattacaaactggaaagctgaggcttctctatcagatatacacgagagatgttttttagcctaacctgtagtcagtgattccagacttcattgtcatgtggartgtcttctcttactatccatgttagcccagagaactctccttgtgtagactttaatctgactcctttaaaataaatccctgctaacctttcttgcatcagatgctggaagacctaagtaaacaagtctacttattcttcccaactacccctaaagctagcagtacctgtagacctgaatcctcttttctttaaattaagcttccttcaataggtctgaatttatcacaaatcctataaattttacctcctcagaaaaaaaatgtagtttacctaactccttgagaaaaaaaaatggaataattgactaattaattcaactaacattgacaattgccaatagtattagaatcttttctgtgttcttatactcagccgtaagcaggaaatagaaga

SEQ ID NO: 409589 - DNA, 494 bp, Homo sapiens
tgaggtgttgcccgactgattccagaattgcagataaaaaacaattaagatttttagactaaatttgctttaatttttgtcttttaagggaaggaatacaaaactgttacctcctcattacaaactggaaagctgaggcttctctatcagatatacacgagagatgttttttagcctaacctgtagtcagtgattccagacttcattgtcatgtggaatgtcttctcttactatccatgttagcccagagaactctccttgtgtagactttaatctgactcctttaaaataaatccctgctaacctttcttgcatcagatgctggaagacctaagtaaacaagtctacttattcttcccaactacccctaaagctagcagtacctgtagacctgaatcctcttttctttaaattaagcttccttcaataggtctgaatttatcayaaatcctataaattttacctcctcagaaaaaaaatgtagtttacctaac

SEQ ID NO: 409590 - DNA, 613 bp, Homo sapiens
catcagatgctggaagacctaagtaaacaagtctacttattcttcccaactacccctaaagctagcagtacctgtagacctgaatcctcttttctttaaattaagcttccttcaataggtctgaatttatcacaaatcctataaattttacctcctcagaaaaaaaatgtagtttacctaactccttgagaaaaaaaaatggaataattgactaattaattcaactaacattgacaattgccartagtattagaatcttttctgtgttcttatactcagccgtaagcaggaaatagaagatcactgatcttaggtaatttgcatagtagggcagggaagataggtgataaccaagaaattaaataattttaaattttattcagcagtaagttattcaggagacttaaaaaaaaatgaatgttctggagtgttacataatattacattgaatgaggcaagaagttctcctggaggaaattgcctttgaatgatgaaaaagaagtcaaacgttcaaaaatctgggacaaaaaggggctaagtaaaggaaaaatcagggcaaaggtaagacccagggtagtatattcaaaagataagggaattcagtaagcataga

SEQ ID NO: 409591 - DNA, 609 bp, Homo sapiens
atgattgaaagacaggactagatgcttcmtagttttaggatttgaataactgggtcgaccctattgttcttatcagaaatgggaaaaaggaagggtgagagagaaggtcttggggctgggtgagaatgaatagtactgtttttaaaaattcatacttagaattcacataatattttagatacgtttttacttacattcagtgcagattgaatatagtctccttaaacttgggactttatttctattagatcagtctcaggttatggttgtttacttagtagtcatatgtagaaaaacattgtattcaatagcaaactatgcatcctctttgtgttagccctcctggctgttagagtttagttccatttattgtatttaagccattttgcaactctttgtaaataggtaacggatagatacataaattctttcctgtttaatagtgattttaattaatttcctccttcctatggaaaaccacttctattcccatttgtaacatttcccatccaaactttttttattctatgtaatttttgcttttttgacttttcctttgaatctgttacaacatctccctggtttcctaatatcgtatgagtaaaataa

SEQ ID NO: 409592 - DNA, 351 bp, Homo sapiens
atcttctaaatcctgtgtttatataatgtgactttgacacatttatttcatataatggtaatttccctgaaaaatgttagactttcatatgaatcagctagactcaatcctaccaatacaattataaattcaaaaggcaaatgacctggaagctgaggcaggagaatcgcytgaacccaggaagcagaggttgtggtgggctgagatcgtgtcattgccctccagactgggcaacaagagcaaaattcagtcaaaaaaaaaaaaaaaaaagtcaaatgactcagattgtacctcagcaccaggaacattacatcttccaggggtaggggagaatttcttagctgttttaac

SEQ ID NO: 409593 - DNA, 447 bp, Homo sapiens
acaaacaaacaaacaaaaagtacaaagcaataaatgacaattttctcacttctataaattctctacttgagggtgagattcctacaagtttacaagtattatccactttagctttaagacctacattgttctgatgactggtgagaagacacataggcatgtcttcgccttgcagaggagtctttgtatgttttctaggggccataacaaggtcaaaaatgaagtaattkgacaccatttctaatttttccaggatccatggtgataaagaattacaactgtcttactatatttggcaccttaggaggcataaatgaaactaacattatttctaatgaaagacagttttcaaaggatgtctctaaaaattacatgttcttttattttggtactatatgtaagaactatcttctgggaaagtgcacccagataaaatcacgtgcttct

SEQ ID NO: 409594 - DNA, 269 bp, Homo sapiens
catttctagcttcatggagctttacatagaagcattgcaattagtatcccaatattttcaagaaaaattaaataactttctagcacttgtagcctgttactgcttagaaaaagaaaaagaaaaaaaaaagatggtggcagactatgtattttcrtgacagcaaatttttagaccttttgagaaatccctttaactagaaagcaattgctccattttaaagtaaaactcactggcaatgtcattttgaacttcaaagcaatgtcagtttt

SEQ ID NO: 409595 - DNA, 269 bp, Homo sapiens
catttctagcttcatggagctttacatagaagcattgcaattagtatcccaatattttcaagaaaaattaaataactttctagcacttgtagcctgttactgcttagaaaaagaaaaagaaaaaaaaaagatggtggcagactatgtattttcgtgacagcaaatttttagaccttttgagaaatccctttaactagaaagcaattgytccattttaaagtaaaactcactggcaatgtcattttgaacttcaaagcaatgtcagtttt

SEQ ID NO: 409596 - DNA, 592 bp, Homo sapiens
tgtgctttttttcctaccttgcaattaataatctgtgagaacatactctgagaaccataaacatgtcctgcttctccttaaaatttcctagtaaatttagcatctatgaatgactcttgcctcgcttccttcatgtttaaaaataagacttctgcatgtaagttgcttatttttgtacttaaatattttaatttgagattagtgtagattaacaagcaacascatgaaataatacaaagagatcatatgtaccttttacccagttttccctaatagtaacatcttcccaattatagtaagtgtaacaacacgatactgacattaacacaatcaaatgaggcatttgcatcacaaggacctctcatgttgccttctcatagccacatccactttgcttccatctgcacactctctttaaatcctgggagtcactcatctgttccctatttatataatttggtcatttcaagaatgttattgaaatggaaacacataacatgtaacctttcaggattgacatatttactcagcataattcatatgactgagtagtgttccacagcatggatttaccatagtttaactgtttgca

SEQ ID NO: 409597 - DNA, 455 bp, Homo sapiens
gatgtgtagcattttgccagaggatagaggatgctaatcatttaccctgccttccctttgggtcctaaccaattgtgatatcaacataagaagagtatacaccccttctgagttgaaggtactcagggcctcagataacaagtctctgtactatcttgcacattcactatagagagaccacacttgttttcaaggcactctataccatgaamcactctaccttctatgaagcagaagtctctccaaattaatgatgagatttcctcttttgatttcatttaggcccattcatgtcttgatgcaccacttgttaaattcttatgcacatgtaataaagtcctggcttagaagtgaaatgcaaaccctgatcataatttttttcttagtatttgtctatattgtagatagaaaataggtagtattcttattagcaaagcctgtttccactgaagata

SEQ ID NO: 409598 - DNA, 590 bp, Homo sapiens
accccctcctctgtgatttcattgccacctggttaaggtgggataatctctaaggctctttccactaygctgaagaacattaacttctattgtattttctactgatgaatgggacttcatatccatttattcattgccgtgcctttacacagactctgggtctccaagtaatgctggttgacctagttggagggtaaagcccttgaccatggtcagaaaactcaactatctaacttaaataaggctccaactcaccatcaatatggagattagtttcaactttttattattccaaggttaacaccaaccaggttaatggggtcaaaattgcatttgttgggtcagagcatgaagtggtctttagatgaaaagacaattgttaaaacccacaaagagagctaatgataatgagatgcttaatggtgtgatggaggagagacagctgtaacactctcttaatggaagttcaaatgatttttggtgaactttctctaactcctttgctcttgcattatgtataatttatcacatctaaagctctgagcccaatgtataataagcctggattttgagatatactttcaggcact

SEQ ID NO: 409599 - DNA, 522 bp, Homo sapiens
tggaagataacagagaaactgaygaattctaattgttgagcaattattggatgcattggggaagaagtcacttttgtaaattattgtgttggtgggaggaaatatccaaagccaaacaaggtaatattctttaggacttatggaatttatcttattgtgtctctcttctctataaaatggtacaacttgttactcattctctttcaccattaccccaccctatatatctcttattctgaatgtgtgtctttcaggaaaccagcatcccatggcctttaaatactccagaattagaggtggactgaactcatggctctgccgcactgctacttatgagcttcatgaccttttagaattcacttaaattctctgactcttggtttctcctttgatacatacattcatagaatacataaaatccgtacctcaaaattgtagtgaagacttaagtcggctagttcatgtccagttctaagcacacagtcattatccaatatcttgaaagaaaataatgcttagtat

SEQ ID NO: 409600 - DNA, 522 bp, Homo sapiens
tggaagataacagagaaactgatgaattctaattgttgagcaattattggatkcattggggaagaagtcacttttgtaaattattgtgttggtgggaggaaatatccaaagccaaacaaggtaatattctttaggacttatggaatttatcttattgtgtctctcttctctataaaatggtacaacttgttactcattctctttcaccattaccccaccctatatatctcttattctgaatgtgtgtctttcaggaaaccagcatcccatggcctttaaatactccagaattagaggtggactgaactcatggctctgccgcactgctacttatgagcttcatgaccttttagaattcacttaaattctctgactcttggtttctcctttgatacatacattcatagaatacataaaatccgtacctcaaaattgtagtgaagacttaagtcggctagttcatgtccagttctaagcacacagtcattatccaatatcttgaaagaaaataatgcttagtat

SEQ ID NO: 409601 - DNA, 522 bp, Homo sapiens
tggaagataacagagaaactgatgaattctaattgttgagcaattattggatgcattgggraagaagtcacttttgtaaattattgtgttggtgggaggaaatatccaaagccaaacaaggtaatattctttaggacttatggaatttatcttattgtgtctctcttctctataaaatggtacaacttgttactcattctctttcaccattaccccaccctatatatctcttattctgaatgtgtgtctttcaggaaaccagcatcccatggcctttaaatactccagaattagaggtggactgaactcatggctctgccgcactgctacttatgagcttcatgaccttttagaattcacttaaattctctgactcttggtttctcctttgatacatacattcatagaatacataaaatccgtacctcaaaattgtagtgaagacttaagtcggctagttcatgtccagttctaagcacacagtcattatccaatatcttgaaagaaaataatgcttagtat

SEQ ID NO: 409602 - DNA, 522 bp, Homo sapiens
tggaagataacagagaaactgatgaattctaattgttgagcaattattggatgcattggggaagaagtcacttttgtaaattattgtgttggtgggaggaaatatccaaagccaaacaaggtaatattctttaggacttatggaatttatcttattgtgtctctcttctctataaaatggtacaacttgttactcattctctttcaccattaccccaccctatatatctcttattctgaatgtgtgtctttcaggaaaccagcatcccatggcctttaaatactccagaattagaggtggactgaactcatggctctgccgcactgctacttatgagcttcatgaccttttagaattcacttaaattctctgactctyggtttctcctttgatacatacattcatagaatacataaaatccgtacctcaaaattgtagtgaagacttaagtcggctagttcatgtccagttctaagcacacagtcattatccaatatcttgaaagaaaataatgcttagtat

SEQ ID NO: 409603 - DNA, 574 bp, Homo sapiens
tcatgaccttttagaattcacttaaattctctgactcttggtttctcctttgatacatacattcatagaatacataaaatccrtacctcaaaattgtagtgaagacttaagtcggctagttcatgtccagttctaagcacacagtcattatccaatatcttgaaagaaaataatgcttagtattgattttaatggaaagtataaactcatactggtattagggaaaatgggtaattttgctataatcttttagagggaaaaactgcccaattatgactcaaaatcacaaacaataccagaaaagactgacaagttatactacaaaatcacaataacctttgcttagcaaaggacagaattatcaaagtgaaaataaaaaaattttaaaacctgaaaaactagaaaaaattactctagtcatagaatagctctagcctcaagctgctttttcctacccctcaggtgttcctctcctcccctttctgtcttcctggtcctgagcattgtatccttgtctttcttgaagtcacttgcgtctacccccatttccatatttgtctaaatgttaccaaga

SEQ ID NO: 409604 - DNA, 636 bp, Homo sapiens
agagctgagagtagagtcgcattccttggggccacatggacagcaaaatgaaaaattagtggtcttagaaaagggaaaaaattatgaacactgggaaagtgaaaagataacttctacactgaggcagatgaaaaatacagtgtcaatagcaaacactggaggagaatatcttgacataagcagcattaaggctatttaaaaggaggaaacagaagcccagagagttggaatagcagcctataggcacacaagcagtaagtggatgaactgggactcaaaggcagaactcttaaccccaaatctattgttctttctcacatatactgttatttccacagagaaccaagtgcgtagakctcataaactgcaaagcaaatttggctgtgcctgtggaaataaactgctgggtaatatatgacttagaccaatgacagctgtgaatttcagtttcatttccagatacagagatagtttgcagaatggtggagttttcacttgcagggcacagtaatgctcttcacttctcagaggcttttcagctaagactgtcaaaggtctctggaaagatgaaacatattctactccataattgaggagccagaggcaaagggtagtgaattagccaagccaccacca

SEQ ID NO: 409605 - DNA, 636 bp, Homo sapiens
agagctgagagtagagtcgcattccttggggccacatggacagcaaaatgaaaaattagtggtcttagaaaagggaaaaaattatgaacactgggaaagtgaaaagataacttctacactgaggcagatgaaaaatacagtgtcaatagcaaacactggaggagaatatcttgacataagcagcattaaggctatttaaaaggaggaaacagaagcccagagagttggaatagcagcctataggcacacaagcagtaagtggatgaactgggactcaaaggcagaactcttaaccccaaatctattgttctttctcacatatactgttatttccacagagaaccaagtgcgtagagctcataaactgcaaagcaaatttggctgtgcctgtggaaataaactgctgggtaatatatgacttagaccaatgacagctgtgaatttcagtttcatttccagatacagagakagtttgcagaatggtggagttttcacttgcagggcacagtaatgctcttcacttctcagaggcttttcagctaagactgtcaaaggtctctggaaagatgaaacatattctactccataattgaggagccagaggcaaagggtagtgaattagccaagccaccacca

SEQ ID NO: 409606 - DNA, 636 bp, Homo sapiens
agagctgagagtagagtcgcattccttggggccacatggacagcaaaatgaaaaattagtggtcttagaaaagggaaaaaattatgaacactgggaaagtgaaaagataacttctacactgaggcagatgaaaaatacagtgtcaatagcaaacactggaggagaatatcttgacataagcagcattaaggctatttaaaaggaggaaacagaagcccagagagttggaatagcagcctataggcacacaagcagtaagtggatgaactgggactcaaaggcagaactcttaaccccaaatctattgttctttctcacatatactgttatttccacagagaaccaagtgcgtagagctcataaactgcaaagcaaatttggctgtgcctgtggaaataaactgctgggtaatatatgacttagaccaatgacagctgtgaatttcagtttcatttccagatacagagatagtttgcagaatggtgkagttttcacttgcagggcacagtaatgctcttcacttctcagaggcttttcagctaagactgtcaaaggtctctggaaagatgaaacatattctactccataattgaggagccagaggcaaagggtagtgaattagccaagccaccacca

SEQ ID NO: 409607 - DNA, 394 bp, Homo sapiens
taagattttgggaggtgagctctaggaatgtcmtgcctgaaaagagtatctttgcttatctggggtccttagatcacaccaaattgtataacaatgtaatctagagtgaggactttgggccacaccagatagtctaataatgtgaattagagtaggggtttggggccacaaggtatcagcttgactctgctgaagtctgagattagctgtgtgagcagccatccaggtttatgtgacctaatacaaatgctagaaactaaggctcaggtgagttttcctggatggtaatgcttcatatatattgccataaattattcatgggaggagtttacactgtccattatctcattaggagaggacaactagaagccacaggtttggaacccttctaggc

SEQ ID NO: 409608 - DNA, 593 bp, Homo sapiens
cagcagggctgcgttctttctggaggctccaggggaaaatctatttccttgcctttccagtttctagaagctgcttgcattttttggcttgtggtgcctcccttacataatacagacctctgcttctgtggtcatayctttttgactctgaccctcctataaagactctcttataaagccccttggaaatatgtagatcccagcctataatccaggataatcttatctcaaggtccttactttaagtacatattttgggagactcattattctgtctagcatagagactgatgtattggatgaaatattcaggttctgacttgcacatttactgcaagtttgtaggacaaattttggatactacctcagaagtctcaggtaccctaaaagcaaaagaaaatccattcttcaaatcaccctttgtttgtgtagctgtggatgactttgcaatcagggaataaattctgtttcatcatgagcagagaggtcatcaacattcatgagttaaagtcaacagatgcatggggttcttttccatttggcaataggcatcttatctccatttataaataaatatatatatgtgtgtattg

SEQ ID NO: 409609 - DNA, 593 bp, Homo sapiens
cagcagggctgcgttctttctggaggctccaggggaaaatctatttccttgcctttccagtttctagaagctgcttgcattttttggcttgtggtgcctcccttacataatacagacctctgcttctgtggtcatatctttttgactctgaccctcctataaagactctcttataaagccccttggaaatatgtagatcccagcctataatccaggataatcttatctcaaggtccttactttaagtacatattttgggagactcattattctgtctagcatagagactgatgtattggatgaaatattcaggttctgacttgcayatttactgcaagtttgtaggacaaattttggatactacctcagaagtctcaggtaccctaaaagcaaaagaaaatccattcttcaaatcaccctttgtttgtgtagctgtggatgactttgcaatcagggaataaattctgtttcatcatgagcagagaggtcatcaacattcatgagttaaagtcaacagatgcatggggttcttttccatttggcaataggcatcttatctccatttataaataaatatatatatgtgtgtattg

SEQ ID NO: 409610 - DNA, 595 bp, Homo sapiens
ttaggttgcttagatgtggccatttaaagcatattggaactgccagcaatataggaattagttgtataatttatgtcatattaaattgttacacaacttcatgtactttcttcttttgtctgartttattgcctcactcatctgggagaataaaatgcatacagagtcgcacagtgacaaaggcaaactgctttttgtaaagaattttaagattcttcattgtggatttaattataagagtgcctttttgtcttgacatctctaaaatctgatggaagtgagtgggaaaagctgatgctatatggtttttcttacccaacttggatgtcatgtttactgatatctgattttaaatactcagaggaattttcagacaaaaaaagtctttttgaaaaacatattatggactttaggttaggacaagatgatatagagccatttttttgttcctcccataaattaaaatttctaaatttcataaattaaattctaaatacaactataagcccaggaaatagcacaagaggtatatttcagtccattcaggctcttatatcaaaaaatatcacagacaagatagcttataaacaagaaa

SEQ ID NO: 409611 - DNA, 595 bp, Homo sapiens
ttaggttgcttagatgtggccatttaaagcatattggaactgccagcaatataggaattagttgtataatttatgtcatattaaattgttacacaacttcatgtactttcttcttttgtctgaatttattgcctcactcatctgggagaataaaatgcatacagagtcgcacagtgacaaaggcaaactgctttttgtaaagaattttaagattcttcattgtggatttaattataagagtgcctttttgtcttgacatctctaaaatctgatggaagtgagtgggaaaagctgatgctatatggtttttcttacccaacttggatgtcatgtttactgatatctgattttaaatactcagaggaattttcagacaaaaaaagtctttttgaaaaacatattatggactttaggttaggacaagatgatatagagccatttttttgttcctcmcataaattaaaatttctaaatttcataaattaaattctaaatacaactataagcccaggaaatagcacaagaggtatatttcagtccattcaggctcttatatcaaaaaatatcacagacaagatagcttataaacaagaaa

SEQ ID NO: 409612 - DNA, 517 bp, Homo sapiens
acatgtggactttatcatctccttcccagaactaaaaaacagatagaatcactagayataaaactgaacaaggatacaatctcaacaacatactcaatcaacagcaattactatatatgcacacatatatatgaataaatatacatatatgaacacacatgcacaaatatgcatattccttcttcctctctctctatataaagtcagtccatttcaaacaacagtaaaatgcttattttattattccaaatggctatgaaactttcaccaaggtagactgtatttggagccataaaacaaacctcaacaactttttaaaaaataaaatcatacagaatgtcttttctgatcataatgaaatctaaccagaaatcaataacaaaaaagagaacagaaaaatctctaatctaatcaaatagaaattttaaaacatacttttaaataatttatagtcaaagaggaagtttaaataaaaatttaaaaagatagatggagttaaatgaaaatgaaaatacag

SEQ ID NO: 409613 - DNA, 586 bp, Homo sapiens
tggggtgttggtatgggaagttcctaaagcaagcatgatagctacaatgtaaaaggcacactgttgttatatattttctcagtgaggtraaaatgtgcattcttctatttcctttcccatgtaacattatgtgccactgaaatacccattaacagttgctataggtttaataccctttaccatcttgaggtacaaaatattgtttttaaatgtctaaattactgtgattctgaatgctcacagatcactctttctttcccagaaacctcaaagaaatcagtctgagagctgcaagggttcactctattcagtagcgtccacattggtatctactttcttcctgaattttttaaaagtaataataatcttaaaagaatccctgttctctgttgtttctgtagcagtgttaccactccatctggtctcctttgaaaataataatgtctactacttcagcaaaaaacccagattgcaaatacagagatggagattttgaatcaggcttaaatgctaatcataatttgaattgtcatctaaatgtttctctatgtcaatgacaagaaatatgcaagaaatccaagagggc

SEQ ID NO: 409614 - DNA, 555 bp, Homo sapiens
tgtgaacagattaacaaaactgacaaactgttagctagaatgatgaagaaagaaagagagaaaactcatattaccaaaaaaagaaataaaagtaaagacattgctaccaacattaaagaaattaaaaaggattataacactatgaacaactgtactccaatagaattagataaccaagatgaatggacaaattcttagaacactcatattacaaaaagtgactcaagaagaaataagaaaataygaacagatctataaaaattaaagatactgacccagtaatcaaaaacctcccaataatggaagtagttttcactaattaccagttatgaacaacaatctttctccagctcttctaaaaatcgtaaaggaaggaatacttcctaactcatgaggccagcattactttgatcccaaagtcagataaaggacattgcaaaaaaagaaaattactatccaatattccttatgaatatagatgcaaaaatatttaacaaaatactgtcaaactgaatccactagcatattaaaagaattaaatgtcatgaccaagtg

SEQ ID NO: 409615 - DNA, 592 bp, Homo sapiens
cacctttaagggtcatctctgccaggggtccccaatccctggaccatggatcagaaccagtgcatggcctgttaggaactgggctgcacaccaggaggtgagcaggaggtgaatgagcaaagcttcgtctgtatttatggccacttttcgttgctcatgttatcacccaagctctgccttctgtcagatcaggggcagcattagattctcataggagcatgaaccctattgtgaactgtgcatgtgagggatctaggttgtatgctccttatgaaaatctaatgcctggtgatctgtcactatctcccatcacccccaggtgggmctgtctagttgcaggaaaacatgctcagggctcccattgattctgcatgataatggattgcataattatttaatatttcattatatattacaatgtaatagaaataaatgagcaataaatgaactgtgcttgaatcaccctgaaaccatcgcccccatacccccacgtctgtagaaaaaatatctgccaaaaaattgaggactgctgatctatgacaacatagatgtaagatttaaccaacctgaagtttttaaaaaagcagggata

SEQ ID NO: 409616 - DNA, 587 bp, Homo sapiens
tattgctcatcaaattcaaattctcaatggtattttttaatgttgcatttcatgtgttctttttcacagtttttattgtaatttcaagctgatagaaaattagaaaaatacgcacaacatatacccatatccttttccttgagattcaccatttgttgatttctgccacatttgccttatctgcatgtgtacaggtgtgcacaygtgggtgggggatgtttttgagggagaggacaagccgttagagagaaagttgcaggccccatgacataccacccctgaatacttaaacatctcatgaaaacaagggcattccctacaaaactcagtacattatcataaggaaaagaaatcaacattaattcaagaatatctattctgttatccacatttaaatttttaaaatccccccaaatgccttctatagctctttatattttttaatcagaagtaggtcaaagttcatgaatgcattttgttgctgtgtttttatatagtccctttaaaaatctacaacaccctcccaatttttgcctttttttcagacttttttttatgagcttaggttagttattttctgcatgttg

SEQ ID NO: 409617 - DNA, 546 bp, Homo sapiens
agttgtaacacatactaattcagtttctattttcaaattcaattctccatctaggtttgcttcaataacctgcaaattgagtattttacatagtcttagaaaaggaagccaaaaggaaaaaaactccatgggcaacagctttcacacaaccagatgacaaagtaccctacaraacctcaaaacacctcagagcacactgagacccccgtgctatcagggaaagtgagaagataaggcccaagagccaagaactcagaaatctcccaaaaatctcaaaggggaagtccccctgcctgcctcccggaatgaagaactcagtgaagatgtgaaaacaggtggaactccgagaggacttgccaggagactacagcagcacaagggcagggctctagggagggctgggtggagctgatgagaactccctcacagcaggagagagtcctgcactgagaaggaaccacgggaagtaagagcctcaactaagcagaatgggcaccttgggcaaaaaaaagggaatgaaactttaaatgaaggaaaaagagggac

SEQ ID NO: 409618 - DNA, 546 bp, Homo sapiens
agttgtaacacatactaattcagtttctattttcaaattcaattctccatctaggtttgcttcaataacctgcaaattgagtattttacatagtcttagaaaaggaagccaaaaggaaaaaaactccatgggcaacagctttcacacaaccagatgacaaagtaccctacaawacctcaaaacacctcagagcacactgagacccccgtgctatcagggaaagtgagaagataaggcccaagagccaagaactcagaaatctcccaaaaatctcaaaggggaagtccccctgcctgcctcccggaatgaagaactcagtgaagatgtgaaaacaggtggaactccgagaggacttgccaggagactacagcagcacaagggcagggctctagggagggctgggtggagctgatgagaactccctcacagcaggagagagtcctgcactgagaaggaaccacgggaagtaagagcctcaactaagcagaatgggcaccttgggcaaaaaaaagggaatgaaactttaaatgaaggaaaaagagggac

SEQ ID NO: 409619 - DNA, 592 bp, Homo sapiens
cctgcttttaactgtttagcaaaggcaatcctgggtatttgatacaggtaatggctactcacgcatgtattcatagtcagtcaaacatttattcaaatccaacctgtgccattctctgtttcagctgttaattataccaccataatgtctttgctatgaaaaacttggtctaatttgagatgtagacataaacaagatattgcagagcaaagcaccaaatattccattatcagttaagatctttcccattgcaaataataaaaaccttgactcagatttttttaaatgttattcatctgcaacttttgaatttctacaatcatagaaagttagacatagatagacaggacatttataatcaactaaccagartgctttaattttaacattaaatataacacagcatagggacttatttacattcatagagcaaagtagttgtaatgcctgagaggataacaccttattctttattgaatggtgctcttgttacaccatattgcacaccttgtttcccttttgagcctattctattttgaagcaaaacttgtagtttcttctctaaagcaaataatcagggtaaaaagattat

SEQ ID NO: 409620 - DNA, 537 bp, Homo sapiens
actaggctgtttattgagctgttttgcctagagccctgaataatacttgtgaaataacataaacaaaatcaaatctcgtatgatcaagtattctactgtgttggagattccaaatgttgcaattttaagataaaggagacaatgaagactacaggctgaattgrgaatatgattgtcaccttaaaaacaaaacaaaaggtgaagcctaattcccaccctcacccccactctcatacctgggtgtgggctagacttagtgagtcactttcaaagagcagagagtagggtaaggaaaaaggagtgactttacagtggagaacttagccaagggattgaagttaacattgtcaatgttgtcatgtgggtatcatctttactgatatgatgtgatgagaaggacatttctatagcattctttccccaaaacccataacaccagtctcaacatgagtaaaactcagagtagaagacattccggaggctgcctggtcagtgctcctccagcctattgaggttataaaaatcaaatatggacca

SEQ ID NO: 409621 - DNA, 537 bp, Homo sapiens
actaggctgtttattgagctgttttgcctagagccctgaataatacttgtgaaataacataaacaaaatcaaatctcgtatgatcaagtattctactgtgttggagattccaaatgttgcaattttaagataaaggagacaatgaagactacaggctgaattgagaatatgattgtcaccttaaaaacaaaacaaaaggtgaagcctaattcccaccctcacccccactctcatacctgggtgtgggctagacttagtgagtcactttcaaagagcagagagtagggtaaggaaaaaggagtgactttacagtggagaacttagccaagggattgaagttaacattgtcaatgttstcatgtgggtatcatctttactgatatgatgtgatgagaaggacatttctatagcattctttccccaaaacccataacaccagtctcaacatgagtaaaactcagagtagaagacattccggaggctgcctggtcagtgctcctccagcctattgaggttataaaaatcaaatatggacca

SEQ ID NO: 409622 - DNA, 594 bp, Homo sapiens
gctgtttggtcccacaagtgcttcagattcaacatatgctaaactgaactaggtcttctcctaaaccttctcctgtgttccctctgttgtttaacaacactactaagcatccaatcatccaagccagaaaactgggggccatcctaaaatttttttctcacctctcaatatctaatcagtcacaaagtccaatcaacattatctcctcaatacttcccacatctttccccagcatccatcttcattgttacttccttaattacaggcatcctcttccttttaaatatcccaactgatttctctctttcagttttatwacttcaaatgtggcctctaccctgcctcttgagtggtctatgtattactccattcttacttttcctcatacttgaaacttccatttgttccattgcctctggagataaaacacaagtagctcacatggagtaccagacagactgtgatctctacctggcttgtagcattcacctcatctccacatgacagctacactgaattatttaagttctccaaattttccttattgttctatgccagctcaagcctttcctccactaagaagtcttctctcaa

SEQ ID NO: 409623 - DNA, 594 bp, Homo sapiens
gctgtttggtcccacaagtgcttcagattcaacatatgctaaactgaactaggtcttctcctaaaccttctcctgtgttccctctgttgtttaacaacactactaagcatccaatcatccaagccagaaaactgggggccatcctaaaatttttttctcacctctcaatatctaatcagtcacaaagtccaatcaacattatctcctcaatacttcccacatctttccccagcatccatcttcattgttacttccttaattacaggcatcctcttccttttaaatatcccaactgatttctctctttcagttttatawcttcaaatgtggcctctaccctgcctcttgagtggtctatgtattactccattcttacttttcctcatacttgaaacttccatttgttccattgcctctggagataaaacacaagtagctcacatggagtaccagacagactgtgatctctacctggcttgtagcattcacctcatctccacatgacagctacactgaattatttaagttctccaaattttccttattgttctatgccagctcaagcctttcctccactaagaagtcttctctcaa

SEQ ID NO: 409624 - DNA, 601 bp, Homo sapiens
gcaactgtgcagacttgctttaaagttttctttcaccatggagttaaagaggattttataatgcgtagttttttcttaactaaggccactttttatctgcttatctttttcattctttattcctcccctatgctgtctttccacttctctatctccttttccggtatgatatctcatttatctagtagtatcctccctcaaccttggcctccctcttctgtttctcttcaatttctcttctctctctctggtgttgattttctcattgaaagcttcaatattacaagagaaaaaaaagattctgataattcattggaatctctaccaggtcaactgtggctagaagcaataagagtttctgtgaaggttttgaaaattcgtttaatatggtatttttaaagcttgcagtaaaaaaggacaagccaaaattcttaagacacacatatacaaatttctcgtgcaaaggaacaattccattacayaactagtttttgtttcatacatgttactttgctcgtacaactcaaatgctgtgtaaatatgggttcaagaacatatgctaaaattgaacaccaatcttctctcttgaaacatgttcatc

SEQ ID NO: 409625 - DNA, 601 bp, Homo sapiens
gcaactgtgcagacttgctttaaagttttctttcaccatggagttaaagaggattttataatgcgtagttttttcttaactaaggccactttttatctgcttatctttttcattctttattcctcccctatgctgtctttccacttctctatctccttttccggtatgatatctcatttatctagtagtatcctccctcaaccttggcctccctcttctgtttctcttcaatttctcttctctctctctggtgttgattttctcattgaaagcttcaatattacaagagaaaaaaaagattctgataattcattggaatctctaccaggtcaactgtggctagaagcaataagagtttctgtgaaggttttgaaaattcgtttaatatggtatttttaaagcttgcagtaaaaaaggacaagccaaaattcttaagacacacatatacaaatttctcgtgcaaaggaacaattccattacacaactagtttttgtttcatacatgttactttgctcgtacaactcaaatkctgtgtaaatatgggttcaagaacatatgctaaaattgaacaccaatcttctctcttgaaacatgttcatc

SEQ ID NO: 409626 - DNA, 567 bp, Homo sapiens
ttgtatgcaggtgttttttggtctggttttcttttatttggaaaagaaggcacattctctcctcttttgccattaatatgagcaataactccacccctcttgaaaaggcactggatattcaaattgttgacatctcttatggtgagatctragagcaccacgcagcctgagcctcggactactagttgcttgcagtaacctcaagcaggtcactttccctccctaaatttctttatctggaaagtaggaaaaataatagtacctgtggcacagaaactgggtaagttcaatgaaataacagtgctaaaaaatttgaggttttattactgaaacaacatgcagggctttgtggatgctggggaaggagaaagaaatgagacccgggatctgctctccctggcaagtcagtcgcatagggcacctgggttgccttgcctcttgcctttctcaaccttgtctgtttatatctccaatctacagcttggatctgctgagtcctgagctaaagagaataaaacctggtgcagagtgagggtccccttctcaacagcaagttttgtctggact

SEQ ID NO: 409627 - DNA, 582 bp, Homo sapiens
aagtagactcacaatacatttttggtgagttgcttttttaaaaataaacttttcattttatttatttaactactttggaagagttttatatttacagaaaaattgtgaaggtgatacagagacttcccatataccccatacccagtttctcctactattcacatcttacattactatggtatattggtcataattaataaaccaacactggtaaattgttattactaaaggccatactgtattcagatgtcyttagttttgactccgtgtcctttttctgatctaagatcccacccaggataccatatcacatttaattgtcatgtgtcttttggctcctgtttatgtgacagtttctcagatttttctttttttatattgacaggtttggaaacactggacgggtgtcttgtagaatgcccttgatagagtctggatgttgttccctctaaatctcctgttgcattataatctccaatattggagggggagcctggtgggaggtgatgggatcatgcgagtgaatttttcatgaatagtttagtggcatccccttagtactgtcctcactatagtgaatga

SEQ ID NO: 409628 - DNA, 611 bp, Homo sapiens
ggaggccacagaggtgaattgccaattgtatcacatcatgttaagaatatgtactagaaatatgactatcactgttgatgttaatttttaatcacttggctaaggtggtgtttttcatgttttccactgtaaaattactcccccactcctttcaacactgtgctctttggaggaagttactattaatcactttttagctcagacctcaggagtgaagagttaggctcccctgcttgagggcagaatttctacatatattatttggaattctgcatgggagatttgcctactctccctcacttattttactcaatcatttatttatatcagtgggagctcatagatatttattttatrgtttggattagaatttaaaactgcattattgcattatttattgtgacttgctttttttaaacttgtctggggaaatttttcctttcttttaagtcatagtttcaaaaccatagcctttatacttatgtatttggaatgctattatttttaaattaaactgtttctatatgaactatggtggagagatgtttgtaattgcaaagaacagagctgagattatctccatatttcaaaaattaatttgggtgacagta

SEQ ID NO: 409629 - DNA, 635 bp, Homo sapiens
ccacttcctctcctaggatagccccatgacaaggaacccacctcagttcattcacaaaggccagcaggaagttggaacaactcgggtaactgcttcttcttgactgcagccttttgacccaccttactgaaatccccaacttctggagtcaaactgtgaaagaaatgtacatagctacttcttcatctccttacaataactgaaggaaatcaagcccctagatgtaagtctatgctttgtctcctgacagacaagcttcttctgccatctgtttctaattgtctttctgatcttatcttcccaagcaggctcccaagagctctctgctgttgctggcctcctccctatttcctcccttttgccttgtaaattcttgctccaagtgttttctaacctgtttctaccactgaggatgctctattctcctcttcccmgacaagcaccatttctaacttcagagtacaactcaaaagttacctgctctgtggctcctccttacctccaatcccagaaatttcccctttcctgcccacgttgtacatcttctcttctgcgagcattgtctattcttcccctgaggtcagaaattgggtcaggtataccctttgaattccgcaatgctctgacaatcagaa

SEQ ID NO: 409630 - DNA, 609 bp, Homo sapiens
gaaatccctaaaagtttctagagaaaaaaaatagttccatacaaagaattaggaaagaagaatggtcttatacctctcaaaaagtagctttaagagctaaatgacaatggagaaatgccttaaaattagaacaaaaaattggatgcaatctataaatctatactcaaactgcaagccaatgtgagagtagaacaaaaatattttaaaacatgttaggtcttcaaaactttttcttcctggtttcttagggaygtactggaagatacattccccaatatgagagtctaaactaggaaagagaaagacatgagattcaggagaccagggacgcaacttaggagaccaatgaagggaattcccaggatgataatgaagataaatcctaggataacagctatgcctcaggcctacagcataaacaatcttgactggcataggaagaacaggacagatggctccaggaggaataactctaagaaaaaacaaaatctgaaagattgcctgaagtatctgttcatattgagaagtgctttatagctctgttagaaaagctgcagaagaactagcattagctgtacagatgacaacacgaaacaaaggaaggaatta

SEQ ID NO: 409631 - DNA, 563 bp, Homo sapiens
accctttcaacatctgaatgtcattcctttggctaactgatttttttttctccacttcttcacttggtgatgacaggagaaactgttggatttttaaaagtcgatttagtggtccatttgcaagaagccacatcgcaaccaatctgttcttaagatttggaattgatttgattcatcttctcagrtggcttattgaaattgtctttagaatgtgtgtaaaatgggtgttgtgtgctctgctgatggcaccagactcagaatttccatccaggtatttatttaattgtcttttctaattctctctactgacactcatcttgaagtttacttttgccattttgttggaacagcactccacccctgccccagacatttaactcctttcagatagatccaagcccaaccctgaaattcccaggttggccctaaatcaatgccagactgtgccgcatgttagtaatggctcacacttcagggagaagaattttcatgagcagtttcagagatgcagataaaagcagcagaaagcccacacacaggctatagtgatcatttctgagaca

SEQ ID NO: 409632 - DNA, 563 bp, Homo sapiens
accctttcaacatctgaatgtcattcctttggctaactgatttttttttctccacttcttcacttggtgatgacaggagaaactgttggatttttaaaagtcgatttagtggtccatttgcaagaagccacatcgcaaccaatctgttcttaagatttggaattgatttgattcatcttctcaggtggcttattgaaattgtctttagaatgtgtgtaaaatgggtgttgtgtgctctgctgatggcaccagactcagaatttccatccaggtatttatttaattgtcttttctaattctctctactgacactcatcttgaagtttacttttgccattttgttggaacagcactccacccctgccccagacatttaactcctttcagatagatccaagcccaaccctgaaattcccaggttggccctaaatcaatgscagactgtgccgcatgttagtaatggctcacacttcagggagaagaattttcatgagcagtttcagagatgcagataaaagcagcagaaagcccacacacaggctatagtgatcatttctgagaca

SEQ ID NO: 409633 - DNA, 575 bp, Homo sapiens
aataggccagtgtcatgataatgaggaaaatccagccattcttactcctctaatccagtgctatgttcattccagaacacacactccccaatggccactttcaagttcattcatcaaccataataaatattggcaatgcaccgcatacccaaaactgctgcacrttttgatggattcaataatcaataacaactcacctcttttccttcaagtaacctataacctactatgccaaggatgatattcaaaatgggttaactggccaagttttaaatagggccataacctatttctttagtctgtctaagaatgtgttataggaggaaataaaagtctctccttattttgagttcaataggcattactatatattttaaccaagacagttgaggttcttttccactttttgcaatctcctctgcagtaagtttaatacacgaagaaagacaatatccaaattatcataaatctgtcagcattctgtttcagaacagaggcaaatggagcttccatgtatctgaaacgttgtatgtatctggattaccgtttttatcctttaatggggtggacctcag

SEQ ID NO: 409634 - DNA, 536 bp, Homo sapiens
cggttacctccatgctgttcctgtgatagtgagtgaaytctcatgagatctgatggtttcataaggggctttcccccacctttgctctacacttctccttgctgccgccacgtggagaaggacgtgtttgtttccccttctgccatgattgtaagtttcctgaggtctccccagccatgctgaattgtgagtcaattagacctctttcctttataaattagccagtcttcagtatgtctttaatagcagcataaaaatggactaacacacctcccaaaggccccacctccaaatactgtcaaagtatgaatttgggaactaaatttcaacacaggaaatttgggaaacatattcaaaccatagcagtacctggcacagtttaagtacctttaataaaattggtttctcccagtggaatttttcagttccgttttccccatccctcttgcctggaatccttgcagttttctgatttttacattatgtgatatgatatgtgggaggtgctttacagcagtgctactccagctatggtc

SEQ ID NO: 409635 - DNA, 536 bp, Homo sapiens
cggttacctccatgctgttcctgtgatagtgagtgaactctcatgagatctgatggtttcataaggggctttcccccacctttgctctacacttctccttgctgccgccaygtggagaaggacgtgtttgtttccccttctgccatgattgtaagtttcctgaggtctccccagccatgctgaattgtgagtcaattagacctctttcctttataaattagccagtcttcagtatgtctttaatagcagcataaaaatggactaacacacctcccaaaggccccacctccaaatactgtcaaagtatgaatttgggaactaaatttcaacacaggaaatttgggaaacatattcaaaccatagcagtacctggcacagtttaagtacctttaataaaattggtttctcccagtggaatttttcagttccgttttccccatccctcttgcctggaatccttgcagttttctgatttttacattatgtgatatgatatgtgggaggtgctttacagcagtgctactccagctatggtc

SEQ ID NO: 409636 - DNA, 536 bp, Homo sapiens
cggttacctccatgctgttcctgtgatagtgagtgaactctcatgagatctgatggtttcataaggggctttcccccacctttgctctacacttctccttgctgccgccacgtggagaaggacgtgtttgtttccccttctgccatgattgtaagtttcctgaggtctccccagccatgctgaattgtgagtcaattagacctctttcctttataaattagccagtcttcagtatgtctttaatagcagcataaaaayggactaacacacctcccaaaggccccacctccaaatactgtcaaagtatgaatttgggaactaaatttcaacacaggaaatttgggaaacatattcaaaccatagcagtacctggcacagtttaagtacctttaataaaattggtttctcccagtggaatttttcagttccgttttccccatccctcttgcctggaatccttgcagttttctgatttttacattatgtgatatgatatgtgggaggtgctttacagcagtgctactccagctatggtc

SEQ ID NO: 409637 - DNA, 536 bp, Homo sapiens
cggttacctccatgctgttcctgtgatagtgagtgaactctcatgagatctgatggtttcataaggggctttcccccacctttgctctacacttctccttgctgccgccacgtggagaaggacgtgtttgtttccccttctgccatgattgtaagtttcctgaggtctccccagccatgctgaattgtgagtcaattagacctctttcctttataaattagccagtcttcagtatgtctttaatagcagcataaaaatggactaacacacctcccaaaggccccacctccaaatactgtcaamgtatgaatttgggaactaaatttcaacacaggaaatttgggaaacatattcaaaccatagcagtacctggcacagtttaagtacctttaataaaattggtttctcccagtggaatttttcagttccgttttccccatccctcttgcctggaatccttgcagttttctgatttttacattatgtgatatgatatgtgggaggtgctttacagcagtgctactccagctatggtc

SEQ ID NO: 409638 - DNA, 578 bp, Homo sapiens
tctttcttaagcattctccttggaaatctcacccaatatcccaaacggcttactctaagatcacaggcagtacccttcctgagtgaggttctgataaattgtgttctctccatcttattatatttccattgctgtttttacacctcattcagattgatatcatgagcagctacttagtggccagccccatgatctggctcagtgtgttcaacataaatgtttgataatcacaaatcrgaatcagatctcttgcttacaattgtggaaaaggagacctggaagacaaaatgacttaaccaaagttacagactttcctgttatatttgatgttgctgttatgctttcttacagtttcacttggctacgttttttcttcttaaatggatgtcagctaccttggttaaggatcgtcagcttagattctttttctaactctcacagcatggtgttaagaataaaacaagtgaccaataagtacttgttgataaattcttttaaaatagtttttaaaaagaaaataagtgtccactttcaagtaggaggcagtagaatgtaatagctcaacatttctgctgcaa

SEQ ID NO: 409639 - DNA, 578 bp, Homo sapiens
tctttcttaagcattctccttggaaatctcacccaatatcccaaacggcttactctaagatcacaggcagtacccttcctgagtgaggttctgataaattgtgttctctccatcttattatatttccattgctgtttttacacctcattcagattgatatcatgagcagctacttagtggccagccccatgatctggctcagtgtgttcaacataaatgtttgataatcacaaatcagaatcagatctcttgcttacaattgtggaaaaggagacctggaagacaaaatgacttaaccaaagttacagacyttcctgttatatttgatgttgctgttatgctttcttacagtttcacttggctacgttttttcttcttaaatggatgtcagctaccttggttaaggatcgtcagcttagattctttttctaactctcacagcatggtgttaagaataaaacaagtgaccaataagtacttgttgataaattcttttaaaatagtttttaaaaagaaaataagtgtccactttcaagtaggaggcagtagaatgtaatagctcaacatttctgctgcaa

SEQ ID NO: 409640 - DNA, 578 bp, Homo sapiens
tctttcttaagcattctccttggaaatctcacccaatatcccaaacggcttactctaagatcacaggcagtacccttcctgagtgaggttctgataaattgtgttctctccatcttattatatttccattgctgtttttacacctcattcagattgatatcatgagcagctacttagtggccagccccatgatctggctcagtgtgttcaacataaatgtttgataatcacaaatcagaatcagatctcttgcttacaattgtggaaaaggagacctggaagacaaaatgacttaaccaaagttacagactttcctgttatatttgaygttgctgttatgctttcttacagtttcacttggctacgttttttcttcttaaatggatgtcagctaccttggttaaggatcgtcagcttagattctttttctaactctcacagcatggtgttaagaataaaacaagtgaccaataagtacttgttgataaattcttttaaaatagtttttaaaaagaaaataagtgtccactttcaagtaggaggcagtagaatgtaatagctcaacatttctgctgcaa

SEQ ID NO: 409641 - DNA, 510 bp, Homo sapiens
gttcccttttcaccacatccacaccaacatctattatttttttgattttttgattatggccattcctgcaggagtaaagtggtattgcattgtggttttgatttgcatttccctgatcattagtgatgctgagcatttttccatatgcttgttggccatttgtatatcttcttctgagaaytgcctattcatgtccttagcccacttttttatgggattggtttttccttgctgatttgagttatttgtagattctggatattagtcccttgtcagatgaatagaatgtgaagattttctcccactctgtaggttgtctgtttattctattgattatttcttttgctgtggagaagctttttagtttaattaagtcccatctatttatcttcgtttttgtaacatttgctgttgggttcttggtcatgaagtctttgcctaagccaatgtctagaaaggctttcatgatgttattttctagaatctttatgacttcaggtcttagattta

SEQ ID NO: 409642 - DNA, 540 bp, Homo sapiens
gcagaaacaggtcagatttaggcttcatcattcatgtttttctaggaggacttgtcatttttttctaagatctatgtagataaaataaggtaaaattttttaattcagacataaaaactgaaaaatggagaaaattgataacctctgtttatcttcacaacacaatgtacttatttgacakatttttttcctctcaataaatttccatttttcttttattcagctttatggaagtatgattgaaaaataaaaattgtatgtatttagtgcatgtaatgtgatgttttgatatattataccttgtgcagtgattagtacaattaagctaattaacatagccatcatcttacacagtaatgaccatttgtatgtgtgtttgtggtgagaacacttgagacatttgcttcttttttaaggttgaataatattccattgtttgtatataacacattttctttgtccatttatctgtctacacttaggttgtttccgtatttgacaattgggaataaggctgcaatgaatatggaagtgcaaata

SEQ ID NO: 409643 - DNA, 540 bp, Homo sapiens
gcagaaacaggtcagatttaggcttcatcattcatgtttttctaggaggacttgtcatttttttctaagatctatgtagataaaataaggtaaaattttttaattcagacataaaaactgaaaaatggagaaaattgataacctctgtttatcttcacaacacaatgtacttatttgacagatttttttcctctcaataartttccatttttcttttattcagctttatggaagtatgattgaaaaataaaaattgtatgtatttagtgcatgtaatgtgatgttttgatatattataccttgtgcagtgattagtacaattaagctaattaacatagccatcatcttacacagtaatgaccatttgtatgtgtgtttgtggtgagaacacttgagacatttgcttcttttttaaggttgaataatattccattgtttgtatataacacattttctttgtccatttatctgtctacacttaggttgtttccgtatttgacaattgggaataaggctgcaatgaatatggaagtgcaaata

SEQ ID NO: 409644 - DNA, 588 bp, Homo sapiens
atttggttaaaatgtccacggaggaaggggaggtaaggactgtgagaagcgtgcccaaaccacagagcttccaaamtgcagtccacatcaccagcaacagccctaatgagctctgtgctggacactccccactgaattacataatacatttccgtttcatttcatgaatcacaacttgggatacaatgttcctgggttgcagttgatatattttagagattaccaaatatttcaaaaagaaaaattgattttattaaattcatatgtaaaatgtctgtatgtcagccaacttatttattttcaaatttgagattttcttaaatgttgtagttacagctcaatgtcaagagagttctcaataaacccattaatgaatagcgagactgccgttgcccctggattcttcatttcttttgagagttcagttcctggttgatgacggtgggtttcatttcagctgcccctcttgggtgagaatgagaaaaaaagtggtagagcttcagaccacggatcaggggaagtggaactcacataggcaactatgtaacagtgagttttgttcactataagactacagtacaagccgta

SEQ ID NO: 409645 - DNA, 588 bp, Homo sapiens
atttggttaaaatgtccacggaggaaggggaggtaaggactgtgagaagcgtgcccaaaccacagagcttccaaactgcagtccacatcaccagcaacagccctaatgagctctgtgctggacactccccactgaattacataatacatttccgtttcatttcatgaatcacaacttgggatacaatgttcctgggttgcagttgatatattttagagattaccaaatatttcaaaaagaaaaattgattttattaaattcatatgtaaaatgtctgtatgtcagccaacttatttattttcaaatttgagattttcttaaatgttgtagttacagctcaatgtcaagagagttctcaataaacccattaatgaatagcgagactgccgttgcccctggattcttcatttcttttgagagttcagttcctggttgatgacggtgggtttcatttcagctgcccctcttgggtgagaatgagaaaaaaagtggtagagcttcagaccayggatcaggggaagtggaactcacataggcaactatgtaacagtgagttttgttcactataagactacagtacaagccgta

SEQ ID NO: 409646 - DNA, 486 bp, Homo sapiens
atcatctatgtgcctgacagaatgttaaaccttaagggaacaaagttgggaagaacaaaacacagtttctttcctccaggtcctaactggggagaaaggcaaatattgtggtgaacacaagctgaaagtgatcaaaatgcttcaggagcagagaggaagcccatctgaacctaaggcggatgctgggcatagcagggccttccctagtgggctgctgtgcacgtgaaatgagacccagtgtgggaagagaaaagagctatgtgtgaggsggacaggccactcagagagatgcagatggattacttcaaaatacatgagagtgggtccagggaactgcatttttaagtgtctactacgagcccattttacatttgttaattcaacaacaaaacccccattttccagatatgaaaaccaaggcccggagagattttgtacctggcccaagatcatgcagcaggcccaaagctgtcaaaattttgccaa

SEQ ID NO: 409647 - DNA, 486 bp, Homo sapiens
atcatctatgtgcctgacagaatgttaaaccttaagggaacaaagttgggaagaacaaaacacagtttctttcctccaggtcctaactggggagaaaggcaaatattgtggtgaacacaagctgaaagtgatcaaaatgcttcaggagcagagaggaagcccatctgaacctaaggcggatgctgggcatagcagggccttccctagtgggctgctgtgcacgtgaaatgagacccagtgtgggaagagaaaagagctatgtgtgaggcggacaggccactcagagagatgcagatggattacttcaaaatacatgagagtgggtccagggaactgcatttttaagtgtctactacgagcccattttacatttgttaattcaacaacaaaacccccattttccagatatgaaaaccaaggcccggagagattttgtacctggcccaagwtcatgcagcaggcccaaagctgtcaaaattttgccaa

SEQ ID NO: 409648 - DNA, 422 bp, Homo sapiens
gagagattttgtacctggcccaagatcatgcagcaggcccaaagctgtcaaaattttkccaaagcccaagctctttgcacaggatcataccacctctttatgctactacatattctataataaggcctaagtgattggtattgattagcaaatccaaagaggcttccttggtcttatgaactaatatacattgcaccaatcagcactgaatagtatacagacagtctaactataatttcttccagagcaataatgagcaggtgataattcactgcctcagcacccacaatgcatttggcctgcattctcacaccccaggtgaagtttttctaacaaaacgcaggtgcagtaggggtgttttcaactcttactagagaatacaaaaaacaatgcttagtttataaaagaataatgtaacacta

SEQ ID NO: 409649 - DNA, 620 bp, Homo sapiens
ttgtgatagacaagactgatgctgggaagaggtgactggtggaatactggataatataygtacagggcaggcagaagaatgaggcatcatgagctgagctgtcagtgagttttgcagttctttccttccctgtacatttctcagcagtcagcattggttgccatccaaaatgccatggtcaaccattccacaagcctcagcccagtagcctggtaagtcctaggcatggcagtgattccccgagactccacctgctcctccagccatgcatccactgctcgctactctcctcctcacttcataaaccaggaggaccatttagagggctccttagctctttcctctctgtttaataacaccaatcaattcattcttcctctaaatctttattttgcttgtattacttttttaacattttattctcttttctttaaacaaatatttttttctagacttttcctctaaattttctatatcctgcttttgagcattctggcctccaatactggcttgaaaacaaaccaaaacctaacattgtgcaatattcactcagtcatttaaccagtgtttactgagaattccccattttcttgccctggcaaggtactgggcatgcaaag

SEQ ID NO: 409650 - DNA, 594 bp, Homo sapiens
gcattaatgtgtgaatggattgatgggtaatcatgagaatgaaactggtggctttataagaagaggaagagagacctgagctagcacagtcagcctccttgccatgtgatgccctatgccaccttgggactctgaagagggtccccaccagcaaggaggctctcacgagatatagcccctcagtcatggacatcycagcctccctgattgtaagaaatccattttcatttctacccagtcttaggtattcagttataagcaacagaaaatagactaagacagtgtagcagtggactgtggatagtaaaaatcaaaggatgataatgtggcccctgttcttgaaaaattccaagtcctactgagaagacatttgtttaatcattatttattatttcaataaatatttatcaagcctccccatgttccaggtattgttctaggtgctaagattacagcagagaacaaacgttttttaaatgaagctttcatttttgtgagactttaatcaaatgtacaaaacaagagtaagtttttgaaacataagtcattactaaatcatgtgatacagaggattagtgatgttcgaaggcaaag

SEQ ID NO: 409651 - DNA, 474 bp, Homo sapiens
tcatttctacccagtcttaggtattcagttataagcaacagaaaatagactaagacagtgtagcagtggactgtggatagtaaaaatcaaaggatgataatgtggcccctgttcttgaaaaattccaagtcctactgagaagacatttgtttaatcattatttattatttcaataaatatttatcaagcctccccatgttccaggtattgttctaggtgctaagattacagcagagaacaaaygttttttaaatgaagctttcatttttgtgagactttaatcaaatgtacaaaacaagagtaagtttttgaaacataagtcattactaaatcatgtgatacagaggattagtgatgttcgaaggcaaaggagaaaagatgaatgtgagggtgttggttgaaaaatgcaactttcaataaattacatcttaagctggatctgaagtttagaagaaatctttcaaatgaaaggaa

SEQ ID NO: 409652 - DNA, 463 bp, Homo sapiens
catacttcctgtgtaaattgagtgtgcatattaagtgggaagtgaatggtacatgtgcgaaatcttggttattcagtttaaggcccagagagattattaacatagctttgcaggctctgtgcagcatagtcagagatgaccatttccctgagatggattcaggtagagggagccctgccaggaggaggcctgaacactgcaggggcagcagcctgcttcctttctgcaacagcttgctgcctggcattgttggggttgggagtgcaggggtgcaggggagacaacaggcacttctgtaaaagtggttccagtgtgtggtaggagacttttttctccatctcctcctctctggtscatctctttcagatgagccctcagcctgtgggcttagaatttatgaagctaatttgcaagggagcttgatgtggtactaacaaccctgaactgtgggttctgatgccct

SEQ ID NO: 409653 - DNA, 546 bp, Homo sapiens
ttctcatctgcctcacacacacctgactaccctatggctctcagctgggaagaacagatccctgatctttaacttcagctgttggcctctcctctgtggtcctatcactcctagcactgagccccagagaagcacctatcccactgtattaagataatgtatttacttcccagtctttccttgaggaaaggaactatgacttgctataatcatatctgcacttacttatatagtgcctgcctggcttgtagcagctattcagtaaaayagtcattgaatgaagaaataattggatcaattaattattcaagagatgttattgcaagaacctgagcagagagccctatgcatatcattctattataatgtctctgctacattttaattcttgctgggatcacgctgtcatgaaagggattaagatcagaggtgcttatctaagcactgcatgtttccttcaggaataggacaacaaccctccttttatttctctcatttttaactttcaaacctttggatttgacatgtatagcatgtcatagtggc

SEQ ID NO: 409654 - DNA, 479 bp, Homo sapiens
aggaccacaggaaagagagagtctcagtccaaaggggcataagagttgacactcttatgacaccaggtggagagtaatcacgtgtgtgtgtgtgtcatgtcarggcagcgatagagattggaggaatgctggacacttccagcagcctgctgtaccttaagaactattggagtaattactcaaggcttcttcaaaggccatcatagtagttataacaaaccagaacactggcagggatctgatctgacgggtgtcttgttgtgtctggttgccacaaggagaaagccaggggactcttcttactatggaactacctgtacattgacacccaatttgtccagaaatgactaactcatcaaatctttcaatgcatctcattagtcagtagtcacatatttgtaatttgaataaattatttacaccaaaattcaaccaactactcagtgttgcacattgtttccattttaattagaacccac

SEQ ID NO: 409655 - DNA, 614 bp, Homo sapiens
ctaggtcctcttgactgatgctcaggccccacagaagtttcctcactcctctctcagccaagcaagggtgtagaaaataataaccaagctcataagagatttccaatattggtgaagatcttcacccctagcttttctcaaatgcatgatctacaatgcatgaaaccctgacttcattcattcctttgaacacaacctttccctctctgatttcctcctgtaaatgctgatgttcccyggtaaatgctgaagtccctaactctcctctacgagaagtcattatattctttgactctgtgacacgggtgacttcaagaagcagaaaacagtaaggttaaaaaaaaaaaggttgagaccttaaaagaggaaagaagggttcagaaaggggtgtttggaggagctgaagagaactttgtccatcatctttcttgaggatagatccaagtatgcagtgaaccacctttgcatgctgctaaaataaatggcagcaggtcaaagacaaagaggcctttcagaggacagaaggaaatgaatgttggaataaatgctttctgatacatttacacagttccaagttggctaaattacacatccattgttttagatagtagttc

SEQ ID NO: 409656 - DNA, 534 bp, Homo sapiens
gtctgagctgaaacagccttaggagaagtcctaatgaggaatgggacttgtgctcagcacaaacggactgggaaagctgaacgtgtatggatatccttcacaggckgactaatcacacaaagtgcaatgactagtttgactaaaagtaatgagactgggacatgagctccactactgacttaaaccttgctttaaacaagttatttaacctcttgagttctctaattccttatggtacctgcactactcgttcaaaatggcagactgaacacatgcgttgacttccttccttcccccaacccacctaaatgacaaaaagcagtggcatgcagttatttgacacccagatgcatcatcttttaatactccctttttatgacaaaattgctttcagtactaatcgttatttcattaatttgtttcacagtttgaaacaaaggtttactttatatacaaaaattttcatttaaaaatacttagtgaaataaatcatgtatgaactaaaattagtacttaccacaaaaatattacagc

SEQ ID NO: 409657 - DNA, 534 bp, Homo sapiens
gtctgagctgaaacagccttaggagaagtcctaatgaggaatgggacttgtgctcagcacaaacggactgggaaagctgaacgtgtatggatatccttcacaggctgactaatcacacaaagtgcaatgactagtttgactaaaagtaatgagastgggacatgagctccactactgacttaaaccttgctttaaacaagttatttaacctcttgagttctctaattccttatggtacctgcactactcgttcaaaatggcagactgaacacatgcgttgacttccttccttcccccaacccacctaaatgacaaaaagcagtggcatgcagttatttgacacccagatgcatcatcttttaatactccctttttatgacaaaattgctttcagtactaatcgttatttcattaatttgtttcacagtttgaaacaaaggtttactttatatacaaaaattttcatttaaaaatacttagtgaaataaatcatgtatgaactaaaattagtacttaccacaaaaatattacagc

SEQ ID NO: 409658 - DNA, 534 bp, Homo sapiens
gtctgagctgaaacagccttaggagaagtcctaatgaggaatgggacttgtgctcagcacaaacggactgggaaagctgaacgtgtatggatatccttcacaggctgactaatcacacaaagtgcaatgactagtttgactaaaagtaatgagactgggacatgagctccactactgacttaaaccttgctttaaacaagttatttaacctcttgagttctctaattccttatggtacctgcactactcgttcaaaatggcagactgaacacatgcgttgacttccttccttcccccaacccacctaaatgacaaaaagcagyggcatgcagttatttgacacccagatgcatcatcttttaatactccctttttatgacaaaattgctttcagtactaatcgttatttcattaatttgtttcacagtttgaaacaaaggtttactttatatacaaaaattttcatttaaaaatacttagtgaaataaatcatgtatgaactaaaattagtacttaccacaaaaatattacagc

SEQ ID NO: 409659 - DNA, 486 bp, Homo sapiens
tacagtataacacatattaaaattcacttacattacccattaaatatacattttgatcatatttttaaaaaattatttataattttgtttttaaaactatttttgcttcaagcagtttcttaaaaattgcagtgattgtttcaattacaatgtaagctcaagaactcttgcaaagtaagaaaactgaacatacaatcctttcaagaataatggacttttttcctactaatatcaaatttaacagcgaaaacatttggcggagtgtaatattttatagacatccattaacaaatcattactttgatcattcagtcttctatttattctttgaataaaaataacaattttatgcctcaaccctttacaagaagcattggaaaacttaatggataaagcrtttctgtggtgatactcctctactaaatcatctgtgggatttggcagaaaagagagtttaacaaaatctgagatgagaagacaggacac

SEQ ID NO: 409660 - DNA, 612 bp, Homo sapiens
aaaccaagatgacaggttgaatatactatgcataccttacaaaatcctaacagggagagggcacatcacacgaagctgctcagagtttgtttagcatggcccaccagcctcyattgcagtcgtagctggggattccttttcaaagaaattaatgaatgatttgttgacatggttatcttcttcaatatatctaattggagatacttccttataggtctagacatgtaattatgtcttcattgtctcctaaagccagttttgcttcagtctgtctaagatgttgatgaaatgtcttcaaatcaataaaggtgtccaaaaataagaatgggaaaaataaaaccttttgcactagttaacaaaaacacttcatccaactgccaatctctcacttagtgtgcttctaccacaaagctttgctcattgtttctttttcaagcatttttccccaaggtttgcacgggctctataattgtgttatctgcaggcccatgcaggactctagatgagctagcatcaggcatttggggtttagcaaacaaagtggacaagtttgacatgtccatcagctgagtggcagtgcccagtgtgatggtttgtcattttcacacatgt

SEQ ID NO: 409661 - DNA, 528 bp, Homo sapiens
  misc_feature (1)...(528): n = A,T,C or G
gggagataaagccagtctagtccttccacrttcctctgcctgcttttattttggctgtgctggcagctgattagattgtgcccacccagattgagggtgggtctgcctttcctactccactgacccaaatgttaatctcctttggcaacaccctcacagacacacccaggaacaatactttgcatccttccatccaatcaaattgacactcaatattcaccatcacaccacagttttatcaaaatcaggtatgagtaatactcaaggtaagattctaaagcaaatacccagactcaagtctttcgttttaacagcacaaggactctcctaagccaaataactgtctagctgtgaacctgtgagattnagaatgtatatacttccaaaatacgctgatgggacaggcatagggtagacattcccatttcaaaaggaaacaggagaaaagaagaaagagataacaggtccaaagtacatccaaatcctaataaggcaaacaacatcaaatcttgaggtttgagaataatc

SEQ ID NO: 409662 - DNA, 601 bp, Homo sapiens
tggctcttgtaatctggcttggaattctggctcttgtccaccataatctctctcctctcttttcctccctgctcccctaaaagtcccgctccgaatctctgagcaggacaagttctcaccttgtatttggatatatttaggattaaactgatcttcttcacttctagctagaaattaacacrtgcccggcacatagtagctgtttgttcagtaaacgaatagtcacttctgcagcaacgttgcctttcccctactttctgctcctctaagtcatctatcttttttctttcttatccttgtaacctgcacatctataagtcatctatcttggtaacccccatttattcttcacaacttagttaccctctccaggaagccatctctaacactctctcactctcccaaacttgagtggttaggagtcctcgtcataatttgatacaaagcttatggtttggatggcaattgctagtttgtttttctgcccttcacccacaccactactccccagattaatctataatgaattttgctctacgaaggattggttggtctaagagagacttgcagatgacacaagtttcctaaggatattataaaa

SEQ ID NO: 409663 - DNA, 601 bp, Homo sapiens
tggctcttgtaatctggcttggaattctggctcttgtccaccataatctctctcctctcttttcctccctgctcccctaaaagtcccgctccgaatctctgagcaggacaagttctcaccttgtatttggatatatttaggattaaactgatcttcttcacttctagctagaaattaacacatgcccggcacatagtagctgtttgttcagtaaacgaatagtcacttctgcagcaacgttgcctttcccctactttcygctcctctaagtcatctatcttttttctttcttatccttgtaacctgcacatctataagtcatctatcttggtaacccccatttattcttcacaacttagttaccctctccaggaagccatctctaacactctctcactctcccaaacttgagtggttaggagtcctcgtcataatttgatacaaagcttatggtttggatggcaattgctagtttgtttttctgcccttcacccacaccactactccccagattaatctataatgaattttgctctacgaaggattggttggtctaagagagacttgcagatgacacaagtttcctaaggatattataaaa

SEQ ID NO: 409664 - DNA, 599 bp, Homo sapiens
gtaagcaaatgctcagatttgtttttcctggatgtctgcagacatacatctctctctagagtccatgttagktctttgccctgcaatcttggttttctgatgatctcaaagaaaagcaattaattttcaatttgtccagatttttttttttttgtaaaagtgggagagatgctcttcccagtactttgtatctctgagctcagttgctggtatagttagatcagaaccttccctcagttgctatctgtctgtgtccaaggatttggcatggaaacaaatgattctgtgttccctacttctcttctgccaaagcttctattggaatttctacctgcctccttcaaatagctaaccccatgtgatggcagaattttgcagaaggctacatgctgcggatatatcatagacactgctgaggcagaaaagcagtgtactatcagattcctctgagcatctgaaatcagctttcaaaatgtcaaacagccttttgatgctctgctgctcccatgagcaacattataattttcctctgagggagactgagggcatggaattggtgctagtctttatccagataggtcaatacggtatttattaaa

SEQ ID NO: 409665 - DNA, 599 bp, Homo sapiens
gtaagcaaatgctcagatttgtttttcctggatgtctgcagacatacatctctctctagagtccatgttagttytttgccctgcaatcttggttttctgatgatctcaaagaaaagcaattaattttcaatttgtccagatttttttttttttgtaaaagtgggagagatgctcttcccagtactttgtatctctgagctcagttgctggtatagttagatcagaaccttccctcagttgctatctgtctgtgtccaaggatttggcatggaaacaaatgattctgtgttccctacttctcttctgccaaagcttctattggaatttctacctgcctccttcaaatagctaaccccatgtgatggcagaattttgcagaaggctacatgctgcggatatatcatagacactgctgaggcagaaaagcagtgtactatcagattcctctgagcatctgaaatcagctttcaaaatgtcaaacagccttttgatgctctgctgctcccatgagcaacattataattttcctctgagggagactgagggcatggaattggtgctagtctttatccagataggtcaatacggtatttattaaa

SEQ ID NO: 409666 - DNA, 599 bp, Homo sapiens
gtaagcaaatgctcagatttgtttttcctggatgtctgcagacatacatctctctctagagtccatgttagttctttgccctgcaatcttggttttctgatgatctcaaagaaaagcaattaattttcaatttgtccagatttttttttttttgtaaaagtgggagagatgctcttcccagtactttgtatctctgagctcagttgctggtatagttagatcagaaccttccctcagttgctatctgtctgtgtccaaggatttggcatggaaacaaatgattctgtgttccctacttctcttctgccaaagcttytattggaatttctacctgcctccttcaaatagctaaccccatgtgatggcagaattttgcagaaggctacatgctgcggatatatcatagacactgctgaggcagaaaagcagtgtactatcagattcctctgagcatctgaaatcagctttcaaaatgtcaaacagccttttgatgctctgctgctcccatgagcaacattataattttcctctgagggagactgagggcatggaattggtgctagtctttatccagataggtcaatacggtatttattaaa

SEQ ID NO: 409667 - DNA, 656 bp, Homo sapiens
tttgtctaagttttattttttattttatttttttttaaacactctgttctcaaacttttgggtgagaaaggcagtaatccaggcccttagctatgtgggttaaagtgctcatagattacagctgccaggatagtctctaaaactatcaagctcataagtgagaagactcttagccttgtaaatgtagcccaagcaagatctcagrtattcaccagcagtaggtaggctaccgctcatttatttctgatagatcccctgacttccctgttactaatctaagcttatttcatggcaatgacaacttggcttttagacaacgtggctgcactgcactccatcacggctcactgcagcctcaacctctcaggctcaagcaatcctcctgactcagcctcccaaatagctgggattgcaaatgtgagccaccgtgaccttaattctgtctctttcttccaagacagaatcaaatacttacacttctccaatgatgacttctcagtgatgaactccatacactcagtttcatgtttgttatagtctccacgtctcttttccattttattttataattgcattatactgatctagctgtctgttatagggtaaccttgcatcacctctcagtggcccatagatggctggcaccactgaatccc

SEQ ID NO: 409668 - DNA, 656 bp, Homo sapiens
tttgtctaagttttattttttattttatttttttttaaacactctgttctcaaacttttgggtgagaaaggcagtaatccaggcccttagctatgtgggttaaagtgctcatagattacagctgccaggatagtctctaaaactatcaagctcataagtgagaagactcttagccttgtaaatgtagcccaagcaagatctcagatattcaccagcagtaggtaggctaccgctcatttatttctgatagatcccctgacttccctgttactaatctaagcttatttcatggcaatgacaacttggcttttagacaacgtggctgcactgcactccatcacggctcactgcagcctcaacctctcaggctcaagcaatcctcctgactcagcctcccaaatagctgggattgcaaatgtgagccaccgtgaccttaattctgtctctttcttccaagacagaatcaaatacttacacttctccaatgatgacttctcagtgatgaactccatacactcagtttcatgtttgttatagtctccacrtctcttttccattttattttataattgcattatactgatctagctgtctgttatagggtaaccttgcatcacctctcagtggcccatagatggctggcaccactgaatccc

SEQ ID NO: 409669 - DNA, 408 bp, Homo sapiens
gtactggtagctagaagcaaggtgttggcaggccgtgccctcttgaactataaaggaraaccagtttcatgcttttctcttagcttctggcgtcactagaatcccttaacattctttggcttgtataactccaatttctgactctatcttccttctgcatgtgtctcttctctctttgttttgttttgttctgttctgtttgtttttttgagatggagtttcacttttgttgcccaggctggagtgcagtggcatgatcttggctcactgcaacctctgcctcccgggttcaagagattctcctgcctcagcctcctgggtagctaggattacaggcatgtgccaccacgcctggctaattttgtatttttaatagagacaaggtttctccacgttggtcaggctgat

SEQ ID NO: 409670 - DNA, 408 bp, Homo sapiens
gtactggtagctagaagcaaggtgttggcaggccgtgccctcttgaactataaaggaaaaccagtttcatgcttttctcttagcttctggcgtcactagaatcccttaacattctttggcttgtataactccaatttctgactctatcttccttctgcatgtgtctcttctctctttgttttgttttgttctgttctgtttgtttttttgagatggagtttcacttttgttgcccaggctggagtgcagtggcatgatcttggctcacygcaacctctgcctcccgggttcaagagattctcctgcctcagcctcctgggtagctaggattacaggcatgtgccaccacgcctggctaattttgtatttttaatagagacaaggtttctccacgttggtcaggctgat

SEQ ID NO: 409671 - DNA, 537 bp, Homo sapiens
ggcctggagcccaaggcaggagtcatcagggacagaatcattgccgcaggtccttagttccgtctgtgctccgtggagtgtggagaaaagtgtcttccagatcagctggtgggggctggggagaggggggagacgtgcacacctkgaaactagggcatctttatggcgtgagctcattttacctcttttctttttaaagtctagatgaggcatgaatattatgaattggaaattagaaagagaggagaagtcaaagaaggagactttcagtgtcagttgagaaaaactacacccaacatgcactcatacacacaccagtaagatcttgcctagggcgtacttcaagagcctggaaattagagggcacaagcatgagaaagcgaaggtgaaggtcagtggccctaaatgaaggactagggagaaatagaaagatcttattatcaagttcttaggttttgtttttttcttagtggggtgggaatgggggagtgtgatttaaaaaagaaagtaacacaggtgctatcttaaattacatgg

SEQ ID NO: 409672 - DNA, 502 bp, Homo sapiens
ttgaatctgggagacggaagttgcagtgagccaagatcatgccattgcactccagcctgggtgacacagcaagactctatttcaaaaaaaaacccaaagaacaaaaaaacaaacactgtttcacaagtgggcttcaaagaactactggacacagcaggtgaaagatcccaaagtcccattgagcacctcccacaggaggaggaggaggaaaaggagggggagggggaggagagatgagtgccagaggggagatgtgcttgttccctgctgaggttactgctgggaacagtgtactgctgggaactctgtctcaaaacaaacaaaaaaaacaaaacaaaamaaaaaaaaaaagaaagaggaactgtgttttttgccattacttttaatgccataacttctaatagcaaaaactgcaactatttttgcaccaacctaatagtaagtatacagatacacatggaatgttataacaagcttattgtagtgggtaaagcactcatat

SEQ ID NO: 409673 - DNA, 607 bp, Homo sapiens
gtgcaatctcggctcactgcaacgtctgcctcctgggttcaagcgattctcctgcctcagcctcctgagtagctgggattacaggcacctgccaccaygcacagctaatttttgtatttttagtagagacggggtttccctatgttggtcaggctggtctcaaactcctgacctcagatgatccgcctgcctcagcctcccaaagtgctgggattacaggcatgaggcactgcacccagcctataaatgctcttattacgagttaccttacggcttatgatttacaaccgaggaagcaggttatttcatggcaggacttgtactgtgatagttctcttcctcgtcatgaaagatgtcaacagcactcatcgggattcccccaccttggctggacctatcctctggccttggtagttgcccatgtgaaaattgggagaaggtgatgcccacctgcttgcacaagggctgggtctaaatcatccagtctctgtgtgtatctacagccctaggaatggggactggctcatggctcttattgcatgatcagggattttgaggatatttgaggtgcccagactcaaaccttccttgtcattacctccttcct

SEQ ID NO: 409674 - DNA, 607 bp, Homo sapiens
gtgcaatctcggctcactgcaacgtctgcctcctgggttcaagcgattctcctgcctcagcctcctgagtagctgggattacaggcacctgccaccatgcacagctaatttttgtatttttagtagagacggggtttccctatgttggtcaggctggtctcaaactcctgacctcagatgatccgcctgcctcagcctcccaaagtgctgggattacaggcatgaggcactgcacccagcctataaatgctcttattacgagttaccttacggcttatgatttacaaccgaggaagcaggttatttcatggcaggacttgtactgtgatagttctcttcctcgtcatgaaagatgtcaacagcactcatcgggattyccccaccttggctggacctatcctctggccttggtagttgcccatgtgaaaattgggagaaggtgatgcccacctgcttgcacaagggctgggtctaaatcatccagtctctgtgtgtatctacagccctaggaatggggactggctcatggctcttattgcatgatcagggattttgaggatatttgaggtgcccagactcaaaccttccttgtcattacctccttcct

SEQ ID NO: 409675 - DNA, 624 bp, Homo sapiens
taccttgcaaaactccccaagggtagtaacagcctctgaccaycctttttccaactttcacttcaaccatactccctaccacagcaaacggtaacagtccctagaaaacaagaatgatatgaattgaattctctagcaccaataaagcttactatattactctcactcctgttataaaaatgacagcgatgacaatattgtaataaatttaattagggatctaccctgtgtctcattttaagacttgacagtatgcgctaattggtttctgtcagcatcagtctcaggctgtgcacacaattggaaactgtctactaagcagagcctaaagcaaggtatcctgctgtaggaaacacaaagaaaaaggatttttagtagacatcatttttctcacactatctttaccctgaaccatcttcaccctgaaccatctttaccctgaatgttgaagaaataacatgcaagtaacttttaactctggtataaaagttaaaagacaaaatattaaaaatcactaccactattataataattgatggatacaatataaaatgtattaataagcaatactctatatgtctcaataaattatgtttattttttgagacagagtctgaccctgtc

SEQ ID NO: 409676 - DNA, 619 bp, Homo sapiens
tcggttcctctaatgcatgctttggatagaccactctgggcttcagagcttctttctttggaattccaactgycccatttcaggatgatttggggcagtctcttgtggaaactcccttgctgtcacttttggggcaactccagccactggttcagcctgagggaagacctggtatagttggcattactccaaagaatgggctgggagaccgggtgtggtggctcatgcttgtaatctgagcactttaggaggctgaggtgggtggaccatgaagtcaggagttcgagaccagcctggcccacatggtgaaaccccatgtgtactaaaaatgcaaaaattagctgggcatgatcatgggtgcctgtaatcccagctatggaggaggctgtggcaggagaattgcttgaactcggaaggaggaggtggcagtgagcagaggccactacactgcagcctgggtgacagagtgagactctgtctccaaaaaaaaaaaaaaaaaaaagaatgggcttgggaaaacaggaccctactggggagatcccaggatgcctgcaagtgcctatgtgaggctctatcacccactgcctgattcctgcaggctgccctgtgagtgccagga

SEQ ID NO: 409677 - DNA, 529 bp, Homo sapiens
attatatgccaacagtgaaaaatctgaaaaaaactaatccaatttacaatagctataaataaaataaaatacctagaaataaacatgaccaaagaaatgaaaaatccctacaatgaaaactataaatactgatgtaagaaattgaaarggatgcaaaataatgagaacatagttcatgttcatggattggaagaatcaataatattgttaaaatgtccatactacccaaagcaatctataatagattcaatgcaatacctgtcaaaatatcagtgacattcttcaaagaaaaagaaaaaacaatcctaagatgtatatggaaccaaaaaaatacttaaagcaattctgggcaaaaataacaacactggaggaatcgcattacctgacttcaaattatactacaaagccattagtgaaacagcatggtaccagcataaaaacagacacacagaccaatggaacagaatagagaacccaggaataaatccatacagccacagagaactcattttcaacaaaggtgccaagc

SEQ ID NO: 409678 - DNA, 625 bp, Homo sapiens
tatttttatggtggtttgaatgaatcagttagttatttaactttattttccaattgctgtttttctatgtggaagatattcaaggtcaagtaaaatttctttttgttttcttgcttccaaaataaaagaaatttacttagcctcctgcaacaagtaaagaagaccaaaaagaaaatgtattcttttttttttgagatggagtctcactcactctgtcacccaggctagagtgcagcggtgtgatcttgactcactgcaacctccgcttcctgggttcaagtgattctctcgcctcagcctccagagtagctgggattacaggcatgtgccactaccccaggctaatttttatatttttggtagagatggggtttcaccatgttrgccaggctggtctcaaactcctaacctcaggtgatccgctcacctcggcctcccaaaatgctgggattacaagcatgagccaccttgcccaaatctattctttattgacatttttattgacaatgggataatagcccagcataccaatcaagaatataatgaacaaactgacatacaacaaacatttcaagatcaaaactacatgtgcttgagtacacatacacatccatgcacgtaagaa

SEQ ID NO: 409679 - DNA, 595 bp, Homo sapiens
tcaactataaggcaaaagcacagaacaaaaattaacacattaaggaaggagaagcagaaaggcaggcagaaactgggttcttcatggcactggggagtggctacatccagcactatatcgactgcctgtcaacatcagataatgttaaaaactaatacataaacagcaaacgatttgtgcatttcaagtcwtttgaaaccagcaacatttaaaagtgatgagccatacaaaaagtatgacaactgaaagcataccttacataaagaggagtataaaaaggtactacaaatacagtaccaaattcctatgaaatgaacaaggtacttcaaagaatagacaaaacttctcatgcaatttcagataaaatgcaagagttacaacaaaaagaatacacaaaaatcataggttagaagatacaatactataatgatgtcaattgtcccaggtcaatctatagatttaatgcaatctcattcgaaatctgagcagagttttttggtctgtgtttacgtgtatgtcatttgacaattgattctacaagtttacatggaaactttacatggaaacttaaaactctttcccccattaaataatg

SEQ ID NO: 409680 - DNA, 595 bp, Homo sapiens
tcaactataaggcaaaagcacagaacaaaaattaacacattaaggaaggagaagcagaaaggcaggcagaaactgggttcttcatggcactggggagtggctacatccagcactatatcgactgcctgtcaacatcagataatgttaaaaactaatacataaacagcaaacgatttgtgcatttcaagtcttttgaaaccagcaacatttaaaagtgatgagccatacaaaaagtatgacaactgaaagcataccttacataaagaggagtataaaaaggtactacaaatacagtaccaaattcctatgaaatgaacaaggtacttcaaagaatagacaaaacttctcatgcaatttcagataaaatgcaagagttacaacaaaaagaatacacaaaaatcataggttagaagatacaatactataaygatgtcaattgtcccaggtcaatctatagatttaatgcaatctcattcgaaatctgagcagagttttttggtctgtgtttacgtgtatgtcatttgacaattgattctacaagtttacatggaaactttacatggaaacttaaaactctttcccccattaaataatg

SEQ ID NO: 409681 - DNA, 584 bp, Homo sapiens
gggaaaataatatatcttcccacaaaagaaaaacattagtttccagattaaataacccaccaagacccagatcaaggccaccatgccacatcaaygaatatcaatgcaaaatttcaaaccatcaaagaaaaagacaagtaagagtattccaacagggaaaaacacacacacacaaaaaagaatccaagtgtcacttccattgtcaagagaatcactggaggctataaggcaaagggcaatataaaattctcaaggaaaatggttttcaaccaagaactttttacctagacaagtgtgagagtaaaatatagacatttccaaagatcaaaagtgtctaaacatttacttcttacacatgcattctcaggaaactcccagaaggtgtgctccaataaacaagtaaaaccagaaagagagagagacatggagtccaaggaatcagggtaacaacaaaggagacagggagaaggtggtggtgtgaggtgccaagatgagagctgtctggaagacccagagaacaatcagctcatactgatgtgtagctcttagaggaagatctccaggaagaaaaggaaaaggaaata

SEQ ID NO: 409682 - DNA, 534 bp, Homo sapiens
cataaataccatgaaaaacaggtctttttgttctaaccgatagagggattatttagcagcttaatgactttggtaaataaaagtttatttgcacctatgagaaagatgacaggtaatatctagatatctgagtaaagagtaaagagagcacaaatacaataagatatggagactcagtatcctatcagctttttgatgtaaaatggtacagtagttactacctaagagaatagtctatttccatgctggttgctcacttgtgtgctcttctgaaagagtgagggcactgtgcgtctgactggatactggggtactctgtttccaagctgcattacagggatttgaaatatcttacatatatatatatatatatatatatatatatatatatatatatataatatatatatttatttatattatatatatatttatttattccatatasaggcataccttggagatattgcaggttagggtccagaccattgcaataaagtgaatcacacaaattttgtggtttcccagtgcata

SEQ ID NO: 409683 - DNA, 599 bp, Homo sapiens
gatagccaccctacagtgctatggaagacttgaactgattcttcctatctagctggagtttcatatcctttaacaactctctccctatcccccactcttccttcaaccctcctattctctgttctacttttgacttctatgaaatcaacttctttttagcttctgcatatgagaacatatgtggtgtttaactttctgttcctggcttatttcaagaaacataatgccctccagttccatccctgttgtctcaaatgacaggacttcctttttttttttatggctgaatagcgtattccattgcatatatatagcacattttttatccattcatctgttgttggacatgggttamttccatatcttgtatattgtgaacagtgctacaataaacacagaagtgcaggtatctctttgataaactgatttcctttcctctggataaatgcccagtagtgggattgctggaggagcttccactctgctctccatagtgaccatactagtttactttcctgcatagtgtgtaagagttcccttttctccgtatcattgccagcatgtttttttttgtctttttaataatggccatcctatct

SEQ ID NO: 409684 - DNA, 625 bp, Homo sapiens
tcaatcacctgcttccaaagagtggcagaaagcaaccaagtgcttagcaaaggcaacacataaagccagcacctaagaatctggggtatctagcaccatcctagagtccttgagaaaataaccacttgttcttaagaggttagataaaattctacctgtcctaaagaaagctgacacgacaaaagccccaaacacactgaacagataaacaaaaatgctcataacttactttaatcatgtgagtcggcttacccttgaaatccttaaagaatttatacaatttaactcaatacaaatttagttctctatctctgtttttaaaatacaagttccttcactgtaatgagttctgaacagattatgttttctgtatacaaaaaagagtcaatattggagtcagagctcataaggagagaagcctgcgtgctatgctaacactcccatttggaggctagtctctttgcaattgcccaacaccacctgcatacacttctctaagtctttcacttactacactagtttgattkgcccagtacagttggtttttaaatgtttatgactgagagaaaaaatgtggacgttttgaaggagagcaaaatggaaagtgatcacgcagagtagaacc

SEQ ID NO: 409685 - DNA, 618 bp, Homo sapiens
ttttgtattctcccttcaaattgctctgatctctgtgttgtcatgtaacaagaccattgtgcttttttggggtagccagtacctacagcatggtgcagtaaatgctcggaataatagtctagtgtcaggaaaccattgtttcccatattctgctttctggttgttgactgcaggaaggactgatctagtgctagttactccacagtggctgacagtcccctctgtatkattatttaacctgttattttatagtccattaatgcagaaatgtttccatccttgctgtactctcatgtccacaacaaagcctgacacattctaagtggttagtagccatttactgagtgctgtatgcagtagattatctctccctttctcctgcatggtcaaatttttccttcagtgcgggactccctccaattagcattggaatatgcgtgaggctccctttgtcttaaaccgccatatctggacctgcccttatctaattcccaacctgcttcagtgttgctttcatccagcagttccattgcaataatattcacaagtgttattgatgactcccctatggtttaaacctatctcggtcttaatctcacttgattcctggtggcattt

SEQ ID NO: 409686 - DNA, 614 bp, Homo sapiens
ctcaccttggccccccacagtgcaaggattacaggtatgagccaccatgcctggcccctaccctgcctactgagaaccaaaggaaggatccaaattctccttagctcaactcgagccatttcctgattgcttcatcagcgaggagctggttattgggctgtccaggcctcccaagcagcacagaaatgaggtgaaggagttttcctgttgctccactctgtaaggagttggagggtgatgtttactcgtttgcagagagagatgccttgtaggcacctcaggatggagagggccctgattccaatgtcctttttttcttcagaaacaggaccttgccctgtcactcaggatggagttcagtggtcctatcatggctcattatagcctcaaactcccaggctcaagcaatcctaccatgtcagccttcccagtagctgggactacaggtaagcatcgtgacactcagtgaattttgtttttattttgttgtagagatgggacctcagtatgttgccayggctgaccttgaactcctgcactcaagggattttcctaccctggcctcccaaagtattggtattacaggcatgagccattgtgcccaccgtctctgg

SEQ ID NO: 409687 - DNA, 529 bp, Homo sapiens
caaaattaatactttttatattaaatttacatatatatagatatacgttttttctttttgataccgggtctcacactgtcaccsaggctggagtacagtggcacaacctctgctcactgcagcctccacctgccaggctcaagcaattctcctgcctcagcctcccgagtagctgggattacaggtaagtgccaccacacccagctgatttttgtgttttttgtagagacgaggtttcgccatgtttcccagactgttctcaaactcctgagctcaaagcagtccacccaccttggcctcccagagttctgggattacaggtgtgagccatcttgctcattctagtttaaacttttgagtggtttgtgtctcctgattggactcctacaaatacagaattgatgctaggaagggtaccaggagatagacgcacacagatgggatttgggaataggtttggttatccaaggagcagtgctgagctccttgcaatgggatatgggatgctggtgatttccaggaagtgagc

SEQ ID NO: 409688 - DNA, 598 bp, Homo sapiens
tccgtgctttgcccaaggagatggtctcattaaggtaaataatttgctataccagattagattatatgaatgtgctcaaggacttttgaaaataagataggctttatgctaataataataataagctccaatattcagcagtcactttacgtcaggtactggtctgagcgcttcacatatccttcatgacaacgctggtcagtagatactactatctcacttttttgatgtagaagcaaacataagactttaagtaacttaccatagatcactgctgataagtggcagaagaggattcaaacactgacattctggctttttttgaaattctagcataaagtattatcttacaacatgcctaagtatcttagttcataggcttctttttagtactctagttttagaaacaaagttcaaacccagttagagggtggagtaaggtatgaggaagrttactatctgtgggaatcttagataacttccatcactccccttctttaagccgcactgcttgcttgcccagacacttctgtcctgggtagtgtggaaaataaaacaccttttgtacttcggttgagggtaggtggattggagggag

SEQ ID NO: 409689 - DNA, 524 bp, Homo sapiens
atgatatttttaattttttgttttactttaaacatactaaatatagttattttattttattttctgtatctgatactttcaataactgcagtcttygctagtcttttttctgtgctcttgctcatagtttttttcatttgttttcatgattagaaaaacagagagagaagaaggagagtaaagggaggaggcggaggaggagaaaagaagaaagcagagaagaagggacagagaaaaaaaggaagttggttctaacgtttctctaacaactggcttcagtgaaacactcccaccttgtggatttttaggttattgaaattaaccagtcttctgggtgcagcacaccaacatggcacatgtatacatatgtaacaaacctgcactttgtgcacatgtaccctaaaacttaaagtataataaaaaataaaataaaaagctacacaaatttaaaaaaaaagaaatcaacctaattcctagattaccacctcttgattcaaatgctttaaatctaggcttttcatctg

SEQ ID NO: 409690 - DNA, 524 bp, Homo sapiens
atgatatttttaattttttgttttactttaaacatactaaatatagttattttattttattttctgtatctgatactttcaataactgcagtctttgctagtcttttttctgtgctcttgctcatagtttttttcatttgttttcatgattagaaaaacagagagagaagaaggagagtaaagggaggaggcggaggaggagaaaagaagaaagcagagaagaagggacagagaaaaaaaggaagttggttctaacgtttctctaacaactgkcttcagtgaaacactcccaccttgtggatttttaggttattgaaattaaccagtcttctgggtgcagcacaccaacatggcacatgtatacatatgtaacaaacctgcactttgtgcacatgtaccctaaaacttaaagtataataaaaaataaaataaaaagctacacaaatttaaaaaaaaagaaatcaacctaattcctagattaccacctcttgattcaaatgctttaaatctaggcttttcatctg

SEQ ID NO: 409691 - DNA, 524 bp, Homo sapiens
atgatatttttaattttttgttttactttaaacatactaaatatagttattttattttattttctgtatctgatactttcaataactgcagtctttgctagtcttttttctgtgctcttgctcatagtttttttcatttgttttcatgattagaaaaacagagagagaagaaggagagtaaagggaggaggcggaggaggagaaaagaagaaagcagagaagaagggacagagaaaaaaaggaagttggttctaacgtttctctaacaactggcttcagtgaaacrctcccaccttgtggatttttaggttattgaaattaaccagtcttctgggtgcagcacaccaacatggcacatgtatacatatgtaacaaacctgcactttgtgcacatgtaccctaaaacttaaagtataataaaaaataaaataaaaagctacacaaatttaaaaaaaaagaaatcaacctaattcctagattaccacctcttgattcaaatgctttaaatctaggcttttcatctg

SEQ ID NO: 409692 - DNA, 451 bp, Homo sapiens
ccaacaaacacttagatgactaacaccaatccttcccaaactcttccaaaaaaaatgaagaagaggaatacttycaaattcatttttcaaaaccagcattaccctgataccaaaaccagagaaggacactataataaaaataaattgcagaccaatactcctgatgaacttggatggaaaaaccttcagccaaatattagcaaatattattttaaaaaaaaaacagcaaaaaaattcaccatgcttaagtgggattcatccctgggaagcttattagtcttatttgattcgtgtaatcagaaaatttctatgtctagtgaagagaaatgagagcaatagagactcatagcacctcaacaaatgtccaggcttgagccagttaacaaatacaagtccttcaaatacaaaaaagactgtgaaagaaaatagaacagatcaatgagactaagaa

SEQ ID NO: 409693 - DNA, 440 bp, Homo sapiens
atttgactaaattcaaaatcctctcatgacwaaacctctcaacaaattgggcatagaaggcatgtaccttaacacaaaacaggacatatataacaagctcacagctcacatcatacccaacaatgaaaaagtgaaatcttttctgctaagatcaaaaacaagacaaggatatttattctcactacttctattcaacttatttctggaagtcctagccagagcaattaagccaaataaagaaataaaagattcagattgaaaaggaagaagtaaaattgtctctgtttgatgacatattatatataggaaaccctaaaaactccaccaaaaagctattagaaatgataaatgaattcaataaaatttcagaattcaaaatcaatgtacaaaactcagtagtttctttacactcacaacaaactatatgacaaaaataaaga

SEQ ID NO: 409694 - DNA, 572 bp, Homo sapiens
gatatttattctcactacttctattcaacttatttctggaagtcctagccagagcaattaagccaaataaagaaataaaagattcagattgaaaaggaagaagtaaaattgtctctgtttgatgacatattatatataggaaaccctaaaaactccaccaaaaagctattagaaatgataaatgaattcaataaaattkcagaattcaaaatcaatgtacaaaactcagtagtttctttacactcacaacaaactatatgacaaaaataaagaaatcaatctcattcacagtagcatcaaaaaaaacgtattttttttgtttaggagcacatttaggattgtacttaggagtacatttaaccaaggaggtgaaagatctgtattctgaacactataaaacattgatgaaaaattgtagatgacacaaatacatggaaagatattttatgttcatgggtaggaagaattaatattcttaaaatgtccttactgcccaaagcgatttataggtttaatgcaatatttatcaaaatttcaatgtcattcttcacagaaatagaaaaaacaatttg

SEQ ID NO: 409695 - DNA, 572 bp, Homo sapiens
gatatttattctcactacttctattcaacttatttctggaagtcctagccagagcaattaagccaaataaagaaataaaagattcagattgaaaaggaagaagtaaaattgtctctgtttgatgacatattatatataggaaaccctaaaaactccaccaaaaagctattagaaatgataaatgaattcaataaaatttcagaattcaaaatcaatgtacaaaactcagtagtttctttacactcacaacaaactatatgacaaaaataaagaaatcaatctcattcacagtagcatcaaaaaaamcgtattttttttgtttaggagcacatttaggattgtacttaggagtacatttaaccaaggaggtgaaagatctgtattctgaacactataaaacattgatgaaaaattgtagatgacacaaatacatggaaagatattttatgttcatgggtaggaagaattaatattcttaaaatgtccttactgcccaaagcgatttataggtttaatgcaatatttatcaaaatttcaatgtcattcttcacagaaatagaaaaaacaatttg

SEQ ID NO: 409696 - DNA, 572 bp, Homo sapiens
gatatttattctcactacttctattcaacttatttctggaagtcctagccagagcaattaagccaaataaagaaataaaagattcagattgaaaaggaagaagtaaaattgtctctgtttgatgacatattatatataggaaaccctaaaaactccaccaaaaagctattagaaatgataaatgaattcaataaaatttcagaattcaaaatcaatgtacaaaactcagtagtttctttacactcacaacaaactatatgacaaaaataaagaaatcaatctcattcacagtagcatcaaaaaaaaygtattttttttgtttaggagcacatttaggattgtacttaggagtacatttaaccaaggaggtgaaagatctgtattctgaacactataaaacattgatgaaaaattgtagatgacacaaatacatggaaagatattttatgttcatgggtaggaagaattaatattcttaaaatgtccttactgcccaaagcgatttataggtttaatgcaatatttatcaaaatttcaatgtcattcttcacagaaatagaaaaaacaatttg

SEQ ID NO: 409697 - DNA, 572 bp, Homo sapiens
gatatttattctcactacttctattcaacttatttctggaagtcctagccagagcaattaagccaaataaagaaataaaagattcagattgaaaaggaagaagtaaaattgtctctgtttgatgacatattatatataggaaaccctaaaaactccaccaaaaagctattagaaatgataaatgaattcaataaaatttcagaattcaaaatcaatgtacaaaactcagtagtttctttacactcacaacaaactatatgacaaaaataaagaaatcaatctcattcacagtagcatcaaaaaaaacgtattttttttgtttaggagcacatttaggattgtacttaggagtacatttaaccaaggaggtgaaagatctgtattctgaacactataaaacattgatgaaaaattgtagatgacacaaatacatggaaagatattttatgttcatgggtaggaagaattaatattcttaaaatgtccttactgcccaaagcgatttataggtttaatgcaayatttatcaaaatttcaatgtcattcttcacagaaatagaaaaaacaatttg

SEQ ID NO: 409698 - DNA, 553 bp, Homo sapiens
  misc_feature (1)...(553): n = A,T,C or G
gaggagcaggaggagtatggagggaagactcctgggtggcatggagctcttgcacctctaggcactgcccagccctgtgtagccaggctgaacccccacaggataaggaagcctgtgtgtgtaccaacaatcaaagctacatctgtgacacaacaggacactgctatgggcagtctcagtgttgtaactactactatgaacattggtggttctggctggcrtggaccatcaccatcatcctgagctgctgctgtgtctgccaccacagccaagccagccctcaagtccagcagtagcaacatgaaatcaacctgactgcctatccagaagcccgcaattactcagtgctaccattttatttcaccaaactatttattaccttcttatgaggaagtggtgaactaacctccacctgtttccctccctgtctgtccatcgtggatgagctctgagcccctgttttccctggtgaagattctttgaattgcagccattctattcacatgaactctacacatctcggaacannnnnnnnnnnnnnnnnnnnnnnnnn

SEQ ID NO: 409699 - DNA, 529 bp, Homo sapiens
tctatgttgaacgaagtgaagtctgtacacagcattgcaaatgtgaacacattcctgtgtgaggcacatcamcatttgtcagttattgtgaatatgtgtatttttaagcaataagatgcagctggtcagttttctgggcaatcttggcgatgcatttcctgtgctgtggttgttctctaaccactgtgagaaacccaaataaaaatcgatccccccccaaaacaaatacgtatcacaaaaccatagtaatcaaaacaacatgacacttgcacaaaaacagacacattgaccaggggaacagaataaggagcccagaaataaactcatgcatttatgaccaataaatttctgacaaaggtgcccagaaaacgtaatgaagaatagacatttgtttcaataaatggtgttgagactactagatatccacatgcagaagaacacgaatgtgtatggtgtgtatccttatctcacaccatacacaaaaatcaattcaaaatggattaaaggtttaaacataaaactgtaaaac

SEQ ID NO: 409700 - DNA, 529 bp, Homo sapiens
tctatgttgaacgaagtgaagtctgtacacagcattgcaaatgtgaacacattcctgtgtgaggcacatcaacatttgtcagttattgtgaatatgtgtatttttaagcaataagatgcagctggtcasttttctgggcaatcttggcgatgcatttcctgtgctgtggttgttctctaaccactgtgagaaacccaaataaaaatcgatccccccccaaaacaaatacgtatcacaaaaccatagtaatcaaaacaacatgacacttgcacaaaaacagacacattgaccaggggaacagaataaggagcccagaaataaactcatgcatttatgaccaataaatttctgacaaaggtgcccagaaaacgtaatgaagaatagacatttgtttcaataaatggtgttgagactactagatatccacatgcagaagaacacgaatgtgtatggtgtgtatccttatctcacaccatacacaaaaatcaattcaaaatggattaaaggtttaaacataaaactgtaaaac

SEQ ID NO: 409701 - DNA, 566 bp, Homo sapiens
gaggcacatcaacatttgtcagttattgtgaatatgtgtatttttaagcaataagatgcagctggtcagttttctgggcaatcttggcgatgcatttcctgtgctgtggttgttctctaaccactgtgagaaacccaaataaaaatcgatccccccccaaaacaartacgtatcacaaaaccatagtaatcaaaacaacatgacacttgcacaaaaacagacacattgaccaggggaacagaataaggagcccagaaataaactcatgcatttatgaccaataaatttctgacaaaggtgcccagaaaacgtaatgaagaatagacatttgtttcaataaatggtgttgagactactagatatccacatgcagaagaacacgaatgtgtatggtgtgtatccttatctcacaccatacacaaaaatcaattcaaaatggattaaaggtttaaacataaaactgtaaaactactagatgaaaacataggggaaaagttccacaatgttggtttggtcaaagatttcttggatataacccccaaagcacaggcaacaaaagcaaaaat

SEQ ID NO: 409702 - DNA, 566 bp, Homo sapiens
gaggcacatcaacatttgtcagttattgtgaatatgtgtatttttaagcaataagatgcagctggtcagttttctgggcaatcttggcgatgcatttcctgtgctgtggttgttctctaaccactgtgagaaacccaaataaaaatcgatccccccccaaaacaaatacrtatcacaaaaccatagtaatcaaaacaacatgacacttgcacaaaaacagacacattgaccaggggaacagaataaggagcccagaaataaactcatgcatttatgaccaataaatttctgacaaaggtgcccagaaaacgtaatgaagaatagacatttgtttcaataaatggtgttgagactactagatatccacatgcagaagaacacgaatgtgtatggtgtgtatccttatctcacaccatacacaaaaatcaattcaaaatggattaaaggtttaaacataaaactgtaaaactactagatgaaaacataggggaaaagttccacaatgttggtttggtcaaagatttcttggatataacccccaaagcacaggcaacaaaagcaaaaat

SEQ ID NO: 409703 - DNA, 566 bp, Homo sapiens
gaggcacatcaacatttgtcagttattgtgaatatgtgtatttttaagcaataagatgcagctggtcagttttctgggcaatcttggcgatgcatttcctgtgctgtggttgttctctaaccactgtgagaaacccaaataaaaatcgatccccccccaaaacaaatacgtatcacaaaaccatagtaatcaaaacaayatgacacttgcacaaaaacagacacattgaccaggggaacagaataaggagcccagaaataaactcatgcatttatgaccaataaatttctgacaaaggtgcccagaaaacgtaatgaagaatagacatttgtttcaataaatggtgttgagactactagatatccacatgcagaagaacacgaatgtgtatggtgtgtatccttatctcacaccatacacaaaaatcaattcaaaatggattaaaggtttaaacataaaactgtaaaactactagatgaaaacataggggaaaagttccacaatgttggtttggtcaaagatttcttggatataacccccaaagcacaggcaacaaaagcaaaaat

SEQ ID NO: 409704 - DNA, 529 bp, Homo sapiens
tctatgttgaacgaagtgaagtctgtacacagcattgcaaatgtgaacacattcctgtgtgaggcacatcaacatttgtcagttattgtgaatatgtgtatttttaagcaataagatgcagctggtcagttttctgggcaatcttggcgatgcatttcctgtgctgtggttgttctctaaccactgtgagaaacccaaataaaaatcgatccccccccaaaacaaatacgtatcacaaaaccatagtaatcaaaacaacatgacacttgcacaaaaacagacacattgaccaggggaacagaataaggarcccagaaataaactcatgcatttatgaccaataaatttctgacaaaggtgcccagaaaacgtaatgaagaatagacatttgtttcaataaatggtgttgagactactagatatccacatgcagaagaacacgaatgtgtatggtgtgtatccttatctcacaccatacacaaaaatcaattcaaaatggattaaaggtttaaacataaaactgtaaaac

SEQ ID NO: 409705 - DNA, 558 bp, Homo sapiens
ctgatatgtggaatctgaaaaagttgaattcatagaagtagagaatggaatggtgattatcagaggctaggagttggggrtagacatggaaaaggtagatgttgataaaagggttcaaagtttcagttagacaaagtttcagtgaactattgcacagaatggtgactgtaataaataacaaggtattgtatgtttcaaaatgactaacagagtagattttaaatgttttcaccacaaaaaagatatgtatgtcaataagatagacctaatctttccacaatttaaacatgtatcaaaacattacattgtaccccatagatacaattattatttgtcaatttaaaatttttcactaatttatattgttattgttgcaccaactcctttccaccaggcagattctcataaagactattttctctcttacatgaagcatttcctacacacctcttaatcacggtagcattgacatcattccaccagattctatctccagtgttaaaataatcaagaacccagaaatctccaccagggggcaaccaatgcgtatcaaagttt

SEQ ID NO: 409706 - DNA, 558 bp, Homo sapiens
ctgatatgtggaatctgaaaaagttgaattcatagaagtagagaatggaatggtgattatcagaggctaggagttgggggtagacatggaaaaggtagatgttgataaaagggttcaaagtttcagttagacaaagtttcagtgaactattgcacagaatggtgactgtaataaataacaaggtattgtatgtttcaaaatgactaacagagtagattttaaatgttttcaccacaaaaaagatatgtatgtcaataagatagacctaatctttccacaatttaaacatgtatcaaaacattacattgtaccccatagatacaattattatttgtcaatttaaaatttttcactaatttatattgttattgttgcaccaactcctttccaccaggcagattctcataaagactattttctctcttacatgaagcatttcctacacrcctcttaatcacggtagcattgacatcattccaccagattctatctccagtgttaaaataatcaagaacccagaaatctccaccagggggcaaccaatgcgtatcaaagttt

SEQ ID NO: 409707 - DNA, 539 bp, Homo sapiens
aatacctaacatagacgtttgtatatgataagagagccagagtacaatttaggagaagaaattgtatggaaggaaggttcatttccattagaccagaaaagacagcacatttgaaggcctgaataagaaatattctggataagatattgtggctgctaccagaatggctcttgatgatctctacctcgtggtatttatacccgtatataatctctttcctatagtgtaagctggtcccaggtacttgtttctattgaatagaatagaacaaaagwaatgagatgccacttctgagattagattataagatactgtgaatttcatcttgtgccctctccctctctctctttctcttgccctctcatttgaatgaagccaactggcatgctgtcagtggcccagtgtaagtcctgttacaagaaattgatgattacctgtagccaaccctaagtgaagaactgaggtcctcagtcctacaaatggagagaaactgaatctagctaagaaccatgtgagtgagctgggaagaagatccaccc

SEQ ID NO: 409708 - DNA, 539 bp, Homo sapiens
aatacctaacatagacgtttgtatatgataagagagccagagtacaatttaggagaagaaattgtatggaaggaaggttcatttccattagaccagaaaagacagcacatttgaaggcctgaataagaaatattctggataagatattgtggctgctaccagaatggctcttgatgatctctacctcgtggtatttatacccgtatataatctctttcctatagtgtaagctggtcccaggtacttgtttctattgaatagaatagaacaaaagaaatgagatgccacttctgagatyagattataagatactgtgaatttcatcttgtgccctctccctctctctctttctcttgccctctcatttgaatgaagccaactggcatgctgtcagtggcccagtgtaagtcctgttacaagaaattgatgattacctgtagccaaccctaagtgaagaactgaggtcctcagtcctacaaatggagagaaactgaatctagctaagaaccatgtgagtgagctgggaagaagatccaccc

SEQ ID NO: 409709 - DNA, 539 bp, Homo sapiens
aatacctaacatagacgtttgtatatgataagagagccagagtacaatttaggagaagaaattgtatggaaggaaggttcatttccattagaccagaaaagacagcacatttgaaggcctgaataagaaatattctggataagatattgtggctgctaccagaatggctcttgatgatctctacctcgtggtatttatacccgtatataatctctttcctatagtgtaagctggtcccaggtacttgtttctattgaatagaatagaacaaaagaaatgagatgccacttctgagattagattataagatactgtgaatttcatcttgtgccctctccctctctctctttctcytgccctctcatttgaatgaagccaactggcatgctgtcagtggcccagtgtaagtcctgttacaagaaattgatgattacctgtagccaaccctaagtgaagaactgaggtcctcagtcctacaaatggagagaaactgaatctagctaagaaccatgtgagtgagctgggaagaagatccaccc

SEQ ID NO: 409710 - DNA, 454 bp, Homo sapiens
atgctgtcagtggcccagtgtaagtcctgttacaagaaattgatgattacctgtagccaaccctaagtgaagaactgaggtcctcagtcctacaaatggagagaaactgaatctagctaagaaccatgtgagtgagctgggaagaagatccaccctcagttgaaatttaagatgacatattgagcagacatactgagacacactgaaagtaagagagcaggaggaaacaaaaccagggtcatacaaagaacacaactgattttgagattctcacataagtattacaccttcagtgagcacgtgtactagaaattwaaaaaataaataaaataaaccttcaaagtgagctagcaaataaatttccctatggtctcagctctgagtggagagagaaaatgttccctgtggagtttatagccagaatccagctctcaaacaggtttcagcctgaact

SEQ ID NO: 409711 - DNA, 574 bp, Homo sapiens
gctctcaaacaggtttcagcctgaactcacacaatctgtgtggcttccaaatttgcaagctgagaatttaattcaaagtggtctcaggttgatagcagtccaaaatgctaggtaggaaaaaaaatcctctctggacaaataaatcatcaaagcaagctcataagagcaggtttcaaaggtcatgagattctaacacacacacaaaaatcacacacacaaaatgggggtagcagcaacatgggtagcrtattcaaacttgaaaagactttaaatatttgtattattagatgtagattatgaaacacatattttaatgtggttaatttttttaaggaatcaaaactatgagtaaagaccaagaaaattgtgctggatggccacttccaccatggctcccctcctatttaagtctgggtactgtgtcacccgaagtcttcaggcacattgttccaggtctgggtttgcctatgaaagaaactcatgagagctggaaatgaggagtgaagaggaggtcttcaaataaagcaggcttaaggattagacatagcaggtttgacagatgtgatggcttgca

SEQ ID NO: 409712 - DNA, 501 bp, Homo sapiens
tttattataatgaattatcttttatactcactacaatttcctaacaattttggggtttatatttttgaaagagatatacctttaattttctttctttgtactattgttaggtaactttgatgtgcagattatactacagtgaaagttgccaatgacaaggcaaagtcacttacatcagacccaaagcaaagtggagccgggtcatgaaaaaggggatcttgtgtgtctgtccacgataagcactatcacaaggactttctataaactcacaagaaatttctgcccacccagcacactctgtttgtccagctcatmctgtaggtgtctctataataggacctatcataaaaaattcctcaagactgcagcatttcagataagccaccctcacaagaacacttgcctagcaatggctgtttctgccagtaagttaacaccagctcctgcatcagatcctgtgaccaatgatgtttgtttcaaaacagcttgcatggacttctt

SEQ ID NO: 409713 - DNA, 561 bp, Homo sapiens
caaaaagaaagttgaggaaatcttaaaacatgttattgagcttaaagttgcaaaaataaactcatgtaccataattsatgagtagaaaaatagactagtggaataacataaaaataaaaacaatgcttacataaaatgttgtaactgatttggatgtcattagaaatcagtaagtaaatagatggacaatgtaatgaaagatgctaggcaaataatgtggtagggagaataatggccctcaaagatgcccatgcctaaccctggaacctgtgaatatgttacactgaatgcaataaaggcttatcagatgtgattaaggatgcaaactgagatggagagatcttcctgggttacccagatgggcccagtctaatcacatgagttcttaaaaatggagaacctttcttagctgagtccagagagagatgtgacaatgaaagaatggtcagagaaatgtgacattgccagctttaaaaagagagaggagaggcaatgagaaaaggaatgctgatgttctctagaagatagaaaaggccaggatatggattctaccctagccgc

SEQ ID NO: 409714 - DNA, 561 bp, Homo sapiens
caaaaagaaagttgaggaaatcttaaaacatgttattgagcttaaagttgcaaaaataaactcatgtaccataattgatgagtagaaaaatagactagtggaataacataaaaataaaaacaatgcttacataaaatgttgtaactgatttggatgtcattagaaatcagtaagtaaatagatggacaatgtaatgaaagatgctaggcaaataatgtggtagggagaataatggccctcaaagatgcccatgcctaaccctggaacctgtgaatatgttacactgaatgcaataaaggcttatcagatgtgattaaggatgcaaacygagatggagagatcttcctgggttacccagatgggcccagtctaatcacatgagttcttaaaaatggagaacctttcttagctgagtccagagagagatgtgacaatgaaagaatggtcagagaaatgtgacattgccagctttaaaaagagagaggagaggcaatgagaaaaggaatgctgatgttctctagaagatagaaaaggccaggatatggattctaccctagccgc

SEQ ID NO: 409715 - DNA, 536 bp, Homo sapiens
tcactaaaattcatgcctgatttctgacttgtgtacactgtaagatgacaagtttgtgttattttaggtcacttagtttgtagaaatttgttacagcagtaatagaacaagtggttatccatatgaggcaaattagattggatacctatctccaatagaaatcaattcaaggtgaattccaggaaaatacttaaaacatttagattaaaaataaatgagaatttttgttacttttkgtaggtcatagaaccaagaaaaacaaacattaaggaggaaaaatgaacatatgactacatcaaaatataaagcttctctatttggatgatatcataaggtgacaaatcataaactgtaatatttacaacatatatataagtgaataaatatacatttagaatatatatgaactcccaaaaatcaacaggaaaaataagacatagaacaagcaaaatgcataaacaaaagaaggcaaaacaaaaataatgactcataattatatgaaaagaagctcatcttcatagatgagcagataaatg

SEQ ID NO: 409716 - DNA, 536 bp, Homo sapiens
tcactaaaattcatgcctgatttctgacttgtgtacactgtaagatgacaagtttgtgttattttaggtcacttagtttgtagaaatttgttacagcagtaatagaacaagtggttatccatatgaggcaaattagattggatacctatctccaatagaaatcaattcaaggtgaattccaggaaaatacttaaaacatttagattaaaaataaatgagaatttttgttactttttgtaggtcatagaaccaagaaaaacaaacattaaggaggaaaaatgaacatatgactacatcaaaatataaagcttctctatttggawgatatcataaggtgacaaatcataaactgtaatatttacaacatatatataagtgaataaatatacatttagaatatatatgaactcccaaaaatcaacaggaaaaataagacatagaacaagcaaaatgcataaacaaaagaaggcaaaacaaaaataatgactcataattatatgaaaagaagctcatcttcatagatgagcagataaatg

SEQ ID NO: 409717 - DNA, 452 bp, Homo sapiens
actttggcagcagaggcaggcggatcactttgagctcagggcaacatagccaaaacccccctccctagccccacccccaccccgtccctaccaaaaatacaaaacagcagggcatggtggcrggcgcctgtagtcccagctactcaggaggctgaggcaggagaatcacctgaacccaggaggcagacattgcagtgagccaagatcacgccactgccagcctggatgacagagcaagactccacctcaaaaaaaacaaaaacaaaaacacaaggttaagagggacccccgaccttacagatacaagtttaagagggacccctaagcaaaaaatgccaaccctttttctcccaatcattgaaacaccaggagggtgtaacagttttgcagcctagctgtagcaggctgatgcccccaagatgcccatatcctaatcccgggaactggtgaac

SEQ ID NO: 409718 - DNA, 452 bp, Homo sapiens
actttggcagcagaggcaggcggatcactttgagctcagggcaacatagccaaaacccccctccctagccccacccccaccccgtccctaccaaaaatacaaaacagcagggcatggtggcgggcgcctgtagtcccagctactcaggaggctgaggcaggagaatcacctgaacccaggaggcagacrttgcagtgagccaagatcacgccactgccagcctggatgacagagcaagactccacctcaaaaaaaacaaaaacaaaaacacaaggttaagagggacccccgaccttacagatacaagtttaagagggacccctaagcaaaaaatgccaaccctttttctcccaatcattgaaacaccaggagggtgtaacagttttgcagcctagctgtagcaggctgatgcccccaagatgcccatatcctaatcccgggaactggtgaac

SEQ ID NO: 409719 - DNA, 452 bp, Homo sapiens
actttggcagcagaggcaggcggatcactttgagctcagggcaacatagccaaaacccccctccctagccccacccccaccccgtccctaccaaaaatacaaaacagcagggcatggtggcgggcgcctgtagtcccagctactcaggaggctgaggcaggagaatcacctgaacccaggaggcagacattgcagtgagccaagaycacgccactgccagcctggatgacagagcaagactccacctcaaaaaaaacaaaaacaaaaacacaaggttaagagggacccccgaccttacagatacaagtttaagagggacccctaagcaaaaaatgccaaccctttttctcccaatcattgaaacaccaggagggtgtaacagttttgcagcctagctgtagcaggctgatgcccccaagatgcccatatcctaatcccgggaactggtgaac

SEQ ID NO: 409720 - DNA, 452 bp, Homo sapiens
actttggcagcagaggcaggcggatcactttgagctcagggcaacatagccaaaacccccctccctagccccacccccaccccgtccctaccaaaaatacaaaacagcagggcatggtggcgggcgcctgtagtcccagctactcaggaggctgaggcaggagaatcacctgaacccaggaggcagacattgcagtgagccaagatcacgccactgccagcctggatgacagagcaagactccacctcaaaaaaaacaaaaacaaaaacacaaggttaagagggacccccgaccttacagatacaagtttaagagggacccctaagcaaaaaatgccaaccytttttctcccaatcattgaaacaccaggagggtgtaacagttttgcagcctagctgtagcaggctgatgcccccaagatgcccatatcctaatcccgggaactggtgaac

SEQ ID NO: 409721 - DNA, 584 bp, Homo sapiens
ccacaacctatgtttataaacggtggggtagctcaggatgctggtccaggtagacaggtgctccaatgcctgaatttctgcctgggggtgaagcagagaaagccctgctgtatcacattctcaggggaacaggctggggcacccagcaatgacacctgcagactggttgtaggtctccaagctggccctggctgcaagtttcatcacctgggagaaattacagctgtagcagcttttctgttgccccgaggctgcgatgggggaaagcacaattccagcacatactgctgaggtgtttyccacaatatggctgtgaaggtccctaccaagccccaaagcagttgttccaatctttggcctgagactaaaatgcctgtgcaggcattctgctgggtcacaaaaagaaaaaaaaaagctgactttgcatgcatccagattgaaaatggcatcttgctcttacttcctggtctgggaaaatgtctgcagctgttcccagtgtctttgcttcacagcatctccaagcctctccccatgttgactccaggccttgggagaaacaaaatgcaacaacttggctggggttg

SEQ ID NO: 409722 - DNA, 519 bp, Homo sapiens
gtattacaggagtgagccactgcacccagcatttgccaagacctttgatggcaggctttttccaggtgatcagtccttgtctggtctggctctgccccactctccttctcacctagttggaatccctagctacttttcagtagaggagagtgtgtaccccaatcccagcttggttcagatctgcatttaastcatggaacctggctgctccccaggttctgaagaaaaaaacggtctctctgtgggtatgataaaggatgggcctgccccaggaccctgtgagagggaagcccaatgtcccaccaggttggcagggctggggaagggaaagtgttatggcagccccaagaaaaaaaagaggcagcagagggagcaggacagcgctcacatggaactcatgccactgcctgaggggagggaggagtgcacgccagtgacgtcagggggcagagaggcgcagttccagggcggctttccccctcacttcctgccatgttactctgatcgcctccaggtgag

SEQ ID NO: 409723 - DNA, 519 bp, Homo sapiens
gtattacaggagtgagccactgcacccagcatttgccaagacctttgatggcaggctttttccaggtgatcagtccttgtctggtctggctctgccccactctccttctcacctagttggaatccctagctacttttcagtagaggagagtgtgtaccccaatcccagcttggttcagatctgcatttaactcatggaacctggctgctccccaggtyctgaagaaaaaaacggtctctctgtgggtatgataaaggatgggcctgccccaggaccctgtgagagggaagcccaatgtcccaccaggttggcagggctggggaagggaaagtgttatggcagccccaagaaaaaaaagaggcagcagagggagcaggacagcgctcacatggaactcatgccactgcctgaggggagggaggagtgcacgccagtgacgtcagggggcagagaggcgcagttccagggcggctttccccctcacttcctgccatgttactctgatcgcctccaggtgag

SEQ ID NO: 409724 - DNA, 582 bp, Homo sapiens
ctcaggggaacaggctggggcacccagcaatgacacctgcagactggttgtaggtctccaagctggccctggctgcaagtttcatcacctgggagaaattacagctgtagcagcttttctgttgccccgaggctgcgatgggggaaagcacaattccagcacatactgctgaggtgttttccacaatatggctgtgaaggtccctaccaagccccaaagcagttgttccaatctttggcctgagactaaaatgcctgtgcaggcattctgctgggtcacaaaaagaaaaaaaaaagctgactttgcatgcatccagattgaaaatggcatcttgctcttacttcctggtctgggaaaatgtctgcagctgttcccagtgtctttgcttcacagcatctccaagcctctccccatgttgactccaggccttgggagaaacaaaatgcaacaacttggctggggttgctcagattcacagtgaaaatgtcagttacagagggaggctctctgcctctctcacatactargacttcgctcacttttataagctggttgctgtcatgttgactgtttgctcacatt

SEQ ID NO: 409725 - DNA, 613 bp, Homo sapiens
tttttattgattgattgatggagacagaatcttgctctcttgcccaggctggaatgcagtggcrtgataatggtttctgcaacctccacctcctgggttcaggcaattctcctgcctcagcctcccgagtagctgggattacaggtgcctgccaccatgcccagctaattattgtacttttagtacagacggggttttaccatgttggccaggctggtctcgaactcctgacctcatgatctgcctgcctcggcctcccaaactgctgggattacaggtgtgagccactgtgcccagcctgtcttttctcttcacacccgcagttcatgatgaaatattaaatatgtactagtggatattactttgctgaatattgcctaatgaatattaagtatttattctcacctttcagacatgaacttatgaattcaacaggtgaagatttacaacttgataaatcaactttgtcaggtacgtcttcagtcaagtcagattagaagattatgtgaggtaattaacacttaacattgatttaatggtagcttccacatgaaatagtatgcctctaagtattaattatgtcctaggacaggagaattcatgttgtcaaaat

SEQ ID NO: 409726 - DNA, 401 bp, Homo sapiens
ggtggttagggaggaaatgttttagggctgttctggagctattgaggtcrggtgtctagatactcccagcttgtctgttgaggagaatgctgttctcattgtgctgcctttgatggtgctgtgtgtggctctttagatgtgcgtggaggtgagctgggggagttaatgagatcttttttaggtgcttttgataaagtagcctgcactacaggattcactgtgacttttttccttaacctatgcatttctctctgctagcttttgctgtctttctcatgcctttgattttcccagctcctcttagttgaattaacctaagtgctctgctatggtttaaatgtgtcccccaaagtttatgtgctggaaactcaatcctcaatgcaacagttgggatgtggggc

SEQ ID NO: 409727 - DNA, 401 bp, Homo sapiens
ggtggttagggaggaaatgttttagggctgttctggagctattgaggtcgggtgtctagatactcccagcttgtctgttgaggagaatgctgtyctcattgtgctgcctttgatggtgctgtgtgtggctctttagatgtgcgtggaggtgagctgggggagttaatgagatcttttttaggtgcttttgataaagtagcctgcactacaggattcactgtgacttttttccttaacctatgcatttctctctgctagcttttgctgtctttctcatgcctttgattttcccagctcctcttagttgaattaacctaagtgctctgctatggtttaaatgtgtcccccaaagtttatgtgctggaaactcaatcctcaatgcaacagttgggatgtggggc

SEQ ID NO: 409728 - DNA, 401 bp, Homo sapiens
ggtggttagggaggaaatgttttagggctgttctggagctattgaggtcgggtgtctagatactcccagcttgtctgttgaggagaatgctgttctcattgtgctgcctttgatggtgctgtgtgtggctctttagatgtgcgtggaggtgagctgggggagttaatgagatcttttttaggtgcttttgataaagtagcctgcactacaggattcactgtgacttttttccttaacctatgcatttctctctgctagcttttgctgtctttctcatgcctttkattttcccagctcctcttagttgaattaacctaagtgctctgctatggtttaaatgtgtcccccaaagtttatgtgctggaaactcaatcctcaatgcaacagttgggatgtggggc

SEQ ID NO: 409729 - DNA, 401 bp, Homo sapiens
ggtggttagggaggaaatgttttagggctgttctggagctattgaggtcgggtgtctagatactcccagcttgtctgttgaggagaatgctgttctcattgtgctgcctttgatggtgctgtgtgtggctctttagatgtgcgtggaggtgagctgggggagttaatgagatcttttttaggtgcttttgataaagtagcctgcactacaggattcactgtgacttttttccttaacctatgcatttctctctgctagcttttgctgtctttctcatgcctttgattttcccagctcctcttagttgaattaacctaagtgctctgctrtggtttaaatgtgtcccccaaagtttatgtgctggaaactcaatcctcaatgcaacagttgggatgtggggc

SEQ ID NO: 409730 - DNA, 574 bp, Homo sapiens
tacattcctttgcacctactttaagctatttactcaaggaaggattaggccgccttcattcagatctattactgaagctatacaacacccccagccttccatgaaggtttgtgtcgatttcttataactatctttaaaatttttcccaccagcctgactgaactcccacagttgttgctactttttgaaattgaaatacttctaggaagactgattaagaacaatatagagaaaagacatatttttcaaactcctgatgaagaagaaacatccgtattaatatatagctaataaaaagataagagatgttgtggaaaayttcatacaagcggtgcccactctcagaacttctattcaacatagtactggatgtcctagccagagcaattaggcaaaagaaagaaataaaaggcatgaaaattggaaaggaagaagttaaattgtttctgtttgcagttgacatgatcttatatatagaaaacaccaataactctgccaaaaaatttagaattcataaatgaatttagtaaagttgcaggatacaatgtgaacatacaaaattcggtagcatttc

SEQ ID NO: 409731 - DNA, 575 bp, Homo sapiens
gattcatactctatatgttattattttgtatgcgatgacaacagaatatattatcatgctccttttgtgaatctcattcataatataaagtataaatttgtgattytgctttaatttgaaatattaacttcaaatatgttatcacaatttgatacaaactattgacagtaaatctgtggattaagtaatgtcttagtaggtattgggaaaatttgaaactagtaacatggaggactattgtcattgtttatttcaaagccagttaaaattctgcaaagcagtgtacataaaaataatttcaagaaatttataaaataccgagattatggtgtataaacaactttagattctttgtttaagaaattctgccagtttgtaatatatgcttcattcaaagtagctaagggctgtacctggctaatagtaggcacctaatatttgttgaaaaggaatactgagtagctgggacctcctgagtagctgggaccacacacatttaacctgtatttataaaattactgtttagagaataacatttgatggaatcatgcttttactttctgcttacgactcaa

SEQ ID NO: 409732 - DNA, 575 bp, Homo sapiens
gattcatactctatatgttattattttgtatgcgatgacaacagaatatattatcatgctccttttgtgaatctcattcataatataaagtataaatttgtgattttgctttaatttgaaatattaayttcaaatatgttatcacaatttgatacaaactattgacagtaaatctgtggattaagtaatgtcttagtaggtattgggaaaatttgaaactagtaacatggaggactattgtcattgtttatttcaaagccagttaaaattctgcaaagcagtgtacataaaaataatttcaagaaatttataaaataccgagattatggtgtataaacaactttagattctttgtttaagaaattctgccagtttgtaatatatgcttcattcaaagtagctaagggctgtacctggctaatagtaggcacctaatatttgttgaaaaggaatactgagtagctgggacctcctgagtagctgggaccacacacatttaacctgtatttataaaattactgtttagagaataacatttgatggaatcatgcttttactttctgcttacgactcaa

SEQ ID NO: 409733 - DNA, 524 bp, Homo sapiens
atattatagtcaactgactttcaacaaaggtgccaggaacacacatggggaaagaacagtctcttcaaaaaatggtgttgagaaaactgaatgtccacaagattgatcttaggcccttatttcataccatataaaaatataaattcaaaataagttagacttaaatgtaagacctagcactatagaactcctagaagaaaacaggggaataactccaagacattggtctgggcaataatattttatgatatgactctaaagcacaggcaagaaaagcaacaaaacacaaatggaatagcatcaacctaaaaagcttctgcacagcaaaagaaagtcaacagagtgaagtgataacctacaaaatgggagaaattatctgcaaactatacatttgataagaggctaatgtccaaaatatcttaggaactcaaacaacacaataataagaaaacaaggawccctaatgaaaaattgacaaaggatctaaatagacatttctcaaaagaagacatacaaatggccaa

SEQ ID NO: 409734 - DNA, 477 bp, Homo sapiens
gatacaaactattgacagtaaatctgtggattaagtaatgtcttagtaggtattgggaaaatttgaaactagtaacatggaggactattgtcattgtttatttcaaagccagttaaaattctgcaaagcagtgtacataaaaataatttcaagaaatttataaaataccgagattatggtgtataaacaactttagattctttgtttaagaaattctgccagtttgtaatatatgcttcattcaaagwagctaagggctgtacctggctaatagtaggcacctaatatttgttgaaaaggaatactgagtagctgggacctcctgagtagctgggaccacacacatttaacctgtatttataaaattactgtttagagaataacatttgatggaatcatgcttttactttctgcttacgactcaattgtttgtactgacattaacatcccaaatccttagcatggcctacaaggccc

SEQ ID NO: 409735 - DNA, 585 bp, Homo sapiens
atatttcaaaacatataattttatttatctgataaaataaatataaaatatgaaactttatattaataaatttgacaatcataaggaatggtcaagttcctatgaaaaatacctacttttatgaaatgatcagaaaaaaactagaaaaactgagtagtttttttttcattgtagaaattttatttaraaaatttttttttcctgtagaaagaactccagggctaggtggatgcaatatttaataaagaaatattaccaaatatttaataaagaaataatgccaatgttacatgaatatttttagagaattgggaagacataacactttccaacttgttttatatggtggtacctccatgatagtaaaaccatacaaggatattaaaagaaatgaaattacagactaatatactacataataattctaaacaaaaatgtttgcaaatataatccaacaatatactccaaagaaaaatacatcgtgactaagtgcagtaatttcaagaatgtatggtttaaaattagaaaaccaaacaatgaaattaaccacattaactgaataaaagaaaaaaatatggttatttc

SEQ ID NO: 409736 - DNA, 561 bp, Homo sapiens
agcatgtaaggtaatgcatatgttagcttaacatggctattttacaatgaatatatatttcaaaacatataattttatttatctgataaaataaatataaaatatgaaactttatattaataaatttgacaatcataaggaatggtcaagttcctatgaaaaatacctacttttatgaaatgatcagaaaaaaactagaaaaactgagtagtttttttttcattgtagaaattttatttagaaaatttttttttcctgtagaaagaactccagggctaggtggatgcaatatttaataaagaaatattaccaaatatttaataaagaaataatgccaatgttacatgaatatttttagagaattgggaagacataacactttccaacttgttttatatggtggtacctccatgatagtaaaaccatacarggatattaaaagaaatgaaattacagactaatatactacataataattctaaacaaaaatgtttgcaaatataatccaacaatatactccaaagaaaaatacatcgtgactaagtgcagtaatttcaagaa

SEQ ID NO: 409737 - DNA, 603 bp, Homo sapiens
attgggaagacataacactttccaacttgttttatatggtggtacctccatgatagtaaaaccatacaaggatattaaaagaaatgaaattacagactaatatactacataataattctaaacaaaaatgtttgcaaatataatccaacaatatactccaaagaaaaatacatcrtgactaagtgcagtaatttcaagaatgtatggtttaaaattagaaaaccaaacaatgaaattaaccacattaactgaataaaagaaaaaaatatggttatttcaatagctgtgggaaaagcacttgttcacatttgaaactatttgtaataataacaaactaggaatagaagagaactgatgtaaatatcttaatatatacacaaaaactactctcaacattataaataatcatgacatattaaacagtttcattctaacacgaggaacaaggtacacatgtccagctcaacactttattcatcattaaaataatactgtgcagtaaaattaacaaggaaaattttaaaaagaacacaaaagaaaactacaaatccttatccctgatcaacacagatgtaaaaatactcaacaaaattctagcaaact

SEQ ID NO: 409738 - DNA, 603 bp, Homo sapiens
attgggaagacataacactttccaacttgttttatatggtggtacctccatgatagtaaaaccatacaaggatattaaaagaaatgaaattacagactaatatactacataataattctaaacaaaaatgtttgcaaatataatccaacaatatactccaaagaaaaatacatcgtgactaagtgcagtaatttcaagaatgtatggtttaaaattagaaaaccaaacaatgaaattaaccacattaactgaataaaagaaaaaaatatggttatttcaatagctgtgggaaaagcacttgttcacatttgaaactatttgtaataataacaaactaggaatagaagagaactgatgtaaatatcttaatatatacacaaaaactactctcaacattataaataatcatgacatattaaacagtttcattctaacaygaggaacaaggtacacatgtccagctcaacactttattcatcattaaaataatactgtgcagtaaaattaacaaggaaaattttaaaaagaacacaaaagaaaactacaaatccttatccctgatcaacacagatgtaaaaatactcaacaaaattctagcaaact

SEQ ID NO: 409739 - DNA, 634 bp, Homo sapiens
taaataatcatgacatattaaacagtttcattctaacacgaggaacaaggtacacatgtccagctcaacactttattcatcattaaaataatactgtgcagtaaaattaacaaggaaaattttaaaaagaacacaaaagaaaactacaaatccttatccctgatcaacacagatgtaaaaatactcaacaaaattctagcaaactgaagctaacaacacatcaaaaagataattcatcatgatcaagygggctttattccaggggtgcttgaatggttcaaaatagacaaatcaataaacatgattcaccacataaatggaactgagaacaaaaaccctatgatcatctcattagatgcagaataagcatttgataaaatccaacatctgtttatgataaaaaccctcaacaatataggtatagatggagtatacctcaaaaaatgagtcatctatgacaaagccacagccaacatcatcctggatgggcaaaagttagaagtgttgcttctagaaactggaaaaaagcaaggatgttcaccttcttcattcctattcaatacagtactggaagtgctagccagaactatcagaaaggagaaagaaataaaaggtatacaaattagaaaagaag

SEQ ID NO: 409740 - DNA, 443 bp, Homo sapiens
catggagccaaaaaaagatccctaatagccaaagcacttctaagcaaaaaacaaagcaaaacaaaacaaagcccccagagcaaaagacaaatatggttcctacaaatgaagaccaayggtaatgcttatctgttcgtggtagaagtgtaaattggtaggattgttaaaaaaaatagtgtagcatctcatggtaatgttgaataactcaataattttacttttaaatatataccccagaggatatcttgcacatatgaaccaggtgatttacaaaagaatgttcatagcagcattgtttgtaatggttaaaaactggaaaaatttcaagtgttcatcaacaatagatctgaggaatgaagtccgacatattcatgtagtggaatatcatatagcaatacgaatggatgaattacaccaacattcaacaaggttgtaatatgcaa

SEQ ID NO: 409741 - DNA, 558 bp, Homo sapiens
gtaatgcttatctgttcgtggtagaagtgtaaattggtaggattgttaaaaaaaatagtgtagcatytcatggtaatgttgaataactcaataattttacttttaaatatataccccagaggatatcttgcacatatgaaccaggtgatttacaaaagaatgttcatagcagcattgtttgtaatggttaaaaactggaaaaatttcaagtgttcatcaacaatagatctgaggaatgaagtccgacatattcatgtagtggaatatcatatagcaatacgaatggatgaattacaccaacattcaacaaggttgtaatatgcaaacttattattgaatcaaggtgaaagtaccttctgataaaggtgaaagaacttctacaaaataatttcatttatataagtttcaaagaaccaaactaaataatgcatcacttgagaaccattaaagtctattaaaaaacacatacaatgcaatggaaggacagtggtcatatccagcaggaaataaaggagaacacaattggcaaggagcacccaatgggcgtctaaggcacta

SEQ ID NO: 409742 - DNA, 601 bp, Homo sapiens
tatttgttgattattcatcctttcctttcactttacagagtcaatcaaacaccaggtcatgttaattttactgtcacgcacatatcttgaatttgcctccttatctctatttccactattcagttcagaccttgataatcactcatctgcattgtagttgcatttttctaattattctgtttctagtcttgttytaaaatctttttttcctcccacaatgcagctagagtggtcaatttaaagcatcatctatctcaagaacaaaaaaccaaacaccgcatgttttcactcataggtgggacttgaacaatgagaacacttggacacaggaaggggaatatcacacaccgcggcctgttgtggggttgggggaggggggagggatagcattaggagacatacctaatgtaaatgatgagttaatgggtgcagcacaccaacacggcacatgtatacatatgtaacctgcacgttgtgcacatgtaccctagaacttaaagtataataaaaataaatattaaaaaagaagcatcatctttattaaaacatttaatggtcctactattccttatgctataaatttcttataatttaataaata

SEQ ID NO: 409743 - DNA, 601 bp, Homo sapiens
tatttgttgattattcatcctttcctttcactttacagagtcaatcaaacaccaggtcatgttaattttactgtcacgcacatatcttgaatttgcctccttatctctatttccactattcagttcagaccttgataatcactcatctgcattgtagttgcatttttctaattattctgtttctagtcttgttttaaaatctttttttcctcccacaatgcagctagagtggtcaatttaaagcatcatctatctcaagaacaaaaaaccaaacaccgcatgttttcactcataggtgggacttgaacaatgagaacacttggacacaggaaggggaatatcacacaccgcggcctgttgtggggtkgggggaggggggagggatagcattaggagacatacctaatgtaaatgatgagttaatgggtgcagcacaccaacacggcacatgtatacatatgtaacctgcacgttgtgcacatgtaccctagaacttaaagtataataaaaataaatattaaaaaagaagcatcatctttattaaaacatttaatggtcctactattccttatgctataaatttcttataatttaataaata

SEQ ID NO: 409744 - DNA, 601 bp, Homo sapiens
tatttgttgattattcatcctttcctttcactttacagagtcaatcaaacaccaggtcatgttaattttactgtcacgcacatatcttgaatttgcctccttatctctatttccactattcagttcagaccttgataatcactcatctgcattgtagttgcatttttctaattattctgtttctagtcttgttttaaaatctttttttcctcccacaatgcagctagagtggtcaatttaaagcatcatctatctcaagaacaaaaaaccaaacaccgcatgttttcactcataggtgggacttgaacaatgagaacacttggacacaggaaggggaatatcacacaccgcggcctgttgtggggttgggggaggggggagggatagcattaggagayatacctaatgtaaatgatgagttaatgggtgcagcacaccaacacggcacatgtatacatatgtaacctgcacgttgtgcacatgtaccctagaacttaaagtataataaaaataaatattaaaaaagaagcatcatctttattaaaacatttaatggtcctactattccttatgctataaatttcttataatttaataaata

SEQ ID NO: 409745 - DNA, 601 bp, Homo sapiens
tatttgttgattattcatcctttcctttcactttacagagtcaatcaaacaccaggtcatgttaattttactgtcacgcacatatcttgaatttgcctccttatctctatttccactattcagttcagaccttgataatcactcatctgcattgtagttgcatttttctaattattctgtttctagtcttgttttaaaatctttttttcctcccacaatgcagctagagtggtcaatttaaagcatcatctatctcaagaacaaaaaaccaaacaccgcatgttttcactcataggtgggacttgaacaatgagaacacttggacacaggaaggggaatatcacacaccgcggcctgttgtggggttgggggaggggggagggatagcattaggagacatacctaatgtaaatgatgagttaatgggtgcagcacaccaacacggcacatgtatacatatgtaacctgcacgttgtgcacatgtaccctagaacttaaagtataataaaaataaatattaaaaaagaagcatcatctttattaaaacatttaayggtcctactattccttatgctataaatttcttataatttaataaata

SEQ ID NO: 409746 - DNA, 576 bp, Homo sapiens
ttcttctaattatcaggcagyagcacaaagctgcttacacctctttacacatctctttattttaggcctccttgcatttgctcatgctgttcctttttgtttgaaaaacttacacatttcttcatttggttaatccttgcacactttcaagattcatttgaggcctcattgactttggaaaccttccctgtaatcttgtattattaatttatcttagttttcacttattagctcttattagattactgtccttacgtgtgtaactctcccactagacagtaagcttttggacggcagagatgatgtctcattcatctttgcatctttagcgcccagcctggtttctggtttcctatagtcactcagtgttgagctaaaccatatttttggagcaatgacttgacaatgcagtatcatgatggaactatcacagatggacagaatgagtctcttgattcctacatttatttttctattgatatagctgatttaaaaagaaacctgttaattatataatcatgtaattaccctgacataacatcaaactccataaattactttccatctctgcctctc

SEQ ID NO: 409747 - DNA, 576 bp, Homo sapiens
ttcttctaattatcaggcagtagcacaaagctgcttacacctctttacacatctctttattttargcctccttgcatttgctcatgctgttcctttttgtttgaaaaacttacacatttcttcatttggttaatccttgcacactttcaagattcatttgaggcctcattgactttggaaaccttccctgtaatcttgtattattaatttatcttagttttcacttattagctcttattagattactgtccttacgtgtgtaactctcccactagacagtaagcttttggacggcagagatgatgtctcattcatctttgcatctttagcgcccagcctggtttctggtttcctatagtcactcagtgttgagctaaaccatatttttggagcaatgacttgacaatgcagtatcatgatggaactatcacagatggacagaatgagtctcttgattcctacatttatttttctattgatatagctgatttaaaaagaaacctgttaattatataatcatgtaattaccctgacataacatcaaactccataaattactttccatctctgcctctc

SEQ ID NO: 409748 - DNA, 576 bp, Homo sapiens
ttcttctaattatcaggcagtagcacaaagctgcttacacctctttacacatctctttattttaggcctccttgcatttgctcatgctgttcctttttgtttgaaaaacttacacatttcttcatttggttaatccttgcacactttcaagattcatttgaggcctcattgactttggaaaccttccctgtaatcttgtattattaayttatcttagttttcacttattagctcttattagattactgtccttacgtgtgtaactctcccactagacagtaagcttttggacggcagagatgatgtctcattcatctttgcatctttagcgcccagcctggtttctggtttcctatagtcactcagtgttgagctaaaccatatttttggagcaatgacttgacaatgcagtatcatgatggaactatcacagatggacagaatgagtctcttgattcctacatttatttttctattgatatagctgatttaaaaagaaacctgttaattatataatcatgtaattaccctgacataacatcaaactccataaattactttccatctctgcctctc

SEQ ID NO: 409749 - DNA, 557 bp, Homo sapiens
ctgttctttattcctggagtatttttcccctgacaaattacttatcatctatcataattcaggttaaatggcactaactcagggaaggcttccctaactgcctcccttctccaaccaaattaggaacaattatatggccacatagtatcgaatcaagtttataattttaaaataattgggagattttgttgtttaacacttgttttcactataagactgtaattacatgcaagtaagaaccatgcctgtttgttcactcctgccacagtcagaatagtgcctggaatatgcagtaagggctgaacaatcactaaataaatgaacaagtgaataaatggatattgtctcatttttagaacagagtactgaatggatcatgaacactatctggtatgtcacgtaggtaatttacaagggctacamtttcagctcagatttaccttttcctggatacaggtcttgataggtctcttgatgtcatttcacttcagattcttctttagaaaacttggacaatagcatttgctgtcttgtccaaattgttactaagaatcaag

SEQ ID NO: 409750 - DNA, 474 bp, Homo sapiens
ttatatttagttctttaatttttgtgttatttccaagggtgctctccattgactcttttaatatagttccactttaccccttaaacccactttcctctcccaccttcgtcatycaactttatttgattttgttatttttaatttttctaataatgacctttatcttttaaaataatatttaatcacccataacataatttgttgattctctcccactgtgaaagttgaatggaccagaatatatttctactatctttctcttcttatttttgttatgaatataattagtctttatacagttatggtttgtaacatttgcattctgttctttaaccgcaaaccccagaacattttgatattaggcttcagaatgctcacttgtatcatgttatctctattcatttttagtggatagttttcttttttaagtttttctgatagagatggggtcttgctatgttgcccaggctggtc

SEQ ID NO: 409751 - DNA, 474 bp, Homo sapiens
ttatatttagttctttaatttttgtgttatttccaagggtgctctccattgactcttttaatatagttccactttaccccttaaacccactttcctctcccaccttcgtcattcaactttatttgattttgttatttttaatttttctaakaatgacctttatcttttaaaataatatttaatcacccataacataatttgttgattctctcccactgtgaaagttgaatggaccagaatatatttctactatctttctcttcttatttttgttatgaatataattagtctttatacagttatggtttgtaacatttgcattctgttctttaaccgcaaaccccagaacattttgatattaggcttcagaatgctcacttgtatcatgttatctctattcatttttagtggatagttttcttttttaagtttttctgatagagatggggtcttgctatgttgcccaggctggtc

SEQ ID NO: 409752 - DNA, 474 bp, Homo sapiens
ttatatttagttctttaatttttgtgttatttccaagggtgctctccattgactcttttaatatagttccactttaccccttaaacccactttcctctcccaccttcgtcattcaactttatttgattttgttatttttaatttttctaataatgacctttatcttttaaaataatatttaatcacccataacataatttgttgattctctcccactgtgaaagttgaatggaccagaatatatttctactatctttctcttcttatttttgttatgaatataattagtcyttatacagttatggtttgtaacatttgcattctgttctttaaccgcaaaccccagaacattttgatattaggcttcagaatgctcacttgtatcatgttatctctattcatttttagtggatagttttcttttttaagtttttctgatagagatggggtcttgctatgttgcccaggctggtc

SEQ ID NO: 409753 - DNA, 474 bp, Homo sapiens
ttatatttagttctttaatttttgtgttatttccaagggtgctctccattgactcttttaatatagttccactttaccccttaaacccactttcctctcccaccttcgtcattcaactttatttgattttgttatttttaatttttctaataatgacctttatcttttaaaataatatttaatcacccataacataatttgttgattctctcccactgtgaaagttgaatggaccagaatatatttctactatctttctcttcttatttttgttatgaatataattagtctttatacagttatggtttgtaacatttrcattctgttctttaaccgcaaaccccagaacattttgatattaggcttcagaatgctcacttgtatcatgttatctctattcatttttagtggatagttttcttttttaagtttttctgatagagatggggtcttgctatgttgcccaggctggtc

SEQ ID NO: 409754 - DNA, 533 bp, Homo sapiens
tttaaccagatattgtgagctctttcacactaatttctcatttgttggacctgactttaatgttacatttcaccttcttgtgttttctatttygttttgctcaggatatatttaagcctgtcatttatattcttatctgtgtttttagcagcattattctctccacttcccactttttttcctgcttttattgatcttcatttctttcatggttgtctttactcattacatcctgaattttgccagattattttttatcactttattttgtatttattttcaattatgtcttctaaatatcatttcagagagaaaacattttagagaaggcatatttttaaaaaacatagaaaatttgatcctgttttttactgcttcatggtataatttgtatgttctgtaccttatgtaattttccctttttcttctagtatttttataaaggtcatcaagttttatttttgtaatacaattattataaataattatataatattattagtctttgaatattctagatacttgtgaaagga

SEQ ID NO: 409755 - DNA, 533 bp, Homo sapiens
tttaaccagatattgtgagctctttcacactaatttctcatttgttggacctgactttaatgttacatttcaccttcttgtgttttctatttcgttttgctcaggatatatttaagcctgtcatttatattcttatctgtgtttttagcagcattattctctccacttcccactttttttcctgcttttattgatcttcatttctttcatggttgtctttactcattacatcctgaattttgccagattattttttatcactttattttgtatttattttcaattatgtcttctaaatatcatttcagagagaaaacattttagagaaggcatatttttaaaaaacatagaaaatttgatcctrttttttactgcttcatggtataatttgtatgttctgtaccttatgtaattttccctttttcttctagtatttttataaaggtcatcaagttttatttttgtaatacaattattataaataattatataatattattagtctttgaatattctagatacttgtgaaagga

SEQ ID NO: 409756 - DNA, 578 bp, Homo sapiens
catgcactttatcttggtgttcagtcttgactggtgtaaacttttgatgtccagaaggttttcttcatktgttgttgtgtggaattgtaaatattttctagcttttgtaaggttgtggctcatatttatatttctcctggtttgaaagaagagagagaaagaagtatgtcaaattgagactcttagattggaaatctgaatttatttacacgattgagattgatctagagttttattttttctgctgtaactgaaatttggattcaagattatatgtgttttgtgaatatgtttggtaacattgtgacttttctataatttagggaagtttgatgtaggagaaagagaaaaaatttttgagagaatcctaaattcatatatggcctaaccttttaatatctatgtaattttagataataaataatttgtttgagattatgtggctctaacaacacctgcttcacagtgtaattatgaggatttcatagaatttgtatagtgagcgttagttttgatgttactttaaacctctttgccttatacattctattttttccatggaacattatatgatttca

SEQ ID NO: 409757 - DNA, 593 bp, Homo sapiens
ttatgtatttatttttgatttctattcttttggtttttttgttgttttttattgatgtatcatagttgtacatgttttggggtacatgtgatatttttgatacatgtatacaatgtgtaatgatcaaatcagagtaatttggatattcatcacctcgaatatttatcttttctttgtgttgggaacattataatttttctctgctagctattttagaatatataataaattattgttccctatgatttctccattgtataattgaatactaaaatttattatgtctatctacatatccccagttcaataactataatttctctgctgtgcaatcaaatactagaacttcttccttygaacgctatatccctaattcaataacaagtaaactgaagctcagcatggtctaggaactttgttacgttaacacagcaagtgagtgttgcagcctggatccaaaaatcaggcctggtcgacctcaaagtccagattattgacctttctaccataatgtatggaggtaagtttgtgaatttattcaaaaatcaggcctggtcaaactcaaagtccaaattattaacctttctaccata

SEQ ID NO: 409758 - DNA, 593 bp, Homo sapiens
ttatgtatttatttttgatttctattcttttggtttttttgttgttttttattgatgtatcatagttgtacatgttttggggtacatgtgatatttttgatacatgtatacaatgtgtaatgatcaaatcagagtaatttggatattcatcacctcgaatatttatcttttctttgtgttgggaacattataatttttctctgctagctattttagaatatataataaattattgttccctatgatttctccattgtataattgaatactaaaatttattatgtctatctacatatccccagttcaataactataatttctctgctgtgcaatcaaatactagaacttcttcctttgaacgctatatccctaattcaataacaagtaaactgaagctcagcatggtctaggaactttgttacrttaacacagcaagtgagtgttgcagcctggatccaaaaatcaggcctggtcgacctcaaagtccagattattgacctttctaccataatgtatggaggtaagtttgtgaatttattcaaaaatcaggcctggtcaaactcaaagtccaaattattaacctttctaccata

SEQ ID NO: 409759 - DNA, 609 bp, Homo sapiens
tacgttaacacagcaagtgagtgttgcagcctggatccaaaaatcaggcctggtcgacctcaaagtccagattattgacctttctaccataatgtatggaggtaagtttgtgaatttattcaaaaatcaggcctggtcaamctcaaagtccaaattattaacctttctaccataatgtatggagctaagtttgtgaattttcatagttttaggatttgaagataaaagaggtgaaaatttggaaacggtttctggacttttgaattttggcaaacagctatgtgataagtccaccctgcagacccacaacttttggaaataactctactgtgatcttcagtagcagaagctgctcctggggtggtagaacacaaggaaaacacacactagtaaaaatttcatgtggcttctttgttctgtacatgtgtttctcttgattagtatatggtagtatcctcaaatcatagtaacaagtatactttttccagtgaattgcatgtgtatattattgtatagtataaaaggcaatatttccatttattatcatctgtgcttttcaaagaaactctgtgagtccaacagggcgataatagaagcaactgccctttc

SEQ ID NO: 409760 - DNA, 609 bp, Homo sapiens
tacgttaacacagcaagtgagtgttgcagcctggatccaaaaatcaggcctggtcgacctcaaagtccagattattgacctttctaccataatgtatggaggtaagtttgtgaatttattcaaaaatcaggcctggtcaaactcaaagtccaaattattaacctttctaccataatgtatggagctaagtttgtgaattttcatagttttaggatttgaagataaaagaggtgaaaatttggaaayggtttctggacttttgaattttggcaaacagctatgtgataagtccaccctgcagacccacaacttttggaaataactctactgtgatcttcagtagcagaagctgctcctggggtggtagaacacaaggaaaacacacactagtaaaaatttcatgtggcttctttgttctgtacatgtgtttctcttgattagtatatggtagtatcctcaaatcatagtaacaagtatactttttccagtgaattgcatgtgtatattattgtatagtataaaaggcaatatttccatttattatcatctgtgcttttcaaagaaactctgtgagtccaacagggcgataatagaagcaactgccctttc

SEQ ID NO: 409761 - DNA, 609 bp, Homo sapiens
tacgttaacacagcaagtgagtgttgcagcctggatccaaaaatcaggcctggtcgacctcaaagtccagattattgacctttctaccataatgtatggaggtaagtttgtgaatttattcaaaaatcaggcctggtcaaactcaaagtccaaattattaacctttctaccataatgtatggagctaagtttgtgaattttcatagttttaggatttgaagataaaagaggtgaaaatttggaaacggtttctggacttttgaattttggcaaacagctatgtgataagtccaccctgcagacccacaacttttggaaataactctactgtgatcttcagtagcagaagctgctcctggggtggtagaacacaaggaaaacacacactagtaaaaatttcatgtgscttctttgttctgtacatgtgtttctcttgattagtatatggtagtatcctcaaatcatagtaacaagtatactttttccagtgaattgcatgtgtatattattgtatagtataaaaggcaatatttccatttattatcatctgtgcttttcaaagaaactctgtgagtccaacagggcgataatagaagcaactgccctttc

SEQ ID NO: 409762 - DNA, 559 bp, Homo sapiens
aatactcatttgatatatattgtataccacatatgattgtttgttatatgtacaatacatgttttttcaactttttttggttctttcyatttacaggaattagagaaagaacaaatcagtgtgaaggagaattgtcagtaaaattacaagaaaagattgagatcataattgacctttgaggataataaaatttaaagaccaaaaggatggacttcacagaaacatgaccttaggttgtttttgcagttgtagtaactggttatatgaccaacaaaatatgaagaatgggtacaaattctgatagtaatgatcagtcactttgcaaatataaagttactatttactactgtattgtacaggttcaataatctttgtgtacacattttatgtatttattgtcaggctgctatataattcagtatttataatagatactatgtatagcaatctatggttagttttggtcttaaccaggaaaaatcactcttttgagttttgctgtttttactagattatttttactggatgattgctcatattatttgattattattgcaat

SEQ ID NO: 409763 - DNA, 559 bp, Homo sapiens
aatactcatttgatatatattgtataccacatatgattgtttgttatatgtacaatacatgttttttcaactttttttggttctttctatttacaggaattagagaaagaacwaatcagtgtgaaggagaattgtcagtaaaattacaagaaaagattgagatcataattgacctttgaggataataaaatttaaagaccaaaaggatggacttcacagaaacatgaccttaggttgtttttgcagttgtagtaactggttatatgaccaacaaaatatgaagaatgggtacaaattctgatagtaatgatcagtcactttgcaaatataaagttactatttactactgtattgtacaggttcaataatctttgtgtacacattttatgtatttattgtcaggctgctatataattcagtatttataatagatactatgtatagcaatctatggttagttttggtcttaaccaggaaaaatcactcttttgagttttgctgtttttactagattatttttactggatgattgctcatattatttgattattattgcaat

SEQ ID NO: 409764 - DNA, 595 bp, Homo sapiens
atgattgtttgttatatgtacaatacatgttttttcaactttttttggttctttctatttacaggaattagagaaagaacaaatcagtgtgaaggagaattgtcagtaaaattacaagaaaagattgagatcataattgacctttgaggataataaaatttaaagaccaaaaggatggacttcacagaaacatgaccttargttgtttttgcagttgtagtaactggttatatgaccaacaaaatatgaagaatgggtacaaattctgatagtaatgatcagtcactttgcaaatataaagttactatttactactgtattgtacaggttcaataatctttgtgtacacattttatgtatttattgtcaggctgctatataattcagtatttataatagatactatgtatagcaatctatggttagttttggtcttaaccaggaaaaatcactcttttgagttttgctgtttttactagattatttttactggatgattgctcatattatttgattattattgcaatttgtctttctggaataggaagcaagaggcctgaattctggttcctattctatcaattgtgtgaattct

SEQ ID NO: 409765 - DNA, 555 bp, Homo sapiens
ctggaaactcagtttacttttctgggcctcatggttttcatctgaatgatgaccaacttggataaaatggtctttatataattycgtaggcatttcccttcccaagggcttgagtctttttcaacaattatagagttttccggtccctcttcccagtgcctcagcaccttgctattcatgttcatctgatcagttgtttgcatgctgacttacattaccctgatgggcagtacctgtggctgtttctgctccctcacccagtccataggcttctggttgtaaaaagtgtgcatcttgagactgtggacagttagctccagaggtgacagtataatcacttcacgtagaagaggatagagagagactcatgccagtggtggtgagcaagtattagagatatgatgtgtgcctctgtgagttttggggtctaagataaattatggcactaggaagatggtcctttgtgtcagaagaactggagttgttggtgcaaaaagtatgatgtcagcatagcagttttatttgtacctcagcaacttctaaaataatctctat

SEQ ID NO: 409766 - DNA, 555 bp, Homo sapiens
ctggaaactcagtttacttttctgggcctcatggttttcatctgaatgatgaccaacttggataaaatggtctttatataatttcrtaggcatttcccttcccaagggcttgagtctttttcaacaattatagagttttccggtccctcttcccagtgcctcagcaccttgctattcatgttcatctgatcagttgtttgcatgctgacttacattaccctgatgggcagtacctgtggctgtttctgctccctcacccagtccataggcttctggttgtaaaaagtgtgcatcttgagactgtggacagttagctccagaggtgacagtataatcacttcacgtagaagaggatagagagagactcatgccagtggtggtgagcaagtattagagatatgatgtgtgcctctgtgagttttggggtctaagataaattatggcactaggaagatggtcctttgtgtcagaagaactggagttgttggtgcaaaaagtatgatgtcagcatagcagttttatttgtacctcagcaacttctaaaataatctctat

SEQ ID NO: 409767 - DNA, 617 bp, Homo sapiens
ttctgctccctcacccagtccataggcttctggttgtaaaaagtgtgcatcttgagactgtggacagttagctccagaggtgacagtataatcacttcacgtagaagaggatagagagagactcatgccagtggtggtgagcaagtattagagatatgatgtgtgcctctgtgagttttggggtctaagataaattatggcactaggaagatggtcctttgtgtcagaagaactggagttgttggtgcaaaaagtatgatgtcagcatagcagttttatttgtacctcagcaacttctaaaataatctctattaagtgttttcaggaactactttctactataggaaaatsattgaggtgagtatccatctggacacagagaaatataacactgttttctgctcaccctccacttcacatataaatacaacatgtgttaaaggactaaatttctagtgtcacagtttgtactttatagtttgaagtcaataagaaagctcatataccttcctaaaagtcacttgttaatgtttgatattaatctaattttatcataaattaaaagtataaaactacaaatttcttaaagataaaatatccaaatggattcagtcaaa

SEQ ID NO: 409768 - DNA, 617 bp, Homo sapiens
ttctgctccctcacccagtccataggcttctggttgtaaaaagtgtgcatcttgagactgtggacagttagctccagaggtgacagtataatcacttcacgtagaagaggatagagagagactcatgccagtggtggtgagcaagtattagagatatgatgtgtgcctctgtgagttttggggtctaagataaattatggcactaggaagatggtcctttgtgtcagaagaactggagttgttggtgcaaaaagtatgatgtcagcatagcagttttatttgtacctcagcaacttctaaaataatctctattaagtgttttcaggaactactttctactataggaaaatcattgaggtgagtatccatctggacacagagaaatataacactgttttctgctcaccctccacttcacatataaatacaayatgtgttaaaggactaaatttctagtgtcacagtttgtactttatagtttgaagtcaataagaaagctcatataccttcctaaaagtcacttgttaatgtttgatattaatctaattttatcataaattaaaagtataaaactacaaatttcttaaagataaaatatccaaatggattcagtcaaa

SEQ ID NO: 409769 - DNA, 580 bp, Homo sapiens
cacttgttaatgtttgatattaatctaattttatcataaattaaaagtataaaactacaaatttcttaaagataaaatatccaaatggattcagtcaaattaagcatgataatatcaaatatcagaataggttaccatgcaggaggtactgagtacttaaaaggrtggggaatgcaatgaacataaaagctggtaccaaggggaggaggagacagtgatgaattaaaacattatcttaactaatccaagtgctggtcttcaatactttcatgtgtatagacaaagagaaactgcagagatttctcacaacctctgtggccattttatgcatcttagcaaaaactctggtgaaatccctccaaaacatatttattaggcatggaaaaagccttacatgacaggtggcataggctccttatgaaatcactgcaggatgggaagccatttagggcttcgtaattgtgaaagattgtatagaaactgaggcacttaaatagcagtgagcatgagaaaatgtggtagataatggtggtgattctatttcttgtgaaagtccacttactctgttctgctacagttg

SEQ ID NO: 409770 - DNA, 595 bp, Homo sapiens
aagtccgtcccaggcacctcttactgcaggtgataatccatctgttaatcatgttttcctcttatgtctactttctgtcagagaattgtggctgcaaactgggaagggaaggaaattataagaatatgtataagtacaaatggaatatgttggaaatgaggaatagttaatatcgcaggtcatttaaacacctgatgaatttcatggatagtcaggaatcttgttcttacctaatctgttaattttagatcagacattacactgaaagtattgatgatgggtttaaatcaggttgcagctcacatgttgtgataatattatgttgattttttgtttttaatatgtgaggaacagaataamtgtatactatttattcatagtgacattgcaatattgattttagtacatattattatcttcataatcacaatttcctccccattttcttagttctcataattttagccacagcccagttggctggaccaatggatggagagaatcactcagtggtatctgagtttttgtttctgggactcactcattcatgggagatccagctcctcctcctagtgttttcctctgtgctctatgt

SEQ ID NO: 409771 - DNA, 483 bp, Homo sapiens
ctcttttacccttctttcttgaattcagtcaaacaacgtacttacatttttcgtcttattctccatcttagaaaccacctcagctttctccattcagcyataaaattgtgcttttcctcaaagattaatctgcctctcctctcactctatactatctctgttagctaattttatttgtgcacattgcttatactgggcattatatacacatatgcatgtgtgtacatgtgcacacacacactgtatgtggacatgtatatatatatgtgtgtgtatatatatagtatatatataaattacaataacataaaggtggcattttaaattagtggaaattaccctgatttgatcactacacattctatacatgtaaagaaaatatcactctgtatcccaagaatatgtacaattatggtttgtcaaatgaaaaagttcatacattgaaaaattttagataaatatcaaactttctctgaaactgta

SEQ ID NO: 409772 - DNA, 483 bp, Homo sapiens
ctcttttacccttctttcttgaattcagtcaaacaacgtacttacatttttcgtcttattctccatcttagaaaccacctcagctttctccattcagctayaaaattgtgcttttcctcaaagattaatctgcctctcctctcactctatactatctctgttagctaattttatttgtgcacattgcttatactgggcattatatacacatatgcatgtgtgtacatgtgcacacacacactgtatgtggacatgtatatatatatgtgtgtgtatatatatagtatatatataaattacaataacataaaggtggcattttaaattagtggaaattaccctgatttgatcactacacattctatacatgtaaagaaaatatcactctgtatcccaagaatatgtacaattatggtttgtcaaatgaaaaagttcatacattgaaaaattttagataaatatcaaactttctctgaaactgta

SEQ ID NO: 409773 - DNA, 620 bp, Homo sapiens
aaatgttgtgcggttaatactcccactggcatgtgatcgtacccgtctccatagtaattgcatctaagaactgaggctacataggaaaaaatcttaaggtccatggttgttaggtatcagatgccctataatggatgaatatttaagtaaataatggcacattgacttgctstctgacacaactgctgaaaatgttggtgaaaagtgagtctcgaagtggtagctcacacttgtaataccagcactttcggaggctgagacggcggatcgctcgaggccaggagttcaagagcagcctgggcaacataacgagacccccatctctaccaaaaatttaaaaattagccgggcatggtggcgcaagcctgttgtcccagttactcctgagactaaggcaagaggatcccttgagtccaggagttcaaggctgcagtgagctatgattgagccactgcactccagcctgggtgacagagcaagactcttatctacctgtgggaaaaaaaaagaaaaaagtttaatagatcctgaagagttggccgggcgcggtactcacgcctgtaatcccagcactttgggaggatgagacgggtggataacgaggtcaggagttcgagacc

SEQ ID NO: 409774 - DNA, 403 bp, Homo sapiens
atatattttatttggctggatgtctgttcagatatttacccagttttatktgggtttttagttttcttagtgttcgtttgaagagttctttgtgtattttcaatacagtttttaaaatcatgtttgtattttgtaaatatcttctcacagtgtgtcttgtctttttgttctctgaatagggtttttcatagtagaaaatttagttttataaagtctgttctcagtatgttcgcgatctggcacttgatgctgtgtgttaacctcaacacctgatcgaatgtcgcttaggttttcttttagattatttatagttttgcatttgaagttgtagtctctggactattttgagtacgtttttgtgttttaatttgtgtatagagtcatttcattctatatggcttcc

SEQ ID NO: 409775 - DNA, 403 bp, Homo sapiens
atatattttatttggctggatgtctgttcagatatttacccagttttatgtgggtttttagttttcttagtgttcgtttgaagagttctttgtgtattttcaatacagtttttaaaatcaygtttgtattttgtaaatatcttctcacagtgtgtcttgtctttttgttctctgaatagggtttttcatagtagaaaatttagttttataaagtctgttctcagtatgttcgcgatctggcacttgatgctgtgtgttaacctcaacacctgatcgaatgtcgcttaggttttcttttagattatttatagttttgcatttgaagttgtagtctctggactattttgagtacgtttttgtgttttaatttgtgtatagagtcatttcattctatatggcttcc

SEQ ID NO: 409776 - DNA, 403 bp, Homo sapiens
atatattttatttggctggatgtctgttcagatatttacccagttttatgtgggtttttagttttcttagtgttcgtttgaagagttctttgtgtattttcaatacagtttttaaaatcatgtttgtattttgtaaatatcttctsacagtgtgtcttgtctttttgttctctgaatagggtttttcatagtagaaaatttagttttataaagtctgttctcagtatgttcgcgatctggcacttgatgctgtgtgttaacctcaacacctgatcgaatgtcgcttaggttttcttttagattatttatagttttgcatttgaagttgtagtctctggactattttgagtacgtttttgtgttttaatttgtgtatagagtcatttcattctatatggcttcc

SEQ ID NO: 409777 - DNA, 575 bp, Homo sapiens
tggcctgggctagtcctatattctctagagttctctttactttgtgctagccaatctctcattatgctgttcacctgttataatgaataattctctgtattaaattttaccactttaaacttttgagtggtttatgcttcctgattggactctgactaatatgttaggaagggtctcaggagrtacacccacacagatgggatttgggcataggtttggtttcccagggggcagcgctgagctctttgccagtgggaaatgggatgctggtgatttccagtaggtgacctcacagtgactcaagctaccacttactgttgattgtgacgaaatgccagctgaggcacgtgccttgggagctaagtggttgctgcccttgaccactgtgaagactggtgtgggaagggtcgctttggatgcacttgagcaggggtccccaacctctgagacatggagacgcaagagccacacagcaggaggtgagcggtatcgagtgagggagtgagggaagcttcgtctgtattacagccactccccttggcgcacattcccgcctgagctccaccttctcagat

SEQ ID NO: 409778 - DNA, 575 bp, Homo sapiens
tggcctgggctagtcctatattctctagagttctctttactttgtgctagccaatctctcattatgctgttcacctgttataatgaataattctctgtattaaattttaccactttaaacttttgagtggtttatgcttcctgattggactctgactaatatgttaggaagggtctcaggagatamacccacacagatgggatttgggcataggtttggtttcccagggggcagcgctgagctctttgccagtgggaaatgggatgctggtgatttccagtaggtgacctcacagtgactcaagctaccacttactgttgattgtgacgaaatgccagctgaggcacgtgccttgggagctaagtggttgctgcccttgaccactgtgaagactggtgtgggaagggtcgctttggatgcacttgagcaggggtccccaacctctgagacatggagacgcaagagccacacagcaggaggtgagcggtatcgagtgagggagtgagggaagcttcgtctgtattacagccactccccttggcgcacattcccgcctgagctccaccttctcagat

SEQ ID NO: 409779 - DNA, 575 bp, Homo sapiens
tggcctgggctagtcctatattctctagagttctctttactttgtgctagccaatctctcattatgctgttcacctgttataatgaataattctctgtattaaattttaccactttaaacttttgagtggtttatgcttcctgattggactctgactaatatgttaggaagggtctcaggagatacacccacacagatgggatttgggcataggtttggtttcccagggggcagygctgagctctttgccagtgggaaatgggatgctggtgatttccagtaggtgacctcacagtgactcaagctaccacttactgttgattgtgacgaaatgccagctgaggcacgtgccttgggagctaagtggttgctgcccttgaccactgtgaagactggtgtgggaagggtcgctttggatgcacttgagcaggggtccccaacctctgagacatggagacgcaagagccacacagcaggaggtgagcggtatcgagtgagggagtgagggaagcttcgtctgtattacagccactccccttggcgcacattcccgcctgagctccaccttctcagat

SEQ ID NO: 409780 - DNA, 575 bp, Homo sapiens
tggcctgggctagtcctatattctctagagttctctttactttgtgctagccaatctctcattatgctgttcacctgttataatgaataattctctgtattaaattttaccactttaaacttttgagtggtttatgcttcctgattggactctgactaatatgttaggaagggtctcaggagatacacccacacagatgggatttgggcataggtttggtttcccagggggcagcgctgagctctttgccagtgggaaatgggatgctggtgatttccagtaggtgacctcacagtgactcaagctaccacttactgttgattgtgacgaaatgccagctgaggcacgtgccttgggagctaagtggttgctgccctkgaccactgtgaagactggtgtgggaagggtcgctttggatgcacttgagcaggggtccccaacctctgagacatggagacgcaagagccacacagcaggaggtgagcggtatcgagtgagggagtgagggaagcttcgtctgtattacagccactccccttggcgcacattcccgcctgagctccaccttctcagat

SEQ ID NO: 409781 - DNA, 403 bp, Homo sapiens
atatattttatttggctggatgtctgttcagatatttacccagttttatgtgggtttttagttttcttagtgttcgtttgaagagttctttgtgtattttcaatacagtttttaaaatcatgtttgtattttgtaaatatcttctcacagtgtgtcttgtctttttgttctctgaatagggtttttcatagtagaaaatttagttttataaagtctgttctcagtatgttcgcgatctggcacttgatgctgtgtgttaacctcaacacctgatcgaatgtcgcttaggttttcttttagattatttatagttttgcatttgaagttgtagtctctggactattttgagtasgtttttgtgttttaatttgtgtatagagtcatttcattctatatggcttcc

SEQ ID NO: 409782 - DNA, 578 bp, Homo sapiens
ttcagtctccttaaggaccattcagtgtttactgtcagttcccagaatgcttttacaggttttgctatcattttccttgaagtctgttcacttttcactaacagtctttgtgaaatccttctggcttctatccattgtctgattccaaagccaatgccacatagtttaagtttatattatattagagtgacatcttattccacgtaccacaaaccacctcaaaacttagcagcttaaaacaacaaacttaaaaaaaattgtggacttgtattagtgcaagcagggcttagctacatgattctgctccrtgtggtattaactgtagccatctgtggtattcagctggcagctgggtagtctggagagttgaaggtggcttcagtgatgtgcctgttttattagtggattggatgaatgttgtggtaaggtgggcctctcttgctctccgtgtagtgtgagagcctgtctacatgatctattcagcagcaatatggtatggctgtgtcccgaccaaatctcatcttgaatcgtagctcccataatctccgtgtcttgtgggagggatcaatcggagacta

SEQ ID NO: 409783 - DNA, 569 bp, Homo sapiens
actttgaacttgagggagatgagttagggtatctggcagaagaaatttctaagcagcaaakcattcaagagtgacttgggtgtgttaaaagcactcagttttaacaggaaaacagagcataaacgttcagaaaatttgtagcatgacactgtgatagaaaagaaaaatccattttctgaggagaaattcaagctggctgcagaaatttgcataagtaacaaggagccaaatgttaatcgctaagtcttcaggccatgtcagagatctttgtggcagccccttccatcacacacccagaggcctaggaggaaaaaatggtttcataggctgggccagggctctctgctgtttgcctgtgtacagcctagggacttggtgctctgtgtcccagctgctccagccacagctaaaaggggtcaaggtacagctcaggccatggcttcagagggtgcaagcctcaagctttggcagcttccatgtggtgttgagcctgtggattcacggaagtccagaatcgaggtatgggaacctccacctagatttcagagaatgtatggaaatgcctggat

SEQ ID NO: 409784 - DNA, 307 bp, Homo sapiens
aatgttaatcgctaagtcttcaggccatgtcagagatctttgtggcagccccttccatcacacacccagaggcctaggaggaaaaaatggtttcataggctgggccagggctctctgctgtttgcctgtgtacagcctagggacttggtgctctgtgtcccagctgctccagccacagctaaaaggggtcaaggyacagctcaggccatggcttcagagggtgcaagcctcaagctttggcagcttccatgtggtgttgagcctgtggattcacggaagtccagaatcgaggtatgggaacctccac

SEQ ID NO: 409785 - DNA, 569 bp, Homo sapiens
actttgaacttgagggagatgagttagggtatctggcagaagaaatttctaagcagcaaagcattcaagagtgacttgggtgtgttaaaagcactcagttttaacaggaaaacagagcataaacgttcagaaaatttgtagcatgacactgtgatagaaaagaaaaatccattttctgaggagaaattcaagctggctgcagaaatttgcataagtaacaaggagccaaatgttaatcgctaagtcttcaggccatgtcagagatctttgtggcagccccttccatcacacacccagaggcctaggaggaaaaaatggtttcataggctgggccagggctctctgctgtttgcctgtgtacagcctagggacttggtgctctgtgtcccagctgctccagccacagctaaaaggggtcaaggtacagctcaggccatggcttcagagggtgcaagcctcaagctttggcagcttccatgtggtgttgagcctgtggattcacrgaagtccagaatcgaggtatgggaacctccacctagatttcagagaatgtatggaaatgcctggat

SEQ ID NO: 409786 - DNA, 629 bp, Homo sapiens
gataattgaatgatggggtgctcccccatactgttcttatggtcgtgaataagtctcatgagagctgatgactttacaaggggcttcccctttcactcagctctcattgtctcttgtctgctcccatgtaatgcatacttttcaccttctgccatgattgtgagcctccccatccacatggaactgtgattccatgaaactctttttattcataaattacccggtcttggatatgtctttatcagcagcatgaaaatggactaatgcaagcagaataagcagaattcttcgatacygactcagcaccccacacacgttggttccaagatgtagaaatggaagcttcaaggcttttaacatctggacatcaaaactggaagttttactttcactgtattttattggtcaaagcagtcaaagagcccacccaggttcaaggagaaagaatatgtccccacgttttcaacaggatggtgccacaaaatttctagtcatcttaattcaccacagatagaaatatgaagagctcatttgttatgttatttgtgaatgcagactaaagatatttgttggtttatatagtagtgggaaaatgagaacttttaaaatattcaacttttagcccttga

SEQ ID NO: 409787 - DNA, 598 bp, Homo sapiens
tgataaacttggactaactgtggcccaggtatcagcactcccaagaattgccaggaggaagctttggcagacaccacaggtatggcaaggctatctccctctgctgaatccaacaggggcaagcaagctggcatgtggcttgaggtgacccgaatatggtcgcacccctcagatgtttttctttgcacttttraaaaaaatctcagaatttgctggcaacatggccaaataggaacagctccagtctgcagctcccagctgagatcaatgcagaatgcaggtgatttctgcatttccaactcgagcgtacctgcgttcatctcactgggactggttggacagtgggtgcagccgccagggtgagccaaagcagaatggcggtgttgcctcacccaggcaagtgcaaggggttgggggaattccctcccctagccaagggaagccccgagggactgtaccatgaggaacggtgcactccacccagaaactatgcttttctcatggtcttcacaatccacagaccaggagattccctccagtgcctctgccaccaaggccctaggtttcaagcacaaaactaggcagctgtttgggcaga

SEQ ID NO: 409788 - DNA, 598 bp, Homo sapiens
tgataaacttggactaactgtggcccaggtatcagcactcccaagaattgccaggaggaagctttggcagacaccacaggtatggcaaggctatctccctctgctgaatccaacaggggcaagcaagctggcatgtggcttgaggtgacccgaatatggtcgcacccctcagatgtttttctttgcacttttgaaaaaaatctcagaatttgctggcaacatggccaaataggaacagctccagtctgcagctcccagctgagatcaatgcagaatgcaggtgatttctgcatttccaactcgagcgtacctgcgttcatctcactgggactggttggacagtgggtgcagccgccagggtgagccaaagcagaatggcggtgttgcctcacccaggcaagtgcaaggggttgggggaattccctcccctagccaagggaagccccgagggactgtaccatgaggaacggtgcactccacccagaaactatgcttttctcayggtcttcacaatccacagaccaggagattccctccagtgcctctgccaccaaggccctaggtttcaagcacaaaactaggcagctgtttgggcaga

SEQ ID NO: 409789 - DNA, 558 bp, Homo sapiens
gggaagaaagcttttaatgttcccctaatttttcttacctttgacatgatccttcacakgtcttattttgcttagtgatttttctttttttttttttttttgagacagggtcttactctaccacccaggcttgagtgcagtggtgcaatcacagctcattgcagccttgacctcccagactcaagctattcttccacctcagcctcccaagtagctggtactacaggcacatgccaccaaacttggctaatttttgtattttttgtagagacagagttttgccaaattctcaggctggtctggaatttctgggctcaagtaatcctgccttggcctcccaacatgctgatattatagacataagccacagtacctggccagttttctttttaaaaaaatctattggttattaatttgaagccttccttttcatagctgtgctccttaattgggagcaaacatgaatggaccacaacttagccaattttctatatacgatctttgccatcctaatttaaaggaatattaattctttcttttcctctttcattccacaaa

SEQ ID NO: 409790 - DNA, 558 bp, Homo sapiens
gggaagaaagcttttaatgttcccctaatttttcttacctttgacatgatccttcacaggtcttattttgcttagtgatttttctttttttttttttttttgagacagggtcttactctaccacccaggcttgagtgcagtggtgcaatcacagctcattgcagccttgacctcccagactcaagctattcttccacctcagcctcccaagtagctggtactacaggcacatgccaccaaacttggctaatttttgtattttttgtagagacagagttttgccaaattctcaggctggtctggaatttctgggctcaagtaatcctgccttggcctcccaacatgctgatattayagacataagccacagtacctggccagttttctttttaaaaaaatctattggttattaatttgaagccttccttttcatagctgtgctccttaattgggagcaaacatgaatggaccacaacttagccaattttctatatacgatctttgccatcctaatttaaaggaatattaattctttcttttcctctttcattccacaaa

SEQ ID NO: 409791 - DNA, 593 bp, Homo sapiens
tttttttttttttgagacggagtttcgctgtttttgcccaggctggagtgcaatggcacaatctcggctcaccacaatctttgccttttgggttcaagggattctcctgcctcagcctcccgagtagctgggattacaggcatgtgccaccacacccggctaatgttgtagttttagtagagacggggtttccctatgttggttaggctggtctcaaactcctgacctcaggtgatctacccgcctcggcctctcaaagtgctgggatcacaggcrtgagccatcactcctggcctaatttttgtatttttagtagagagagggtttcactctgttggccaggctggtctcgaattcctgacctcaagttatctgcctgcctcggcctcccaaactgttggagttacaggcgtgaaccaccatgcctggccagctctatttctttaagcctacatgttttgcacttgttaaaagtatttgaacatacaattactcagcttcccttgtttacgcgtgaattttgtagaatcttaaatattttttccaatctaagctttattttatcccgtttcttctatatttgtataacttta

SEQ ID NO: 409792 - DNA, 593 bp, Homo sapiens
tttttttttttttgagacggagtttcgctgtttttgcccaggctggagtgcaatggcacaatctcggctcaccacaatctttgccttttgggttcaagggattctcctgcctcagcctcccgagtagctgggattacaggcatgtgccaccacacccggctaatgttgtagttttagtagagacggggtttccctatgttggttaggctggtctcaaactcctgacctcaggtgatctacccgcctcggcctctcaaagtgctgggatcacaggcatgagccatcactcctggcctaatttttgtatttttagtagagagagggtttcactctgttggccaggctggtctcgaattcctgacctcaagttatctgcctgcctyggcctcccaaactgttggagttacaggcgtgaaccaccatgcctggccagctctatttctttaagcctacatgttttgcacttgttaaaagtatttgaacatacaattactcagcttcccttgtttacgcgtgaattttgtagaatcttaaatattttttccaatctaagctttattttatcccgtttcttctatatttgtataacttta

SEQ ID NO: 409793 - DNA, 593 bp, Homo sapiens
tttttttttttttgagacggagtttcgctgtttttgcccaggctggagtgcaatggcacaatctcggctcaccacaatctttgccttttgggttcaagggattctcctgcctcagcctcccgagtagctgggattacaggcatgtgccaccacacccggctaatgttgtagttttagtagagacggggtttccctatgttggttaggctggtctcaaactcctgacctcaggtgatctacccgcctcggcctctcaaagtgctgggatcacaggcatgagccatcactcctggcctaatttttgtatttttagtagagagagggtttcactctgttggccaggctggtctcgaattcctgacctcaagttatctgcctgcctcggcctcccaaactgttggarttacaggcgtgaaccaccatgcctggccagctctatttctttaagcctacatgttttgcacttgttaaaagtatttgaacatacaattactcagcttcccttgtttacgcgtgaattttgtagaatcttaaatattttttccaatctaagctttattttatcccgtttcttctatatttgtataacttta

SEQ ID NO: 409794 - DNA, 647 bp, Homo sapiens
  misc_feature (1)...(647): n = A,T,C or G
aggtgtggcagctcacacctgtaatcccagcattttggaaggctgaggtgagagaactgcctgagtgtaggagatcaccgaccaaccgtggtcaacagtagtgacactttgtctctactacaaattaaaaaaaaaaaanatgagctacacgttgcagtgcacacctgtagtccgaacaactggggaggctaagactgagggatcacttgagtctagaaggttgaggctgcagtaagctatgatcacaccattgcactttgcttgctaaggagcaagacygcatttcttaaacaaaataaaaattagatgggaatattgctcaagccctggaggttgaggctgcagttaactgtgattgcaccactgcagtccagcctaggtgatagagcaagaccctttctctaaaaataaaataaaataaaaattaaccttctatcatatttcccagtaacaccttccctcctacatttctcctagaagcccttaaattttgtttttcacatatcgtttaaaacttttaagtgctgatgtctgtctgtgtcatccctctttttttttttttttttaaatgtctttttgtcacttctagctggacctaccatgaaagacttctgaatccaggaagagaaactgactgggcaacatgt

SEQ ID NO: 409795 - DNA, 647 bp, Homo sapiens
  misc_feature (1)...(647): n = A,T,C or G
aggtgtggcagctcacacctgtaatcccagcattttggaaggctgaggtgagagaactgcctgagtgtaggagatcaccgaccaaccgtggtcaacagtagtgacactttgtctctactacaaattaaaaaaaaaaaanatgagctacacgttgcagtgcacacctgtagtccgaacaactggggaggctaagactgagggatcacttgagtctagaaggttgaggctgcagtaagctatgatcacaccattgcactttgcttgctaaggagcaagactgcatttcttaaacaaaataaaaattagatgggaatattgctcaagccctggaggttgaggctgcagttaactgtgattgcaccactgcagtccagcctaggygatagagcaagaccctttctctaaaaataaaataaaataaaaattaaccttctatcatatttcccagtaacaccttccctcctacatttctcctagaagcccttaaattttgtttttcacatatcgtttaaaacttttaagtgctgatgtctgtctgtgtcatccctctttttttttttttttttaaatgtctttttgtcacttctagctggacctaccatgaaagacttctgaatccaggaagagaaactgactgggcaacatgt

SEQ ID NO: 409796 - DNA, 647 bp, Homo sapiens
  misc_feature (1)...(647): n = A,T,C or G
aggtgtggcagctcacacctgtaatcccagcattttggaaggctgaggtgagagaactgcctgagtgtaggagatcaccgaccaaccgtggtcaacagtagtgacactttgtctctactacaaattaaaaaaaaaaaanatgagctacacgttgcagtgcacacctgtagtccgaacaactggggaggctaagactgagggatcacttgagtctagaaggttgaggctgcagtaagctatgatcacaccattgcactttgcttgctaaggagcaagactgcatttcttaaacaaaataaaaattagatgggaatattgctcaagccctggaggttgaggctgcagttaactgtgattgcaccactgcagtccagcctaggtgatagagcaagaccctttctctaaaaataaaataaaataaaaattaaccttctatcatatttcccagtaacaccttccctcctacatttctcctagaagcccttaaattttgtttttcacatrtcgtttaaaacttttaagtgctgatgtctgtctgtgtcatccctctttttttttttttttttaaatgtctttttgtcacttctagctggacctaccatgaaagacttctgaatccaggaagagaaactgactgggcaacatgt

SEQ ID NO: 409797 - DNA, 647 bp, Homo sapiens
  misc_feature (1)...(647): n = A,T,C or G
aggtgtggcagctcacacctgtaatcccagcattttggaaggctgaggtgagagaactgcctgagtgtaggagatcaccgaccaaccgtggtcaacagtagtgacactttgtctctactacaaattaaaaaaaaaaaanatgagctacacgttgcagtgcacacctgtagtccgaacaactggggaggctaagactgagggatcacttgagtctagaaggttgaggctgcagtaagctatgatcacaccattgcactttgcttgctaaggagcaagactgcatttcttaaacaaaataaaaattagatgggaatattgctcaagccctggaggttgaggctgcagttaactgtgattgcaccactgcagtccagcctaggtgatagagcaagaccctttctctaaaaataaaataaaataaaaattaaccttctatcatatttcccagtaacaccttccctcctacatttctcctagaagcccttaaattttgtttttcacatatcrtttaaaacttttaagtgctgatgtctgtctgtgtcatccctctttttttttttttttttaaatgtctttttgtcacttctagctggacctaccatgaaagacttctgaatccaggaagagaaactgactgggcaacatgt

SEQ ID NO: 409798 - DNA, 591 bp, Homo sapiens
agattcatcagacagtgaacagggttgcaattaacaattatgctggaaaaacaggtgtaaaccaggacagttcaggcatgcagggcttacagttaccttagtaatactggaaagggggattgattatagaagaacactgagatagggcaggtttctaattaatgttgaatatgaaggggacatccataaggattttaatacatgctcattttaacagtagcagttagtgacatcccagttatgccctctttttactgatgaygaaattgatgagctttatcttgtcaaatggtagattatcttatatctcaggcatattggaagggacatgggttctttttttaaccctggagatcagttattagcataatcatgcccttatgacctgaacatgaatgccctttccttagagaataacctacttacctggaagaaaggagttttcaatcaatctttcagaacttacaatgtattaaaggtgatgttcatcacagattatcttgggggaataagagaccatcgttaggatggagcttggcacacagtaggtacacaataaatgtgtgttgacagagactcagcagaataaat

SEQ ID NO: 409799 - DNA, 604 bp, Homo sapiens
atgtgtgttgacagagactcagcagaataaataatttttttaaaagaaatcatatatttgtttttattcaacttttcctaaacagttgaatataagagagaaaatacacattagagtcaacaaattgcctgtctgtagaaatcacagcaaacaaactgctatacagaacttacagaagagatagtatctctcggtagaacaagcttaaaagatgaaacagcctttcttttcttttgatttatttgttattaygaaaaataggattaagcatatttaattgaagtatctatcccttccttgataggaccatcatcttggagaagaaatttgatgttggtgttgaataaagttcaccaatgatttggccatgaaataagagatggaggagttcctgaaagcctgtgtagaaagacttacagaagaaataagaaactgaagtaaaggaaacaggaaataataaaaagaaaggatagggaagatgttacatttaggggaagctgggtgaagagtagaagaaacttctatatactctttttgcaaatacttgtaagtctactattatttcaaaataaaaagttagaacaaatttttttaaaagacatga

SEQ ID NO: 409800 - DNA, 568 bp, Homo sapiens
ttattaattttgcaattgattatactgattgcatgaagatttccattacagaaacagatttttgaggactaaaaatacagcaattatgctggttactcatttaagtcagtaagtaactacaggttgttaaagtagcagacattttaaacacagggagtcatttacttccttccttgaagtacctgaaatttctattcatgtttttttttwaaaaaaaagaggggcaacacatgttaaatgatagcaatcaagatttttcatgcaatagtttaaaaatctaaaatgaatgatttctgaaagcattatagataattaaaatacaacattgtcttgacaaaatatctctatgaaattaaatagggcctgatcttcagaagaaggaaccaagaaatcctctttaccagctacaaagccctcaaatggtggaggtgaggctcagcagagcatcctcctgccggcatgtgtctacttcagtctcttcaggggttctcaacaggaaaaggaggggatggaggagctgggacattttcatttgtcccagtgaggtagtgctcatggtatttagtgc

SEQ ID NO: 409801 - DNA, 546 bp, Homo sapiens
ttctgctgtactgagcatctacctacctttagtttcactgaggcacctaagaaacggtcaagcccttagttcttcccattccttcacatattttcctctgttcctggctcttagtgttttatctgttttcaatttcagttacagtgagtatacactgtcctcctgagctcttttcccagagactctccgctgctattccaaagggcctaaacytctattctgtctgtcaaagatggttaatacatgagtattaacgtccagtttttttatatagtaattgaaagtttgcctgctgtgtacaagactgccctgctggccaggaacccgactggacatagcatttgccagccacctgctgggaacaacagtgcagcgagacagacagtgaactctgttacccaacaggcatttgccagggcctgatttctgcgattcagcgatgtacctttcaaaggctcttcatccaactgcaaatcttcccttcactcatctacttgtttggattcagaagatagcacttgccacaaagagacacattccctaata

SEQ ID NO: 409802 - DNA, 499 bp, Homo sapiens
tgattccatgtttttgctatggtgaatagtgctgcaatggacatacaagtgattgtgtttttttggtagaacgatttatttttcctttggatatatacccagtaaggggattgcctggtcaaaagatagttctgttttaagtactgtgaraaatctccaaactgctttctacagtggaactagtttacaccaacagtgtataagcattccctttttctccactgccttatcagcatctgttgttttttaactttttaataatagtcattctgactagtgcaaaaggttatctcttggttttgatttgcatgtctctgatgattagtgatgagcattttttcatgtttgttggccacctaaatgtctttttttgggaagtgtctgttcatgtcctttgcccacttgttaatggggttatgtgttttttgcttgttgaattaagtaccttatggattctggatattagacctttgtcaaatgcatagattgtgaatatttt

SEQ ID NO: 409803 - DNA, 317 bp, Homo sapiens
aactgggattcaaactcactccagtgattctgcggaattcctacggcattgccaccaactccacactggcttgtatccctgtctgtgttgtgctggtgggcccagtggtgtwtgttgtacattgtttaaaatcttttataaaatagctgtctcttctgtaatgcataatcatcttctactgtttgctgtttattgttggaaagtctcctgggagctggaaaataatagttcttcattttgaaaaataattttttttctactttgagctctgtttcttcttctttcatattatatcttctgagggctggaagttacct

SEQ ID NO: 409804 - DNA, 583 bp, Homo sapiens
ttactttaatgttgctacaccactcttacattgtggtgagttacatccactgcgttgttttgtccagaatcctttcttttccatcttgctaactcttactttaagtttcagctcacagatcctgactcagcttacagatcttataatgatgtgctcaaagaacttggcaacatcagaaaaggcaagatgtaggaactgataatgcagttattggacagtttatggaaatggggattgatccacttaaaaagcaagcattttccataccagcaggrgacttctgtctagaaatatgatattgtaatgaaagtggtccacaaagctcatactgctataatgagtttacacaggactcactgggtgttataaaaataaaaatattagctttgtactgtcaatgccaaatgtaaatacagtaattctatgtgaccctccaacatttgaccttgagcaagattttcaacccacttttgcctctgtcttcttgtcataaaagacaagataatctctcaaggctagtttgactccaaaaatcttggattttgctttcctttctctgcaaagcagttggagaaaaccatgc

SEQ ID NO: 409805 - DNA, 432 bp, Homo sapiens
aaacactgaaaagaattgtttttaaaaccaaaagaataatttgattttaatgaatatgtcatctactgacacaaacaaacggcaaaatttttcttctactcttttgcaactaaaataaatttaagtcaaggttcatcctggagagtttttgttgttgttattgttgctagctgttgcaaaatagccaaaagttgttttgtaatagaaatgctgacttaaactcaattactgtgagagtttgaatagactctccttttttttaagacataagaaggcaattaggtgttcatgtggayatttatgtgtaagggatcatttaaaagactgcaaaagaatgctaaatatgaaaagaggttacagagcattatagagtgagaaagtgccagagttatttttaaaatatataagttgtatatgttatatttttaaaac

SEQ ID NO: 409806 - DNA, 513 bp, Homo sapiens
atgggacaggaaggagtcaaatgccactatttgcaaatgatgagacaataacaaatcatgcacagtttattagaataaataaatttagaaggttgctattaaaagataaccataaaatccaagtgcctttctatacaatatacaatgagaaaaatattacatatgtaatatgtttatataacacacatataaatatatagtcagccctccatatctgtgggttccacatccatgggttccactttcagagattcaaccaacagcagatcaaaaatatttgggagaagaggtagaacaggatggctgaatataaacctccagcaattatgccccactaaggaacaccaaattgaacaactatccacacaaaaaagcaccttcataagaaccaaaaaccagataagctattacagtacctgkttatacatcttataactgaaggagacactgaagaggtaggaaagacagtcttgaatttcctacacctctcctccccaatcccttgacagcagc

SEQ ID NO: 409807 - DNA, 513 bp, Homo sapiens
atgggacaggaaggagtcaaatgccactatttgcaaatgatgagacaataacaaatcatgcacagtttattagaataaataaatttagaaggttgctattaaaagataaccataaaatccaagtgcctttctatacaatatacaatgagaaaaatattacatatgtaatatgtttatataacacacatataaatatatagtcagccctccatatctgtgggttccacatccatgggttccactttcagagattcaaccaacagcagatcaaaaatatttgggagaagaggtagaacaggatggctgaatataaacctccagcaattatgccccactaaggaacaccaaattgaacaactatccacacaaaaaagcaccttcataagaaccaaaaaccagataagctattacagtacctggttatacatcwtataactgaaggagacactgaagaggtaggaaagacagtcttgaatttcctacacctctcctccccaatcccttgacagcagc

SEQ ID NO: 409808 - DNA, 561 bp, Homo sapiens
tttgcccatttttcaaaaatcaagtttttccttttactacagttgagcattgagaattcatcacataatctggatataagtttttgtcagaccatttttgcgaatattttctcccagtcttcagcctgcatgttcgtcctctcaactttgcaaagcaaaagactttttaaattaatttttttactttttagataattgtagatttrcatacagttctaagaaactatacagaaggatctcatacacccttttatgtagtgtgcaccagtggtaacatcttacagaatattggcatagaaacagtcaggatacagagctgtttcatctccataaggtttccctttcagagccacactcacctccctcccattccaacctcctccttaaccctggcaaccactaatctgctctctatttctgtaatttcattatgttagaatgttaaataaatagaatcatacaacaggtaatctttgggatttgcttattttcactcagcgtaattctctggtgagaattatcaatagtttgttcctttttattgttaagtatatgccatga

SEQ ID NO: 409809 - DNA, 556 bp, Homo sapiens
ataacttcccccaggcacactgctctgcaaaagccactgtttcttagagaaacacatatgaacacatttctaagttgtgcatgctcaaatacattttgtaaattattattcataaaaattcttgggttttattagtttagggctcagtgagccttctagctgaactatagagttatgcagtgtctggaagcagaatggagggggaagctaattaacatagttcttacatgaccaatggaaattctttatttgccctcaggatctacattgctgtgtctactcaacactgttaaatatgacaaggtcagtaaccctgtttttgtaamaatgaatgtgaacaaacttggacctcacacacattgtcattgtttaacagggtcaactgagttaactgggagcattatgcatgtatagtgccaagaaggccccatcaacagtcaagtatataatgttaacatattagcataagtagtggagcaacagatggccaagctagagcaagtcagattaacccgaagattctgcactaactgttgagccataagagggctttata

SEQ ID NO: 409810 - DNA, 579 bp, Homo sapiens
agccacccaacaaatagtccagtggggacaatcgaaggacagtgggttaccatggtcattccagtgaataagacctttatcaaaagtacataacagtgccagtgtgctgaatgagaatgcatcccaagtggctgcggggagaatctttgccagaagtgtaaattatgtggcaatatctaaaagagcaccttataatttcagatttctcaggaaagcatatttttctttgggggtaaaaagaagaaaatgaaacatcttataataaccaagtagatttgttttcttctgccagcaggaagaaagcgctcctagaaaatgtttagggygtttccagccaaaacttactgttcagcttggtctttgtcctttccaaattgtatgagccactctttgcatttgagatgatcagtgaggcaactggccatctgtgagcatcataatggtcttattaaagtaacccagctaaagtggttagaagcaaatatcaatttataattttccataagtgacaggtcacaacttttgttagccataaccagattctgtcttaggctgaaattcgcaaacctacgtcttctc

SEQ ID NO: 409811 - DNA, 646 bp, Homo sapiens
aggctagtgcggctgttccaactgagcatccattttgattctgagcttcctgaaaggcagaattagaagggaaacattcttgaattatttccattagaattgaagaaacacaaacaaattcttatttgaacacaagtttttctggcactaaattctaaaggaaagaaatytcttcacatgtgcttttttaaagcatgtgatttctcttttgaaaattatttttaggcacacaaatgatttatgaatacatttaaacaacacagaagtatgtagattaagaagttcaggttctcctttaccctttcaacttcaccctcccacctggagtctggtgtgtgacatctctgaactttttctaagaccccctttatttcctagcgcttgccccatgtgtaccaaatacatcatatacagtgatcatatagatggattattcttcagcttacttttatttatttatctatgctttgaagatcatccatatcaatataaatagtgctattttgttttgtaaaactcctatatggatgttctaagatttaccaaaacattctcctatgtttgagttatttgcaatttttcttccttcgtttgtttttttgagacagggtttggctctgttgcccaggctggggtgcagtggcat

SEQ ID NO: 409812 - DNA, 646 bp, Homo sapiens
aggctagtgcggctgttccaactgagcatccattttgattctgagcttcctgaaaggcagaattagaagggaaacattcttgaattatttccattagaattgaagaaacacaaacaaattcttatttgaacacaagtttttctggcactaaattctaaaggaaagaaatctcttcacatgtgcttttttaaagcatgtgatttctcttttgaaaattatttttaggcacacaaatgatttatgaatacatttaaacaacacagaagtatgtagattaagaagttcaggttctcctttaccctttcaacttcaccctcccacctggagtctggtgtgtgacatctctgaactttttctaagaccccctttatttcctagcgcttgccccatgtgtaccaaatacatcatatacagtgatcatatagatggattattcttcagcttacttttatttatttatctatgctttgawgatcatccatatcaatataaatagtgctattttgttttgtaaaactcctatatggatgttctaagatttaccaaaacattctcctatgtttgagttatttgcaatttttcttccttcgtttgtttttttgagacagggtttggctctgttgcccaggctggggtgcagtggcat

SEQ ID NO: 409813 - DNA, 541 bp, Homo sapiens
tcacccatctcttattcagatcagagacattctcacagaccatatccagactaaagaggattctgaatatttatttttctttttttttttttttaattttagagacagggtctcactctgctgcccaggctggagtgcaatggtggaatcaccactcacckcagcctcaacattctgggctcaagcaatcctctcacatcagccttctgattagctgagactacaggcatccaccccaggcccagttatttttttctttttagggatgaggtgttgctatattgtccaggctgtcttgaactcttggcctcaagagatcctcctgccttggcctcccaaagtgctggtatgaaggcatgaaacatcatacctgactgattctgaatatttcaaactgtacatttaaaatccaactcaaatggcatggcacaccctgctgtgaaagcaacacactccaggcagaatcctagaaagctctgagcactcagcataatcctaattgtcatcaggtctgtaaccactgctgtttcttcacaaagtc

SEQ ID NO: 409814 - DNA, 590 bp, Homo sapiens
attcagatcagagacattctcacagaccatatccagactaaagaggattctgaatatttatttttctttttttttttttttaattttagagacagggtctcactctgctgcccaggctggagtgcaatggtggaatcaccactcacctcagcctcaacattctgggctcaagcaatcctctcacatcagccttctgattagctgagactacaggcatccaccccaggcccagttatttttttctttttagggatgaggtgttgctatattgtccaggctgtcttgaactcttggcctcaagagatcctcctgccttggcctcccaaagtgctggtatgaaggcatgaaacatcatacctgactgattctgaatatttcaaactgtacatttaaaatccaactcaaatggcatggcacaccctgctgtgaaagcaacayactccaggcagaatcctagaaagctctgagcactcagcataatcctaattgtcatcaggtctgtaaccactgctgtttcttcacaaagtcactatttgagccattttactcaaagttgactgaatttcaagaaaggtatgagacacaatcac

SEQ ID NO: 409815 - DNA, 512 bp, Homo sapiens
gcaacaagtcactatcttggaagcagacacagggccctatccagacacaaaacttgctagtgctttggttttgaacttcccagcctccagaactatgagaactaaatttctgctttttataaattacccaggcttgggtattttgttatagcagcacaaatagaccaagacaggagaaccagactgtcagtagtggygagagcatgactcagatgcactgggagagccagagacaccaggagagagccactgggagggagcaggagagtttgtttctaaggctgcctcagaacctcataattaatgagctctttatatgccaggccttgggttgaacacttcacatgcatcattttatttaatcctcacagtcatatgagatagattctcttactgtgcctatttctcatataaggatatcgaggtttagaatgggaagtggccagaactccaaccaaatagatctgtgattgcagtgcaaagcctggctgtgctggttaagagcacagcca

SEQ ID NO: 409816 - DNA, 629 bp, Homo sapiens
tatggtccaaatatccaccaaaatttatgtgtcgaaacttaaatctccattgtgatagtattaataggtggagttttgggtgaagtgattaagtcatgagggcttatctctcatggattaatactttttcaaagggctggagggaactagttaggccatgtgaggatacagagttcatcccatctggaggatgcagcaacaagtcactatcttggaagcagacacagggccctatccagacacaaaacttgctagtgctttggttttgaacttcccagcctccagaactatgagaactaaatttctgctttttataaattacccaggcttgggtattttgttatagcagcacaaatagaccaagacaggagaaccagactgtcagtagtggcgagagcatgactcagatgcactgggagagccagagacaccaggagagagccactgggagggagcaggagagtttgtttctaaggctgcctcagaacctcataattaatgagctctttatatgccaggccttgggttgaacacttcacatgcatcattttatttaatcctcrcagtcatatgagatagattctcttactgtgcctatttctcatataaggatatcgaggtttagaatg

SEQ ID NO: 409817 - DNA, 611 bp, Homo sapiens
ctgtccaaaaacatgagcaaaatttaatctctttggaggggtacgctatatactgtctttgggcatttggcatccatttatatcttgctctctctctctccctcccctgtactgaaagcctggaaggataaaatttgcatttctcagattcctttgcaactaagattctggatatattgtgataggcacttggaagagatttgaaaagtggaagaaagttaaaggctgtcttcctgcaacagtggcagctgacaaccaaggtctggactccacgtttctcggtctagtcagcagcatcatgagtggaaggcagccatattcatggcagcagtagtattaacagtagcagtaattttctgaaatctggtgcacagcagaccttgaagccaaaagacatgttgcaatcccctgactcaggcttttccagctcttctgctgagtgtgtaatcacttagtttcctgcattaaatctctttctactggaaatacctagagtgtttgctgcactatatccagatagagacagaaggayttttgaccctacacattgatacctctgaaggtctccattttttatttacgtattgtacagatatcccttttagggcaca

SEQ ID NO: 409818 - DNA, 588 bp, Homo sapiens
tggggagaaaccttggacaataccctgctttcaagggcagaggtccctgcggctttccacagtgtattgtgcccctggtttattgagactagagaatggcaatgacttttaccaagtatactgcttgtaaacatttggttaacaaggcacatcctgcacagccctagatccttcaaaccttgattttatacaacacatgtttttgtgaactccaagttgggtcaaagtggttggggcaaagtggctggggcaaagctacaaatgaacaacatctctgcaaagcaattgttttaagtacagatctttttcaaaatggagtctcttatgtcttccctttcgacatagacacagtgacagtcggatctctctttcttttccctacacaaataaagagcccagtgccttttctcattgctcaagagattgaaggggtaggaagaaaagatgttaagttataaacatgtttcagttttggtaccacttgagccaatttatgttttgaagaggaaagggtcttgcctacwaagtcagtccctgggttttccttctgcttatggaatccaggcaatgggcaaagagaaaaagaaa

SEQ ID NO: 409819 - DNA, 569 bp, Homo sapiens
tgggctcaggttgtgcactggagagctgcttaatctttaggctttgaagaccggggatcttaaaatggctctggaggagctgaggtagctttgctcttcttaaatgggtgatagactgtacgtaactggttaaagtttgtttaagagttcagggtatgaagattctagagtcaggaagaatctactaactttcctgatttttattggctctgagatccgaagccagttgttgttgttgttgagtatacgggattgtcaggcagatctggctgtggaaaggagactgtgggcagcaagtttagaggcgtgactgaaagtcttgctgcgacctgagctgctgaatcagctttctggttactatgggccacrgccgtgttttctttttgatgtcctttgcggtggatcacagctaccggctgaggtgagtagcctgctttcctggtagatggctttatgtacatgcacagcagcaaaggcgtacttgctgtcagtgtaaatgttaataagtttattcttactttattggagagcctgagtgagggcgatcaattcagccttttgtgctgagg

SEQ ID NO: 409820 - DNA, 475 bp, Homo sapiens
aacctggtctagccttttagttaaatcactatcacaggccggattagtgggccagacacatggggcctgtgaacatgagtgggtctggcccatacagtcataatataattggcmttgaggggcctagtctataatagtttcaaatttattgttttgtagtaccactgcagtatcagccacacattcttcccaaactaagactactgggtcttttgattcttttggaatttccttggggcatggtttccctttaggcctaaattttaatgatctttgataggaagaattctgtaaattattcatttgtgacctgagcgacattcctcttatcatatgataagtaaatttactggtggcactgacagtaggtacttctatcaaccaagtttggattgtaggcattaagcatcctggtgcttttcccaggcaaataggaggataatgatacccaatggaaatgtttatcatcattcct

SEQ ID NO: 409821 - DNA, 475 bp, Homo sapiens
aacctggtctagccttttagttaaatcactatcacaggccggattagtgggccagacacatggggcctgtgaacatgagtgggtctggcccatacagtcataatataattggccttgaggggcctagtctataatagtttcaaatttattgttttgtagtaccactgcagtatcagccacacattcttcccaaactaagactactgggtcttttgattcttttggaatttccytggggcatggtttccctttaggcctaaattttaatgatctttgataggaagaattctgtaaattattcatttgtgacctgagcgacattcctcttatcatatgataagtaaatttactggtggcactgacagtaggtacttctatcaaccaagtttggattgtaggcattaagcatcctggtgcttttcccaggcaaataggaggataatgatacccaatggaaatgtttatcatcattcct

SEQ ID NO: 409822 - DNA, 538 bp, Homo sapiens
ttgctatccccaattttaatataaggcaagagcagtaattgagcaattctatcacctggattggcactccagggaacagtacagctgatcactaactgaatttcccctttataatctgagtcaattaccccagtatgaatttgaactcctttcaaatttagactagatcttcctaaaataaggcctaccatcccttgtggcagcgggccatatacccctgtaggaatcttttgcaggggctctccacggagtaaagaaatcatttgagtagaacataaatctactgcagcactgcctgctgtgrcagaggataattgtcgtattgtaattggctgatttcctgaaatggtggtatttactgtgggggttgttgtccctgaaaaccctgaggaacaaatggctgaatcgggaatgccccactttgttgcggggcctggggctggcccctcttgccgtttcccgacaatggttgtccatttttatcaaatttagaacgacatgccttagcccaatgttttccttttccacatcttggaca

SEQ ID NO: 409823 - DNA, 535 bp, Homo sapiens
aacacaataattctccagtaacagacctgaaagaaaaaggaaaatcgaggcctgtaacagaatttawaataatggtcttaaggaaactcagagagatacaagagaatacacatagacaattcaatgaaatcaggaaaagaattcatgacctaaatgagaaattcaagagagatagatatcacaaaaaaacagccaaacagaaaacttgaaggtgaggaattcgatgaatgaaataaatacaactcagagtttcaacaacatactagatcaaggagaacaaacaatgtctgaatttgaagacaggacttttgaaatgacccagtcagaccaaaaaaaaggaaggaagaagaagaaagaataaaaggagaaaagaaaaagaaaaggaaaagaagaaggaagaggaagaggagaagatgagaaaaagaaagaagaaaagaagaagaagagagaagggagaaggaagaaaggatagaggagagaggaggaggaacagcaggaggaggagcagcagcaggaggcgtaggaaaaaaagcct

SEQ ID NO: 409824 - DNA, 535 bp, Homo sapiens
aacacaataattctccagtaacagacctgaaagaaaaaggaaaatcgaggcctgtaacagaatttaaaataatggtcttaaggaaactcagagagatacaagagaatacacatagacaattcaatgaaatcaggaaaagaattcatgacctaaatgagaaattcaasagagatagatatcacaaaaaaacagccaaacagaaaacttgaaggtgaggaattcgatgaatgaaataaatacaactcagagtttcaacaacatactagatcaaggagaacaaacaatgtctgaatttgaagacaggacttttgaaatgacccagtcagaccaaaaaaaaggaaggaagaagaagaaagaataaaaggagaaaagaaaaagaaaaggaaaagaagaaggaagaggaagaggagaagatgagaaaaagaaagaagaaaagaagaagaagagagaagggagaaggaagaaaggatagaggagagaggaggaggaacagcaggaggaggagcagcagcaggaggcgtaggaaaaaaagcct

SEQ ID NO: 409825 - DNA, 534 bp, Homo sapiens
agtgtcacaaagaaatagcaactgaacataaatttaattttctcagcaaggccatttttttactttctgcagaaagggtacactmgccagcacttctgccatgagagtacactgaacaaaggagacagggacatttataacctgaaacattcaccctactgctgttaccagtttccattggctggaatgggacctcacattctgtatttgtcccaattggctagcaacttagaacttttcaaaagaggcaaaggcagaggagaacaaaggaaggaggaagtaaattgtggaatgctcagaaaggtaaaaacacctccgaataaagaagaggaataggctacgacttaatgcttgctttgaccagtataagtatgccagggaaaatatttaggctaaattgtgggagctaagaacacaaagtacattgatttctttattacagctagcagatatctaagaatgttagcacaggtctttgaataaattttgcttctaagagaagttactatttattcttaattagatggggaggaa

SEQ ID NO: 409826 - DNA, 553 bp, Homo sapiens
ttatgtgtcaccataaatacatctttatggccacattgtatgaacacaytactagtgaacgattttaaccctctactttgggtttcttagaaaatactgctgccatgagtgctactgtactcatctctctctccctctccccacctcctgtttttttttctggcttgagatagggtctggctccaccactcaggctggagtgcagtggcataagcatggcccactccagcctcaacctcccagtctcaagggatcctcctgtctcagcctcctgagtagctgggactacaggcacatgctgccactcctagctttttttttttttctttttttttttctgtagagacaggctctcactttgttgcccaggctggtctcgaactcttgggctcaagcaatcctcttgccttggcctcccaaagtgctaggattacaggcatgagccaacgtgcccagctgtacttgtctcttgatgcacaagaacacacattttctaggatctacctaaatatggacatgctgggtcatgggggatatgtatacattcgacctt

SEQ ID NO: 409827 - DNA, 553 bp, Homo sapiens
ttatgtgtcaccataaatacatctttatggccacattgtatgaacacactactagtgaacgattttaaccctctactttgggtttcttagaaaatactgctgccatgagtgctactgtactcatctctctctccctctccccacctcctgtttttttttctggcttgagatagggtctggctccaccactcaggctggagtgcagtggcataagcatggcccactccagcctcaacctcccagtctcaagggatcctcctgtctcagcctcctgagtagctgggactacaggcacatgctgccactcctagctttttttttttttctttttttttttctgtagagacaggctctcactttgttgcccaggctggtctcgaactcttgggctcaagcaatcctcttgccttggcctcccaaagtgcwaggattacaggcatgagccaacgtgcccagctgtacttgtctcttgatgcacaagaacacacattttctaggatctacctaaatatggacatgctgggtcatgggggatatgtatacattcgacctt

SEQ ID NO: 409828 - DNA, 576 bp, Homo sapiens
ggacgtcatcactgtgtcttaacaagtaaaaagctgaacaaattgaaaaatcaacaactgttcttagatccatcagagaagtgaggtcacagggcaaacctgctgtccccataattggagggaaaaacaggcaggcacagagaatcacaacttaacaggagcagaaacctccacagagaccagcgctaacacagggaaactgaactgtaattgacaaagtgctggaggctcagtgtggacaagtctgacacataaaaattccagacagacccagtcattaggggccctacacttttgtgagttttacctactggagctctgccagattctcacagtaagtatacagggggaaatcccttgtgcttccggtaaggggagggaaacaggaaccatttgacatgtgtcagagcattctgttgataacaaggtctgctcycaggagaaacgatttaaccagaacctaacttgcttggttttatcagagcctaactaaccaagtggaagagaaatacccaactccagccagcaccggccttccatgtaagaaaagggaaatagccaactgcagcacactct

SEQ ID NO: 409829 - DNA, 429 bp, Homo sapiens
tatgtttatgttaatgtatkttttaatgttaatgaacatatatctcattcagaaaagggctaagaaaacaatttctaagcagaagtactgaaatgaattgtacaaacatcacataataatttgcatttttaaagtatcatggtaaaaatgcctatgcctaaggattcatttgcacaaacacagattccaaatataccaatgaaaaagctgagtttttgatcacagcaatgcatcattgtttattttatttagtctcagctagcctgaaaattaccattttacccagtggattattcacccattgtgtggtagaaaaagacaaatgttgtcaccaaacaagatgatacagtatttccttttattcataaaatcaccttgaaaaacagaagtgattcatgaataaaaaaatctatagcagcactggagaca

SEQ ID NO: 409830 - DNA, 613 bp, Homo sapiens
ttatgttattttataacaatataaatttaggtgtctttctattcagaaaaaatgccacttgatttactttaaattgtgtaagacaaaaactgctttgtcaaaaataatatttaaaatgaaatatgttttctttggggactggatgcatgttaaaaatacatattaatacataactaaatgttatgcatcaaaaagaccaaaacgcctttcataaccttgcaattttagcatatgctttataaacttaactggtttgtatttttaggctattttgaagatctttccataaataaaatatttcttaggagtacagtgcttgttttccaatacttggatgatgtattattgtttttctcattgtgtgtttttatrtttttatgtatgtattatttttttctcaagttttttccttgaagaactatttaatagtgtagcttctggatctggtgaataccagtttttgtattacaatcatgaacaaagcagaactgcctgcataatactatgactaaatggatgagattgatttattccagtaactaacaatatcaaaaggcgagtaaacttttccatgggggtacaatacataaccaattcataagaatttcttcaa

SEQ ID NO: 409831 - DNA, 613 bp, Homo sapiens
ttatgttattttataacaatataaatttaggtgtctttctattcagaaaaaatgccacttgatttactttaaattgtgtaagacaaaaactgctttgtcaaaaataatatttaaaatgaaatatgttttctttggggactggatgcatgttaaaaatacatattaatacataactaaatgttatgcatcaaaaagaccaaaacgcctttcataaccttgcaattttagcatatgctttataaacttaactggtttgtatttttaggctattttgaagatctttccataaataaaatatttcttaggagtacagtgcttgttttccaatacttggatgatgtattattgtttttctcattgtgtgtttttatatttttatgtatgtattatktttttctcaagttttttccttgaagaactatttaatagtgtagcttctggatctggtgaataccagtttttgtattacaatcatgaacaaagcagaactgcctgcataatactatgactaaatggatgagattgatttattccagtaactaacaatatcaaaaggcgagtaaacttttccatgggggtacaatacataaccaattcataagaatttcttcaa

SEQ ID NO: 409832 - DNA, 618 bp, Homo sapiens
ttatttttctgaaacagattttagggagcaggtattttgcttgagtcaagaaagctttgctctcctttttagttaacactagagcctattaccttcttgttttcttacatttttctgcaatttggatcatattatagactaaagtacagtatctcctcttggttgttttgttgttattgttttatttagtgagtccccaaaatatcttaagtgccaaagggagagagaccaccctagcatttttttttataattatgcaagattggtgtgtttgtgcctctggtacatttaaaactaaatggaggcygggtgcggtggctcacacctgtaatcccagcactttgggaggccaaggcaggcggatcacctgaggtcaggagttcaagaccagcctgcccgacatggcgaagccctgtctctactaaaaaaatacaaaaattagctgggcatggtggcatacacctgtaatcccagctacttgggaggctgaggcagaaaaatcacttgaacctgggaggtggaggttgcagtgagccaagatcacgccattgtactccagcctgggcaacagagtgagactctgaatcaaaaaaagaaaaaaaagaaaaaagaaaacct

SEQ ID NO: 409833 - DNA, 309 bp, Homo sapiens
cagaatataaatatcgatgtaattcatttcttactacatcaggcttccctcaaaagggttaaactgcagccctcaacttggctaagtgcagagaatgaggattgrctgagatgccatctttttagtccttggacaacgagtgtagtggagtttggtatggctgtcgcctcttctgagtagcctctacagttgactctactatatatttctatagaatatcatttttcatatgtgtcatgattgtggaaaaaaatgagagtgcagtattattatataatgccacctgtagtgatgatagttttttttcat

SEQ ID NO: 409834 - DNA, 492 bp, Homo sapiens
tattgctcacagttctggaggctaggaagtccaagatccaggtaccagcagattcagtgtctggtgagggctcattcctttcttcaaatttagcatcttctagctgtgtcctcatatagcagaaaggcaaacaggctccctcaatcttccttcttaagaatattaatcctattcatgamagcagagccctcatgacctaatcacctcctaaaggtcccacctgtcaataccattgcttttggggtatatttttcaatgtatgaatctgggggagacactgacatttagactatagcaaagactatgaaagaaattattttatgacagtgtgagttctgcttgcacatattttaaaacatgaaataattaagtctttcaatgaaagatcctaaataattaacatgattgctacagaaaaagttacacgttttcttggataagctgctgatatggaagaagagatttgaggtacatcctggcaaattttttaat

SEQ ID NO: 409835 - DNA, 529 bp, Homo sapiens
aaaacaaaattttagtttttcagacttactaacaacaacaacaaaaagccacacatgactaaaaaagggaagagactattggaagcagacatttaattggctmccccaaagggatttagatttacaacctaaactcaccatctttcatcccagcagccatttttctgctgataataaaattgttggcctgtctggtcttccagttaactgttccatttatgccatcagcacagcttaataaaaaagcttttcagaataaaacaaatgtacaaaaaaatgaaattaatgtcatgattttttaaaatgactgtcacagatcacctacaattaactgggatcagattccttccagcccagctaactgtttaattctagtcagcaaatatttgttgtatgtcaatacaaggagtatgtggggatacaagacaaccaaggcatagttcctgcccctgaaggagcttacaatctatggggattggcaattcatgtacatatacatatacatacatacacatatatacacacacga

SEQ ID NO: 409836 - DNA, 550 bp, Homo sapiens
acccatgcattgcacagttccgtggaaaaagcatggtttcccaggctgggtagcatgctcactcaccacctcccttagctgggggcgggggctcctgccctgtgcggctctcaagtgagctgcagcaccacactactactcttccttcctctctgtgagtcacacccaccagccatctattcagtcctaatgacagaaccaggataccttggttgctggtacaggattcgcacacagttttggatcttttcaatgggagcctctgatcactgctgcttctagttggccaccttgtccctgtcccctgaaattttttatatgacccatgatatggtctactatttggacaatgttccatgttcattgactyatcttcctatatctctccttatctcagatattattttttgaggtctacattatatattatagccactacaaatttcttttgactattgtttacatagtatattttaaaaattattttaaactgtctatgggggagagcatgatgaactgcaaaggaccatgaggaaatttgggagatgat

SEQ ID NO: 409837 - DNA, 550 bp, Homo sapiens
acccatgcattgcacagttccgtggaaaaagcatggtttcccaggctgggtagcatgctcactcaccacctcccttagctgggggcgggggctcctgccctgtgcggctctcaagtgagctgcagcaccacactactactcttccttcctctctgtgagtcacacccaccagccatctattcagtcctaatgacagaaccaggataccttggttgctggtacaggattcgcacacagttttggatcttttcaatgggagcctctgatcactgctgcttctagttggccaccttgtccctgtcccctgaaattttttatatgacccatgatatggtctactatttggacaatgttccatgttcattgactcatcttcctatatctctccttatctcagatattattttttgaggtctacattatatattatagccactacaaatttcttttgactattgtttacatagtatattttaaaaattattttaaactgtctatggkggagagcatgatgaactgcaaaggaccatgaggaaatttgggagatgat

SEQ ID NO: 409838 - DNA, 582 bp, Homo sapiens
gccctgagttttgtcttcctcagcatttgtacgaatgactttgatgaagatctaagaggcttgctttaaaatccatggattaattgaaaagggatagctgttagaaataggtaacaatttagagttaacatggtttttaagtgggctgcaatgctgtgctgaaagcaaaaaaatattttatagtagtaaatgcatcataattcattggtatggaagtatggagatgactttgtatggtggcagttctttaggaaaatgaaggttawtatgaaccagtggcatgatatggttgcaaaagaaaaaaaaattagttaggttctggtagtagtatagtgtccatatgtcacaaaaattaatagtaccctgctctaatcaaccacatctgtagtattgtgtccatttctggctgtcacatttaaagagagattttgacaaattagacaacttccagagcagtccatggggatgttgaagggtctggcaatcctgtcatgggaggtatcctcacagggtctggaagtgtttaacttgagaagactaaacagtcaacatgaactctctgatgtttgcttcggaaagtag

SEQ ID NO: 409839 - DNA, 590 bp, Homo sapiens
ccagaacaattatatagccctcatagtcaacatatgatgcatgaaatggggtatgtccatggtatgggactaggaaaaaatttgcaaggtttgaaggaactgcttcaagtggaaagacaaaagttcccactgagatttaggatatcatttttgatggtggccattgttaagcctccagaacctatacctttaaaatggttaacagataagccaatttggatagaacaatggccactgagtaaagagaaactggaggctttagaggacttagttactgaacaattagaaaaagaacacatagctccaacattttccctttggaattctccagttttcataattaagaaaaaatcaggtaaatggagaatgttaactgacttaagaaccattaattcaattatacaacctatggggacattgcwgccagcactgccttctcctgctatgattccaaaaaattggcctttaatagtcataaatttaaaagagtgtttctttactatccccttagctgagcaagactgtgaatggtttgcatttacaattcctgtggtaaacaacctgcaacctgctaagcgttttcactggga

SEQ ID NO: 409840 - DNA, 578 bp, Homo sapiens
aagcacagaaatatcaagacagatccaagaaatgctgtcattgaatgctaacctgcggcggcaaagcccaactgaggaagcggatgaggctcccactgcactcctgcctgagatcctatcatggagctggggacaggggatggtgccaagggggaagtctgcacagctctccccaggctgggcctgtttctggggaaaagaacttgcagccactcaaaacacagtttagaagaatgaaaatgttcctcaccggaggcaagactcagccattcataggccctgtggcccccagaggcaggaaagcacgggggagcaataaccatgtgaaatcaagtcccaccccagagccagtgaggcggtttactgaacttcttgcatctttaatgctctgtgaggcacagggaasgtgaccgctacccttcttgcccaatgctttggaacaaggaagaacaaggaaggaagcgcagggaggaaaagacagctgtctcgttagccttcagattcaccaaaggcaaggactcactcaagagcctcccaagttgcaaggacagcaaatcagcaaggaggccagaaagcaa

SEQ ID NO: 409841 - DNA, 578 bp, Homo sapiens
aagcacagaaatatcaagacagatccaagaaatgctgtcattgaatgctaacctgcggcggcaaagcccaactgaggaagcggatgaggctcccactgcactcctgcctgagatcctatcatggagctggggacaggggatggtgccaagggggaagtctgcacagctctccccaggctgggcctgtttctggggaaaagaacttgcagccactcaaaacacagtttagaagaatgaaaatgttcctcaccggaggcaagactcagccattcataggccctgtggcccccagaggcaggaaagcacgggggagcaataaccatgtgaaatcaagtcccaccccagagccagtgaggcggtttactgaacttcttgcatctttaatgctctgtgaggcacagggaacstgaccgctacccttcttgcccaatgctttggaacaaggaagaacaaggaaggaagcgcagggaggaaaagacagctgtctcgttagccttcagattcaccaaaggcaaggactcactcaagagcctcccaagttgcaaggacagcaaatcagcaaggaggccagaaagcaa

SEQ ID NO: 409842 - DNA, 555 bp, Homo sapiens
ctgcccaggacaggctcagcttacacatgttgttccagcataattcaaattacattccagttcagacaacaaacaatagcattgccctacctatagcctttacagagtcttttaaaatttaagattggagaaaagaaattagaagtggtgggaaggtttaatatttcatattttggtggtatcctcagcaaaataatgaagggattgaagttattccaacttcctcattgtaactttcctgccccagtcactgccagccaacagctatcaaayaccttcccctcccaccactccataacgtctatgctcaaaactttagtacaatcaggtttttattttttctttctacacaatgtattattcttttggaatatccaaggggacaatgtaacagataagttattcctggctcctgtgcacaggggagaagatccttttctctcagcttcctagctttcttttgtgagcaacaccatcttgggtggcctattggagttgcaacaccacagccctgcttttgtccgatcactggagtaacccaacagtgggaatatc

SEQ ID NO: 409843 - DNA, 535 bp, Homo sapiens
catctcaaaataaaaaaaaataaaataaacagttatgtaatcctcttcattattttctttaaaaatactgtcttcttttatcttcttgttaaccaaaaagtgacagagactggagccttgattaatagtttcctttagccaaagtttgagaatacatctgggaagaacaccagccacaggagcctctgtgacctgtgctttttctaaagagggttttgggaacttcagaatttaaaggagaaagagcaagcaggagagagaagaaggagagtgtgtaggtagtgaggcaaatggtcacattcttgtgaggctctgagaagtgctcagcaaatctgcattttgcatgtgaaaagagggcatagaggaaaaagtcagttatatatttctattgtgataaagaaatctccattttacataagataatgcaaacatrtgaaaagagagaatagaggcaaagtcgattacgcattcaacttggattgggtggagggataatttcttggtcttgtccttgtcctgtgcctgccaaggtaaa

SEQ ID NO: 409844 - DNA, 547 bp, Homo sapiens
agaacacattctgacaagtaaagattccagtgtcatctgataactatcaacaacttcattagctcacctaaacaaagagcctttcttatttttttagaaacaaaactcttatggaaacgattatgttttcttctttcctctaaaacacttacttggctaagatgatttttattctaagatgaagatttacctgccctacaaacttcaggaggtggtgtgactggttggaatctataccaacagtgatagactaatcgttgcttggaattcaaatgcagccagcactctgtcctaactaatgaaattggtgttgttctgcaaaggaaaataattgaaggcatgttctgccacttaattccacagaaagtaacatcttctaacatgtagggacttgcctactgagagctgcactgactgtgtcaaggaagatactatgcattggaagaacacccaagcamcacttgcctctcccctactcatttcctgtattaaagcattcatcatgtttttaaagctgtgctgtcagtattgtgctcccagacattat

SEQ ID NO: 409845 - DNA, 526 bp, Homo sapiens
agaccagcctgaccaacatagtgaagccccctttctactaaaaatacaaataattcagctcaggctatgcgtgcgcacacgcctgctaatctcagctacccaggaggctgaggcaggggaattgcttgaacctgggaggtggaggctgcagtgagccaagatcatgccactgaactccagcctgagtgacagagtgagactgcatctagagaataaaattatgcctttttgtagcacatatattttgtaacatgcaactgaagccmgtattatattattagttttcatttaatgttttcagcccatctcccctgatatttctggagacaggaaatatgtttcttacacctcttgcattccatcctcaactcccaactgtctaaatgcaatgaacatttaataaaaaaaacagttgattggtcaattgattggacaacaaggctgaaactactcatttcttttcttttcctatttcttcctttattttccctttctgaataatttagccctagagccattaggtggg

SEQ ID NO: 409846 - DNA, 500 bp, Homo sapiens
ttccatgtttacatattgtaagaatcaatattgttaaaactgtccacactacccaaagcaatgtacagattcaatgcaatccctcaaaataccaattacattcttcaaagaaatagaggaaaaaattctaacatttctatagaaccacaaaatacccagaatagccaaagctatcttcagcaaaaagaacaaaactggagaaatcttattacctgacttcaaattatactacaggggtataataaccaaaacagtatggtgtttgtataaaaacagayacattgaccaatgaaatagaatagagcacccagaaacaagtccacacacctggagtgaactcatttttgacaatgttttcaagaacatacactggggaaaagacggtctcctctggtgctgggaaagctggatatcaatatgcagaagaatgaaactagacccctatatctcaccagacacaaaaatcaaatcaaggtggatgaaagactgaaatctggcca

SEQ ID NO: 409847 - DNA, 635 bp, Homo sapiens
ccactccctactttttagcttacaatgctatttaagctttactcattcagtccttattttagtctcatatattgtgggcctccagcacatatgcatgtaaaattttgtatggattttcactgtaaccacccaagrgattcaccttgccccctgcctcaacagagcccattcatcaagacaggggaattgtaatagagaatgagttaatacatgctgccaacaaaaagagccaaactctgtacaatacttgaagagatttattctgggccaaatatgagtgaccatggcccatgacacagccttcaggaggtcttaagaacatgtacccaaggtggtcagggtgcagcttggttttattcttttagggaggcatgagatatcaaatacatttaagaaatacattggtttggtccacaaaggcaggaaatgtgatttttgcagaattctttgtgatagagcagactccagagaaattgcaacaacttaaagtctttcagatctggccctaaggagctataggagagaaaaaaaatctgtcagatcaccattgcctacctctactccaactggagctgtttcaaaaccaacatgtagaaatctttttgtctggctgccctgtgaactcagaaactagt

SEQ ID NO: 409848 - DNA, 557 bp, Homo sapiens
tgtctttctggggtgagtatcagtttctgcaggagggctgaatgtgagaaagaataaagagagaaggaagcgaacaagcacagcttaaacatcgcctatttctattgagttttaagaacgctgtgattttgtttgtcatgcaatccattcatcaggccaggcagacacagaacttgggtgtgagtgacgataatgagctgatataattttcacaccctcatcactgagatctctcccatcaggaatgggtcagggagctcacaggtggcagcaactgctattacaggcctcatctctaccagctcctggggcctgccctcctcccattagaaaatcctccacttgtcaaaaaggaagccatttgctttgaactccaattccacccccaagaggctgggaccatcttaytggagtccttgatgctgtgtgacctgcagtgaccactgccccatcattgctggctgaggtggttggggtccatctggctatctgggcagctgttctcttctctcctttctctcctgtttccagacatgcagtatttccagagagaaggg

SEQ ID NO: 409849 - DNA, 576 bp, Homo sapiens
atgaattttgtgatgtgttttctgtacataaagataaaagaccatttttaggcagctcaaattcagtggactaccccttggaaagggactgtgatcttattttatacctgtccccaccagattcattctttaagtttcttattaaaactcatgttattttcatacctccttgagttttccactggtgaaggttggagacagcaatgatcgtaatctcttccattcttcatcctcagctatagagatggcacttttcataaatcccactggaccaaaaggctagagttcaaagcagaaacattttgtcctacatcagttgtggaggtctccatggttgtagaaaatgtgttaaacaggaacacttattcaacaactatttagtgactgtctactgggtgatgggccctatgctagatgctcaatagagatttatcccagatgcccagtgtcytgggatgtatttgtgtggggcggggcgggggggtggcggcagtgttcaggagaccctgatgtcgtctccagcctctatatcccagtcttcttttacatgcaaattatccacgtggtagagaatgt

SEQ ID NO: 409850 - DNA, 589 bp, Homo sapiens
gatagcaaaggcatccacgtaggatccgtatgaagtaagaaaatattcctcagctctcagggtagaactccaaagagatattcatgggtcctggccccacagtggaggtcactcaaaaggcaaacaggttggcatctcatctgcttcaagcctggacacagggacatcaaatgtgtcactgtgtgcgtggtctgccatgttgtggggcggtcactacagactygggcagccaggcagacaatgccttagccttagacaatgctggtgcagcccaggagtcagaaactgtagtgtagaccatgccctccttaggccaacacaattacgtgcaatagatgactggcttttctgttagcctcttcattggaaccaaaagtggtattactctaccagaggggagctagaaagaaactaaacagtttgcccagcacagcctctgccttgacatggaaccatgtgagtctagacactcacctagatctttccttgggggacagtgctgctgacagattaactcaatagtttgtcctgacctgagagatcacgtaacttctagaaagtgtagaagcagagattagtgtcattgatt

SEQ ID NO: 409851 - DNA, 546 bp, Homo sapiens
caacaaacgtctatatcctcattcatatcgatattctcattctagtygcctgattgagtttgagagtcatgctcaacttagaagagggcgggataagtaaggctaccatacgcctggagatggagagctaaaaatatttctagaagcatagtaattactacttcaatcaccaaatgatttcaggacaggttaggttttgccaccacataatcggaaaaaaaaaaaaaaaaacctttccatttttagaacgttttatatttggctatcatgtctaatggactctagacctatgatacttcacagatgagaaacagaagtcaggcatctttgcttacaaaaagggctataaagggaggtgtaaaaagtacttggtagagtaagaagcaagtattttacctcactgtaaaaaatcatacttagctccaggctgccactaacacaaacaccaaacatctggccattcttacatttttaacaaattggccgtcatcaaaagtagggaagaggggaaatagtacaaacatcggattttttttttttttaagt

SEQ ID NO: 409852 - DNA, 569 bp, Homo sapiens
gaattgattgatttcttctctctggccgatgctttggttgtcatatctgaaaactcttcaccaagcaccaggtacagaagattttctcttctccttttttaccacttacgagtttcatactttacatttaaatgtacaatccattttgagttaatttttgtgtaagttgtgagatttacgttgagatacgcttttttttgggacagaatcttgctctgtcacccaggctggagtacagtggcgtgatctgggctcactgcaacctccacctcctgagttcaagtgatttctggctaatttttgtatttttagtagagacaggattttcaccatgttggccaggctgatctggagctcctgacctcaagcgatctacctacctcagcctcccaaagtgtgagatacactttgtattttattttttaaattttttgcctgtggatgtccaattgctccagcaccatttgttgaaaagactatccttcctccattgaaytgcctttgcacctttgtcaaaaatcagttggccgtactctgtgggtctccttctgggttctctattctgttcc

SEQ ID NO: 409853 - DNA, 632 bp, Homo sapiens
ggtatgaggatgccctcatgcctcctcacttctacgctccactcactgtatttctccaaagattcagaaccttggtaaaaacaaggctcagaaaatataccctaggtcaacttctcaagacctccaaaaggaacagggaggtctacctgaattttagaagcttgtacaactggggcactatrcaagcttttcagaaaggtcttatacccacatcttcagtactcaataatatgttacctgctggttcctctataatgcctatatcctctgaacaccactgtcacatagagcttcctacaaggatggaaatgtttcatatctgtgcaatacaaaagggtagtcagtagctatgtgtggctcctgacaacttgaaatttggctagtgtgactgagaaactgaatcttaaattttatttcattttaattaatttaaatttaaatagccaaatgtaactagtaactatagaagagtacagggaagctaggaataccataaaggactccaaattcatggagctttattattttatttgcagtgatgtcaggcttttgaaatcaaattttcacttcaaaagtaaacacatttctttcctagaacattttcctttattaagtgccatggggttgttagc

SEQ ID NO: 409854 - DNA, 623 bp, Homo sapiens
cgttactatataaagtttaatcaagtgatgacaagttacttgaaattagtcatttaatcagcagctctgggtaatgacaatcagactttgttttgttgtttcatgggagggatcactttttgaagctggaaaataccagaaacttgagtggggggcaggcagccacttaggcccccaggaagaaattacaagaatgcttaatgaagcattatgagtttcctgcttgtgactaaatcacagraaaactggatttgtctctgatttgggctgtatttagtctgtgaatattgtatttgttcacccagtgtttttaacatccttggattcgttcccaatatttaaaaattggggattttaatttaaaaggtcagtattaatatcttccttaaatcacagtgcacacattctgaattgaaacagtaaagtcaggcagttgggcaacagggagcctgcattcttccctgacagcagtgtctcttcctagtcagtccctactgatgagtgatattgtgaacttagccatttatatgatctgccacaccccatgagacagttgtatttgcatccatgatctaagaatttgttttcagttcattaaccatttgaaaaacttaattcttagg

SEQ ID NO: 409855 - DNA, 580 bp, Homo sapiens
tgcatcccacccccaccccagcacgcccaggtgactccaatatacactaaagtttatgagctcctgccttacagatttcatggtgtggcttgttatatagctcactttaaataatgtaaaggtctcaactttcaagtttctcctttgttcttttcaatatgtcctcagtgctaatcacaagcaaaggtgagctttcccacttgaattggtgcccatctgtggggtgatccgagtgaactgaaggggaagaactgtagatggaacttctaccagacaaaggaaagcttccgcttgctcagtatgcattctttggagacagctatcttctccaaaaataataaatgactgagacatgacaaaattcaggattcccaggacattttttttaagtgaaagaggcaaagccttttcccagctcagcagttaatttagcacattaaatgaccgtgtgtcctaatggcagtctggccatgccctggatggctgatcagaagttgtgagcagatgttggaaaattcactgtgactgaaacaatctaayaaataaacgggttggaggatgggatggccaaggtagtcag

SEQ ID NO: 409856 - DNA, 567 bp, Homo sapiens
tatttttaaagtaatgaaaggcaaattagatttctttctcattagtcaccaaccattcaggagcagtaatgtcactatcattgattctggtgtttcgatcacaactcttctgaaaaagtgcccgagttatagtcattgggcatttggggaatgtctagccacctcttacccccgccaacctggctggacttcaagattaaagcagactgattagcaaggaatccctattccgggccttaaaatgaaatccctgggagttgccagacataaagtgatttgatgccaaaacatccaggtgggggaaaaaataataaattatagggatattttatatrtacaattccaaatatggttacgtgtagtttggaaacatctgggtgatgaattggaatttcacttttgcttcagctcttcggcataacgtaaacacagcctgcaagtccctagagataaatgggagagttggaaactgcaaaaggtagatagagacaaaatcagattttaaaactgcgtcccgtgctgcttgccaagtgggaaaaaattctaaaaattcaaagcagtccagag

SEQ ID NO: 409857 - DNA, 345 bp, Homo sapiens
cagcaactgtactatcttagtcgaagcccctttggttgctggtgatrgaaacgctttcaaagttgctcaagcaaaacaagggacttttattaaaaagcttccagggaaaatcactggtaactcaacagagggaagtacaactgggtcttgtcaagaaataatgatcaggtacctgaaatttctccatgctggagacgaaggatgaaggagaccatcagagttcccagtcccaggtgggcttgcattctagtgggaggaaacagaccatgaaaacacagtgaagtaaataagtacgtcaagtgccaatcaatggttgctatgaagaggataaagtaagtatgtatt

SEQ ID NO: 409858 - DNA, 345 bp, Homo sapiens
cagcaactgtactatcttagtcgaagcccctttggttgctggtgatggaaacgctttcaaagttgctcaagcaaaacaagggacttttattaaaaagcttccagggaaaatcactggtaactcaacagagggaagtacaactgggtcttgtcaagaaataatgatcaggtacctgaaatttctccatgctggagacsaaggatgaaggagaccatcagagttcccagtcccaggtgggcttgcattctagtgggaggaaacagaccatgaaaacacagtgaagtaaataagtacgtcaagtgccaatcaatggttgctatgaagaggataaagtaagtatgtatt

SEQ ID NO: 409859 - DNA, 617 bp, Homo sapiens
gcccctttgtgaggtgattagctcatgattagtgcccttataaaagggcyggaggaacctcttcatctcttccaccacatgaggaagcagcaacgaggtgccttctttcaagaagagggcgatccccatcagacactgaatctgttgggtctcaatcttggatttcctagcctccaaaactgtgagtgatacatttttgctgtgtacaaattagtctaagatattttgttataacagcgctaacatactaagccaccttctatatggaattttgttctcatctgaattttcttcccatgttcttattgtctagtaacactccgttaaaaaaaattaatcagttcaagtacaaggactttctataacatttacataagtgaaatgtgagttgcattattgtgtttagttggttttctctccccgctttactacgatccagtcatttcaacagtgtattttaagatacgtggtgccaaaagtgcataaacttccagaaactaacatctttgaattcccactattcaaaccgtggtctgagggtcagggccattccatttcctgggagcctgtggtgattgctgaattacaagtccaggcaaactcaatcaaaatctgta

SEQ ID NO: 409860 - DNA, 593 bp, Homo sapiens
gtagtggttttaatttgttctgtgatcatgtgacattgctaaactgctgtatattttttctgatggatgaagatgtcctgatgttttcatcatgtgtcatcggggcaggttcaggacaggctccctacaacccctcagcctctaggccctttaaaatgaatattgaaagcaggcaagggaaaaaggaatcaaccaaaccaaggttgatctgcctggcaggcgacgggggtggaggtgtgtgtaccttgtattctttaatgattttattccattcagtcactacttaccaagcacctattatatagggagcactggatacagatagtaaggtggtgtggcctcttcccgtaatacacaacctagtagggtaagaccaggatgcctttaacttccctgccaggcagagtttctaaaagcaaggggtgagggattggggaaggtgacagtggaaagggttgttggcaaggacattccaggccaagggagccatggaagacrttgcctagattgtaggataaggaagaaaggatagtggaaggatatattgctcttaaaattaatctgtctgtttaacacgaaatagggtgaccaac

SEQ ID NO: 409861 - DNA, 592 bp, Homo sapiens
gaaactaacatctttgaattcccactattcaaaccgtggtctgagggtcagggccattccatttcctgggagcctgtggtgattgctgaattacaagtccaggcaaactcaatcaaaatctgtaggacaacaagatccccaggtgacttatttgagaaatcaagcttagagcaacagtgctctaaaccaagtattagatatagaactgtacatggatctcagtagaaactgatacagtgattaaaaaaaacactttcctacaagtttctctgatgtcttgtatctgaagatgcagaacatgaaattaaaytttcttgatgaccattattaggattgtaaacatctataattgttcagctttttcttccaaacttttctttcttaatggttgattagagaaaattttgcatttattatatatgccttgggtgcctccagccccctgcagtatttatcacctgaaatgggcaaataatctgtctcaaaaaaaaactgtggaaaaatctcgaaaatgtagtctgcaggtgcctttaagtttggaggatccctttgcaaaataaatatttaaatattttatgaacccacctgacag

SEQ ID NO: 409862 - DNA, 525 bp, Homo sapiens
gacacatctcttaaataaatctctctttcaagagctgacctagaattcagataaaatacttcatgttgattaaatctaaataccccttgctatggtctgaatgcatgtgtccccacaaaattcatatgacaaaatgtgaatccccaaggtgacgatataaggaggtagggtctttaggagttgatgaggttaggaaggcagaacccacgtgaatgggattactgcccttatttaaaaggccccagagagatatcgccccatttctgtcatgtgaggctacagtgaaaagacatctttctaggaagcaggccttcaccagaccccaagtcrtctggtaccttgatcttagatttcccagcctgcataactgtgagaaataaatatctgctgtttgtaagtcacccagttctatggtatacttttaaagcagtttgaataagaaacttcttattgattaaaaatcatggagtcaaacctaactgcaagaatgattgaaatgggaacatgaccaccatagataaaatt

SEQ ID NO: 409863 - DNA, 525 bp, Homo sapiens
gacacatctcttaaataaatctctctttcaagagctgacctagaattcagataaaatacttcatgttgattaaatctaaataccccttgctatggtctgaatgcatgtgtccccacaaaattcatatgacaaaatgtgaatccccaaggtgacgatataaggaggtagggtctttaggagttgatgaggttaggaaggcagaacccacgtgaatgggattactgcccttatttaaaaggccccagagagatatcgccccatttctgtcatgtgaggctacagtgaaaagacatctttctaggaagcaggccttcaccagaccccaagtcakctggtaccttgatcttagatttcccagcctgcataactgtgagaaataaatatctgctgtttgtaagtcacccagttctatggtatacttttaaagcagtttgaataagaaacttcttattgattaaaaatcatggagtcaaacctaactgcaagaatgattgaaatgggaacatgaccaccatagataaaatt

SEQ ID NO: 409864 - DNA, 541 bp, Homo sapiens
aggacagcctagttattttttcacatttgacatactctcaggagtacatgaattrcacgtggcaaaattgccttaaataggaaaagtttcttctcaacccatctaacaaaatgaagaagattaaacaattatcaggataattaatgcactcaacgtacttcttaaaaaagaaaatgtatcaaggtaatttgaggaaaagtggtgattttacctaattttcagaggtaagagtagctacaagacttagaatgtagttcttgcatgtaaattataattctgggcaccaatcccaagcctaatgtaaaactatctgactttatggtctcttcactcttcactcacttgccactaataagaaaattggctcttgggtttagctataatacaaaaatgtcatacagatcctagaatggtggcaatctccagactaataactaaaatgagaaaaagaacaggacccttttggatagttcaaaaaatatgcttcagcatgtaagataagacttcagagatagactaacatctaaggaaattaaagaag

SEQ ID NO: 409865 - DNA, 541 bp, Homo sapiens
aggacagcctagttattttttcacatttgacatactctcaggagtacatgaattacacgtggcaaaattgccttaaataggaaaagtttcttctcaacccatctaacaaaatgaagaagattaaacaattatcaggataattaatgcactcaaygtacttcttaaaaaagaaaatgtatcaaggtaatttgaggaaaagtggtgattttacctaattttcagaggtaagagtagctacaagacttagaatgtagttcttgcatgtaaattataattctgggcaccaatcccaagcctaatgtaaaactatctgactttatggtctcttcactcttcactcacttgccactaataagaaaattggctcttgggtttagctataatacaaaaatgtcatacagatcctagaatggtggcaatctccagactaataactaaaatgagaaaaagaacaggacccttttggatagttcaaaaaatatgcttcagcatgtaagataagacttcagagatagactaacatctaaggaaattaaagaag

SEQ ID NO: 409866 - DNA, 541 bp, Homo sapiens
aggacagcctagttattttttcacatttgacatactctcaggagtacatgaattacacgtggcaaaattgccttaaataggaaaagtttcttctcaacccatctaacaaaatgaagaagattaaacaattatcaggataattaatgcactcaacgtacttcttaaaaaagaaaatgtatcaaggtaatttgaggaaaagtggtgattttacctaattttcagaggtaagagtagctrcaagacttagaatgtagttcttgcatgtaaattataattctgggcaccaatcccaagcctaatgtaaaactatctgactttatggtctcttcactcttcactcacttgccactaataagaaaattggctcttgggtttagctataatacaaaaatgtcatacagatcctagaatggtggcaatctccagactaataactaaaatgagaaaaagaacaggacccttttggatagttcaaaaaatatgcttcagcatgtaagataagacttcagagatagactaacatctaaggaaattaaagaag

SEQ ID NO: 409867 - DNA, 541 bp, Homo sapiens
aggacagcctagttattttttcacatttgacatactctcaggagtacatgaattacacgtggcaaaattgccttaaataggaaaagtttcttctcaacccatctaacaaaatgaagaagattaaacaattatcaggataattaatgcactcaacgtacttcttaaaaaagaaaatgtatcaaggtaatttgaggaaaagtggtgattttacctaattttcagaggtaagagtagctacaagacttagaatgtagttcttgcatgtaarttataattctgggcaccaatcccaagcctaatgtaaaactatctgactttatggtctcttcactcttcactcacttgccactaataagaaaattggctcttgggtttagctataatacaaaaatgtcatacagatcctagaatggtggcaatctccagactaataactaaaatgagaaaaagaacaggacccttttggatagttcaaaaaatatgcttcagcatgtaagataagacttcagagatagactaacatctaaggaaattaaagaag

SEQ ID NO: 409868 - DNA, 520 bp, Homo sapiens
tgtgtcatttgcaaataaaagtttgaaaaggaaaggaaggtaggacaaacttctactttcatccatgaaaaaggtactagccacagagctatcgagtgacatgatctttaagagtagggaaacacatgaagcaagccctacattgacctggttttcttctttggaggtggagcttgaacacaacatggcagtcttctgaactgagaaagtagatggaattaaatagagagagagagagagagagagagagagaaaccagcagagacaaaaccatgtctgtcaggatcaaaaagggctgccagtaacttagctgtcatccagaacaaaatcracaccctataaatgaagaagaaataatctagattccctacagtatatattcacaatatctagcattgagttacaactagctggtatgtaaaaaagcaagaacaaccaatccatactcaaagaaaaaaggtataaataaaaacagactatgcaatgactcagatgttgaaattagtagacaaggacttta

SEQ ID NO: 409869 - DNA, 494 bp, Homo sapiens
gtacagaagtgagggaggaggcaaggtagagattatacaatgtgactcaagtggattaaagagtctaggaaaagcgtgaggaagattagaagtatgaaaaaatgctaagctcaatgaacagtatgtccaaggtggatcrctgattctttgagtcaggcagctagaggcagtgagctggaaagatagaaagtaaagatcagaaagtgggaggtataaaactgacattatggagggatttcaggtgcagataatattgcggtctaggatgcagcattatcttgtagaactttctgtgataatggaattgttctgagctgtcaaatatggtagtcactagccatctgcacctactgagcacttgaaatgtggctagtgcaattgagagactgaattcctaatttttaaacgttgtaatagtcacctgtgattattggctactatgctgggcagtgcaggctagggtctgactgcagaaatgagtcggtgagaccaga

SEQ ID NO: 409870 - DNA, 494 bp, Homo sapiens
gtacagaagtgagggaggaggcaaggtagagattatacaatgtgactcaagtggattaaagagtctaggaaaagcgtgaggaagattagaagtatgaaaaaatgctaagctcaatgaacagtatgtccaaggtggatcamtgattctttgagtcaggcagctagaggcagtgagctggaaagatagaaagtaaagatcagaaagtgggaggtataaaactgacattatggagggatttcaggtgcagataatattgcggtctaggatgcagcattatcttgtagaactttctgtgataatggaattgttctgagctgtcaaatatggtagtcactagccatctgcacctactgagcacttgaaatgtggctagtgcaattgagagactgaattcctaatttttaaacgttgtaatagtcacctgtgattattggctactatgctgggcagtgcaggctagggtctgactgcagaaatgagtcggtgagaccaga

SEQ ID NO: 409871 - DNA, 494 bp, Homo sapiens
gtacagaagtgagggaggaggcaaggtagagattatacaatgtgactcaagtggattaaagagtctaggaaaagcgtgaggaagattagaagtatgaaaaaatgctaagctcaatgaacagtatgtccaaggtggatcactgattctttgagtcaggcagctagaggcagtgagctggaaagatagaaagtaaagatcagaaagtgggaggtataaaactgacattatggagggatttcaggtgcagataatattgcrgtctaggatgcagcattatcttgtagaactttctgtgataatggaattgttctgagctgtcaaatatggtagtcactagccatctgcacctactgagcacttgaaatgtggctagtgcaattgagagactgaattcctaatttttaaacgttgtaatagtcacctgtgattattggctactatgctgggcagtgcaggctagggtctgactgcagaaatgagtcggtgagaccaga

SEQ ID NO: 409872 - DNA, 494 bp, Homo sapiens
gtacagaagtgagggaggaggcaaggtagagattatacaatgtgactcaagtggattaaagagtctaggaaaagcgtgaggaagattagaagtatgaaaaaatgctaagctcaatgaacagtatgtccaaggtggatcactgattctttgagtcaggcagctagaggcagtgagctggaaagatagaaagtaaagatcagaaagtgggaggtataaaactgacattatggagggatttcaggtgcagataatattgcggtctaggatgcagcattatcttgtagaactttctgtgataatggaattgttctgagctgtcaaatatggtagtcactagccatctgcacctactgagcacttgaaatgtggctagtgcaattgagagactgaattcctaatttttaaacgttgtaatagtcacctgtgattattggctactatgctgrgcagtgcaggctagggtctgactgcagaaatgagtcggtgagaccaga

SEQ ID NO: 409873 - DNA, 584 bp, Homo sapiens
agtggcccagtgctgagagataagaaacacactgggaagtaaagggcaaggcaggattactgaaaacgtctctaagacccgggacatataggaagcaggggtgtctggagtttgtatttactgcgttgggcctctagagctacacaggcagaacagcctctctaaagatttagggcccaaccaccgaggcatcagcaagacagttttatggagctgcaatgtggtcacaaaactgaactccaggctgggggaaaggagtcaatgttagacacagattcccttctctacaactgactcaaagaagaagaagactgaaagaattgtcaaaaatcaagagcatatgtttattatgagaatactgtargctgtgtgcagactatgtccttcctctgtggtgggatatttttatttttcttaagtaatttaataaataaaacatgacatattcagatacataaaataaacatctgttttgtgtgtctgcaagtcactgtgtggatatggacacagacgtgagaagccatgctgtagagggattaagagcataaactccgcagtcacatcactttggtgcaaaacctggc

SEQ ID NO: 409874 - DNA, 479 bp, Homo sapiens
ctgtgtgcagactatgtccttcctctgtggtgggatatttttatttttcttaagtaatttaataaataaaacatgacatattcagatacataaaataaacatctgttttgtgtgtctgcaagtcactgtgtggatatggacacagacgtgagaagccatgctgtagagggattaagagcataaactccgcagtcacatcactttggtgcaaaacctggctctataccttactagccacatcactttcagcaaattccataattcttcagttcttaggtttcctgaggattagatacagtagtcatcaccagattcctatcaggtacaccagacacatcrtaagtgttcaataagtgttggatctcttattattattatttgcaacattatctaggggctgggaaagccatctctttaatagagtaagccacaatcatttatttggatttgacaatgacacttaataaaagaagacaatt

SEQ ID NO: 409875 - DNA, 620 bp, Homo sapiens
gtgttggatctcttattattattatttgcaacattatctaggggctgggaaagccatctctttaatagagtaagccacaatcatttatttggatttgacaatgacacttaataaaagaagacaatttactagagctatcaaatgtttttgcaaagaagtgaaacatggaataattaaaacaaatgtaaactcaaaggaaaatgcaaatgatagaaaggttggtcaatttgagtcattggatttcattattttgatgttaaaagcttattgagcttgctaagtcagragtgtttctgattttctaaacatatctaccatagatcaaatttgaagttgatactgaaactcgtcttacttcactgggaaaaattgacatctgggtaaaccagtggagcatcactaactgaattgcagccctgatactaagttttctctcaaaactcattctttcaggcagaaagataatgatgaaattccatcagaaatctcagattttcacctagcttgtccacttaaagattttctcacttgttctttaattacttaaatgtctctaatgcctctcattgctagtatgtgttttacaggtagaatttgctttaatgaatctggtatattac

SEQ ID NO: 409876 - DNA, 619 bp, Homo sapiens
ttagagaatatttgaaattaactagtaagaataatctttcaagtccctccatatttccactaggaagttgccttttgaacttcgttaccaataaaaaagaagttttctagtattccaactgttataagttttcctactgaattttaaagattaagcaatttcatagaaggatcagtttgaaaggatattcatctttgtgaacaataacaacagaatttttgcagaagaataagaattcatggctaagactaaattgatcatagatttttgcagtcttgagtttaccatcaaasaaaaccacacaagtttcccagtatttaggtattaaaataagattgcaacaaaccaaatacctgaattattagcactatacttcccattcgctcaagcaggcttcaaagttttcctcatctccaaatattcctggcgattttacatagtattggacctgtcctcaccaagtccctggtttctttgttccagtattcactcaggacactgatcatcttaagactcaattctgataattgcccaaccatggaggtgtgcaaaatgcagagtgatgagacaactcagccaagtcagaaggagaaaattctctctccatgttttgcaatta

SEQ ID NO: 409877 - DNA, 619 bp, Homo sapiens
ttagagaatatttgaaattaactagtaagaataatctttcaagtccctccatatttccactaggaagttgccttttgaacttcgttaccaataaaaaagaagttttctagtattccaactgttataagttttcctactgaattttaaagattaagcaatttcatagaaggatcagtttgaaaggatattcatctttgtgaacaataacaacagaatttttgcagaagaataagaattcatggctaagactaaattgatcatagatttttgcagtcttgagtttaccatcaaacaaaaccacacaagtttcccagtatttaggtattaaaataagattgcaacaaaccaaatacctgaattattagcactatacttcccattcgctcaagcaggcttcaaagttttcctcatctccaaatattcctggcgattttacatagtattggacctgtcctcaccaagtccctggtttctttgttccagtattcactcaggacactgatcawcttaagactcaattctgataattgcccaaccatggaggtgtgcaaaatgcagagtgatgagacaactcagccaagtcagaaggagaaaattctctctccatgttttgcaatta

SEQ ID NO: 409878 - DNA, 553 bp, Homo sapiens
caagtgcaattttgttagatgaatagattgcatggtagtgaagtctggacttttagggtgtcygtcacacaaataatgcacattgtacccattaagtaatttattattatccaccttccttccaccacctcaccctttcaagtctccattgtttatcattccactctttacatccatgtgtgtacattattttgcttgcactatatgagtgagaaaatgtgatatttgtttttctgtgtctgacttgttttacttaagataatggcctccagttccatccacgttgctgcaaaaaacatttcattcttttctatggctgaatagtatttcattgtgtatacatggcacatttcttaatccactcatctattgatgggcagttaggtccattagcagattctatgtatctgctactgtaaatagtgctgcaataaacatacgagtatgggtacctttttaatatattaattacttttcctctgggtagatacccagtagtgcaatagctggattgaatggtaattctatttttagtcctttgagaaatttccat

SEQ ID NO: 409879 - DNA, 671 bp, Homo sapiens
actcacaaacaaatgtatactgtggatgagttgctctttgtaatcatggtaaccaatgtcaaccagaatacaagtgggtatgcaatgaattcaagtgtagaaaagttcctactctgattacattgagaaggctacaggttgaagccataaaatacctcatcaatactgactactcctttggatattatatccatgtatttcatgatatgcttgcagtcccmaaactggcataacattcacattttaatatctaatacactaaatagatgactgaattcatctctgcttcataatcaatccaaattgctacagttgattaaagccagagtttcagattatttcaaagtcatagtaagcatgaaggatgatcaaggtaactgatccaccatcggtgaaagggttagatttaatagaatttttagaaagaaaaatatgtgacagacatcattctagtttcattaagagagattagcagcaaaactcgtgctgttttttacagagctatacattataccagtgggtacattgagatcaatttgtaccatctggtatacagacaaattttatgaatagcaatctaataaaaaattaataaagtcaaatttatagtacttaccactataaaagtaatattcccaataagcacaatgacacagaccagctggtgtatg

SEQ ID NO: 409880 - DNA, 580 bp, Homo sapiens
accttaaaacctgaatttgcacagagaagcctaaagggagaattggagagtagaaaacagttagaaactgatggtacaatcaactctctggaagattttcattatagaaacaaaaagagaaatgagtcagtaacattaaaaatactttctttttttagatttaattttgtattgatgtataatagaaattcatatcttaaggtacatgcagtaatttaatatgttcatgtaattcrtaaggatcaaatcagtgtgactgggatatcatcaccttaaatatttgtattttctttatgctataaaaaataataaaaatctgtcatttgcagcaacattgatggaactgcaagtcattatgttaagtgaaataagcaaaggacacaaagattaatatcacatattgtcacttacatgtaggtagatttcattaagacagagagtagattggtgggtaccagaggccaggaacaacagtggggcagaggggatgaaaagagattgattaatgagtacaaacatacaatatgatagaagacctaagaccttgtgtatgataaatcagtagggtgactatagttta

SEQ ID NO: 409881 - DNA, 540 bp, Homo sapiens
gaggcagcactgggatgatagttctctggctaactccctaagaacaggtctttgcagtgtctttagaaagggtgacatgaatatgcatgagataggcaagcatcattacatgtgcagggtggagcacggggtacacagttgcagtgagaaatcatgytagtacatatatcacatgaccaaaaaatggtggataagcccctcctaataaatccgctgggtggggatttcagtagcataatgaggcatgggataaagattggttagttattcttctgctcttgtgcacatgctggcaatagagttaaatcccttgagtaagacttatagcgggatgctgcttatcttagtttcttcaaggtctcatggtcagtggggatggcaccacaggagctggtgctgcaaggtctggttatcagcaggtataggaaaaatgggggccaaatcctggtgaggactgagtcttgtctctactctgtctcgcaatgtctcttgccctaaaaacctgtctatttttcagcatcagaaaagaatggaatgatt

SEQ ID NO: 409882 - DNA, 564 bp, Homo sapiens
agaccagaacttccttgttgaatatagggatatacgcagatatacatagacrtgtctatatacatatatgtgtgtgattaaggatatcacacatatgtaattatagatatcctataagaagtccttagtaaggacttttttatgttcataaattttaccttaccaagatgacaaaacctctctacagaaaataccatgctctaattttatttctcatatagcacatttttcaaatatatttgttggatttcatagagaatctatacacttctgagttcttaagaatgtgtcttatcaataacacctttagatatggcttgctcctttagctggaatatacactgaaaacttcaatacttacaaaaatgtgttttgaatgttatgttttcaaagttggaaagacagtttccctttgattaggatattatggatccagctcacttatctaatcaaagttcccaggctgtacctagagaattctattaaaaaacaaagacaacatcagctgtcatctacctgcttcataagaatattgtatgaactaatgagataattcctgtaaat

SEQ ID NO: 409883 - DNA, 601 bp, Homo sapiens
caagacctagcgtcacaaatgaaaataagagcattatcaaaatgctgcaaaagagaattttaagagtaaatttatgctcctgcattttaaaatttaaataaaaagtcaaattctgagaaaaatattaagataactcacaaacgtggatagtcctatctatagttattaaagtaattaaattagtattcaaagtcttttcgaaaactctagttccaaatgacttcattggtgagatctctcaagatccacttgcattgtcttatccagcaattccactcctacgacacagatacaaaagagtacaagaatacatgaataatctccacaatgaacaacatcaataacaatgtttatagcaggactacttttaatagctaaaaattaaataacgtgtgcatctacaataagatggatgaaaattactctatcacttgaggactccatagtaaaaaaaaaatcaagcaaactacagcatcgtgcaacatcttgaawgaaattcataaaaccgtgttaagataaaaagcagaaaataaaaaggcacaattttcattaatgaatctgttcatgcaagttcaaaaataaggaaacttatttttaggaa

SEQ ID NO: 409884 - DNA, 549 bp, Homo sapiens
atatattaaattattttgtctgaatgcaatagcttgcaatgaatgaagagaaggtttaagctgaaagaaagcctactctattcataatatatgttatatttcaatttgggggaatcaaattataatctttcccaaatcaaggcaatctacacaggtaaatgcaaggagaagttagtaggattctggtgaattcatactgctgacatccaagtcaggtcagaaattactgatttcatttattttctgtctagccaagaagcaagattgcactctaaagaagccaatgacagatcatccagyagtagttactactggtcctactcagctcttgagtgctcttcatgagaagagattcttatcatcactcttcccaaattgggtgattatctaagagagaataactgtatgagttggtctttgccatttagcaaatctgctaattaaagctccgaactgaactccaagcctactccacgggggtaccatgcctcagctggacaagtaacaacaatacctgacatataatcatccaaagtgtaagagaaaatt

SEQ ID NO: 409885 - DNA, 473 bp, Homo sapiens
gttccttgtttggattttcctgtgtctagcccatataattttataatacagatgaacatgagagaagcaaaaatgtgtatgttccattcccttgacaaaagttttttttttcataataattatttagagtgaatatttttgggaggataaataagcacaattatacttttactgtgccttgacaattgtgtacattcaaggcctgcctttcaccactgcaggctgcatttccacaggctgatayaacaaccatcctttcctgtggaaggtagaattgcacccttcataaacattagtgcattgacatttgatactggaaattccagatttgcttaggagttgaaaagaactcttttgttttcctgatggcttccaacgtcactttcccacaaatctcataaatgtgagtattaaatctatgctaccctctcccacagtttggctttattttaaaatttatatgttaaaacata

SEQ ID NO: 409886 - DNA, 585 bp, Homo sapiens
aattccaacaaagagaacatcatgaaagtctgaaagaattgtgtcattgaaatgctatcattatagaaaaagccatgaaatcatcaaaactaaaacaataaattccttctggggaaagctatatctagatgttgtgcatgacttcataagatttataacacagtctatcaagaaaattatgaaaaaagattgtggatacagcacaaaaaatgaaaggttaaagctttgaagatagagatcttggaaaaattcaagagcttacagacactaaccagaggaattaagagaagatgacttgatgaagataagcactttcaaacttgtgccagatgatgaggaagggaatgccagaaaacaacgtgacatcatacaatctggcagcatgattctaatttttcaagactgcttttgacttcttttgtgacctggacctttctatgatatggacactgacactgaagttaaatattgaaggaaatatcggtactgtaaagaaacatgtttggaacaacaaaaaagcaaaagtgtcagacagaaattamcatgcatttctataaagttacaacatgtgtacctgcatttcct

SEQ ID NO: 409887 - DNA, 616 bp, Homo sapiens
tgccctaaaacttaaagtataaaaaaaaaagtaaggtactagaatgtgaaattcaaaaaaaaacaaacaaagtcattttcagatyaaaaataaataaataaataaataaataaatgcagactcaaaacacaattttaaacatattttgggtttcaaagaggaagtaaaatgaaactcgctttggggcacattaaggcataattgttggtatatagtgaagctagagtattgaaataatttgcagcacaggatcttgaaccaaataggtcaaaattgaatcatttcttcacttaatattttctgtcctttcagcgtcttacaatttcaatgataggcagaaactagcctttttgtcctcctttaaaatgaactgggaattaaatgagggtgcctatttctagtcttgttgaagatgatagaggatatatgttaactcaagattttgtaatttaaataataaattagctgatacctcacagtaaaatgttggcttaaagaaaatcatagtgtttctcctttaaacaaaagtaaaattcttattaaccaaaacactttgaactatttttcctcatttattcaatttgtcattctttaataaaatcaaattagattagtt

SEQ ID NO: 409888 - DNA, 603 bp, Homo sapiens
ttttttaatgcatggtgttttgtttcaatattataaaagaaataggatgttaaatatttagtctatagaaacaaattgcctgtttctgaaacttagatctgacactttctatgttgacatgtaatccacaatgttgaaggtgagggttgttaggaggtattagggtcatgggagcagattcctcatatggtgccttggagccctcctagcagtaatgagtaaattcttgctgtgagttcacgcaagatccggttgtttaaaagaatgtggcccttaccccaactctctcttgctgcttctatcaccatgtgacatgccttctccctctttgtcttctgccatgattgtaagattcctgaaacctcacgagaagctgagcaggtgttggcaacatacttcttgtaccatctgaagaactgtgggccaaatataactcttttattataaattacccagcctaaggtattttttatagcaagcaaaatgkactaacagaatttctatatctcacttttcatcttgaaaatctagataatactaacttgcacacagagttgtttgaatattaaatgaattaaagcacataaaaagtatagaaaattt

SEQ ID NO: 409889 - DNA, 589 bp, Homo sapiens
attccactttttacaaatatgtgcataattttaatggctagaacaataaaagtactcgtttattgcaaagacagccaagtctccccttcccgggatttctstctcttccacaccatgcctgccagcactacgttaacgctaggccctgatcagccttccccttgctccttccggtgccttctgagagctgaaattgtaaaatattaatcagatgttctgcttttagcacactaaaattctgagcagctatccagagagttggattgtgttatcaccggtacatttttctgttttgcctattttataatctgagcagtgtgtacaattcataacttcagcttagctgtgtagtctgttgacaattcccacaataatatcacttagctgctcttgtctttcatcctcacccacctctctcctgtgagctgcacttgtagatatttaaatagtcccctgaatgccttctttacgtatgtccttactatgccactacactattctctccaaactatgactgatttattcatttattcagttattgaacttcaatacattttttattatagagtaccatgtgtaaggcactgga

SEQ ID NO: 409890 - DNA, 623 bp, Homo sapiens
ttctttacattccactttttacaaatatgtgcataattttaatggctagaacaataaaagtactcgtttattgcaaagacagccaagtctccccttcccgggatttctgtctcttccacaccatgcctgccagcactacgttaacgctaggccctgatcagccttccccttgctccttccggtgccttctgagagctgaaattgtaaaatattaatcagatgttctgcttttagcacactaaaattctgagcagctatccagagagttggattgtgttatcacyggtacatttttctgttttgcctattttataatctgagcagtgtgtacaattcataacttcagcttagctgtgtagtctgttgacaattcccacaataatatcacttagctgctcttgtctttcatcctcacccacctctctcctgtgagctgcacttgtagatatttaaatagtcccctgaatgccttctttacgtatgtccttactatgccactacactattctctccaaactatgactgatttattcatttattcagttattgaacttcaatacattttttattatagagtaccatgtgtaaggcactggaagcacaaagatacaaaaaaagtaaaa

SEQ ID NO: 409891 - DNA, 623 bp, Homo sapiens
ttctttacattccactttttacaaatatgtgcataattttaatggctagaacaataaaagtactcgtttattgcaaagacagccaagtctccccttcccgggatttctgtctcttccacaccatgcctgccagcactacgttaacgctaggccctgatcagccttccccttgctccttccggtgccttctgagagctgaaattgtaaaatattaatcagatgttctgcttttagcacactaaaattctgagcagctatccagagagttggattgtgttatcaccggtacatttttctgttttgcctattttataatctgagcagtrtgtacaattcataacttcagcttagctgtgtagtctgttgacaattcccacaataatatcacttagctgctcttgtctttcatcctcacccacctctctcctgtgagctgcacttgtagatatttaaatagtcccctgaatgccttctttacgtatgtccttactatgccactacactattctctccaaactatgactgatttattcatttattcagttattgaacttcaatacattttttattatagagtaccatgtgtaaggcactggaagcacaaagatacaaaaaaagtaaaa

SEQ ID NO: 409892 - DNA, 589 bp, Homo sapiens
attccactttttacaaatatgtgcataattttaatggctagaacaataaaagtactcgtttattgcaaagacagccaagtctccccttcccgggatttctgtctcttccacaccatgcctgccagcactacgttaacgctaggccctgatcagccttccccttgctccttccggtgccttctgagagctgaaattgtaaaatattaatcagatgttctgcttttagcacactaaaattctgagcagctatccagagagttggattgtgttatcaccggtacatttttctgttttgcctattttataatctgagcagtgtgtacaattcataacttcagcttagctgtgtagtctgttgacaattcccacaataatatcacttagctgctcttgtctttcatcctcacccacctctctcctgtgagctgcacttgtagatatttaaatagtcccctgaatgccttctttacktatgtccttactatgccactacactattctctccaaactatgactgatttattcatttattcagttattgaacttcaatacattttttattatagagtaccatgtgtaaggcactgga

SEQ ID NO: 409893 - DNA, 615 bp, Homo sapiens
acctctgcctcccgggtccaagagattctccttgagtagctgggactacaggtgcatgcccagctaatttttgtatttttattagagacggggtttcaccatgttagccaggatggtctctatctcctraccttgtgatttgcccgccttggcctcccaaaatgctggatatacaggcgtgagccactgtgcccagtcagaggacttttttctaatcatctatcctgcccaggaaactttctgtcttgctttgggccacaatccagagcaagttgaggcttccctctgagagtttaaggtccttataattctgttccagtctctgactagcctcatagtccaccctgctcagagcagcagctgccaaaatttcaggcaaaatgtttccaaataaaataaccagaatttaggaagcagtccttgaaaattcgatgtatttcaatgacagcaaatgctacaggctgtttacctcttggtggaaaaagaacgagatagcttgataaatagtcagctcttatattttcatcaattgtacctttccaaataatactgcactgttgatgcctaggataggatttatgctggaaattcaatttacaggctgaagcgaggcaa

SEQ ID NO: 409894 - DNA, 516 bp, Homo sapiens
caaaatgtttccaaataaaataaccagaatttaggaagcagtccttgaaaattcgatgtatttcaatgacagcaaatgctacaggctgtttacctcttggtggaaaaagaacgagatagcttgataaatagtcagctcttatattttcatcaattgtacctttccaaataatactgcactgttgatgcctaggataggatttatgctggaaattcaatttacaggctgaagygaggcaagcatttacaatgtttcactgaaaacgtccttctccacccctcccccatgaccaggtctatgcaagctagtaagcatggaagaggccaggtataaaccttactcattcaatgatggccaatcgcaggctatcctgtgtacactaaactgggtttgagcagttgaacaacagtcgttcatttgttcattcattcattgctcattcattcaatatttatggaatgcctatttattatatgagagttatttcaaacaaatatttagaagaaaagataaaat

SEQ ID NO: 409895 - DNA, 516 bp, Homo sapiens
caaaatgtttccaaataaaataaccagaatttaggaagcagtccttgaaaattcgatgtatttcaatgacagcaaatgctacaggctgtttacctcttggtggaaaaagaacgagatagcttgataaatagtcagctcttatattttcatcaattgtacctttccaaataatactgcactgttgatgcctaggataggatttatgctggaaattcaatttacaggctgaagcgaggcaagyatttacaatgtttcactgaaaacgtccttctccacccctcccccatgaccaggtctatgcaagctagtaagcatggaagaggccaggtataaaccttactcattcaatgatggccaatcgcaggctatcctgtgtacactaaactgggtttgagcagttgaacaacagtcgttcatttgttcattcattcattgctcattcattcaatatttatggaatgcctatttattatatgagagttatttcaaacaaatatttagaagaaaagataaaat

SEQ ID NO: 409896 - DNA, 559 bp, Homo sapiens
gggatcccagtagcccaagcaagaggtgatgaagcctggactcagaagcaacaagtaagtggcagatgagaggatggatgggaatcatatttggaagttaacattttcaggatttgtggttgatcaagtgtggaaagtgaaagagacagaacagatgcagtcaccattcaccaaaacaggaaaacaccagaaaaggaccaaaaaggaagagaactgtctttggagagaatcatggctatttcttctaatgtactacactcctcagccaatcacctcagattaaacagattttattttcagtgatcaaaagtagaatcaggctctgacctcaaaaatatctgccctctgctcacagatgcctagtctttttacagtaatgaaaggccaaagcctgagtcagcacactccacaattagagatagtgttgcattcagtttcctagagctgacaatgttgccacaaaccagggagcttaaaacaagagaaatgtattctttcacaattctgaagaccggaagtccaaaatcagagtgtyagtagggccatgtcccctccaaaa

SEQ ID NO: 409897 - DNA, 613 bp, Homo sapiens
tccttgctttgttccaagcaagatgttgtacaaatgggatagtgagggttacagagagttgggtctaygttgttctttcaccattctggacattttggtgcaataaaaccaattaaattgaaatgccacaggatctctgtagctcagtttcatatgtttttaacaacctccattcacagaagtcattttccttcaaatgtaggaaaacaagattgggttaacttcaaaggaacttaaagtagtaaatgcagagtgctgaatttcttattacaaacaagctctaaacctagaccatgagtgatggcggacttgggaatacaaagctggaaactggagggtgagaaattaaaagcaagatcagtaacaacttggaaattagctaaattcaagaggttcagaaacttggctaaaaaggctgagagtacagtcatgtatccacagaaacatgggtcccataagtcaaaagaacgtgagtcaaaaccctgtggattagtcatgagttgaggacctcatgaagtctggagtgtcagaaatccaaacagcacaccctagtactagcaacagggagtcttggaaatggaggtgacagctatctcaaacagtttcataaata

SEQ ID NO: 409898 - DNA, 613 bp, Homo sapiens
tccttgctttgttccaagcaagatgttgtacaaatgggatagtgagggttacagagagttgggtctacgttgttctttcaccattctggacattttggtgcaataaaaccaattaaattgaaatgccacaggatctctgtagctcagtttcatatgtttttaacaacctccattcacagaagtcattttccttcaaatgtaggaaaacaagattgggttaacttcaaaggaacttaaagtagtaaatgcagagtgctgaatttcttattacaaacaagctctaaacctagaccatgagtgatggcggacttgggaatacaaagctggaaactggagggtgagaaattaaaagcaagatcagtaacaacttggaaattagctaaattcaagaggttcagaaacttggctaaaaaggctgagagtacagtcatgtatccacagaaacatgggtcccataagtcaaaagaacgtgagtcaaaaccctgtggattagtcatgagttgaggacctcatgmagtctggagtgtcagaaatccaaacagcacaccctagtactagcaacagggagtcttggaaatggaggtgacagctatctcaaacagtttcataaata

SEQ ID NO: 409899 - DNA, 580 bp, Homo sapiens
cagcaatattaaatgccagaagacaatggaataatgtctacagattgaggggaaaaaaatacattattaactttgagaatcgtaatgttcagcttttgtggtctatcctgtaatcagtctttgtaaatattccatgaacttttttaaaaagacaaaaagtgctctctaaaggtactgtggaacatttttgaatgagtatataatacatagtagaggaaatcttaatataatttttaacaaaaatagcacaaaacaaattttctgattataatcagtgcaataaaattagaaatccaaaacagaggtagaaattaaaaacgcagattcttgcaaatttttgagacagattcttctttataacttgtgggtcaaagtgtgaatcaaagtgcaacagcagagaaattagaaaccatgagcatgaaggcaacgtttactaaaacctaaggggaaaactaacactgcaggcaaagaaartctatggcctgaaacacttatatgttaccaaacaaatatgaataaaacaactgggacatttgagttggaaaaattaaaaagtgtacataaaaacagaatttaaatc

SEQ ID NO: 409900 - DNA, 626 bp, Homo sapiens
tgctaacacttggtaagtgagactgtagaatcaggggtacaaccatcctactttatcctttttttgcccttgagttaaatcatattgtcttaaatcaaatggagataaatatatttattgaggcrccgctgctgtgtccaaggttatgaaatgcctttcttcttcatagttttctgaaattttatatattgtcaattcctctccagcatcataaaacaatgtagaaggtatcagttattattcagaaccatggagtcaattttttttctctagaaatagaaactttctatagctactcaagtgaaaagaggtaggggcatcagaaaatctgggcaatcagaaacctgaattgtattttcacttgtcttcttcactttagctttggttttacattggactttctagaagtcattttgtgtatctgtgtctcactctatacaactgggacaaaaatacagacagctgacaactttaagcactcaaataaaaaactatgcatgatcataaagcatatcaacatacctcacatagccctttgcattgtggcaaccgtttggtttgctgataacaaaagagtattggaaagagttaatttgcactagcatgtaataaatctcctcaatcac

SEQ ID NO: 409901 - DNA, 626 bp, Homo sapiens
tgctaacacttggtaagtgagactgtagaatcaggggtacaaccatcctactttatcctttttttgcccttgagttaaatcatattgtcttaaatcaaatggagataaatatatttattgaggcgccgctgctgtgtccaaggttatgaaatgcctttcttcttcatagttttctgaaattttatatattgtcaattcctctccagcatcataaaacaatgtagaaggtatcagttattattcagaaccatggagtcaattttttttctctagaaatagaaactttctatagctactcaagtgaaaagaggtaggggcatcagaaaatctgggcaatcagaaacctgaattgtattttcacttgtcttcttcactttagctttggttttacattggactttctagaagtcattttgtgtatctgtgtctcactctatacaactgggacaaaaatacagacagctgacaactttaagcactcaaataaaaaactawgcatgatcataaagcatatcaacatacctcacatagccctttgcattgtggcaaccgtttggtttgctgataacaaaagagtattggaaagagttaatttgcactagcatgtaataaatctcctcaatcac

SEQ ID NO: 409902 - DNA, 596 bp, Homo sapiens
ggatatactacattttattcattcattcatcagttgattgacatttagattgttttcatttaccagttattataaataaagctgctgtgaacagttatgtacaagctttttttgtggacatattccttcatttctttttggtgtataggagcggaattgctgggtcatattctaactctatgtttaaccttttgaggaactgtcagacaagattggcatatgcgtgttgttttccaaagcrgctgcaccattttgtattcccaccagaaaggtagagttccaatttctctacatccttgataacacttgttattatctatctttttgaccatagccatcctagtgggtgtgaagtggtatctcatgggtgtatgtttttgtaaattgtatgtttccatttacaggaaacgtctagagtgggcatctgtagagacaggaagtaaatgaatggtttcctaagtgtttccccttccccgctttcctagggaaacctaggaaaccattcatcatcctgggggaactggggagcaatgaccagagactgctaatgtggcgtttccttttgaggtgatgaaatgttctaagattgattatca

SEQ ID NO: 409903 - DNA, 642 bp, Homo sapiens
gttctggcctggagctgctccatggtcactctaccagggcagggaaagcagcaaaaaatcaacagtttcacttccagaggggcatgtctgggtctatatcccgtgtattatttttatttttatttttatgtttatttttttccttaagacagagtcttgctctgtagccaggctggartgcaatggcacaatgttggctcactgcaacctccacttctggggttcaagtgattctgctgcctcagcctcccgagtggctagggctataggccccccaccatgcctggcaaatttttgtatttttagtagagacagggtttcaaaatgctggccagactggtcttgaactcctgaccttgtgatctgcccacctcagcctcccagagtgctaggattacagacatgagtcactgcgcccagcctatctgatgtattattaatgctaccttcttattttactactccaggatttctcaaccttggcactattgatttgaggccagtaattaattctttgtggcaaggggctgttctgtgcattgtattaataggatgatattctgtattatctctgacctctacccactagataccagcagcacctcttatgaagttgtgagaaccaaaactgtctcctgacat

SEQ ID NO: 409904 - DNA, 642 bp, Homo sapiens
gttctggcctggagctgctccatggtcactctaccagggcagggaaagcagcaaaaaatcaacagtttcacttccagaggggcatgtctgggtctatatcccgtgtattatttttatttttatttttatgtttatttttttccttaagacagagtcttgctctgtagccaggctggagtgcaatggcacaatgttggctcactgcaacctccacttctggggttcaagtgattctsctgcctcagcctcccgagtggctagggctataggccccccaccatgcctggcaaatttttgtatttttagtagagacagggtttcaaaatgctggccagactggtcttgaactcctgaccttgtgatctgcccacctcagcctcccagagtgctaggattacagacatgagtcactgcgcccagcctatctgatgtattattaatgctaccttcttattttactactccaggatttctcaaccttggcactattgatttgaggccagtaattaattctttgtggcaaggggctgttctgtgcattgtattaataggatgatattctgtattatctctgacctctacccactagataccagcagcacctcttatgaagttgtgagaaccaaaactgtctcctgacat

SEQ ID NO: 409905 - DNA, 642 bp, Homo sapiens
gttctggcctggagctgctccatggtcactctaccagggcagggaaagcagcaaaaaatcaacagtttcacttccagaggggcatgtctgggtctatatcccgtgtattatttttatttttatttttatgtttatttttttccttaagacagagtcttgctctgtagccaggctggagtgcaatggcacaatgttggctcactgcaacctccacttctggggttcaagtgattctgctgcctcagcctcccgagtggctagggctataggccccccaccatgccyggcaaatttttgtatttttagtagagacagggtttcaaaatgctggccagactggtcttgaactcctgaccttgtgatctgcccacctcagcctcccagagtgctaggattacagacatgagtcactgcgcccagcctatctgatgtattattaatgctaccttcttattttactactccaggatttctcaaccttggcactattgatttgaggccagtaattaattctttgtggcaaggggctgttctgtgcattgtattaataggatgatattctgtattatctctgacctctacccactagataccagcagcacctcttatgaagttgtgagaaccaaaactgtctcctgacat

SEQ ID NO: 409906 - DNA, 613 bp, Homo sapiens
tgtattattaatgctaccttcttattttactactccaggatttctcaaccttggcactattgatttgaggccagtaattaattctttgtggcaaggggctgttctgtgcattgtattaataggatgatattctgtattatctctgacctctacccactagataccagcagcacctcttatgaagytgtgagaaccaaaactgtctcctgacattgttacatgtgctctgaggagcaaaactgcccccagatgagaatcactggtttcagttattacctcacagtgtactgtacaaaaattaactcaaaatgtatcatagacctaaatgtaagagctaaagctagaaaacttctagaaagaaacaaggagaaaaatctttgtgtccccggttcaagcaaagaattcttagatattataacaaatatataacccatgagagagaaaaaatgatgtattgggcttcatcacgattaaaaactttctcatgtcaaaagtcatcactaagaaaatgaaaaacagagactgggagaaaatattgcaaattatataattaataaagatcttgtatctaatgtacatgaagaaacattaaaactcaagaacagaaagacaa

SEQ ID NO: 409907 - DNA, 613 bp, Homo sapiens
tgtattattaatgctaccttcttattttactactccaggatttctcaaccttggcactattgatttgaggccagtaattaattctttgtggcaaggggctgttctgtgcattgtattaataggatgatattctgtattatctctgacctctacccactagataccagcagcacctcttatgaagttgtgagaaccaaaactgtctcctgacattgttacatgtgctctkaggagcaaaactgcccccagatgagaatcactggtttcagttattacctcacagtgtactgtacaaaaattaactcaaaatgtatcatagacctaaatgtaagagctaaagctagaaaacttctagaaagaaacaaggagaaaaatctttgtgtccccggttcaagcaaagaattcttagatattataacaaatatataacccatgagagagaaaaaatgatgtattgggcttcatcacgattaaaaactttctcatgtcaaaagtcatcactaagaaaatgaaaaacagagactgggagaaaatattgcaaattatataattaataaagatcttgtatctaatgtacatgaagaaacattaaaactcaagaacagaaagacaa

SEQ ID NO: 409908 - DNA, 613 bp, Homo sapiens
tgtattattaatgctaccttcttattttactactccaggatttctcaaccttggcactattgatttgaggccagtaattaattctttgtggcaaggggctgttctgtgcattgtattaataggatgatattctgtattatctctgacctctacccactagataccagcagcacctcttatgaagttgtgagaaccaaaactgtctcctgacattgttacatgtgctctgwggagcaaaactgcccccagatgagaatcactggtttcagttattacctcacagtgtactgtacaaaaattaactcaaaatgtatcatagacctaaatgtaagagctaaagctagaaaacttctagaaagaaacaaggagaaaaatctttgtgtccccggttcaagcaaagaattcttagatattataacaaatatataacccatgagagagaaaaaatgatgtattgggcttcatcacgattaaaaactttctcatgtcaaaagtcatcactaagaaaatgaaaaacagagactgggagaaaatattgcaaattatataattaataaagatcttgtatctaatgtacatgaagaaacattaaaactcaagaacagaaagacaa

SEQ ID NO: 409909 - DNA, 631 bp, Homo sapiens
gttcctttctgaggaaaccaactatcagttctcccagacagtattaaggaactaaaacttaccagatcattgcatctggacagtaagacataagacccctcacccatcatgattgcctatctaaccgcctgctttctgttgaccaacagctcttcctttaccttctctaattcctgttttagtttcttccctgctatataaatgcctgattttagttggtgagggagatgaatttgagactgactttctattctccttggctgcagcacctgagtaaagccttcttccctggcagtaattgttgtcttagtgattggctttctatgcaaagaacaatgggacctagatcaaacccctggcatttcagtaacaattagggaatcaataccaccaygtgataccattatgcacccactaggatggctataattttaaagaacagataagttttggtgtggatgtggaaaacctataatcttattcactgctggtaaaattgggaaatagtgaagcctttttgaaaagagcttggcagttacttaaaaagttaaactcactaaacataaacataaacctggcaattcatgcatagaaatcttccaaagagtaaatatcatatgtctacacaaag

SEQ ID NO: 409910 - DNA, 631 bp, Homo sapiens
gttcctttctgaggaaaccaactatcagttctcccagacagtattaaggaactaaaacttaccagatcattgcatctggacagtaagacataagacccctcacccatcatgattgcctatctaaccgcctgctttctgttgaccaacagctcttcctttaccttctctaattcctgttttagtttcttccctgctatataaatgcctgattttagttggtgagggagatgaatttgagactgactttctattctccttggctgcagcacctgagtaaagccttcttccctggcagtaattgttgtcttagtgattggctttctatgcaaagaacaatgggacctagatcaaacccctggcatttcagtaacaattagggaatcaataccaccatgtgataccattatgcacccactaggatggctataattttaaagaacagataagttttggtgtggatgtggaaaacctataatcytattcactgctggtaaaattgggaaatagtgaagcctttttgaaaagagcttggcagttacttaaaaagttaaactcactaaacataaacataaacctggcaattcatgcatagaaatcttccaaagagtaaatatcatatgtctacacaaag

SEQ ID NO: 409911 - DNA, 607 bp, Homo sapiens
taaagacaggcaggggtgttttgaaagggaatagtatgatcggcaaactgtaagtggattggtcagcaaagtaactgagggagaaaaatcacctggctatcataatttttcttccttagaattgaatgaataaatggtgcccactactcatatrtagcaattgtggtggctttttgtaaccactgaaaaatataatgtatgtgtccattcttctaactgaaatggtttaataaaactctcttctgcatttccttcttcaggggtttaaaacatgtctctggggtctggcagacttatatttaaaatccagcactgccacatttgcaggtatgtgaccttaggtagattacttaactttttttaagttctcagtttcctcaactgtgaattggaataatagcagtttcctgtaagctgtggactgaatatgtctcccccaaatttatatattgaaacctaagccttaatgtgatggtatttggagattgggtctctggatggtgattaggtctttaggggagagccctcaagaatgggatcagtgcccttataaggagctgaagagaccagagttctctccttccaccatgtgaggacacagctagaa

SEQ ID NO: 409912 - DNA, 563 bp, Homo sapiens
caagcctttttataatctacgtaaattcattaatccatgaaggctgcattcttacgacctatacacctcccattaggccccaccttccaacaccgctgcattggggattaagtctcaacacatgccttttcagggacacattcaaaccgtagcagtgggcacactgaaataaaaaaaaaagaataaatgaaagccggattccccaacttgggaagtccacactcttcttataacatagttactgcaataatcactagtggctgattacagttgatgagccgaaacctrttggacatctctgtagtctgaccctttcacttgatagaagtagaaaccaaggccttgggttgggggcttggggtcataaaaaaaaccatgtctgctgacacacagtgagttaatatctcagctgggacgaaatcctttgtcttactcccaatgagaagttctttctctgccctactacaaaaacagcttcaaataaactttcagccagaaaataacagtgtggagcatattctggagcttggtatctgattgctgtagtttccataattgccctg

SEQ ID NO: 409913 - DNA, 506 bp, Homo sapiens
atggtttaattgaatactgttgtttaaaatgggggtgggggataaaggcatgaagggctggcttacatgccttcatgagtgtgtgctcacatttaatatgatgggggggctaggagagggatggatattatgtctgactgagaataattccctacctygtactataaaacagaagacaggtaatttcacctagatagattcctctgcctttccatggaacttgtggaagggagctaggggaatatgctggtacaacaatacagttctttcctacatgtcctcaattattttgtttcctacctgatgcagtagtcccaggaccggggctgcaactgcagatgccagaagcagggatgattgctatgcaagaaactgtaacaatatctttaaacttttatgccggaattcctgaaggcctgatggaatggaatttgccttcatcctatctggcaaaattggagttgacagtaaatgcagctgtattggtattgcttagcggttgtaat

SEQ ID NO: 409914 - DNA, 506 bp, Homo sapiens
atggtttaattgaatactgttgtttaaaatgggggtgggggataaaggcatgaagggctggcttacatgccttcatgagtgtgtgctcacatttaatatgatgggggggctaggagagggatggatattatgtctgactgagaataattccctacctcgtactataaaacagaagacaggtaatttcacctagatagattcctctgyctttccatggaacttgtggaagggagctaggggaatatgctggtacaacaatacagttctttcctacatgtcctcaattattttgtttcctacctgatgcagtagtcccaggaccggggctgcaactgcagatgccagaagcagggatgattgctatgcaagaaactgtaacaatatctttaaacttttatgccggaattcctgaaggcctgatggaatggaatttgccttcatcctatctggcaaaattggagttgacagtaaatgcagctgtattggtattgcttagcggttgtaat

SEQ ID NO: 409915 - DNA, 607 bp, Homo sapiens
gctacccttatgtgtaggcaaaccctaaaatcacacgtcaaattaacatcaggaaaacatgagcgaatcttcagccttgtaattttctgggtgactgaaattgcttctatgttaagtgtttataattttgtttttcatctgcaggcttatattttctactttctgcattaactaataaattcctgttttctggaatgtactaggccagaatatcacctatgagtggagctgtagtagagacttaggaattagaagggatgttcaactaaatgacttttaggttccctttcatttatgataatttgttattctacttccttggtgactcagaataaaattacatactgattttcctacttgaaaactgtagttgataggaaaaaaaaggagcacaaatattgattgctcatccatcctrccttttgtttaggtttatttgagtgatacattactgaaatttgtcttttgataatgatgatttaattctttagcaactatttatacaatattggccagtgaaaaatttcagatggttctccatgttttagactatcagagcaatgcattggtctgaaacataacaccctagaagacaaaagaatgaaaa

SEQ ID NO: 409916 - DNA, 554 bp, Homo sapiens
ttgggattacacagggcatgtataccatgggctgataatcttgggggccatcttgggattctgcctaccacaaagagtaatcaatcaaactaatgtaatcatcttgaccttaagaaacaatttggctcttcaagtgccttgtatatatatttcctgtgaggtcaattctaattccaatcactagagtctgcagaaagagtagataacagactatacctatggggccagagtgtgttcagagaatgggaatgcaataagtaagtctcttgggaggttgggagtgatgtgatgaaaactgatctgttgaagatgatttcatcttctctgagatcaattttggggatggagcagggggtcckaaatgtaatttagaagttgttagaacagcctagctcagaagataattatgtctatactttgtaaaaaatctctgggaagagaagtgtaagttgaaacatacaatatatatttttgaattaaatttatacacattgggtatggattgggttttggggggtgtgtggaaaggaaaggagaaattggaaatgcctctg

SEQ ID NO: 409917 - DNA, 440 bp, Homo sapiens
cttaagaatattcatggaaaggcctctgacaagtactcttgaatacaagtttcagataactttggagatcatatcattggactaggtaaaaactttcaggactscagttaaaagctagtgcatttatgaggattgctaacccaacatcaggcagaacaataattacttacacaaaactgaacaaatagaggactgaaataattttatgacttccttggttgtaacattgctaattctttttgtgttctgttttccagagtcaagaaaacttttttcttttgagctatttatagcttacaacaaattgagtgaagtatactattataagcaaaaatgtgaaggatttatctttctctctacctgatttcttcagaatttagaaactatttgtgaacattcttaatttatggcaatataattatttatataagtttaataat

SEQ ID NO: 409918 - DNA, 440 bp, Homo sapiens
cttaagaatattcatggaaaggcctctgacaagtactcttgaatacaagtttcagataactttggagatcatatcattggactaggtaaaaactttcaggactgcagttaaaagctagtgcatttatgaggattgctaacccarcatcaggcagaacaataattacttacacaaaactgaacaaatagaggactgaaataattttatgacttccttggttgtaacattgctaattctttttgtgttctgttttccagagtcaagaaaacttttttcttttgagctatttatagcttacaacaaattgagtgaagtatactattataagcaaaaatgtgaaggatttatctttctctctacctgatttcttcagaatttagaaactatttgtgaacattcttaatttatggcaatataattatttatataagtttaataat

SEQ ID NO: 409919 - DNA, 511 bp, Homo sapiens
ggggcttataaccgtgggaccagctcaaaccaattaaccactgcttaagttgttacagatgttgcagaggcaaaattgcaagtcattgaccccagccatgaacaatgttaacctcctgatttttaacacaaccaatctggcagaccagctgcagtggcatcacctaggcctagttagaaatgccataaaagcttggcccaactccaaattgaagagacacatttsagcatttcctcctgtctccttgccagtaaactcaaaatgaaacttttattctcaaaagccagtgccatagtgttggcttctatgcacattgattggcaagcccattgctcaataacagtttatatattctcatgatatttgttagcatcctttaatttcaacctaaaatactcccttttgcatgcatggtaaggcagatgatgatgaattccttcagcttttatttgtctgggaaaaccttttatctctcctccattggtaaagaacatctttgctgggtataaga

SEQ ID NO: 409920 - DNA, 511 bp, Homo sapiens
ggggcttataaccgtgggaccagctcaaaccaattaaccactgcttaagttgttacagatgttgcagaggcaaaattgcaagtcattgaccccagccatgaacaatgttaacctcctgatttttaacacaaccaatctggcagaccagctgcagtggcatcacctaggcctagttagaaatgccataaaagcttggcccaactccaaattgaagagacacatttcagcatttcctcctgtctccttgccagtaaactcaaaatgaaacttttattcycaaaagccagtgccatagtgttggcttctatgcacattgattggcaagcccattgctcaataacagtttatatattctcatgatatttgttagcatcctttaatttcaacctaaaatactcccttttgcatgcatggtaaggcagatgatgatgaattccttcagcttttatttgtctgggaaaaccttttatctctcctccattggtaaagaacatctttgctgggtataaga

SEQ ID NO: 409921 - DNA, 511 bp, Homo sapiens
ggggcttataaccgtgggaccagctcaaaccaattaaccactgcttaagttgttacagatgttgcagaggcaaaattgcaagtcattgaccccagccatgaacaatgttaacctcctgatttttaacacaaccaatctggcagaccagctgcagtggcatcacctaggcctagttagaaatgccataaaagcttggcccaactccaaattgaagagacacatttcagcatttcctcctgtctccttgccagtaaactcaaaatgaaacttttattctcaaaagccagtgccatagtgttggcttctatgcacattgattggcaagcccattgctcaataacagtttatatattctcatgatatttgttagcatcctttaatttcaacctaaaataytcccttttgcatgcatggtaaggcagatgatgatgaattccttcagcttttatttgtctgggaaaaccttttatctctcctccattggtaaagaacatctttgctgggtataaga

SEQ ID NO: 409922 - DNA, 587 bp, Homo sapiens
caatccaaggaaaataagaatcacaataaagcaatacaggagctgaaggacaaaataaccagtataaaaaagaacctaatgcatctgacagagctgaataacataatacaataatatcataaatattaaaagcagaagaaatcaagctgaggaaagaatctcagaacttgaatactggttctctgaaataagacaaaaaataaagaaaaaaggctaaaaatgaatgaataaagtgtctgagaattatgagattatgtaaagagggcaaatccgattggcattgcttgaaagggaaggggagaaagcaaacaacttggaaaatatatttcaggatactgtttatgaaaacttccccaaccttgctagagagtccaacagtcaaattcaggaaatacagagaactcctgcaagaatctacataagargatcatccccaatacacataactgtcagattttccaaggttgaaatgaaagaatgttaaaggcagctagagagaaagggaagccacctacaaagggaaacccttcaggctaacagtgggtctctcagctgaaaccctccaagccagaagagatttggtgcca

SEQ ID NO: 409923 - DNA, 475 bp, Homo sapiens
tctcattaccaccattcctgccttacaagagatcttgagatgagcactaaatatagaaaagaaagactgctaccaggtaatacaaaaacacacttaaacacacagaccactataaagcaaccataaaaacaagcgaacataataaccagctaacagcacaatgacaggattaaatacacatatatcaatactaaccttaatgtaaatggactaaatgcccccacttaaaaggcatagagtgacaagctggataaagaagcaagtcccactgatatgctgattcaagagacccatctcacatgtaatgacactcataggctcaaaataaagggatagagggaaatctaccaagcaaattgaaaagagaaaaaagcaggagctgcaatcctawtttcaggcaaaacagatttctttttttttagtgagaagaaaatgttattgacctcaatttagaagaaaagaagatgaaaaataa

SEQ ID NO: 409924 - DNA, 545 bp, Homo sapiens
tttactttttctaagaaaaccagaataatggtatcctgaaaactagaaataactcaacaaagcctgcaaatctccttcctytaaaatcccattggtgcaaagcactgtttctgttagcaatatacccttcctctaggcccagggactaccagggaagaggtggatgcatgagattgtaagggccagttttaagggttcagatccccaaaatcaaggcaggcacacacacatgcttatacagggcgtaaattgatggactttgtctcctgagccattatatgccccctttccatctttctcaatcatgaaaaaaaatttctactttaatataagagcccaaacccaaaggcttggccacattctgggacccatgtgtatttacaattaaatgtaaaacagttttattcctcaaacctagaccaattccccttgtcagcaaacagtagctagaattgccattgccccatatccctcaagattgaggaatgcacaacagaaagggagttgatatagtttgaatatgtgttgctgccaaatttcatgtt

SEQ ID NO: 409925 - DNA, 545 bp, Homo sapiens
tttactttttctaagaaaaccagaataatggtatcctgaaaactagaaataactcaacaaagcctgcaaatctccttcctctaaaatcccattggtgcaaagcactgtttctgttagcaatatacccttcctctaggcccagggactaccagggaagaggtggatgcatgagattgtaagggccagttttaagggttcagatccccaaaatcaaggcaggcacacacacatgcttatacagggcgtaaattgatggactttgtctcctgagccattatatgccccctttccatctttctcaatcatgaaaaaaaawttctactttaatataagagcccaaacccaaaggcttggccacattctgggacccatgtgtatttacaattaaatgtaaaacagttttattcctcaaacctagaccaattccccttgtcagcaaacagtagctagaattgccattgccccatatccctcaagattgaggaatgcacaacagaaagggagttgatatagtttgaatatgtgttgctgccaaatttcatgtt

SEQ ID NO: 409926 - DNA, 518 bp, Homo sapiens
aacattttaaatgcattcatgtttgtgtttgtaggatactatttgtagaataatatgtccagtgaaaatatatttcaaaatgaaggtaagataaagacattaagattgaaaaagaaggaattgctgtgaatacagtcacacttaaagataagaaaattttccttccttccttccttccttccttcattccttctttctttctttctcttctttcttgtttttttttttcacatttattccccgttttattaactgatttaaaaggcaactttacaaaacaatatgtatataattatactgtagaatctataacagagaaatataatgtttactaataaaagcacctagaaaatggtgggaataaagctatattggagtaagaaaatgacaagaggggggrggagccaagatggccgaataggaacagctccagtctacagctcccactgtgagtgacacagaagatgggtgatttctgcatttccaactgaggcaccaggttcatctcactagggagt

SEQ ID NO: 409927 - DNA, 493 bp, Homo sapiens
atattactatgttgcccaggctggtctcgaactcctgggctcaagcgatcctcccaccttggcctcccaaagtgctgggattaaagatgtgagccaccatgccccacctccagatccttctaatgggcattccctaagttactgccatcagctcccctttccacccctcgacaaattccatgattctggcacaatctcctctattcatatagattcatctgatctgtactggtgacttcccaagtcgatgagcctgcccttatctctcayccaaccttaattaaatcaaatccattcaattcaaatccatgtaagtcaagaagcatttgttgaacaatgtccacatatcaggcaggttggttggccatcagtggctatataggatagtactactttagtaactctaaccctcagccttaggggcttagaagcttgattctctcagcatattaagtggagtaatttctcagggtgcaaattaacccagctcaca

SEQ ID NO: 409928 - DNA, 549 bp, Homo sapiens
gaatcctttgcatacatggtagcagcaaccacagcaatggactgtgtcattaacactgattccttcagaagattgtaacattggtgatagtgccccagttccttgcaggggaggacctctcccttcttagcccattaagtktggaggcagagactactcctattggctccaggaaagggcatgtgtcaaaggtctggccaatcagagagccatatcatctgggacatgggattggctcagagatgagcaggtgactgcttcaaacccaatgatatgggactttggctagaacttgatttgaaattttcttcaaatcttcatgatttctagccatgaggtcatgaagaaaaacctggagcagctcactgccattttgccaccatgaagacaaagccaaggtgagctggaaatcacacagcagcagagctgaggtggagaaagcccaggtcttagtggcatagtgtgaatctctgaattccaccatgtctaattatttgtttctccctgaatttttagtagtgtgaaccaacacatccctgaagtgcctta

SEQ ID NO: 409929 - DNA, 549 bp, Homo sapiens
gaatcctttgcatacatggtagcagcaaccacagcaatggactgtgtcattaacactgattccttcagaagattgtaacattggtgatagtgccccagttccttgcaggggaggacctctcccttcttagcccattaagtgtggaggcagagactactcctattggctccaggaaagggcatgtgtcaaaggtctggccaatcagagagccatatcatctgggacatgggattggctcagagatgagcaggtgactgcttcaaacccaatgatatgggactttggctagaacttgatttgaaattttcttcaaatcttcatgatttctagccatgaggtcatgaagamaaacctggagcagctcactgccattttgccaccatgaagacaaagccaaggtgagctggaaatcacacagcagcagagctgaggtggagaaagcccaggtcttagtggcatagtgtgaatctctgaattccaccatgtctaattatttgtttctccctgaatttttagtagtgtgaaccaacacatccctgaagtgcctta

SEQ ID NO: 409930 - DNA, 536 bp, Homo sapiens
tgtttctggcaggatggaaaatcccctctctgtcacttcatctcgggtgaaaacaaaagtcctataggagcttaatctggggccagagccagccacaggatctcagcagaggccaaaactaaggattcatcatacggcatccagcaggaatgttgtctctctggatcccctggtcagcaatctcattcgtcatttttaatcctagtgctggtctgaaatgcaaaacaataccttctctttgtgctcatgctggmtaaacatgggaaaagaaagagaagttcaaagtgagttttatttaatacagagtttgttgaattgttttaattgaaaacaggtcattgacccaagtttttaaaattgcaatttaaatttaatttattttggctgggcacagtggctcacgcctgtaatcccaggactttgggaggccaaggcaggcagatcacttcaggtcaggagtttgaaaccagcctggccaacatggtgaaacaccatctccactaaaaacacaaaattagtcagacatggtggcacgt

SEQ ID NO: 409931 - DNA, 611 bp, Homo sapiens
tccaatgttatgggcaacgtgggcagcttctcatgttattcctggagaatcactttccaggttcttctctctctccctctccagcctcccccaatttccctttatcttcgcttctaattggaaaaacggaggagggaggtatggtgaaagaagagatcctaaaataggtcaggccatcatgcaggttccaaaataaatgtcatcaatgccaagtcactgaaccatatagcccaagctgacagggcctcattacctgctgttctgacttgggattttaaagtcataggaagcatcggtgtcaaggacttacaaaagagccccccaaaaagaaaaaccaagacagggaaggcaattttggggtgagcaggggagaagttgggataagggaaatgaagaaagatgctgccrtactaggattgaagcacaaaccagaatgtgcccttttgtaatccacgttgctatttttggttatcggtggacttgtgggggatggaaagcgggaggaataaatccatccttgccccagtgcaggtttgaagtttatgaggatggaatggtaagcacacaacatagggttttatgcatcagcacaactttgtgttaaattgttc

SEQ ID NO: 409932 - DNA, 542 bp, Homo sapiens
agaatctgatgaaaaatatgggaaaatgcactttcatcacatttgtatgcaattttggtggaaacacttaccctgaagatttaatgtctaaaataagttgcttgatgaatggaattatagaaacagtatataatccttaccttgatgtcagatccattggtctgttcactaaatccctatcttctttgtcctcttcattcttctttaagcactcttgattttcgtctmctccaaccttaaccttctcttcctttcctcttgaggtctgtctttgaaaggatcttggttgtagttcagcagttataatttcacaaggttcatttctctcagggtagtaataaacttttaaagtatgactaggtcaatatttctctaaatgagctcctttgtccataatttatacccagtggcaaacactctgtgactagaaagacagaaaggaaataataccttgggacaatattttaatagccagatgtcattgccactaaccaatgtttaggctgtatacaagtataaccttgctgactgatttccaactc

SEQ ID NO: 409933 - DNA, 578 bp, Homo sapiens
ttacaatcccaccagtaggaggatgcaaaggaaagcattccattttctctgcatcctcaccaacatctcttcttttttttttttttttgtctttttaataatattcattctgactggtgtaagatatctcattgtagttttaatttgcatttatctgatgattagcattttttcatatgcttgttgaccatatgtatgttttcttttgcaaaatgtctatgtatgttctttatccattgtttaatgagatgatttggatttttttgtgtgtactgagttgtgtgagttcaaatgagtgaattgtatgacatatgattatatctcaataaagctgtttaaactttttttaaaaagtcttctccttctttttaaaaatgtacatctatctacatttatttttcaagaatggttttgctgaacataaaatccatccctcagatttcctttggaggccccaaaaggattcccmagcacattttggctgcataatagcagcataaattaatgatggatggacaccatttttcacactagaaaaggagtgaaagaatacttcaaaatgttaaaactaggtcata

SEQ ID NO: 409934 - DNA, 583 bp, Homo sapiens
cacaatagtaacaacatgaatattgcttacctattataattatgatattcccaaacacatttaataacctcttcgttttctcttcaaatattcactgtrgagatacaatattctaagtacaatttatatggtcaagacaaaggacataacatcaaaaattgcaaaaggaaaaatgcatgccttcaaatttaaaacataaagatattgtgatgtagaagttgccccataggtgataagccaattcctgcataagctaattattccagtttaccatgcctacagttaggctaccaaataagaccacttgatattttgcactctagccaattggccatatttttctcagataactaaatctaaggccattagcacataattcattcaagaatgtcttttttaaaaaggaaaacaagccttttgtttaactaaacactaatttctaatatgaagctaagtgaatttaagaaaatatactatcataggaaagaaaagataaatatgaaagtctgttcactcagagttttagctgaggacccaaaactcataaaaataagtatttctacattctaaagagagccaccaa

SEQ ID NO: 409935 - DNA, 553 bp, Homo sapiens
ggaaacatatctcctcccaatgacattatcacagcataggtcctagatgtttattgtcaggaagtcaggcacctggtgrggaagttaaactgttttcctcacctcagcaccctcagcctgcctattacctggttatcagtcatttgatttacctcagtggctgatgaggacagaggctgagcggtcctcacctactccttgcttgttagatgccacctgcatctatctctgcttgactagatgccaccaagaagctatcttgagtcactagacagacccaccatttccacactaacagtcatccaaaagctttcacttagatgaatggagtaatttataagcaagataggaaagacagaaagaaagatggcataaagagtgctgcttcagccctttcaataaggtccagcttgtacaccaatagccagtcttgtcaagtgctcactctccatatgcacagaagctgttaccctgctgttgaaagagctgcaggtttttgtggtttttttttggcacatcaccattcattaccaggaataaaaatcagcttctt

SEQ ID NO: 409936 - DNA, 600 bp, Homo sapiens
agagacacaattgcagtgctggacacagtagagaaagtctgcacctctaccccatcaggcaggcagcctctgtgatcataaagggtcttgaaaaaggggtccttgttctcccaggcacactactgcrgaaatggctagggcttctctcataggcatgcagcatagatgcacatacagacagccttcttgaaacaattcgggttgattgcagccctacaggagaagcactctccaggttcaggactgcacaagaggcagagtcataattcttttctacttggaacatcaacatttctacagataaaaagagatgcctgtctgatctgagtaaccagaacattaggacaggagtgtggctgtggatagcttttctgctggcttcacaggaaagataaggtagctcccacccttcaacctgataaaacttcagcacatctaattgagacccccctacaccagccaccaccttcatcaaggctgggacctctacccaccattgggtattatatctacacacctgttttagctacaactcggtgccaaaagagggatgcttcccctatttgcctgaggcctaaatcatcaactcagtaaataaaa

SEQ ID NO: 409937 - DNA, 600 bp, Homo sapiens
agagacacaattgcagtgctggacacagtagagaaagtctgcacctctaccccatcaggcaggcagcctctgtgatcataaagggtcttgaaaaaggggtccttgttctcccaggcacactactgcggaaatggctagggcttctcycataggcatgcagcatagatgcacatacagacagccttcttgaaacaattcgggttgattgcagccctacaggagaagcactctccaggttcaggactgcacaagaggcagagtcataattcttttctacttggaacatcaacatttctacagataaaaagagatgcctgtctgatctgagtaaccagaacattaggacaggagtgtggctgtggatagcttttctgctggcttcacaggaaagataaggtagctcccacccttcaacctgataaaacttcagcacatctaattgagacccccctacaccagccaccaccttcatcaaggctgggacctctacccaccattgggtattatatctacacacctgttttagctacaactcggtgccaaaagagggatgcttcccctatttgcctgaggcctaaatcatcaactcagtaaataaaa

SEQ ID NO: 409938 - DNA, 600 bp, Homo sapiens
agagacacaattgcagtgctggacacagtagagaaagtctgcacctctaccccatcaggcaggcagcctctgtgatcataaagggtcttgaaaaaggggtccttgttctcccaggcacactactgcggaaatggctagggcttctctcataggcatgcagcatagatgcacatacagacagccttcttgaaacaattcgggttgattgcagccctacaggagaagcactctccaggttcaggactgcacaagaggcagagtcataattcttttctacttggaacatcaacatttctacagataaaaagagatgcctgtctgatctgagtaaccagaacattaggacaggagtgkggctgtggatagcttttctgctggcttcacaggaaagataaggtagctcccacccttcaacctgataaaacttcagcacatctaattgagacccccctacaccagccaccaccttcatcaaggctgggacctctacccaccattgggtattatatctacacacctgttttagctacaactcggtgccaaaagagggatgcttcccctatttgcctgaggcctaaatcatcaactcagtaaataaaa

SEQ ID NO: 409939 - DNA, 599 bp, Homo sapiens
aactatggggaggcagtagagggaagtggcgattcacttacagtctctggagcaggcagtgtgggcatgtatctgggtcctacttgctacttgatattattatatctttgattgcatagtctcatcttcagcaacagcaattactcataggtcaacacgttttgtaaactaacttcacttctgcatttgctttagtttttttttgctttgattacgtttactttaatttcacagaggtattaagttagaggtgtattagttgctaagaaatgaaaaacacaaaatgctaagacatcaaaaacaggtaattcaactaatcattaatggtgctcccagtttttgcctattatgaacaaagttgcaatgaacacattctgtgagcagaggcttttcctttgttttgattacttcttgaggacagctttctacaggtgggattacaaggtcaaagggcatgacatttttttggaggggagggaatctcctatagctatttmtgacctgttttctaaaacatttatatgtatttacactgccttctgcagacctgagcttcctttcatctttggaaatatcgattctcacctggaaaatagtta

SEQ ID NO: 409940 - DNA, 547 bp, Homo sapiens
gatcctttttatttctgtggcataaattgtaatgtcttctttgttatttctgattttatttatttgagtcttctcctttctttctttgtctagctagatgtttgttgatttttaaaaatctttttaaaaaacctgttagttttaccaatctttcttattatttttctattctctatttcactggtttctgcactaatcataattatttccttctgtctgataattttcgcttagttttttcttattttttatttccttgaggtataaaagtagattgtttatttgagatttttcctgtcttaaaatgtagatatttagcactataaacttccctgttagtattgsttttgctgcatctcataagttttggtattctgtgttttcatttgagttttaatatggtttggatttgtgtccccacccaaatctcatgttgagttgtaatccccagttttggaggaggggcttggtgggaggtggttggatcatgggggtggatttcccccttgctgttctcatgacagtgagtgagttcttacaacatctc

SEQ ID NO: 409941 - DNA, 462 bp, Homo sapiens
ccaagccattagataaagggttgtttggcaatttgatatctgcgtgttaaaataatcaaatatatattgtagctgatggcttcaataataataacaaatctagatttttgttgttgtcrttgttgttacatccatgggacaagaatttattatctatcctcagtagcaaaatttgaaaaaaataaaagcctagcacttagtagagcaaaataaatattagtttagtgaataaatttgtactctgaatttaagcactttggtcctttcctaagatttgcccaaagcagaacgcaagatggtcaatctttaaccatccctgctaccaactctgtaatcaagtctcagcactgcaaatatttccaaactgtatctaaattgcaggacactttattctggtttgctagagttggtgtttaaatagaaaaaaaaaacagctcctttctggattattaattattttag

SEQ ID NO: 409942 - DNA, 550 bp, Homo sapiens
caggcaagggtgactcacttataaaatggatgagattagaaagagataccagcttagctcaggctaaaacawtggagacctttgggcgcaggatgacaaaaggtaaaccctggcttgtcaggtgggtcattcagagggtcgccagctgccacatcaacaagtcagggctattatgactaaataattctgggaccctaagtcctggaaccccatagagagaaactgtgagaaggacagtgaggactgggacaagcctatagaggttcctttcctctcttcatgtccagttgtcaccaccaagataaaagcagaccaactgtgcatacagggagtagctccacaagacttgcccccacctgaaagactgcagtgaaccccaatgcaggattataccactaaagaattggcagagctgggaaattggttcagatagaaggggagacagttgatcaagggatggcttctctgtctatgggacatgaagacagagggtattatactctccagacttgagataagtaaaatggcatccctcacaaaccacccatcc

SEQ ID NO: 409943 - DNA, 508 bp, Homo sapiens
agataacattatagttccaatgaatacaaatcagatcggcaagcctttgttaatttggtcaattggcaaataaatttagctggcttcattggagttcttgacaatcactatccaaaaaaaatttttttcagtttttaaagctaacaacatgggtccttccaaaaattacccatygtgctccattggaaggagcagtgactgtgtttacagatggctctagccatggaaaagcagcttatgtgggacctaaaaacagaattattcaaactgactttcaatcggcacagagggctgaattacaggcagttatagctgtgttagaagactttaagcaacctgtaaatattgtctctgattcagcttatgttgttcaagccactcaatacatagaaactgcactcattaaatatcttgtggatgaacaactctatcagctgttttcttctttacaaaaggcagtgcgtgatcactattttcctttctatatcatgcacattcgagcatatac

SEQ ID NO: 409944 - DNA, 576 bp, Homo sapiens
aaaacttagaaatgaactttactaaggatgttgaagatctgtacactgaaaaccaccaaacaatggtggaaaaaattgaagaagaaaccagcaaatggaaaactttcctgagtttgtggattgaaagaattaatactgttaaatgtccatactatgcaaagttatctatagattcatgcacacctcatcaaaattccaactacactttttatagaaacagaaaaagaatcctacatatatatggaaccaaaaagacctcaaatagygaaagcaatcttgagcaaaaagagcaaagttggaggcgtcacactacctaaattcaaagtagactagaaagctatagcatacaaacaatatggctctggcataaaaacagacacacagatcagtggaactgcagaaaaatttcacgaataaatccacacatttatggtcaattgacttgtgacaaaggtgccaagaacacactgtgggggaaaggagagtctcttccactaatgttgttgagaaaactggatatttgcatgtggaagaatgaaattgcaccattatatcacattgtataaaaaaatcaac

SEQ ID NO: 409945 - DNA, 618 bp, Homo sapiens
ttcaaagaggaaacaatgtacaaaatatgtgatagctggcaacatagactaggatcaaattttagtctgtggattttattttccctcattctctatgtactctttatgccccttgttttcatgtcccaatgtaaagccctaagatgtgcatcattcactatatccattctattttatcacagttctgtcattttcctaggcttaacattctcatcagcattatttgaggactgtgacaaacaaamaaaaaaaaaacccagatacagaaattctggagcattcttaatgtggatttcaacaagaacagtttttaaatccctgtagcatgactgccatctagagaagactagagatattgaaattaaccaagctaatcaagtatctttatgggattacttttttctaaccctttgataaaagccataaagaaagacatttcaaacaagaaatgtagaaaatacttaaatgttgtatggtgccttcagacggggccattaatctgtttttcacaaaacaatatttagaaattgtattctgtttctaaggagaaatgatgttattagtgatagcaatctgcttgcctttgaatttattttatggattccttatgaaaatata

SEQ ID NO: 409946 - DNA, 622 bp, Homo sapiens
ctttccttctgacccatacctcctgggccccaaccatgacttttttgaaagtgtagcccgaaaattctccgtacctctgaatctacttcctctgatccctgcctcctaggtactaatggttcagactttcatttcctctcctaagtattagagcaagttgtatctcccaagggatctaaagaagctctatgctctgtccctaggcatctaggctatgaacccagggaatcttgtccctggtgtctctcccaatttaggcatgcagctctcgacatgggcagttatatgggaccygttccccaccacccttgccagggccccaagtttgtaaatggctaggaggattgctctcccattgtgtaagatgctctcctcccctgatttctacccagcttacccctcagcaatacaatctccaagccttggctccttggccagggccttagaactgatggcccagtactttaacaactggaaatgggtctatgacaacataatagatcaggatgaaagtgaattgagtaagtcaaggagagaagagatagagagagagagagagagagagagacatagagagaaaagagaaggagagagagaaaaagagatagagtagtaaagaaaa

SEQ ID NO: 409947 - DNA, 579 bp, Homo sapiens
acccctttcaactttttccaccaagaactaagaatattttgcagtgtccaggttcctgagatacaatccccttctgtcttcctccttcccaacactgaagctgccccagctactgctgacatgggcttcccagtccaaggatctaacacatacaccatatacatgctcacaaataatctccaggactccaccacagtccccaaacccatcattctgttcatgtccacaaatgacccctacctttgggyttatgcatgccaccagtcacagcccctactagtgagtatgcataagcagcataccctgaacttggacacaaacctccaacatgttgcttgtgatatggctggaggcatgctagagctaggaagctggtccctacagtcatgcatctacatgtctccagctccagtccctgcagctgtgtatatgcataaaactgtgtgacccctgtcacccacccttactgacacacacatgcctatagttggccactgcagctgcacacatgcttgcagctggcctctgccccaacagctgcatataagcacacaaccattctcgcctaccagtcctcac

SEQ ID NO: 409948 - DNA, 579 bp, Homo sapiens
acccctttcaactttttccaccaagaactaagaatattttgcagtgtccaggttcctgagatacaatccccttctgtcttcctccttcccaacactgaagctgccccagctactgctgacatgggcttcccagtccaaggatctaacacatacaccatatacatgctcacaaataatctccaggactccaccacagtccccaaacccatcattctgttcatgtccacaaatgacccctacctttgggtttatgcatgccaccagtcacagcccctactagtgagtatgcataagcagcataccctgaacttggacacaaacctccaacatgttgcttgtgatatggctggaggcatgctaragctaggaagctggtccctacagtcatgcatctacatgtctccagctccagtccctgcagctgtgtatatgcataaaactgtgtgacccctgtcacccacccttactgacacacacatgcctatagttggccactgcagctgcacacatgcttgcagctggcctctgccccaacagctgcatataagcacacaaccattctcgcctaccagtcctcac

SEQ ID NO: 409949 - DNA, 591 bp, Homo sapiens
caataattattttttaatgacaaatgatgaatgtgtaaccttttacatcaaagaagatatttacacattttactttaatatacaacaacctgtactctctattgaactggctcaaacaacctactgttatagttactgggttactggtacttttttgtttttttttttgagttggagtctggagtgcagtggctctatctcggctcactgcaacctccgcctcccaggttcaagcaattctcctgcctcagcctcccaattagctgggactataggcacgtgccaccacccggctaattttttgtatttttagtagaaacaggatttcaccgtgttagtcaggatggtctcaatctcctgacctcrtgatctgcccgcctcagcctcccaaagtgctgggattacaggcgtgagccactgagcctggccaattgctggtactttaaaaaaaatcagatctagatctaggtccttacctgatctgtatgtaccatttctcactaattttttttaaagaatatgacagcctgtctgcagcttccaagacaaaagaagtttcaaatttcttattggtatcacagggtctaataa

SEQ ID NO: 409950 - DNA, 572 bp, Homo sapiens
gattattgcttttcatagtcttattttaatgatgaggactttcttgtgcctcttcatgatttttaactatgtattaatatacaccaacttttccatatggatggttatatactttgaaaatcagctgaacatcgccctgattcatggtagttgttagtataatattgtgacattgttttaaaaacaaactaggaaaaaatagtttggcagttcttcaaaatattgaacataggtttaccatatgacccaacaatttcacttccaaatatatacccatgagaaattaaaatatatgtgcagtgcacacaaaaactttcacacaataacagcactattcataatagccaaaaaatgaaaacagcctatatgatttttcaactcattaacagattaacaaaatgtggagtgtttgtacaataaaatactatttggcaataaaaaaatgaaatacggattatcattttaacatggaagtattacaatattatgccaagtgaaagaagctactcacaraagaccacatgtcaaatgattccatttgtatgaaatgtccagaataggaaaatccatca

SEQ ID NO: 409951 - DNA, 541 bp, Homo sapiens
gtgtcagctggctatttgagtaaaaaagatactccatgttaaaagggactagttcagaatcatgcaagtgcttttgttcaagacagtcatcttcactatgcagtagaagtgcttatgaagtgttccattttattttactttattttttatatagagactgggtcttactgtgttgctctggctggtcttgaactcctgggctcaatccagcctctcaccttggcctcccaaagtgctgggattataggtgtgagtcatcgtgcctggttgaggactttcatttttttaaaagtcacaggatatgaaagagatgtatactcaagggttaaggtttaataaaactatttattttcactgcttcattaaggacatttttaagtaaaactsgcttttctccccttcacttgaatggagaatatgactgctagtaatgtttggttctgctaccctgagttctgctaaggtgtcagcagttttattcatgtttccaccatcagtgcaaatgtaaacacagtgaaagaagcaaatatatgttgttagt

SEQ ID NO: 409952 - DNA, 562 bp, Homo sapiens
ttgtgctcagactccatacactctttgtccctgagtatcactagagtatctggttaaggtcccatccacccttctggtgacatgggtcttccatccctttatcaaatccaccccccactttttaggtggagctaattctgctccccttgagtgtggtctgtacttagtgacttactctggtgacgcacttgaataaaatacagtgggagggacagtgcatgcctgcagcttctttcttgctttttgtgggatcacttgctctgggagaagccagtgctgtgctgttaggatgctcaaagggcacaaaggagaggtccatgtgatgaggaactgggtcctcctgacaacggccatgtgagtgagtcaatccaaagccagaacaaagtccctgctgacatactgactgcagcctcaggggacactccaggccagaaccacaaaactaagctactcccaagtttttgatccacagaaactgtgtgagatggtaaatatttattattattttaggctgctaagttttggactaatttattrtgcagtagcaaacaaataatatttt

SEQ ID NO: 409953 - DNA, 564 bp, Homo sapiens
gggccagtgatataaatatgcatttcccattcacttgtgagtttaggattttttttttttaaagagctctaccatgttcctttgatctttgctttttatgcagacggggtccacagagaaccagctaatccagagcctacagagcccggagcacagtcaggcatttcagaaatgcacwtggatggtaactaggagatttcttgaacaatagaaagttcccaacaaagctgttagggctcaagaggaccagctccaccacccacccctgctgatctgggagctgctacctgggctgagctggctcccgtccacagggcccccagttctctggctcaattcaatacctcctgctgcggtggcttgtttcttcttgtcctgaatgttgttcttcagagctgatgattaatgccttccatttagggtgagaaaaatgaccttgctgtctatgcaagtgaggatcatttattccatctacaaaagcagcacacatctacttggctcaactcagagtatttctctttgctgtcttcttgttaaacacgatcgtttcttcaagcgaggttt

SEQ ID NO: 409954 - DNA, 585 bp, Homo sapiens
ttctcagcacctgtctaggagtcagtctcttctttctgtccacctgccctttcaatttatatactcatgcttttactttaaattgcatttgtagttattacaacgagttcagtgccatctccactcaaagcagtcccaatctttcactctttcctttggctcctcaaagtgatcaattataaagcagaggtactgattgccttcaagcttcaggttataggaccttaggctgggagctgatggccccacacagctgatcttctggttttgtaatgagagaaaatggaagaatctctctggaaggaaattgaacactttaatagytctgcctatctttctttgccagatcaattgtaagttagcactaaaatgtctctagagttactagagacattctaactctagaaagttacagtctctcgtgcctcctgtatccctgccatgtcaatacaaaggggcagcctggctggaggactcagtgctgtgccccaaggagttttgctaacaagttagttaagcaccagaagaggtcaggctggggagagagcctgtgtcctgattttggaagtcattcacgttggaatt

SEQ ID NO: 409955 - DNA, 624 bp, Homo sapiens
tgctcaggggaaggaaaataggcttcaatgcatgggatggagacaagtgtgcagacatccttactctgccacagtttttgcaggatatatatgtagatactttggggacaagagtgaacatgagtctggatctacagaaatgagtcagaagtacaaaggtgactcgaacaatttcctaagaaaatttagcagtcaaaaccatggaagtggatgagaagatcaggcagttgacaatgggaaaagaactatatttaagagaggaatttagttggggaggaggccaataaaggagagaggagaatgctaggagccagtaaataggkgaccagcctgcaaagagaagagaggtaagagtgtcaggaaggagtgatcgagggagaaaggctgcctagagactgggaaggacgagatgtgagagggtggggaattggaagcaggagacaccagtgatcttgcatgacagctttgggagtgcgagcgtcctgggcaatttacctggaggagcaagcacgcagctctgcacaccaggggttgatccatggccaggttggggatgaggagcaggaagccgcttcacaggttctgtgtgacgttgggaaggtgggaagggggtcagtagcagta

SEQ ID NO: 409956 - DNA, 473 bp, Homo sapiens
cttgcaaaagattaagagtgcttaagaattcttagaaacgttcttctttaaagtacaatgcctttgggttttcagtaagattactgattgtgcttcgattaaactaaagtctcattagaaagttccaaaataaggcctaggaagactaatgaaaattcattccatttttaaaagctaagattgacagtaagtgtattgccagaatttgcaagggttttatattaattacaacatcaaggaagctggatttagaattgtccctgggagtctaccacattcaaaatccatcacacagggctgctgctcacagattacaattgttcttccccgggaggaaggagcggccatcctcggctgagctgtagctgctgtgagacagcagagaaawgtatgctcccaatcagaggatgaggtcagggaagacaggaagaggtccgatgtccaagcaatctgggaattggggtttttcatcg

SEQ ID NO: 409957 - DNA, 490 bp, Homo sapiens
tctctgggttcgggagtcccatcttcatttggtgaagcactccttcagccaaactcggcccggccaagacaatcacctgtcactaattttcctgccattcggtttaaagcctatgataaagaaaatatctaaaaagaaattgctatctgaaattttgattctattttatttctattgcaaattgcttctagcagaacctgacaaaaataacccctgctctttctgaaaatgatcacgagtcaccataagggcacagtatgccttactaaattacactgtcaactggaaattagcaattgacctgcrcatccctttttaataagaacatccctgctggtattgatttatagggagcattatttcctattgcagtatgagtagtaataatttttccttggaggcaccttaagtttttaagagttcctgtaacaaaggagattttaacaaggcaggagtaattttatgtgattgtaggctgtttgttatgcac

SEQ ID NO: 409958 - DNA, 582 bp, Homo sapiens
acctggtttatggtattttgttattgcagcccaaatgaactaagaaaataataccataatggagttctgttatagtgttctaaatgaatatttatatcttttgggggaataaacttctgtaagtaaaatttcaggatcaaattgtatgattgtttkaaaggctcttgggtgaaaaagggccaaattgtttctaaaagtttgtcagtccacactgtcatcagcagcacaatgtagcggaatttgaaagtgtgttttctagagtttgacagtgaagtatggtactgcttgtttattgaggctaatagttttatcttttattccttttttcccagtggttattgttctattgaaatatgtttatgacatctattaaataatgatgtggatcttattaatctttatgataaatgatttattagaattcatgctaatttgcattaaagaataagcttataactgtaggtacttagtggaagtttttagaagtgagtcctggggaaaaataacccaattaaaaatatgtaggcacattacttgaaaaaaaaactcagaaaaaagaaaaacacccaatatgcatgttaa

SEQ ID NO: 409959 - DNA, 513 bp, Homo sapiens
catgaataatacctctttccatatgtgtacaatgtcttcatagcatgtgtgaatttcagaattggaatagagtttaataagcaattaatacaaaccactcattctacatataaggaacctgccatgactagtcacttgtgtcacagaagcaaatcaatactttatttcttcagcatcctaagatctaaattgctttaaaggtagggtaaaacattaagtgtcttgaggtaagccaataaaagttgttttttactaagaaaaataccacataaaacaaaatyaattgcacccaaactcttttctagacactgataaacaagtcttttaagattccagaatcctagatagtccccacatctcaacacgacttgttgttttctcagagcttgtgttttataaagtaaacaattggtagagagagaataactgctggccactggaagtgtcaaacattttaaagaggcaggtgacctatgtggacactaactgcccattacatggctactgttgatt

SEQ ID NO: 409960 - DNA, 513 bp, Homo sapiens
catgaataatacctctttccatatgtgtacaatgtcttcatagcatgtgtgaatttcagaattggaatagagtttaataagcaattaatacaaaccactcattctacatataaggaacctgccatgactagtcacttgtgtcacagaagcaaatcaatactttatttcttcagcatcctaagatctaaattgctttaaaggtagggtaaaacattaagtgtcttgaggtaagccaataaaagttgttttttactaagaaaaataccacataaaacaaaatcaattgcacccaaactcttttctagacactgrtaaacaagtcttttaagattccagaatcctagatagtccccacatctcaacacgacttgttgttttctcagagcttgtgttttataaagtaaacaattggtagagagagaataactgctggccactggaagtgtcaaacattttaaagaggcaggtgacctatgtggacactaactgcccattacatggctactgttgatt

SEQ ID NO: 409961 - DNA, 513 bp, Homo sapiens
catgaataatacctctttccatatgtgtacaatgtcttcatagcatgtgtgaatttcagaattggaatagagtttaataagcaattaatacaaaccactcattctacatataaggaacctgccatgactagtcacttgtgtcacagaagcaaatcaatactttatttcttcagcatcctaagatctaaattgctttaaaggtagggtaaaacattaagtgtcttgaggtaagccaataaaagttgttttttactaagaaaaataccacataaaacaaaatcaattgcacccaaactcttttctagacactgataaacaagtcttttaagattccagaatcctagatagtccccacatctcaacacgacttgttgttttctcagagcttgtgttttataaagtaaacaattggtagagagagaataactgctggccactggaagtgtcaaacattttaaagaggcaggtgacctatgtggacactaactgcccrttacatggctactgttgatt

SEQ ID NO: 409962 - DNA, 574 bp, Homo sapiens
atgcatgcaaatgcttaatcacagtgtcaggtatacagtagtgttcaataaaagctaactgatttttatygtcatttatccctatctttgacgcatgaacctgaggctttgtaaaattcagatggaatgaaaagggaagtctcattaaatcttatagaggtatttttaggagaatgcatgggaatattctgagcttctcctgaggcaaactgtggtaagtatactctgtggatattgaggaattaagaactaatatttgaaagaaaaactgaaattagttcaaaacaagactacataaaaaatacactagggccttgagactatatttatgagatatgtgtgagaagaggggcagggcaagagtctggagttctatatttgatttagcagtgttctagcagagttattttcggaaaatcgttttggtatgactccagtatgtatggagcttccacccatcctaaagtaaactgagccaggtatgttattaaatggcgatggagtgattctttatgataataaacttgattggagttattcgggtcacagtaggaagggctcagtgacttaggaa

SEQ ID NO: 409963 - DNA, 574 bp, Homo sapiens
atgcatgcaaatgcttaatcacagtgtcaggtatacagtagtgttcaataaaagctaactgatttttattgtcatttatccctatctttgacgcatgaacctgaggctttgtaaaattcagatggaatgaaaagggaagtctcattaaatcttatagaggyatttttaggagaatgcatgggaatattctgagcttctcctgaggcaaactgtggtaagtatactctgtggatattgaggaattaagaactaatatttgaaagaaaaactgaaattagttcaaaacaagactacataaaaaatacactagggccttgagactatatttatgagatatgtgtgagaagaggggcagggcaagagtctggagttctatatttgatttagcagtgttctagcagagttattttcggaaaatcgttttggtatgactccagtatgtatggagcttccacccatcctaaagtaaactgagccaggtatgttattaaatggcgatggagtgattctttatgataataaacttgattggagttattcgggtcacagtaggaagggctcagtgacttaggaa

SEQ ID NO: 409964 - DNA, 444 bp, Homo sapiens
caatttaaatgaaaagatatagacattaaagagcgatccgaaaatattacaaacaacaacaaataacctcatgctagtaaatttaaaatttagatgaacaaattcttagaaaaacagggcttgccaaaactgacacgacgaaatggagaatctatgcttattacaccttcacaaaatgaagatmcacgtccatgtgggtgtgtagggtctacagtggtatctcatgtggtttaatctgcatttccttgaggacatgcacttggtgtggaacttttcctgtgctcatttgcttttcgtggattgtctttggtgaggtatcttttagggtctttggtctgttttactgagttattttctcattattgagttttaagtattctttgtatattttggataaccgtcctttattttatatgccttttgcaaatattttctcatagtctt

SEQ ID NO: 409965 - DNA, 547 bp, Homo sapiens
tacaggtgtgagccaccacccccagccgcagtcctcaattattttaagagtttaaataagttctgggacaaaaatgtgagacttgctctgctaacttagtctttcagtatattgcccctttctcaatctcaaaccacactagtcaccttgctgcttctcaaccccaccacacagtttcctctgctaccttcttataacttagtatttcctctgctttgtgtgctagttccccatgaatccatgtggctcatgctctcatgtcctttagatctctgctcagtcaccacaacacataggcctcctttgataagcccrccgcaaatcagtctgtattaccctctaatcaaatacatttgcttacttcatcatagctcttacaactacccaataaataacattctgtgttatttatttgtgtgtctttgcttattatctctttgtttactgctgtctctagtgctaagaaccatatatgacatacagtaggtacttaataaatattttttgaattcaaatataatgcaaggctgtggtcagcatgaagaca

SEQ ID NO: 409966 - DNA, 547 bp, Homo sapiens
tacaggtgtgagccaccacccccagccgcagtcctcaattattttaagagtttaaataagttctgggacaaaaatgtgagacttgctctgctaacttagtctttcagtatattgcccctttctcaatctcaaaccacactagtcaccttgctgcttctcaaccccaccacacagtttcctctgctaccttcttataacttagtatttcctctgctttgtgtgctagttccccatgaatccatgtggctcatgctctcatgtcctttagatctctgctcagtcaccacaacacataggcctcctttgataagcccgccgcaaatcagtctgtattaccctctaatcaaatacatttgcttacttcatcatagctcttacaactacccaataaataacattctgtgttatttatttgtrtgtctttgcttattatctctttgtttactgctgtctctagtgctaagaaccatatatgacatacagtaggtacttaataaatattttttgaattcaaatataatgcaaggctgtggtcagcatgaagaca

SEQ ID NO: 409967 - DNA, 589 bp, Homo sapiens
gttgatgatgtgatctgtacgcatagtggttaagactgagggatatacattagaccttcattcattccacaactatttactgatcacctgccgtgtgccaggcactgtgctaggcacttgagagacagaatacagcaagacaaacatagttgcttcctttatggaacttatagtccagcaaatatgagactccctggatttgagtcacaatggctgcctcctagctgaatgactttggggaacttacttaacctcttcagacctcaatttccttatctttaaaaccggaataatcatagtactttcctcatagggcagtatgactattgaattgttgatatgtgaatgcatgtgaaactcataaatcataagattggcacttacagcttgtttcactgggttgtagattaggtgtgcatgtatggtttcactaaaagcttgtacttgaggcctaacaaaattagcaatttaattatgagtgtttaataaacgctataattactggacacgactctaagtagcagaagatatggccgggkcgagcagatagatgttagagagtacaactttctgagtttgggtaacaaga

SEQ ID NO: 409968 - DNA, 560 bp, Homo sapiens
catgaaaaagagaaagttctgtttgtaaaggatttttttatgaagtcacaggcccaagggagatgagtacagaaagctatttagggtaccaagaataaattggatggccccctctctattcccttttttaatccccctaattatttattctgcaacttctcccccaacaagtatgtaagccacattagggccgggatttttgtttawtgtggcatccccagtgctggtatgtactctgtattaaaaatatattaatgaatgagtgaatgaatgaatgaatttcatctgaagaatgagccttccagacgaattccttgttaaaataagccagcacattgtctataaagcagcttccttgattaaggggcaaggtctcagtttaacgtgagataagagtttctgatttcagcatccagccaaatgatactgttctttggaatgcactctcttcttccctccactagtttttcttccctagcatttgttttggatctgtagttacagcattttctgctcagaattcaactgagggaaaaaaaaatgtgttttgagtaatactc

SEQ ID NO: 409969 - DNA, 560 bp, Homo sapiens
catgaaaaagagaaagttctgtttgtaaaggatttttttatgaagtcacaggcccaagggagatgagtacagaaagctatttagggtaccaagaataaattggatggccccctctctattcccttttttaatccccctaattatttattctgcaacttctcccccaacaagtatgtaagccacattagggccgggatttttgtttaatgtggcatccccagtgctggtatgtactctgtattaaaaatatattaatgaatgagtgaatgaatgaatgaatttcatctgaagaatgagccttccagacgaattccttgttaaaataagccagcacattgtctataaagcagcttccttgattaaggggcaaggtctcagkttaacgtgagataagagtttctgatttcagcatccagccaaatgatactgttctttggaatgcactctcttcttccctccactagtttttcttccctagcatttgttttggatctgtagttacagcattttctgctcagaattcaactgagggaaaaaaaaatgtgttttgagtaatactc

SEQ ID NO: 409970 - DNA, 560 bp, Homo sapiens
catgaaaaagagaaagttctgtttgtaaaggatttttttatgaagtcacaggcccaagggagatgagtacagaaagctatttagggtaccaagaataaattggatggccccctctctattcccttttttaatccccctaattatttattctgcaacttctcccccaacaagtatgtaagccacattagggccgggatttttgtttaatgtggcatccccagtgctggtatgtactctgtattaaaaatatattaatgaatgagtgaatgaatgaatgaatttcatctgaagaatgagccttccagacgaattccttgttaaaataagccagcacattgtctataaagcagcttccttgattaaggggcaaggtctcagtttaacgtgagataagagtttctgatttcagcatccagccaaatgatactgttctttggaaygcactctcttcttccctccactagtttttcttccctagcatttgttttggatctgtagttacagcattttctgctcagaattcaactgagggaaaaaaaaatgtgttttgagtaatactc

SEQ ID NO: 409971 - DNA, 510 bp, Homo sapiens
tgtgaaagaactaatgccccaaaagaaaaccaagagaatagattctgggcagcaagaaaactaacaaaacttacctccaaaatgtttaagacttagttcaggtagtatctttatcaggtaaaataaaarcatatcaaaccaaaagtgtactcactctctcaccccaaaatgaagaatacaccaatgtaatataatatgattttttattgacttctgtcctccacccagctcctattctaaaatcgggccaaacaaaaattcttatcttcttgagaggggcgaggggaaaggtcaagttagagaatgactgccttataatcatttgggactttcttagttcagcttataggacatattgtgttagtaattattggtgtatttcccatacaactaataatttaggatattttatttcataatgactgaaagaccaactgttttagttcatttttgctactctaatgaaataaccaagaccagataacttctgatcagaaatatattggctca

SEQ ID NO: 409972 - DNA, 510 bp, Homo sapiens
tgtgaaagaactaatgccccaaaagaaaaccaagagaatagattctgggcagcaagaaaactaacaaaacttacctccaaaatgtttaagacttagttcaggtagtatctttatcaggtaaaataaaaacatatcaaaccaaaagtgtactcactctctcaccccaaaatgaagaatacaccaatgtaatataatatgattttttattgacttctgtcctccacccagctcctattctaaaatcgggccaaacaaaaattcttatcttcttgagaggggcgaggggaaaggtcaagttagagaatgactgccttataatcatttgggactttcttagttcagcttataggacatattgtgttagtaattattggtgtatttcccatacaactaatwatttaggatattttatttcataatgactgaaagaccaactgttttagttcatttttgctactctaatgaaataaccaagaccagataacttctgatcagaaatatattggctca

SEQ ID NO: 409973 - DNA, 529 bp, Homo sapiens
tacttgctggttgtgtctgaaagtagtgttcatttctagtcatatcgctgccataaggagttgaaagacagtgaggagaaaagcctaagaagggcagcatggatgaccccagattaaatgtcaagccactcacagaaagtttagagacttacagtggaaagtcaaaaggacttgaaggagatgtaattacagattcaaagctcaatgactgtatgtgataatgtcacctgctttcattttaacagagacctatttacacaatgcagatcctaaagtgcagatttggaaaattccaagtaaatttatgaagggtttttcaatagcaacaaaagaacctaaaagcatagggtagtggaaggtattaaagttgctatgtgagaagaaacacttgaatctgtgaatgaattctctttcaccctcactctctgtctctgtctagtgcatgtgcacacacrtttatattttaagaaaagtatttttagaaggaatctaacaaagagatggtgttaatttggatcttttaaaccaa

SEQ ID NO: 409974 - DNA, 562 bp, Homo sapiens
tcaggtgggcaaagctgtgagctccacctccttcaactatacaaattttgatttggtaaaggaaattttgacctcattatttcaccctgcyttgaaccaagtttttatgcacctactttattattgctctttgcatgtacattaaaacaaatattttattttgactttaacctagaatgagcactacagttataagcaattgacacaagataagtctaaaagaaccaaaaaaacatagagtaagattcgtgatagacaaaaagtgacttgctggcaatattaaacattgctaaactcaagcaacgaaaaattaggctaaatattgtcaacagtgtcaaaatgttctccattcataatctattattgatctacgataactaataaatctgtacactgtgattcatgtttttggaaaattgaactcccaacttacacacaatattccagttgcctctgaggaatgaggttataaataatttaaaattttgatgtcttgtttttctttaatagaaaatttattgcctaggtatagtagtgtattagggttctccaggaatcaaaa

SEQ ID NO: 409975 - DNA, 572 bp, Homo sapiens
gacctggtcctgcctcaagaaagcccttataaatacagagcttaggaaaatgaaaaccattcaaagatgaataataaaaattatatctatactccaagacaaaagggaaaaaagscaaaaaatgtattaataaagtatatccttctgtaaaatattaccataccaatgaaagttatgaacaaatgtcttgccatgaatttggaggaaaaaaaatccttcaaattaaagtgatcacctggatgaaagatgatatataacacagtaatggaataattcagggaaagtatggtagcatagcaggaagagataagatatgagcttgcacaactaaggaaaggtgtagtccaagaaaaaaaaaatagaagaattaaggaaataaaaacaaaatggggcaaaagaatcagatagtataaaaatcacaggagattcacagaggttgagaatggcaaagttggtgtgatagaatagaagaaataaagaaagacccagaatgaccaatgagacatatcccaataaagttgctgggcttcaaagataaagaatcctttcggcagacaggtgaaaagactagg

SEQ ID NO: 409976 - DNA, 430 bp, Homo sapiens
ccatgtgaaaatctgcaacctaaattttctgttttgcgatgttgataaaaacaaatcaacctcccaaatgtcaataactctatttatagcgtttgcgtttatgtacgtagcatagagaaatacatgatgaaattatttttcttaaaaaattatttattattccgtttttcaattgctcactttcttattttctcttctctcttaattttaattttactttatcagattcagttattctcatgcattctttagataatatttcatctcaattatttcatttattattttcattraatattacaatttacatttctgcctgacctctgagtttcctagtgttcatctaaatgatcttaaagttttaaaaacattcagcacgtcacagctacatgattaacttgacctgtagattcttcctaatttggatgaa

SEQ ID NO: 409977 - DNA, 615 bp, Homo sapiens
attgttgtatgcatgcagaggggaaaaggaaagggagtgaacctgaaamtaaacaaatataatatgttttaaaaaaagatacattgaatcatgtttaagtatgaacaaattaaaatgaagagaggtgatggacaaaggctaggaaaaagaggctggctttagacacctaaaatctacagatttcagaagattttttggttgtgaccagacagctaaacagtctgtgagtactttggcaagaacataaatggcgtaagaactgctgtgtccatatttttgaaagctgactctaagtcaggagaaataactatcttctgtgaacccgggagaagagacgtatccttgacattagctgaggtcagtatggccagtcaattcttttctctgccaaaaaaaaaaaaaaaaaaaaagcccagaaagtaaggaaaacaagagggcaggagcctcatagatgaggaaaatcatatctttaaaacacagtttcttgttgataaataatcctcttactgcactggcaacaggactctctcctgccactccccctttgtcttacattcttaatcagttgattacataccactaaaaatacacataatgccacttcctcctttcctg

SEQ ID NO: 409978 - DNA, 553 bp, Homo sapiens
ctaggaacaacagactataccatatagcttaggtgtgtagtaggctacaccatckagttttgtgtaagtatactctgtgatgttcactcaatgatgaaatcacctaaagatgcatttcttagaatgtatcctggtcagtgatgcctgattacacctacatttggtgttgcatctcctgctttctttaaattaaatgcaaattatatactagataataattttctgcagagcaatgagcttgctttgaattccttgatatttccctaagaatggcactcatattgggtaggatcctgtctttggggagttacaaagtctaaatgaacaagaagttagttaaggttaggttagatgccaaagaagcccagccaattgtcctggactccaagagaccaatcttgaaagcaatcttggtattcagagtgactttacacttatctgttagtcaaggtgcaagctaagcttctgtaacaaggagaccccgaaactcggtagctcaccatagatagaagcttattcttcatgtaacaggaccaagatgagtagacagttc

SEQ ID NO: 409979 - DNA, 555 bp, Homo sapiens
attttgtggttgttttcccagcataacttagtgaaagctgacactgtgagactacactgcagtaataaataaatctcaaaatctcagtggcttggcataaaagagtttaatgttctcatttagggaaggctagagggggctccattttctccaggatacagtcttcttttaggcattgctaaattaattgtcatgaacaactacggctttgaacttacctgaccagcttctatttggatcatgtataaccaaatccactgagatgggacctcatgaaggtctgaattattattttattttcttgtatttcagatcctcttagcttgtttacatagtttgactcttgccattttgagatttgttttgattttggatgtactatgtttttaatcattaaagaaggattagtttggttggtccaaaatgaattttatactgctttccaaattcartattcttttgaacttattccaggaactgcactgaagtattggtctcaagatgtagagtgctatctgggcctctgcaatcctggtgtgatgggggaaggtttag

SEQ ID NO: 409980 - DNA, 546 bp, Homo sapiens
ttacagaaacctggccaagttcgcagaactctgagagctccgtgcctcccactccagctgaaacacttgtgggaaaactgagcaaatggatctgcctcgcaggatcagaagaagtaggcaccagcaattccatggctcttctcttccttgtagttttatttttcttgttatgaaataaagcaaagtaatacaaaatttataaagtacaaagcaaattttaaaaagtaatgaatgctctaaaagagaagtcacttataattccactatcaagtgtgaatcacttttatctttgcatataaatcttttgcaaaagttaaaatagcatgcttatttagaaaaytcaactatcacccagcggcaaccattgctaatctattggtgaccacttggtcatctctttattcatacctacacacacaggtatctctgtaatttatgtaggggtcactctctatatcatgccttgcatctggctcttttattcagttgaatttcagagagatctttctattatcaagaaatattaaaaaaagtattttaattgtt

SEQ ID NO: 409981 - DNA, 490 bp, Homo sapiens
aaaacacaattccactctctatctgctttataaagctagaggatttcttgaaatctcccaattattctttttattttactaaattttrtggttgtgaaccgaagtaatatatagtagatgctccttttgtgtgcaaaggtcactctaaccatgcgtgaaaaagccaaactttttaaaaaatggcattcaaaatattgccacacacctgtttaatgcataatgctaaggatttgaaaggtataaaagaatttaaggcaggacccagtcttacggatctttaaatacctgaggacagaacaatataccatgaaatgtgtgtaaatggataaaccaatagataaaaatgtgtaataaatgctagatatgaacagtactgtaggggtgcaaaaatgagaacgatgacttccctggaaagatcaaggaaagcttctttgaaaaagtggaattttgcaatgagaagaattcagggaagcaaaaaaggaggaatcaa

SEQ ID NO: 409982 - DNA, 490 bp, Homo sapiens
aaaacacaattccactctctatctgctttataaagctagaggatttcttgaaatctcccaattattctttttattttactaaattttatggttgtgaaccgaagtaatatatagtagatgctccttttgtgtgcaaaggtcactctaaccatgcgtgaaaaagccaaactttttaaaaartggcattcaaaatattgccacacacctgtttaatgcataatgctaaggatttgaaaggtataaaagaatttaaggcaggacccagtcttacggatctttaaatacctgaggacagaacaatataccatgaaatgtgtgtaaatggataaaccaatagataaaaatgtgtaataaatgctagatatgaacagtactgtaggggtgcaaaaatgagaacgatgacttccctggaaagatcaaggaaagcttctttgaaaaagtggaattttgcaatgagaagaattcagggaagcaaaaaaggaggaatcaa

SEQ ID NO: 409983 - DNA, 490 bp, Homo sapiens
aaaacacaattccactctctatctgctttataaagctagaggatttcttgaaatctcccaattattctttttattttactaaattttatggttgtgaaccgaagtaatatatagtagatgctccttttgtgtgcaaaggtcactctaaccatgcgtgaaaaagccaaactttttaaaaaatggcattcaaaatattgccacacacctgtttaatgcataatgctaaggatttgaaaggtataaaagaatttaaggcaggacccagtcttacggatctttaaatacctgaggacagaacaatataccatgaaatgtgtgtaratggataaaccaatagataaaaatgtgtaataaatgctagatatgaacagtactgtaggggtgcaaaaatgagaacgatgacttccctggaaagatcaaggaaagcttctttgaaaaagtggaattttgcaatgagaagaattcagggaagcaaaaaaggaggaatcaa

SEQ ID NO: 409984 - DNA, 648 bp, Homo sapiens
tttgttgaaatatatgctgcaagtcaagtcagtgatgagcggcatgtgttgaggcttaaaatatcacttttcatggtcatattctctacttcctctttcacaaactatgtgagctgcaattgtaatttcagtatcactaaatgaaggctacatggagtttcttgtcataatgaaggcattttctgtttgagtctttctcttctttcccaatccctttccccagaccaattcccacaaatgttccaccaactcatttccatcgtgttacatgtctgtgtcttcaggtactatatctgtattctaacattactctctcagtcccgatttgtggaagccaatgataacaagattgcttaggtacaactgaagaagccaattttcatggctttgggaaccttctgcatttagaactgtagcctaatgtataaccaagctaacacacacacacacacacacacacacacacacacacacacacacacacmccacacattaaatcaagaaatactcagaggaaagctccaagtcttatagcagaatggaagggaacatggaacacagttcagtttccagtctggatctcgtctgggtagatgaggtcatttgccatctggtagaccctgtgaaatgaaaccgtgagctaattcc

SEQ ID NO: 409985 - DNA, 648 bp, Homo sapiens
tttgttgaaatatatgctgcaagtcaagtcagtgatgagcggcatgtgttgaggcttaaaatatcacttttcatggtcatattctctacttcctctttcacaaactatgtgagctgcaattgtaatttcagtatcactaaatgaaggctacatggagtttcttgtcataatgaaggcattttctgtttgagtctttctcttctttcccaatccctttccccagaccaattcccacaaatgttccaccaactcatttccatcgtgttacatgtctgtgtcttcaggtactatatctgtattctaacattactctctcagtcccgatttgtggaagccaatgataacaagattgcttaggtacaactgaagaagccaattttcatggctttgggaaccttctgcatttagaactgtagcctaatgtataaccaagctaacacacacacacacacacacacacacacacacacacacacacacacacamcacacattaaatcaagaaatactcagaggaaagctccaagtcttatagcagaatggaagggaacatggaacacagttcagtttccagtctggatctcgtctgggtagatgaggtcatttgccatctggtagaccctgtgaaatgaaaccgtgagctaattcc

SEQ ID NO: 409986 - DNA, 661 bp, Homo sapiens
gtctatgctgagactatgcattcctgtgattttttatttagaaagacatattgaatagaacaggcaataaatatatttatttgtcccaggcccagactaagtgtttaagactyggagcttatggagaagaatttgaacacatctcataaatgcacatacctccccccaaaagttttaccaatcatttgatcataaattcactgactcccatgagagttcttccgttggatcaagttctgggatacggatgacaatattatttaagagataatcactccttgtcattctatacttaagaccctacacagctgtccaaagagtatatagtaggtgaataagaggttttaaggaatgacttgttgattaatgatatgttttaatttttcaaagtcctttcacacatttaatcttccataatcctagtatttgcaaagcagaaattgtactgacacttcaccctagaggttacggaaattctcttttataataggtatcatgtttctaagacagacctgactgcaaatattctgtcttgtggtcaacacaattatatccacattcaccatagcatgagtgtgatagttaatgctaagtgtcaacttgattggattgggggatacaaagtattaatcctgggtgtgtgtgtgccaaaagggattaa

SEQ ID NO: 409987 - DNA, 661 bp, Homo sapiens
gtctatgctgagactatgcattcctgtgattttttatttagaaagacatattgaatagaacaggcaataaatatatttatttgtcccaggcccagactaagtgtttaagactcggagcttatggagaagaatttgaacacatctcataaatgcacatacctccccccaaaagttttaccaatcatttgatcataaattcactgactcccatgagagttcttccgttggatcaagttctgggatacggatgacaatattatttaagagataatcactccttgtcattctatacttaagaccctacacagctgtccaaagagtatatagtaggtgaataagaggttttaaggaatgacttgttgattaatgatatgttttaatttttcaaagtcctttcacacatttaatcttccataatcctagtatttgcaaagcagaaattgtactgacacttcaccctasaggttacggaaattctcttttataataggtatcatgtttctaagacagacctgactgcaaatattctgtcttgtggtcaacacaattatatccacattcaccatagcatgagtgtgatagttaatgctaagtgtcaacttgattggattgggggatacaaagtattaatcctgggtgtgtgtgtgccaaaagggattaa

SEQ ID NO: 409988 - DNA, 310 bp, Homo sapiens
gctggctagtgcactgtgtgctcagctgctgttacttgttggagcaagatgttaggacygtgagaaaaaccactgtgaacctgtacctcacactgatgttagccccattgttaccagaggagcacatgaaagaaacacttttcttttcctctgacctgcctggccaaataatatttataattcattactttcagtaaggacaagagaacagaactttctgtattccaatttgaacgccttatgactagggtatcaatatctatttgccacaagctccaccacactctattgtcttacatcccctcatctc

SEQ ID NO: 409989 - DNA, 310 bp, Homo sapiens
gctggctagtgcactgtgtgctcagctgctgttacttgttggagcaagatgttaggactgtgagaaaaaccactgtgaacctgtacctcacactgatgttagccccattgttaccagaggagcacatgaaagaaacacttttcttttcctctgacctgcctggccaaataatatttataattcattactttcagtaaggacaagagaacagaactytctgtattccaatttgaacgccttatgactagggtatcaatatctatttgccacaagctccaccacactctattgtcttacatcccctcatctc

SEQ ID NO: 409990 - DNA, 603 bp, Homo sapiens
cacacatatgtttcctgtcggatttagtttgcaggcccttgtgtagggaagaaaagaacttagaggaaaaggttacatttaagggtaggctctaagaactgatcattagaaaggtagaaagagcatcgagaagaaaatgttagattggaaacaaaaggaggagataatttcagagtagagttgtgagtataagatcctgcagagaggtccattgagattatggcatctctccagtaagacagcactagtacctttggtaagaaaagtttttgcatggtgtggtgaaggcagagccaggctgccatgccagggaaarggagcagcaaagggtgaagaaaggaatgtgctccactctttcaagaagtttgatgtggaaagaaaagagaaaggaggactggctgcttttatagggagacatgctgaaagagttttctttgtatggcaaggaacacttaaacgtatcatttgtagatggaagagaagtagctactggggaggaaaagggaaatgattgaagatgagagagcaagagtaagagaagagactaaatagaacaactctccagagagcttatttccattacataattcactccacaaatgt

SEQ ID NO: 409991 - DNA, 589 bp, Homo sapiens
gttgatgatgtgatctgtacgcatagtggttaagactgagggatatacattagaccttcattcattccacaactatttactgatcacctgccgtgtgccaggcactgtgctaggcacttgagagacagaatacagcaagacaaacatagttgcttcctttatggaacttatagtccagcaaatatgagactccctggatttgagtcacaatggctgcctcctagctgaatgactttggggaacttacttaacctcttcagacctcaatttccttatctttaaaaccggaataatcatagtactttcctcatagggcagtatgactattgaattgttgatatgtgaatgcatgtgaaactcataaatcataagattggcacttacagcttgtttcactgggttgtagattaggtgtgcatgtatggtttcactaaaagcttgtacttgaggcctaacaaaattagcaatttaattatgagtgtttaataaacgctataattactggacacractctaagtagcagaagatatggccggggcgagcagatagatgttagagagtacaactttctgagtttgggtaacaaga

SEQ ID NO: 409992 - DNA, 537 bp, Homo sapiens
aaattcattgctagaaaagataaatggatgacatattggcccccaaaccctgtttctaatggaaaatcccatgcaagagatgaaacgttactagaaaacatgaaccgcttcattaactttatgcccaagttctatcagcrattgatttttaatgcctgtgttcatcatttatgagctcttagtattctttacatatattttaaattaacctttataaaatgaactagttatactgtgactctcactgtatcatctatataaagcatctcaaagaataattcacagaggagaaacagaaagcttatgagcctgtggttttgtggtgcaaattactaaatgtcaaatgtggcagctataaatgccactctatttgaaatgaccttaaaaattgccaacacattgtgaagtatacttttggaaaaatcaagattacattgctttcttttattatatttcaatggtatctttcagccaacgttcctagcaatataacagtgagtccatctgcatcacaatatatttattattgatagaaag

SEQ ID NO: 409993 - DNA, 590 bp, Homo sapiens
tgggttctagaaataacaattccacagacacagtaagcaatccattgagattcgtagagttgtctggaataattattttaaataggaagttaaaaagcaatggaggccgggccggtggctcactcctgcaatcctagcactttgggaggctgaggcrggcagatcacgatgtcaggagttcgagaccagcctgaccaacatggtgaaacctcgtctctactaaaaatacaaaaattagctgggcgtggtggtgggcacctgtaatcccagctactcaggaggctgaggcaggacaatcgcttgaaatcggaaggcgaaggttgcagtgagctgagattatgctactgcactccagcctgggcaacaagagtgaaactccgtctgtgtagaaaataaggtttgaaaacaggattttataagcctgcttgtaaccagtggtggggcaaaactgttcaatatagctttgttgttactggaactatgttaaaaataaattgccagaagctgattgatttaagagatgtttttgaacttatcactagaggatagctaccattggctaacagccaacctcttgttgtaagcccttg

SEQ ID NO: 409994 - DNA, 607 bp, Homo sapiens
attatcttcacttatgtgaagcagtatgcctcctaagatagtctaacactctcttccagagctattaatacaaagatcttcccatgatagtcaatttttgttaaagtttctccaaccacactggaagcaagaaaaaaattatttttttaaaaaagtttrttttaacaaggaggcaagtaagacattcttttattcccttttttatttttggcaaaatatgcttattgtaaaaattgtcgtttgctcttttttatggtgtaaatgaactttgttagacctatgactgcatgcattatatatgggtcagaaaagccagactctaggtctaatttttctatttgttagcttggtaaataaaatgaagatggtggtgctagcagcttaaaaactacacccaatgggaagtctggattatttaatgatttactactggaaaattaaaaataaatttaaaagaatgctagaaagatcacaagttctataaagagagagatcactgggagcctgggattatattctcaaatgaaattttaactttcagctctctggcaagccaaggaaataatcattgcttttatgtacaagtaaagaagtgacatcatcaaaa

SEQ ID NO: 409995 - DNA, 601 bp, Homo sapiens
gaattgcttgtggaacatgcatgttccaccccacctggaccccagattgtgcgcatcttcgatgagctctcagattccttgttcagagtggctgacttggatgaacacaaatgtggaattatgtcaaagtttgcaaaaattactagctgattaaaaacaaaacaaaaactaggcaagtggcctaactgtttatgtttgattttgaaattagtggaatccatctagacaaagaaaagtgtaaaagagcagtggacctcaatgttaaaatcttggatttgagtagtacatgtcttayggcaaacaactttcccaacaagattgagaagcatctcttactagaacacattcaccataacttttatctgatggggatcgtatcataattgatggtctccatgcagaagcaccaggcgacttggtgtgagaagctgcttacaaaatttttcttcatccctatactggtcagttaaaatgtttagaagaattctcagcaacagagatcctctgcaaaagttggtagggtattctgtgttttccagcagggctctccaaggaacaatagttaaaaattcagagactgtcatccagttccctgagaaac

SEQ ID NO: 409996 - DNA, 512 bp, Homo sapiens
taatagtttaatattctaaaggtatgttcaagtgactatccattttcttttcacttaaatgagtattttttctgctttttcattgcaattaatacctgattgcctcctgcttatttcttctgcctgtctactttccattctgcttttacaatgcttacgtgtcctcaatattttcttctgttaaaattttgaatttgcacatctagagagttcagtgctttataaggtaaactataccatataaacggaattagtttttatggctttagggtcttaaatttccttaagaatttactttcataatttcatggggaaaaaatgamccctttctaaagcactctttttgataaagtaaataaatctgttatttgaaaaatgacataggcatgtgggttttaacaagatatttgttttctggcattttctctgttatatcaaagagtggttttggtttgttttgtttttttttttttctcgtctggataggatgttatttgacaattcttttttaa

SEQ ID NO: 409997 - DNA, 563 bp, Homo sapiens
agattgggaattacgtcttatagtgattagaaggaaaaaaatgctttgagacttacagtttcccttaaaatattttcagaattgctaaacatatttttcagaagctgataaactcctttgactagtatctttaagtttttaaatgttatggatgcagatttcagtagtccttcacatctgtagttttatttaygttataaagctcaccaaaattttaaacagcagatcatgtagtatggtgggagtagcacttaggtcaggagaccttggttctggtcctaatttgccacagctgtgttattttaggcaagttagttaacttctgttggcttcaattttctcatctgtaaaataagggggtaattgtaaatgaccattgagttttattctaaggtacaaaattctgtagggatttttttgcatttgaaaaaacataaaataactttggtttgcatgcattatgggaaatagaaaacttcttagttattgccaagagagaaatgagatctctttatatcatatataaatttgtcagtctttccaactattaatagagagaaagt

SEQ ID NO: 409998 - DNA, 477 bp, Homo sapiens
ttttcactaaatttcaaatgaaaatgatttctaaactgagaaagtttcaatagctatatatttataattatagttacttaatataagcctctattatttattgtctttcagaagaaaatttttttaagatacagagtctcactctgttgcccaggctggagctcagtagcatgatcatagctcagtatagcctctaattcctgagctcaagcgctcctcccacctcagcctcttgagtagctagggctacaggcatgcactaccatgacctgtaatgctaattttttaattttttaaattttttgargagacagtgactagctatgtggtctgtgctggtcttgaacttctggtctcaagcagtcctcctgccctagcctcccaaaagcactagggttacaggcatgagccacagcacctggcctatactcatatttctgtttttagaacttgggcttctaggttgacagtccttgt

SEQ ID NO: 409999 - DNA, 288 bp, Homo sapiens
caagtttagaaacaaaactgtagctgaaaagttttctttttcaatgctttaaaacagacttcaaaaaaatcatttaagtttgataaaattaagctgttaaacctggctcttgtgcctttttaaaggagaaaatatttgattcttcaatttcttttgtgacatcttttcctaaacatgtgttataattctcaagtatatattttgtcttccccactagactggaagcttcttgaaggcataatgtgtctgattaatcttgstatctaacttagtacctaaaataatccc

SEQ ID NO: 410000 - DNA, 481 bp, Homo sapiens
attcataaactaagcagcagcagtggccctgtatcatcacagttgcattttggaaggtaaaattaaccatttggaaatatgtattccatcaccttctttatgcaaggtacttatttaggctgaagacacaggacagaaaagggctttgactatatacagatgaacatggacaaagataaacttcagataattagagctatgcagagactttatggtattgtgaagagacaattttcgattatgtgtaataggaaggtgtcccagaggatgtggcatttaagcagagatttgaataacaaaaacaaactagccatggaaataaaatgtaggaggaagaaattctaggcagagggagtagctagtgcaaaggtggtcacatgatgtgtgtgggtgtgtgtgtttccccctaggactctaacacagaaggygaaggagagaatggtgggaagttgcattggagaggtacggaggggctgcatca

SEQ ID NO: 410001 - DNA, 568 bp, Homo sapiens
taataattgaagatcttcctatcgaccaaatgcccttctcccctatgctcatctgcttatagccaggtgttttactctccaggcaaaaaactcaaacagttctctaaagggcatgtaggtatttatacctgagagtaaagcctgcctttttctggcatgtggaaaatccccataatataaaagctggcttcccaccctttcacttaaatatgaagccctctggttgacagtttccactatggataaagagatttaaatcagcctttttagcattcacttaggcagcacatataccagcctttttattactccctccttaaacatgaakaggtagccaaagatcttcagctactttagaaaagcctggaatttaaaagagaaactgagggaaactaacatgaatgtcaacaaatgccaaaggaagcaaaggaaattcagaaatccaaagagaactttaaaaactctctcctaatgctatccctcccctatctccccacccactgacaggcctcagtgtgtgatgttcccctccctgtgtccctgtgttctcattgttcaactcccactt

SEQ ID NO: 410002 - DNA, 601 bp, Homo sapiens
tatgtagtacatgacataggtgtagacactcactagactgaaaggagtacatgtttccaaagcagctttaattcacgtctctgctgagggtgattacaatagtaggaagcaggaggcaggtcttargctatagcaagaggtacaggcaatagcctctgtggcacaggattgagatacctgttcataagacatctcggaggctgtgtcactagacacagccccactcttatcagcatggggtgccagaaacatgagactcaatgggaaaataaaattaagaggatttgaatatgttataaaggaaaggcactttgagtaaaacattaattggggctgccatcatgtgaagatttttaaacttttgtagaacccagaggtgttgcaaatgccgctctctgagaaagcagatagtatgcagaagtggctcttcctctgatattggaagtaaaagattaacttcttgatggctgacttctcccaactgagtttaagctcacaatttcctgactcctgaaaattggctgtgactgccaccaaactgtatccagaaacccaaccatttgtcacctcccctgctatcacattggtccaagccacaatc

SEQ ID NO: 410003 - DNA, 546 bp, Homo sapiens
ccacacttcctgctagctgcttctaccaatgactgaagatgactagggtactaaaacatgcccattccagtgaaatagaactcttccaacaaggaactttggctgaaggattttccatcagccaggtttaacctttctaagaactgctgcattgcagtctaagattcttcctacccagttgtccttccttccctctcttcttgcacagatgtcagacctacaccatgctttggaggcattccctgccttcacctgctccccctgccaataaatctcttccatttctcatcctttcttggcgtctgcttctcagtggacccaaagttacatactatrtaataggacaacttggctagacatcatctggggtgggaaattgattttcagccaggggtacaatgttgcctacaagttaatttatctaatgtattactctggcctatttcagagcattctggggtcagaagcaaccctggacagtaccaggaggacccacagagcatcacaattagtgttaggagaacagccttgtgaaagtaagaatag

SEQ ID NO: 410004 - DNA, 534 bp, Homo sapiens
ctgggtgacagagtgagactctgtctcaaaaaaataaaaaaattaatggacaaaaaagacatgaacagaccacttcccaaaagaggacacagaagtggctgggaaacatgaaaagatgctccacatcgctatcctcagagaaatgcaaatcaaaactgcagtgatataccatctcacaccagtcataatggctattattaccagtcgccaaacaacagctgttggcacggcttcagagaaaagggagcacttatacactgttgatgggaatgcgaattagttcagccactgtggaaagcagttggagatttttcaaagaacttaaaacaactattactcaacctagcaatcccattactaggtatatatccaaaagaaaataaattcttctaccaaaaatgcatatgtattctcatgttcatcacagcactattcacaatagcaaagacatggaatcaacytagatgctcatcagtggtggattggataaagaaaatgtggtacatataataacccatggaatactacacagcc

SEQ ID NO: 410005 - DNA, 532 bp, Homo sapiens
ggctgtctggtcggggcctggaaagaaaataattgaaagattttagagaaggagttctggggtagaggtatgcaggtaaacatgaagagtttagtgtgacatattatggcccaatagaaagcatctaccatggaagagattgtgaacagtgaagcagatataataaccagaccagtttatataagccagtctttgttgtwggctaccctgaaactgacattttggcataagaaaaaagtggccatgctgccagagacaggctatgcatgggcccaggagcatggacctcccatcaccaaagctgacctagcttctgctgcttctgaatgtccaacctgtcagcaacagagatcaatgctgttatatcactatttattaatgagaccaactggccacttggtggtaagtcaactacaagggctagagggttgttttcacctattctgggtacaggcttgtctttcctgattgtagtaccttagccagcaccataatccaggggcttaaagaatgtctgatctatgggtataga

SEQ ID NO: 410006 - DNA, 618 bp, Homo sapiens
ctttggtgagcaagagttgtttctttataaaaataataaaaaaattagtagtcctgccttacctaaagtaacaattttcaagactcatacatactctctttcatttgaacataacttcatttttaataaaaatacaaataaaaacttttcttagaatagtaataaaatcagttttccatcccagtygcaatcaggatcaagatgtctctccctaagtgtaagtgctacatagaagttcaatatttttcctatgagggtaagaagcagaaattaattagttgttaccctcatattcactttaagtagttcaaataacagcaactttagaagattgttagctgaaaatcaaagttagtaaagttttagttgggggtggtaggagaaggaggagacagcaaatcacttataaatggcttcaaaacaggacccaaagcctaaattccaggaggttgagtgagtgctgtgctttcatgggcctcttcttcatgaaacaaagtgtgtaaaggttgccattaaggacaaacaagtgaaatactttatacattacagtggttggaataaaaattgggatgagtgggttccagagagcagagtactcaaatacaaggacactaattt

SEQ ID NO: 410007 - DNA, 502 bp, Homo sapiens
cggccttccaaagtgctaggagtacaggtgttagccattgcacccggcccgtttataatttagtatgaactcttagtactgtcctcttcgttaaatagaggcatggatttacaaaaaaccattgatataaaaaaaagtaaccttttaattcaaaatatttaatcagaaacaaatagctgtacttccttaaaagataagtcctcagcctgggcaacatagttaaaccccktctctagaaaaaaatataaaaattaggctgggcgcagtggctcacgcctgtaatcctagcactttgggaggctgaggtgggcgaatcacttgaggtcaggagttcaagaccagcctggccaacatgatgaaaccctgtctctaaaaaaaaaaaaaaaaaatagccggcatggtggcgcacgtctgtagtcccagctacttgggaggctgaggtggcagaatcgctcgcaaccggtaggcacaggttgcagtgagtcaagatcccaccattgca

SEQ ID NO: 410008 - DNA, 548 bp, Homo sapiens
agtggttaataaaactcaatatatattctttcaaaaaaaattcttagcaaatacaggcatagactggacacagtggctcatgcctgtaatcccagcactttgggaggctgaggcgagcagatcacttgaggccaggagttcsagaccagcctggccaataaggcaaaaccccgtctctactaaaaatacaaaaatttgccgggcatgatggcacatgcctgtaatcccagctactcgggagactgaggcacgtgaatggcttgaactcaggaggcagaggttgcagtaagccaagattgtgccactgcacttcagcctgggcaacagagagaaactctgtctcaaaaaacaaacaacaaaaaaaggcatactttgttttactgtacttcactttatattttacagataattgtgttttttaccaattgaaggtttctggtaaccccatgtccaacaagtctaacagcaccatgttttttaacagcatgtgctcattttgtaactgtcacattttggtaattcctacaatattttaaactgtttcatta

SEQ ID NO: 410009 - DNA, 621 bp, Homo sapiens
agcatgctgccccttaagacagtgtctttagaaaataccaacagagaaagaaacatcaccatgttaaagttggaatattgactttgtttattctttctctgtgtagtgatccagtcactcgttaccatgatattcattgtactattgttaattcaaatacatgcaaaatcatttaattaaaattgctaaagcccatatgataaaatgaatgaacgaatgcattattagtagaaaataaatatttccataagaatttcaagatgtttagctactaattgtactactgcataaagaaacacacaaaaatattatagtcttgaacgttaaaataacgaatatgtacaattatatttaacagtatttgtaaaatttttaagtttcatatatattaaagaataaattcaactttgtttgtatttttcccctgaaatagctttctttttgtcagatattcaatgcttatggcaccacagtcgtcatttttggctttgtaaactggacttttctacatatattccaactctactttaaccttaagctatactaaagaataacttttcctsctgtatgtcgttctgtttctgttaaataccagttggtacccaggcctctaactgccta

SEQ ID NO: 410010 - DNA, 547 bp, Homo sapiens
ttttcccctgaaatagctttctttttgtcagatattcaatgcttatggcaccacagtcgtcatttttggctttgtaaactggacttttctacatatattccaactctactttaaccttaagctatactaaagaataacttttcctcctgtatgtcgttctgtttctgttaaataccagttggtacccaggcctctaactgcctacctcaaagtgactcacaattttctaaaaatcatacctgctaaaataatcaacagaccaaaacaaaataaacatatttgccaytctttgtcgatattatcgaatccttaatataggccctgaaaaatctttagtaaatatgttttccttaaaggtagatactaagtttagaggaacaaaatgcacccctcccccatcccctcttgtttatagagggcttttggttttggttttatttcttttctttgtttactcatttatttgcattttttctatagtaactttaaatatcttagttttggtatatattatttccttacttccccaaattttaaatcacaatta

SEQ ID NO: 410011 - DNA, 656 bp, Homo sapiens
gcatttcttaaacttaccactggtttgacaatgttaatttgatcaaagagaaatccactagatataagtgtataataactgagaaatgagattattaatgttttgggggaatataggaagtaggtaaaattactgctgagagggttaataggtgacatcaaatattcattattttaccttkttgttcccaagtataggcagttgtaagtgtgctaactatgtcagtttttgctgacatggtttaaatttcacaatgcaagaactttttctggttacgatagagatgtggctacacttagaaaatcagagtttcatctgacagtagaaaaggcataatctgctttctttctcatgtttacaagaggcttaagaaaagggttggtggggccaaataagatttaaaaaatcttctctttactcttttcttcaattttgcaatgattggtgtacttgtacatggtcacttctcagaaatgtattagcattaggtgttgataaaataatcagtagaaattctgtatcctaacatcccttttcaggttcatattcaatttaatagcagataaaattggtctttttctttaagtttttagtttagccttattcatttttttagtagtaactcatgtcccataatataaaaataactaagagtc

SEQ ID NO: 410012 - DNA, 605 bp, Homo sapiens
aaccggcttatataggagccaacaaaagcagcttctggaagctatccttggcaagaggagytctactcttgccctgacatttgccttggggaccagcggaaagaaaaaagaaaagatatagattacaactccaaaaagaaaaattaaaagccaaaacaggaactaactgtaactctttaaggaagaagaaaaattcatactatcttcctccactaccagggccacactgagaattaaaggagccccccaagaaattgtattggttagcattctagggaagggatggctgagaagccaaacagggtcactagaatctatgagcacagagcttgtggaggcctgaaacacggtgccagggctgctgctgtctctcaggcacctatttctgctcttcccttaacaatgtaacaaagacagagggaagcccaaatgcttcatttctggaaaaagaagaaggaaaggatctaacaatattctctcccctttttaaaacttctgctaagaatgtacagaaacgggccgggcgtggtggctcacgtctgtaatcctagcactttggaaggccgaggcaggtggattgcctgagctctggagttcgagaccag

SEQ ID NO: 410013 - DNA, 605 bp, Homo sapiens
aaccggcttatataggagccaacaaaagcagcttctggaagctatccttggcaagaggagctctactcttgccctgacatttgccttggggaccagcggaaagaaaaaagaaaagatatagattacaactccaaaaagaaaaattaaaagccaaaacaggaactaactgtaactctttaaggaagaagaaaaattcatactatcttcctccactaccagggccacactgagaattaaaggagccccccaagaaattgtattggttagcattctagggaagggatggctgagaagccaaacagggtcactagaatctatgagcacagagcttgtggaggcctgaaacayggtgccagggctgctgctgtctctcaggcacctatttctgctcttcccttaacaatgtaacaaagacagagggaagcccaaatgcttcatttctggaaaaagaagaaggaaaggatctaacaatattctctcccctttttaaaacttctgctaagaatgtacagaaacgggccgggcgtggtggctcacgtctgtaatcctagcactttggaaggccgaggcaggtggattgcctgagctctggagttcgagaccag

SEQ ID NO: 410014 - DNA, 531 bp, Homo sapiens
agactagttatgcacctaacatcctatgatgcacaggacagactgtcacaacaaagaatcgtccagtccaaaatttcagtagtgtggaggttgagaaaccctaacctaggcaaatcaaaaaggcatactactgagcaaaaaaagcaagtcacagaaatatcatatataattgaaacatacattatatcatttaaataaagttttggtaaacaagaaaaattttaaatatattattttaaaactcacatttatgtggtgaaattrtgaagaaaaccaagggaattataaacacctggaagagaataaaaaggatggaattagggaaggacgccaaggaacatcaaagatactggcataggggtggatgttttattattcttatttaagaatataagcatatctaccaagcaaatggaaaacaaaaaaacgcaggggttgcaatcctagtctctgataaaacagactttaaatgaacgaagatcaaaagagacaaagaaggccattacctaatggtaaagggatcaattcaac

SEQ ID NO: 410015 - DNA, 621 bp, Homo sapiens
tattgactagataatttggaactaaaaatagacaacaaaaagaacatgatgatatggaaatagtaattgcagaaagtagctaccattcctacagttgagagaataaaaggaagaggatacaaggattaaaatttagaaggttagaggaggggctcatgaaactgaaatcctgagaagcgtgcttctcaggtggtgctatctgtgggctcagagaaggggtctgtgaggctggtatttagcccactggggagttgggtggtggttagctgtccctgagggtctttgatggcacatgataaggctggttttgcaagtgttggaccactgcaaagtggattcaaccgatgctaggagaacaaattactgycaagccttcagcaaatcttgaaaatataatcgaattctaatatcttctcatgacctctacttctattcctcttacccacaccaccatcatctcttgcctggattattccaaaaacctcctattagaattcctggcttcctctgttgtccctctttagtctattcttttttaaaaatataagcagccaatgtaatcctgccaaattttaagtctgagcatttcactgtactgctcagaattttccagtgtctttt

SEQ ID NO: 410016 - DNA, 572 bp, Homo sapiens
aagaattattcacttaaaacatttaagaatttatcacaatatgctagatgggactagaatatttacgttgaccacacagaatattcttttgttacggcaaaatctacacaaacaagcaaactggttcaagtatttgctgggtatgaaaaaaaagcaagaggaactacctagcttatttaaatttgtttatttaattcttgagaccgggtgtgggggaattgctctggtgcccacccaggctggagtgcagtggcacgatcatagctcaccgcagcctgaattcctgggctcaagcaatcctcccacgtcagcttcctgagtagttgtgactacaggtatgtgccgcctcacctggctaattttttgttgtccaggctagtctcaaactcccagactcaagcgatcctcctgccttagcctctcaagtaggtagggattataggcacaagccacagtgcctggcctaaattaaaaatttagccawcttaaactaggattggcagatgtatctgttaccatcatgtgaacaccatgtgcaatgaagtttcactggtaaatcatctcacaggcag

SEQ ID NO: 410017 - DNA, 586 bp, Homo sapiens
ttctaactagttataatcagacgataaaattttaggccagttaatctaaaagtagctttacgtagttttccttattaatcaaacacagaatatactctttagtttttattagcattctcattagaattcagagastacatcttacctgggctgcatagatgaagatgtagagtctaatgctgactgggcttctggcacactgccatctgtgcattgaactggtaaagattcagacagactactgacagaggttgctgtaacagtaccacattgcgtattagtgattctatatgctcagcagtctaagaccttatctaaaaaaatcaaaatccattttccacagaacacagtatagaggttttcttttaatatgtagtatgttggttcattatttttaaaaaatttttcaacggtttgccagtgaaaaatatgttaattttaaaccaagaaggaaaccatctgcaaattgtatacattaataaactcctatttcttaggactgaatagcacccaagcccaaatgctttaattcaaaaacatcttccaagtactagagaacaaatgagatatttaaataagatgacat

SEQ ID NO: 410018 - DNA, 586 bp, Homo sapiens
ttctaactagttataatcagacgataaaattttaggccagttaatctaaaagtagctttacgtagttttccttattaatcaaacacagaatatactctttagtttttattagcattctcattagaattcagagagtacatcttacctgggctgcatagatgaagatgtagagtctaatgctgactgggcttctggcacactgccatctgtgcattgaactggtaaagattcagacagactactgacagaggttgctgtaacagtaccacattgcgtattagtgattctatatgctcagcagtctaagaccttatctaaaaaaatcaaaatccattttccacagaacacagtatagaggttttcttttaatatrtagtatgttggttcattatttttaaaaaatttttcaacggtttgccagtgaaaaatatgttaattttaaaccaagaaggaaaccatctgcaaattgtatacattaataaactcctatttcttaggactgaatagcacccaagcccaaatgctttaattcaaaaacatcttccaagtactagagaacaaatgagatatttaaataagatgacat

SEQ ID NO: 410019 - DNA, 503 bp, Homo sapiens
tggagccctttgtggcccatggtagaaaaggaactatcttcacagaaaaactacccagaagcattttgagaaactyctttgtgatttgtgcactcatctcacggtgttgaaactttatttttattgagcaattttgaacattcctttttatagaatctacaagtggatatttggagtggtttgagacctatggtagaaaaagaactatcttcaccgaaaaaccacacagaagcattttgagaagcttctttttgatgtatgcattcaactcacagagacgaactgatcttttgatagagcagttttgaaactcacttttgtagaatctgcaggtggatatttggagtacattgcggtctatggtgaaaaaggaactatcttcgcatgagaaccaggcagaaacattctgagaaactagtttgtgatgtgtgcattcatctcacagagttgaaatcattttttgatttgagtagtttggaaacactctttttgtggaatctcta

SEQ ID NO: 410020 - DNA, 415 bp, Homo sapiens
tatctagtgatatcccataatttattactgatattgttaacttacattttctttttgttaaggcgtatcaattttattgatttttttcaatgaattaacttttcatttyaatacttttttacctttttctggttttattttgatttctgctcttcatgactgtcattcttgtacttacgtcatgtgtaacttgctcttttcctagcttcttaaggtgcaagttactatatcattaatgttcaaccttcctgctttactaataagtattggaagctataactttctaggcattgttttaggtgcattacacaaattttgatatgttgcatttttattatcttttagttcaaaatggtttctcatttccatccctgggttatttgggagtatatttttaaatttgcaaatacttgtg

SEQ ID NO: 410021 - DNA, 581 bp, Homo sapiens
gcagctagggagactgtgcctcacccgccttctagaaatatgatcagccttgaggtctctgaattggaaggctaagttaaacaactaacacctgctctccagcctcacttgcattctcagtgggatggcaatctcttcccttatccccaaagagctttctctttctcctgttataacrgttattccaaacatttaacatgcttcaagtcctctaccccagccttcctcaaagtgcacctagactaggcattgtgatcagaaaggaggtatgtgtagtgggtaaaatcatgtactcttcttggccagtcttcctgggtttgaatcctatctctatcatgtagtagcttcattaccttgggtgagttaattagcctgtcttgggccttggttacctcatctacaaaagaatgtgataatgacacctttctcataagttcagttaatgatttgatgggtatagagcttatagaaaaggagctagcatgtactaagtgctcaataaacattaacagactaaacacacaacattgcctctcttccataatcactaaaatcacacacacacacacacacacacaaca

SEQ ID NO: 410022 - DNA, 605 bp, Homo sapiens
gaaaacaatcttcaaagcctttctcagagtgagttcgctctccggaggcttgctttccacattctcatggcattaggaaacctcagggggatggtatctgcctctgtcacacaagggaatgaatgtaacatatagtattggaataagctgaagatagccatccaaacagtattaatatgttttaaacgtacaaaacatttcatatgacttgaggatttttgtaagttagaaattcgactcactagcatggattacaccttaaataaatatagtttcttccctggtgttttcatacatcatggagcaaatttatrtttatttggtaaacatttgcttattaaataaacgtttgcctgaagttgaaaggggatgctatatagagctcccctaattgctctgttagctcatttgacctccagaggccctgggatccaaagagctgcacccccacctcaggaagcctggagaaagccaggcagcagcaggacagtgagattttgttcaacaaatctgtattcatagccagatactataatgggggttggaaaatacaaagatgtgaggggctctcagcttgtctgtaatgaagtgatcagggcagggca

SEQ ID NO: 410023 - DNA, 605 bp, Homo sapiens
gaaaacaatcttcaaagcctttctcagagtgagttcgctctccggaggcttgctttccacattctcatggcattaggaaacctcagggggatggtatctgcctctgtcacacaagggaatgaatgtaacatatagtattggaataagctgaagatagccatccaaacagtattaatatgttttaaacgtacaaaacatttcatatgacttgaggatttttgtaagttagaaattcgactcactagcatggattacaccttaaataaatatagtttcttccctggtgttttcatacatcatggagcaaatttatatttmtttggtaaacatttgcttattaaataaacgtttgcctgaagttgaaaggggatgctatatagagctcccctaattgctctgttagctcatttgacctccagaggccctgggatccaaagagctgcacccccacctcaggaagcctggagaaagccaggcagcagcaggacagtgagattttgttcaacaaatctgtattcatagccagatactataatgggggttggaaaatacaaagatgtgaggggctctcagcttgtctgtaatgaagtgatcagggcagggca

SEQ ID NO: 410024 - DNA, 706 bp, Homo sapiens
ctgttcttaaaggtatgtgtcacactgagtcagcaggctcctgggtccataggcaggtcagcagtctctgacacattctccttcagctcttctgacaggtagaccttccatttttacagctttatggaaggatatttcacagaccataaaattcaacactgaaagggtaaagttcaacgcttttcattattgacacaagcagatcttgactgtcacagagagaaagataaaaaacatattagctcctttctctagtggcctgcatcctctgttccctgccatctcttaatctttccctccaataatgtttgcctgggcatcccctctaacccrcagccactttcagacccctcagcagcacctcctggtggccagcaagccttggagggagggagccgccagctagtgcagcagttagctcaccatgccaggacccacactccccccagtggaataagctctatgctcagacaacagacttaatgaaaaccaaagaaacaaggataaaaatgaggtgaaagaaatagaagtgtttttgtgaacttttaaagtacagtaaataagtctagagtttataagcaaaagctgatatttttttaaaagagctttactgcataatctttatccttattcccacaagcagtcaaaaatcccacaaccacatgaacctatcaaatagtaaagaagcatttgggaacaagagcta

SEQ ID NO: 410025 - DNA, 582 bp, Homo sapiens
tacaatagtcagttacatgtctagacatgagcataaaaataaaaatatacagctgacacttgaacaatgtgagcgttaggagtgctgaccttcatgcagtcaaaaacccacctataactcctgactccccccagaacttaactactaatagcctcctgttgaccagaagccttaccaataaygtaaatagtcgattaacacatattttgtatgttatatgtatataccgtattcttacaataaactagaggaaagaaaatgttgttaaaaaaatcatatagaagagaaaatatagttactgttcattaagtggaagtggatcatataaaggtcttcattcttgttgacttcacattgagtaggctgcagaggaggaggaagaggaggggttgatcctgctgtctcaggggtggcagaggcagaagaaaatctgcatataagtggagccgcactgttcaaacccatatggttcaagggtcaactgtaagtcatgtacaacagcaaaaaaactatataacaaatcaaactagtcacacaacataaagttttattgaaagtaattttagaagaatagagagatgt

SEQ ID NO: 410026 - DNA, 526 bp, Homo sapiens
tcatatagaagagaaaatatagttactgttcattaagtggaagtggatcatataaaggtcttcattcttgttgacttcacattgagtaggctgcagaggaggaggaagaggaggggttgatcytgctgtctcaggggtggcagaggcagaagaaaatctgcatataagtggagccgcactgttcaaacccatatggttcaagggtcaactgtaagtcatgtacaacagcaaaaaaactatataacaaatcaaactagtcacacaacataaagttttattgaaagtaattttagaagaatagagagatgtactctattcacatataacgagtccaaattataaagttattaattttccccattctaattctatatgttcaatgtaattccaaactcctgctagggttttctgtgtggaatctgacagattgataattataaaatgtataaagaagatcaaagagccaagtacaaccaaggcaactttcaagaaccgcctaaggtgggaaagtacttgccctactgtt

SEQ ID NO: 410027 - DNA, 602 bp, Homo sapiens
ccccacaatcaaggatagatatatctagcacctcacaaagtttcctcatgtcctttttgttttgctttgttttttgtggtaaaatctaccctcttaacrgattttcaagtacacaataccatagtgttaactacagacactacattgttcagcagttctctagaacttactcatcttgcatatctgaaactttcatacccactgaacagcaattccccatgttccctaccctgcagcccctggcaaccactattgtattctctgttctacgagattgactatatttatagatatctcaaataaatggagttatgcaatatttgtcctgtgactggcttatttcacttagaataatgtcctccaggttcatctgtgttgtcacaaatggcaggatttccttctctttttaagccgaacaatattccattgtacgtatatatcacattttctttatccattcctctgttgatggacaggtgggttgtttctatatcttggctattatgaataatgccgcaacaaacatgggagtgcaaatatctcttcaagatcctgttttcgcttcttttggatatatacctataaatgagattgctagatcg

SEQ ID NO: 410028 - DNA, 602 bp, Homo sapiens
ccccacaatcaaggatagatatatctagcacctcacaaagtttcctcatgtcctttttgttttgctttgttttttgtggtaaaatctaccctcttaacggattttcaagtacacaataccatagtgttaactacagacactacattgttcagcagttctctagaacttactcatcttgcatatctgaaactttcatacccactgaacagcaattccccatkttccctaccctgcagcccctggcaaccactattgtattctctgttctacgagattgactatatttatagatatctcaaataaatggagttatgcaatatttgtcctgtgactggcttatttcacttagaataatgtcctccaggttcatctgtgttgtcacaaatggcaggatttccttctctttttaagccgaacaatattccattgtacgtatatatcacattttctttatccattcctctgttgatggacaggtgggttgtttctatatcttggctattatgaataatgccgcaacaaacatgggagtgcaaatatctcttcaagatcctgttttcgcttcttttggatatatacctataaatgagattgctagatcg

SEQ ID NO: 410029 - DNA, 521 bp, Homo sapiens
tggggctaaaagcccagcgagaatcacaggagaatgcagaactgtgttctgaggcagcagggatggactggatctaatctagtgctataagtgcaaaatgcccaggaaatgtgctctgtggatagccaaggactcctgctccccaagacagagacgcaaatctgctcccttagttgggtaaacaactctgggaagataaataagtgagcaggcctccaagtaaatcaacccacagcatgtgtgcataacgttttagtgttaaatacaaaataatctttgactgattgtcatttcaagtgtttataatattccaggggtcctgtcataatgttcttatcatctgtaagctgaragacatatcagaaatttattaagtttgtaaataaaactgctatgtttgagatcacttgattagtgcaaagtttaatctattttgtatgaaatactttttttctctgttaagatggtaagtttgcttctcagacattttaaatacttaaaatatatgaaacctacaaatg

SEQ ID NO: 410030 - DNA, 584 bp, Homo sapiens
gatgcatgcctgtagtcccagctactcgggaggctgaggcaggagaagcgcttcaacccgagatgaggaggttgcagtgagccgcrcactgcagcctgggagacagagggagactccgtctcaaggctccagcctgggcgacagagcaagactctgtttcaaaacaacacacaaaaaaacagtcactctggtgctctgcccaccctagcccagctctgctgcttctttgctctcctccccttcaattctcactctgcttcagcccactgatctccagctgtcctcagatacatcaaggcctctcccaccttgtggttactgtcccttctgcctggaagcattttcctggatgtacatgtgactcactccctggcctcttccagcccacacacccacactcacactgggagcacgcagaccacacccttcctgaatccatagattgagccgtcccctgccttccccacagatgccctatcctcctccttcactttcttcacttagtttttcctctctagcacttactaccattgaacatttcacatatttttcttatttgttttatttgttgtctgtgtttttct

SEQ ID NO: 410031 - DNA, 595 bp, Homo sapiens
ggggtaggaagtggaacgagagggtgggccctggacttcagcgtttgatgcatatcagccatgcccacaagtaaagtacactctcacragggaagttacaaagcaggtggagagaggcagaagttttctccccaccttccctctagggaggataaaatggaattaagaattaggaaactactcgggaggctgaggcaggagaatggcgtgaacccgggaagcggagcttgcagtgagccgagattgcgccactgcagtccgcagtccggcctgggcgacagagcgagactccgtctcaaaaaaaaaaaaaaaaaaaaaaaaagaattaggaaaagtaaaacctcattgtaagctaaatattgatttccctacatcagttcccaactttatttccctgtcataaagggccattcccctaaatatgcggggaataatccctgaagtctgagttactcagctcagatctgcaccatcagggctggggaagagtagtaccaggggattaaaagaatttatattccatgtcaaatggaactgtccttggtggactctttgtatagctcttctcacctgagttacaggtacgcagctgtgt

SEQ ID NO: 410032 - DNA, 575 bp, Homo sapiens
ttgctagtgtgagcacaaattggcaaaacaactttggaaaacagcatgacattatggcatagttgtcaacgtattgcttctcagctcaaattcacttttcaatacaagctttgagatgagggaatttctttaagcatttctcctctaaagtgagcacgatgttgagctttctcagtagagggcgctaggcaggtgttgcgggagggaggggcgcttctgcagtttctggcggaggctcagtggtcaaccgtgcgggtgggaagkggtcgggtggattctgcccttccatatgcccagagttccaagtccctcagcgacttcacagcccccttgtctgctcaacacggtcactatgtgtttcaggcgccctcaggcctgttgcacagtcacacgcaggccaccagctgcggctcccctgcccagcctgcactttggagggttgtttcctgttttttttttccaccactgcaaaccatcaaatttctctgccatccagtgggttcaactacaccttctccaacgaagtcagaaccacagttttggagagggagccccttgcaagtttattcttcctt

SEQ ID NO: 410033 - DNA, 619 bp, Homo sapiens
tatcattagagttattggggaagcaattttgttagtcattatgcatatcaataattatacaaactgatttatgagtgcatttttatcactagtattattagtgcagttgttagagctmaaccacaaatataattactttcaactttaatgaaatatagaataatctacattcagatagtaagaatagtattaatcgctgacaataattaaaatacacttctacatataaacagtgtttaaaatgtagaagtaaacatgataccagacaatattttcaaagtggaaaggctaagggagtggtgaaagtgtttaaaaacaggcctgtgtttaggacttcctagcgataggctaagcaccttggcagagagtcaggtattgtagcaatgaacttgggtggagtgaacctaataaaatcactctttccactttagtgtttaaaaatataaacacactttgatgttaaaggagaaagtgagtgtacatagaaaataagtactgtatttatttcttctcaggtttctgtaacatttcttagtataaacgttctgtttctactgccggctattgttttgcaaggaaaatgggtgttagatatcaatttagatttgaggaggtgagt

SEQ ID NO: 410034 - DNA, 619 bp, Homo sapiens
tatcattagagttattggggaagcaattttgttagtcattatgcatatcaataattatacaaactgatttatgagtgcatttttatcactagtattattagtgcagttgttagagctaaaccacaaatataattactttcaactttaatgaaatatagaataatctacattcagatagtaagaatagtattaatcrctgacaataattaaaatacacttctacatataaacagtgtttaaaatgtagaagtaaacatgataccagacaatattttcaaagtggaaaggctaagggagtggtgaaagtgtttaaaaacaggcctgtgtttaggacttcctagcgataggctaagcaccttggcagagagtcaggtattgtagcaatgaacttgggtggagtgaacctaataaaatcactctttccactttagtgtttaaaaatataaacacactttgatgttaaaggagaaagtgagtgtacatagaaaataagtactgtatttatttcttctcaggtttctgtaacatttcttagtataaacgttctgtttctactgccggctattgttttgcaaggaaaatgggtgttagatatcaatttagatttgaggaggtgagt

SEQ ID NO: 410035 - DNA, 578 bp, Homo sapiens
cagaggttgcagtgagcctagatcaaaccactgcactccagcctgaatgacagagcaatactctgtctcataaaaaaaaataaaaaaaaaaaaaagaagaagaagaaggttcgggtttttccttagttgagttctaggaggtccttaggttccctgcctccagacccttttcctgcttcactatgaaacacctctacatttgttgctaccacattatggtggcaaatgcataaaccttagagtcagaaaagtattcaaaatgttattgtgtcattgtgaacacttttctcacttaaaaatggtgactttgaaagattatagagaataaaggcagatactgtyttataaagtccctagaatatagccaggcatatgctagatatcacatgagtatcctaaaaactgcatccttgctgtctttattgttgttgttaagatttttcttcattaattcctagagcattatcctttaagccacatgatccaccttatatcaacttttataggtgacaagcttactttagaattaacgttaggaaaactttttctgttcttgaagcaagcatcctttttttctg

SEQ ID NO: 410036 - DNA, 634 bp, Homo sapiens
agctgagatttctggttagaaaaatcaataggaatttacagcaaagcttggaggagggcattctgatgtgactaagaaactctgaaggcaatcgttactcaatgcagaagcaactcctttctattgctgcgggaggggatgagtggataaaaaaaaaaaattgagtgatgtgaggaccctagctgaatagtgatagagaaattctcagtaattctttttcttttacttttwcttttttttttccagtcgtttatttaaccacttcattaattcaaaggtttattgcatgcctaccatagatcagactctctaagggcatgtgtaatcaagaaataaatgaggcacaacccctagccctaaggatctcaaggtgtagagagggaggcaaacaagaaaagtaatcattaaaatgcaaggtgatgattaccatcacagagatgatgtacctgccgagtcttgcctggcctatggaactcaggaaggaatccataggaggcaatacttggactgcatccacatagaaaatggtagaaatcttctgtgaaaaatagacccaaggtatagcattctaggcagaaacatccacatgggtaaagagcttggcactctttcaagtaggattaggtttagctgt

SEQ ID NO: 410037 - DNA, 634 bp, Homo sapiens
agctgagatttctggttagaaaaatcaataggaatttacagcaaagcttggaggagggcattctgatgtgactaagaaactctgaaggcaatcgttactcaatgcagaagcaactcctttctattgctgcgggaggggatgagtggataaaaaaaaaaaattgagtgatgtgaggaccctagctgaatagtgatagagaaattctcagtaattctttttcttttacttttacttttttttttccagtcgtttatttaaccacttcattaattcaaaggtttattgcatgcctaccatagaycagactctctaagggcatgtgtaatcaagaaataaatgaggcacaacccctagccctaaggatctcaaggtgtagagagggaggcaaacaagaaaagtaatcattaaaatgcaaggtgatgattaccatcacagagatgatgtacctgccgagtcttgcctggcctatggaactcaggaaggaatccataggaggcaatacttggactgcatccacatagaaaatggtagaaatcttctgtgaaaaatagacccaaggtatagcattctaggcagaaacatccacatgggtaaagagcttggcactctttcaagtaggattaggtttagctgt

SEQ ID NO: 410038 - DNA, 618 bp, Homo sapiens
cttacatgataatttaacagcagattcaaggcaacttaaaactaaaattctagactccctaaacgccatagatctacacacccaacaaacagccacatggaaggatgtgtgagaacatctctcctggatagatccccactccggcgggggcgggtgtcactccttcattggaaaaggatgttactgattattctcaggtttgtcttatgttatttactaattctaggatgcaaagctggaaaacgagttataacckctgcaccttacaaacctgttcctgcacacacacctgtactcttcaatcaataaaacctgatgcaaaaaacggaaaagggggagatgtaggagattggtcagggtggtgagaaaaattataggaaagatacaaaccttggaaggctgggaggttttgcaaaagctttgggagaggattatagctgaaggcagttaaattctcttatctggaggctgagagcaaagcggtagataacaagggaatgtaaaggaacttatctagataaatctgtttacttatgtctccagaaaccaacctttgatcatttgcatgcaggactgctctctactccgaggatcaacaatgttaattacccacaaatt

SEQ ID NO: 410039 - DNA, 591 bp, Homo sapiens
aactttaatactaactgatggaggtgaggtgaggaaagatgtgggcaggttattgtcttgaaataaatttaaagagattttccttatgtttgcacgaaattaaaaagtaaaattttatttcaaaatccatgatattatttaatatagtaattaatttgggtagtctaatgcagtagcagaatagtatatcacattaamtatagatttactatattttatgtagtcattcttctatggttggatacttaggcattttatctttgtctataaagcttttttatgctttattatttttaatattttggatgcattttttgttagaagttgtatttgagagatgatatggatgaatattttaaaataatgagacattatcaagacattacatatctgataagagtctagtattcaaaatatacagaaatagttcagagatattccaggtttggtttcagaccaccacaataaagtgagtatcacaataaagcaagttacaaatgttttgatttcctagttcacataaaacttctgtttatactatactgtaatctattaagtatgaaatagcattatgtctaagcaaacaatgta

SEQ ID NO: 410040 - DNA, 608 bp, Homo sapiens
gggctgcagaatgcatgctgtgttagcaggcataaaaacrattttaaccttcttatacatttctgtaagagctcttgggtgactgtattataataacgagcaatactattttgaaagaaatattttttgtcctgcacggtagatctcaacagtgggcttaaaatattcattaaaccatgctataaacagatgggctatcatccaggctttgttccatttatagaacacaggcagagtagatttaacataatttttaggggtctcagaattttcagaatggtaaatgatcaataattttaatgtaaaatgatcagcccctaacaaaaaagtcagcctgtcctttgaagccagtccttgacttctcctctctagctatgaaagtcctagatatcatcttcttccaaaagaaagctattcagtctacatttaaaatcagttgttcagtgtagatattatcttaacaagataccacttcacaacctctaggaaggctatggttttcaaagttgttggatattaagcagggcttgtcttggtaaatttagagcatgaaataagttcacatgtaatgagtacccagatacttttgatgagaaaaccacaaatta

SEQ ID NO: 410041 - DNA, 614 bp, Homo sapiens
gagttttataacagcactccagtcacagagacgactctgtattctgaaataatcaacaatcaactagatcactgtacatcacctactactcatggagcctctcctatgtttacatatattkttaaataaaactatggttaagtaacctctcataaggttatatcgtttctctcctattactttctctaaaaattgataggagtctatatgtagaaattagcccattattttgaatttagcgggtgctgatctgagactatttcctcaggtaccaatcttctatttacaatgggcttacaagatatagttgggatcctgaagacttgtgaagtgatatctgaatgatacataattaatgagattcaggaaggagaattgggtgaggggaaaaggcccagaaacactgatattaacattcccctgtgtttattaatatatctattttcagtccaattaatcctccatgccagaggttaaagagaaatattttcttttattgaagaattctggaatgatagttaaacatagcccacacttatacttagggaaagttcttcctttgtttctattcccttgtactgggctataaacacagtaacaaggaggagtccctc

SEQ ID NO: 410042 - DNA, 475 bp, Homo sapiens
gttttataacagcactccagtcacagagacgactctgtattctgaaataatcaacaatcaactagatcactgtacatcacctactactcatggagcctctcctatgtttacatatatttttaaataaaactatggttaagtaacctctcataaggttatatcgtttctctcctattactttctctaaaaattgataggagtctatatgtagaaattagcccattattttgaayttagcgggtgctgatctgagactatttcctcaggtaccaatcttctatttacaatgggcttacaagatatagttgggatcctgaagacttgtgaagtgatatctgaatgatacataattaatgagattcaggaaggagaattgggtgaggggaaaaggcccagaaacactgatattaacattcccctgtgtttattaatatatctattttcagtccaattaatcctccatgccagaggttaa

SEQ ID NO: 410043 - DNA, 475 bp, Homo sapiens
gttttataacagcactccagtcacagagacgactctgtattctgaaataatcaacaatcaactagatcactgtacatcacctactactcatggagcctctcctatgtttacatatatttttaaataaaactatggttaagtaacctctcataaggttatatcgtttctctcctattactttctctaaaaattgataggagtctatatgtagaaattagcccattattttgaatttagygggtgctgatctgagactatttcctcaggtaccaatcttctatttacaatgggcttacaagatatagttgggatcctgaagacttgtgaagtgatatctgaatgatacataattaatgagattcaggaaggagaattgggtgaggggaaaaggcccagaaacactgatattaacattcccctgtgtttattaatatatctattttcagtccaattaatcctccatgccagaggttaa

SEQ ID NO: 410044 - DNA, 475 bp, Homo sapiens
gttttataacagcactccagtcacagagacgactctgtattctgaaataatcaacaatcaactagatcactgtacatcacctactactcatggagcctctcctatgtttacatatatttttaaataaaactatggttaagtaacctctcataaggttatatcgtttctctcctattactttctctaaaaattgataggagtctatatgtagaaattagcccattattttgaatttagcgggtgctgatctgagactatttcctcaggtaccaatcttctatttacaatgggcttacaagatatagttgggatcctgaagacttgtgaagtgatatctgaatgayacataattaatgagattcaggaaggagaattgggtgaggggaaaaggcccagaaacactgatattaacattcccctgtgtttattaatatatctattttcagtccaattaatcctccatgccagaggttaa

SEQ ID NO: 410045 - DNA, 475 bp, Homo sapiens
gttttataacagcactccagtcacagagacgactctgtattctgaaataatcaacaatcaactagatcactgtacatcacctactactcatggagcctctcctatgtttacatatatttttaaataaaactatggttaagtaacctctcataaggttatatcgtttctctcctattactttctctaaaaattgataggagtctatatgtagaaattagcccattattttgaatttagcgggtgctgatctgagactatttcctcaggtaccaatcttctatttacaatgggcttacaagatatagttgggatcctgaagacttgtgaagtgatatctgaatgatacataattaatgagattcaggaaggagaattgggtgaggkgaaaaggcccagaaacactgatattaacattcccctgtgtttattaatatatctattttcagtccaattaatcctccatgccagaggttaa

SEQ ID NO: 410046 - DNA, 614 bp, Homo sapiens
gagttttataacagcactccagtcacagagacgactctgtattctgaaataatcaacaatcaactagatcactgtacatcacctactactcatggagcctctcctatgtttacatatatttttaaataaaactatggttaagtaacctctcataaggttatatcgtttctctcctattactttctctaaaaattgataggagtctatatgtagaaattagcccattattttgaatttagcgggtgctgatctgagactatttcctcaggtaccaatcttctatttacaatgggcttacaagatatagttgggatcctgaagacttgtgaagtgatatctgaatgatacataattaatgagattcaggaaggagaattgggtgaggggaaaaggcccagaaacactgatattaacattcccctgtgtttattaatatatctattttcagtccaattaatcctccatgccagaggttaaagagaaatattttcttttattgaagaattctggaatgatagttaaacatagcccacayttatacttagggaaagttcttcctttgtttctattcccttgtactgggctataaacacagtaacaaggaggagtccctc

SEQ ID NO: 410047 - DNA, 596 bp, Homo sapiens
ttcttcctttgtttctattcccttgtactgggctataaacacagtaacaaggaggagtccctccctctcattcttacattcatattatcaaaatatgtctcatgtataacaagtttttcattacaaaaattaatgttcactttaagtattgaaaaacaaagagaagccataaggtgagaatgaaaactgtctcctagtcacaccattcagaaataatcacggttcacatttgactgtagcatttgtacgaagcccatgtgtaactcttttgttcattttatgaaattgtaaagtttattctactgggaaacaacttgtttcatttaacaatgtaccatgaacatttttccatgtaattaagcattctacagtatcattttaaygattacatgaatactgttttatgtattgcaggagtataataagccaattcattattattagatatttaggctctaatattttgttttgccattacaaccaaggtgaaacctttagcaggttttttgacttctctgtctctcagtttttcacatttaaaaaaatgagaacaataatggcgcctactccaaaggttgtgtggtggattaaatgaa

SEQ ID NO: 410048 - DNA, 629 bp, Homo sapiens
ttgacataggtgagatagctatatctagaaatgattgaacataattaataattatatgccataattatatccaacttgattttacatttttcaagactttgcattctcttctgctctttatacttaacataatcaccatacctgattcctacacagcttaggaaaattaatcagcatactctctatcattatatgaaagtaaaatgcatttggatgtttgttattgttttattttcttattgtttacctggattctttgtttgttctgccattttatggtatctaccaatacctccataaccacttgtatttaaggataacccttcttgacaccaatgtatttagatttatgcagtaaatcactgtgatatatcatttatacatattacttctccaattctcctaacaatttttttgctgttaatctgtgaggaataaaaaggatttttattattattattattgttcttgtaaaaatgagaaaactaaagcttagataaattaaataaataatttagtgttatccagtttatgtgattttggatttaaaacaaggtttaccaacttayatgacattcattcttaatataggagaaagttattgcaagtacactcatagagaaaaatat

SEQ ID NO: 410049 - DNA, 585 bp, Homo sapiens
ggacatagagaggggaacatcacataccrggccggtaggtgggtggagggctaggggagggttaacattaggggaaatacctgatataggtgacgggttaatgggtgcagcaaaccaccatggtacgtgtatacctatgtaagaaaactgcacgttctgcacaggtaccccagaacttaaagtataaaaaaaaaagaagaaaaaggtcttgggcaaaagaccattttaggttgcttgagaaaccaaaataagagccaataggtgaaactagtacagtggtacatgttagtttagtatttcaaacaaattttcaactaacaagagttacaacaccagggaatgttctgtcttagggggagttagctttttgttactgaggataactgatccttcagatgaatatctctaagagatattgtaggaggaatttctacattcattaagatgccaagaaagcaccttatactcttccagagtcctccacatttatccatattcccctccatttattgctccatctttcatagtaaatctctttgaaatagtttgctatattcagtatctctcacttctcaactccaattt

SEQ ID NO: 410050 - DNA, 585 bp, Homo sapiens
ggacatagagaggggaacatcacataccgggccggtaggtgggtggagggctaggggagggwtaacattaggggaaatacctgatataggtgacgggttaatgggtgcagcaaaccaccatggtacgtgtatacctatgtaagaaaactgcacgttctgcacaggtaccccagaacttaaagtataaaaaaaaaagaagaaaaaggtcttgggcaaaagaccattttaggttgcttgagaaaccaaaataagagccaataggtgaaactagtacagtggtacatgttagtttagtatttcaaacaaattttcaactaacaagagttacaacaccagggaatgttctgtcttagggggagttagctttttgttactgaggataactgatccttcagatgaatatctctaagagatattgtaggaggaatttctacattcattaagatgccaagaaagcaccttatactcttccagagtcctccacatttatccatattcccctccatttattgctccatctttcatagtaaatctctttgaaatagtttgctatattcagtatctctcacttctcaactccaattt

SEQ ID NO: 410051 - DNA, 585 bp, Homo sapiens
ggacatagagaggggaacatcacataccgggccggtaggtgggtggagggctaggggagggttaacattaggggaaatacctgatataggtgacgggttawtgggtgcagcaaaccaccatggtacgtgtatacctatgtaagaaaactgcacgttctgcacaggtaccccagaacttaaagtataaaaaaaaaagaagaaaaaggtcttgggcaaaagaccattttaggttgcttgagaaaccaaaataagagccaataggtgaaactagtacagtggtacatgttagtttagtatttcaaacaaattttcaactaacaagagttacaacaccagggaatgttctgtcttagggggagttagctttttgttactgaggataactgatccttcagatgaatatctctaagagatattgtaggaggaatttctacattcattaagatgccaagaaagcaccttatactcttccagagtcctccacatttatccatattcccctccatttattgctccatctttcatagtaaatctctttgaaatagtttgctatattcagtatctctcacttctcaactccaattt

SEQ ID NO: 410052 - DNA, 442 bp, Homo sapiens
gtttctaatactattctccaataaaacaaaccaagactgcttagagaaatggctcattctygaattgggacaggaaattttaaagatgaccctggaacatcttgtagtaccagaaaattaggaggttctcaaaaatcacaatgagagagtatataaaagggacacaggatccaaatgaaagagctcctaatggccaaacctagaaaaatatgaaaggaaaaaccattactgaattataacccaaagtacaaaataaaacatcataagataatattagtataaataagtaattgaataaagacatgagggagaacagacaaatcttcctcgcagaagaatgtcaagtaatttatatagatacaccatcctcaaggaggtggagcataatctcccattccccgagcgatctttgtgcatagtgatgtccttccaaagagtgcag

SEQ ID NO: 410053 - DNA, 529 bp, Homo sapiens
tattaaggcaggaccctctggtgtctctagtgaatcatccaggaatttaacaagggctttgtctctgttctgtcagaacttgaatacctcctacccacgttaagtttacaactccatgtttgttctttgctctcctgatggcattttactctacatatgcatggtgtcatrtgccagagttaagggaccccataagtggagtttcagtgctcttttgttggacaattcccttctttctgggactctgcccttcatattgctattgcattagcttcttcaacttctcatctctgtctcctccacttatctagatcactgtgttttgcttgggattccaattttttgcatgtgaatgtataaagtgtctcaggcagaaaaccaaggaaattatacagcttgccttttctgtttcttttctctcagggattacaggcttgttcctgtttatcatgtctgaaaacactttaaaaaaaatatggcctagttttcatttcttgtttgtgggacagtaagtctggtcctagatgtt

SEQ ID NO: 410054 - DNA, 529 bp, Homo sapiens
ccaagagctgaaagataaaatagtcattttaagggataaccaaactgaacttctggaattgaagaattctctacaaaaatttaataatacagtcagaagcattaacagcagaatagaccaggttgaggaaagtatatcagarctcaaagactggttcttcaaataaacccagacagactaaaaccaagaaaaaaaaagggtttttttaagggaaaaaaacctctgaaaaatatgtacttacgtaaaaagatcaaatctaagactcattggcattcctgagagagaagagagagtaagcaacttgaaaaacatattcgataatatagtttatgaaaattttctcaatcttgttggagaggtagacatacaaattcaagaaatacagagaagccatgtgagatactatataatactaccattctcaatgctcataatcattagattcaccaatgtcaatgtgaaataaaaggcacttagagagaaaggtcaaatcacttacaaaggaaaccccatcaggctaacacgagat

SEQ ID NO: 410055 - DNA, 529 bp, Homo sapiens
ccaagagctgaaagataaaatagtcattttaagggataaccaaactgaacttctggaattgaagaattctctacaaaaatttaataatacagtcagaagcattaacagcagaatagaccaggttgaggaaagtatatcagaactcaaagactggttcttcaaataaacccagacagactaaaaccaagaaaaaaaaagggtttttttaagggaaaaaaacctctgaaaaatatgtacttacgtaaaaagatcaaatctaagactcattggcattcctgagagagaagagagagtaagcaacttgaaaaacatattygataatatagtttatgaaaattttctcaatcttgttggagaggtagacatacaaattcaagaaatacagagaagccatgtgagatactatataatactaccattctcaatgctcataatcattagattcaccaatgtcaatgtgaaataaaaggcacttagagagaaaggtcaaatcacttacaaaggaaaccccatcaggctaacacgagat

SEQ ID NO: 410056 - DNA, 588 bp, Homo sapiens
gctgtgcagctttaattctgggacccctactctatttcactaatcgatgtgtctgtttttgtaccagtaccatgctgtttgattactatagccttacagtataatctgaattctggtaatgggatgcctaagagtttgttcttactgcttargtttgctgtggttactcaggctcttttttggttccatataaatttcagaatagtttttactacttctgtgaaaaatgatgttggtaatttgatagggatagcattgaatctttaaattcctttgggcagttatggccattttaacaatattgattcttccaatccatgagcccatgagcatgaaatattttcccatttatttctgtcatctctgatttacttcctcagtgtattgtagttctctttgtagagatttttacctccttggttagatgcattcctaggtatttcatttttgtatgactaattgttcataattttctctgaacaatcataaaagggattgtgatcttgatttgatgcttaactagaagattattagtgagtggaaatgctactaatttttatacattgattttgtatcctgaaactttac

SEQ ID NO: 410057 - DNA, 588 bp, Homo sapiens
gctgtgcagctttaattctgggacccctactctatttcactaatcgatgtgtctgtttttgtaccagtaccatgctgtttgattactatagccttacagtataatctgaattctggtaatgggatgcctaagagtttgttcttactgcttaggtttgctgtggttactcargctcttttttggttccatataaatttcagaatagtttttactacttctgtgaaaaatgatgttggtaatttgatagggatagcattgaatctttaaattcctttgggcagttatggccattttaacaatattgattcttccaatccatgagcccatgagcatgaaatattttcccatttatttctgtcatctctgatttacttcctcagtgtattgtagttctctttgtagagatttttacctccttggttagatgcattcctaggtatttcatttttgtatgactaattgttcataattttctctgaacaatcataaaagggattgtgatcttgatttgatgcttaactagaagattattagtgagtggaaatgctactaatttttatacattgattttgtatcctgaaactttac

SEQ ID NO: 410058 - DNA, 580 bp, Homo sapiens
acatgtgcctctgcttctgctctatagggaaaatgttccttgaggtcagagatatattttatttctaatcccactgtggtacatatgtccacaggtcacagaatacagaagtaatttgagactctccctctcaataatatatcaatttagcatcatgttttccttcttccccttgcacctaatccagtgtctagaacattagaagggatcaggaaatattaacatgaagaaatgaatggaaatatgtagcatcagcataggtattaaatggcaggaggtgacatagccactgacttgccatttcttctgataaagtaaagmaaagcaaatcatacatgtagtcagaagatagctgaacatagtttatgcttaatacaccatttaattagctttagatgaatataatacaagccagatagataagtgtattaagtaagcaaaatgagtaatcaataagaaaaaatcaaagcacattttctgcaagctgtacattttgggcagggtatatcatagaaagggctaagggctgagggaacaaattgtgaagaaagtattagaaacctgaggttcatcttaccta

SEQ ID NO: 410059 - DNA, 633 bp, Homo sapiens
ggcaaatgtgaaaagatgtaaaaagaggcagaaattaatgcatcttataaaaattatatcttgcattttaaatatactaatatgtgttcatcaacatgatactcaaatcaactttgggaggtagaatgatactaacctaaatttttagatgaggtgattgaggtttcaatttttaggtcctaaaagtttaatatatattaaaaaatttctctgaaaaatgtatatctatctcacattaggtagaattgactaaccacattttcaccagctgccctcatattaatrccaaatgtttcatataccgtctttataaagtagaatattctgggtagaaatttcaaggatttgggtttccccaactatctctaattcctataatcataattttgaaattctctgacatgtaatgcaaggtgtaatttcagattctcaggctctcgctctggcttttcatctgtaagctgtcagataaccttcaccagcagctctgccattaacatttacattaaccttcatctgttcctctttcaaagacggattgcttttcacttcacctacgtctgtcttcatctgaataacctttattggacttgtttacaacctttgggaattcatttttcaaagatactagtt

SEQ ID NO: 410060 - DNA, 633 bp, Homo sapiens
ggcaaatgtgaaaagatgtaaaaagaggcagaaattaatgcatcttataaaaattatatcttgcattttaaatatactaatatgtgttcatcaacatgatactcaaatcaactttgggaggtagaatgatactaacctaaatttttagatgaggtgattgaggtttcaatttttaggtcctaaaagtttaatatatattaaaaaatttctctgaaaaatgtatatctatctcacattaggtagaattgactaaccacattttcaccagctgccctcatattaatgccaaatgtttcatataccgtctttataargtagaatattctgggtagaaatttcaaggatttgggtttccccaactatctctaattcctataatcataattttgaaattctctgacatgtaatgcaaggtgtaatttcagattctcaggctctcgctctggcttttcatctgtaagctgtcagataaccttcaccagcagctctgccattaacatttacattaaccttcatctgttcctctttcaaagacggattgcttttcacttcacctacgtctgtcttcatctgaataacctttattggacttgtttacaacctttgggaattcatttttcaaagatactagtt

SEQ ID NO: 410061 - DNA, 617 bp, Homo sapiens
gcactttgtattaacaaacagatgtatattatttcacatttctctttaccttttaataatctcatgtatcttttgtttattgtaamatgtttatgtcttatctgtataaaaacatatacacattaaaataatcaaacaggacatgatgacgttagaatatttttttccttcagagatacccatcttcactttcctctctaggtgactaaaagcagaaattctcaaaaagggaaggttcttataccgttaataagtaaatattaaatttcaaacatcatagtacaagttaatattcctataaatgtctatctgaagatcttcaaagtgctttgaagttgttaattaaacctttccatgcctaccagtttaactaagaaacatacagtaacctcacagagggatcatttcatttaactcaagtgttctcccctgatggagaataaaatagttacatgataagccagagtgacactgaactgcatcttaagatggaaaatgaacgattctatgatggccgaacgcatctgccaagggagtttatacagaatgtgttttagacttagaatttgcatagcatgctagtttttattgctattaatatgctattatgaagctga

SEQ ID NO: 410062 - DNA, 595 bp, Homo sapiens
aatttaaagtaatatggcagaggtaagtttgggcaaagacactatgcaacttcctgaaacaaaaataaaattttagtctgttttcattaaataaacatagtttttaaaacaataaaagataataaaaggaatgtaacagcatttaaaaagcatgatattgaaaatgttattctaggcatataagaatgatataacaaaattagtcaagaacaagaaatgaggaaattggatagaaaagaaaaaagtgttatcatcagacaatacaattttatcaatagtagtggatgcaaggggkatataacaatatctaaaaaatataaaagaagagagttcaagattgctgaaataagactacattaaaaaaaagtcatcctatatattagatataagaaattagaattgtatttacaaaactcattgactataaagtacaaaaaattaataaaagatgtgcaagacatatatggagaaattatttaaatgtattaaaaatcataaaagaagactggaatgagtagaagggcatataataactgttgaagaaatcaaaatcataagggcatgcagataatcaaaatctaatttgatttaatca

SEQ ID NO: 410063 - DNA, 620 bp, Homo sapiens
tagcaggtcaattaaatttatgcactgatcaaagtttcttgagcttctaatattatgtgccagaagctgtttttacatactaggaataaagaagtggacaaaattaataaatattgctcacttcattgagcttaccttttaatggggaagagggaaataaataactaaaatataaaccttactagatgatacagtgttctttggagtaaggcaaagtaagggagggcaatagagactagtggtcagctgactgtaattttaaagagggtggttagagaaagctgcactgaaaaggcgacatttaagcaaaaacctaaaggaggttgaaggaaccagttgtgtgcatatttgggggaaagatcatgctatgtcaagggactagtaaagataaagagcccttataaggtgtgagaaatacatgggagctaggatattgctagagtggagtsagaacaaataacagtggtgaaggaactgagggtcagggtggggttgctgtgccatccgttattcagaacacagttttatatagtctaaatcaaggacttggccttttttcagagtgagaaggttttgagaaaagagtacctgagttacttgaagttaaaaggatgattctg

SEQ ID NO: 410064 - DNA, 610 bp, Homo sapiens
ctttgtaaagcttgttataagtccaagttatttagccatatggtttaaatccatatagttttaactatagaagtctaccaaaggaatgagtataggtagaattgatctgagggcactctaacatttcagaatcagatgaaaagcaatgagcaagagactgaggagctgccataaaatgggaataaaaccatgaaaatatgctatcctagaatccacttaatcaaagtgcttccaaaaggagagagtcctcaactgtgctaaaacttaagttaaacaagaagagggctgaggattgacctttgtatttataaatgtgaagtcattgtagacattgacaggaactaaattggacgagagtactatgtatgaaaacctggttcagtgtgagtccaaaaaaaaagtaaaaagaaatcagatcattttsttacaagagtaaacatactaacagggtagtgaatgaaggaaaatgtgggctcaagagaggtttgtattttggggtttcttttaaattacagaatgtttgtattgatgaaagaaatgatcagtaggaggaaaattgaaaaggcaaaagagagaggaagaattgctacagtaatgccctagtttgaaa

SEQ ID NO: 410065 - DNA, 578 bp, Homo sapiens
cccaccaaagtgatggttaaaagatgaatggttttgaatgctgattttattccagccattaccaaaaatatgtagttgacctctcctccatagatgagccaaactcttcrccactgtaccaataaatattggtgaatttctttgccttacaaggatatctccctaagaatgtttcactgcaagctgccatgatgcatgccaaaagtagccagaagtagagaactgctctgagagatttcagaaagccccttctagtccacaaaactatgagaaaactgctttctaacatggccaccttatcctcctctcatcaacctgtggataatgagcactgattctgagcccaacactgcagataatgtgaacagtaagatattatcctcatcataatgaatttatagaggcagaactgagaagcaattaaagaaaagaaaataatagatgagcataaaattaattgccaaattgagtgattccacatctaggaaaaggaaaagggaaaagcacgcaacttacatcccaaccacttttgctaccttttctaagttgatcctacaacagccttttaaaacaagtgt

SEQ ID NO: 410066 - DNA, 578 bp, Homo sapiens
cccaccaaagtgatggttaaaagatgaatggttttgaatgctgattttattccagccattaccaaaaatatgtagttgacctctcctccatagatgagccaaactcttcgccactgtaccaataaatattggtgaatttctttgccttacaaggatatctccctaagaatgtttcactgcaagctgccatgatgcatgccaaaagtagccagaagtagagaactgctctgagagatttcagaaagccccttctagtccacaaaactatgagaaaactgctttctaacatggccaccttatcctcctctcatcaacctgtggataatgagcactgattctgagcccaacactgcagataatgtgaacagtaagatattatcctcatcataatgaatttatagaggcagaaytgagaagcaattaaagaaaagaaaataatagatgagcataaaattaattgccaaattgagtgattccacatctaggaaaaggaaaagggaaaagcacgcaacttacatcccaaccacttttgctaccttttctaagttgatcctacaacagccttttaaaacaagtgt

SEQ ID NO: 410067 - DNA, 536 bp, Homo sapiens
gctagtagaatggcaaatgttgatcatgtatagtgatttgcggtttttctctttctttatgaagcctcttgatgcaaaccagcacccatttccagagaaacaggaaacacacccatttcacaatgagtartagaacttactttagtccaaaccaaatctaagactaaagtttgggtatacagaaagtgtttgatttagcacatgttgttcacagcacaagcactttaagatcaaaagtttcatttctttcatatgtgttacttttttctatgcaagcacaagacttttccatgtgtttcattattgttcggggaaaaaaaattaacatgctggatcaatggaaacatttgtctactaataagaaaattagaaaaggagtgaataggtcaggcctagttgggctatacaccctctacaaagccagcagacaaagttgctccctttcagcccctaagaagagtatccaaccttgttgaacattaagcttcttcctagtatttattcatctggatagaggtacaatatcctgacaggtt

SEQ ID NO: 410068 - DNA, 498 bp, Homo sapiens
tagagtgataaacagatggaagataggagataaacagatgggagatatcaagagaggtaaaaaaaaattatggaagctctaatgaaatggtccaacagaagtttaacaggaatttaaaaaaaaaagtaagaatagagagaatcagggacaggcaatattggaagagataatgactgaaaattytaatagttgaaagacacaagtcctttggttaaaaaaaaaaaaaaagcaaaaccaagaatacatgagcaggataaatagaacaaatcctcatctaatactgtcatagaattaactgtagaatagagaaaataggagaaacaaataacaagaggacagtagaatgacaacagagattctgtcggctctagtggatatcccaagtgtaatctcagcctccaaaaactcctcttatgggccagcatcaaaatactgcaataaattcacatgcaagaattgtggacccttggaaattatgtcaatagaagcgcaaacaag

SEQ ID NO: 410069 - DNA, 533 bp, Homo sapiens
ttgggtagctttgagtgttgctagtccttctgaagacagcgttaaggagaaatctcttaaggtatctgtagcttcactattagacccatataagatattcaaagtaactacaaggtagaaaacgtttttccacaggtctcaaactacatcttcttttggaacaacattccatgatgtttatttgacttcaaaaggcactgatgatagacttgtctaaagatccatttcccatcatgtatgtgccataaagcaatgcctaactttgtcaaaataasgttgcaaaattcagaatgaaaaagaaagaatttcagggtaaaaattaaagtctatgagtcattattttttgagtatacaataaggaattaataatcagataacattttaaatcttaatgaagagatgagctttaaaaagtacacatttgctttttattcttctcttttcccgaacaagtttttaatcccttctgatgttctgtttttttcctttgatactaaaaaatacacctgccagctgagatgttatagaaacct

SEQ ID NO: 410070 - DNA, 579 bp, Homo sapiens
tggaatctatgtaggctaatatgctttaatttaaacttaattataagaaaactaaaagttccagacagaattttctttgataacagcttttgttgcatggaaatgtgtaaagacttctaagagttcaccttcttttctgagcacttggaggttacacatctctaaacccataaacttaggctcagctatataagtatttagtaccaatggcttgtaagcaaatgtaatatgtgtcactaaaagattaartagttaattttagtaagagtgttttttgtttgtttgttttttgttttcctgatgcatcaaggagttcccacaatcttaatagtacatactacatgatggaagaaatgattctctttgtctgtattactgagtggtgtcatggaggacattggtctataactacaaagcttctgataacaaataagtcttgtgttgttttaagtctctgagatttgggggtctttgtaatcacaaagtaacctaaactaggactattacagcttaaatttgcaattaccagaggtactcaaattgcccaaatgcaatagtaaacttaacaaggtagagaaa

SEQ ID NO: 410071 - DNA, 572 bp, Homo sapiens
aaataatttctttgagggcaggacttatgaagaaaaaccgaatgctctggtctatttcaaaaggctacttttcttctcctcctcctagaagcatgagggatttttcttatttgctgtgagaacctggttgagctcctagagataaaactcacaaaagtataggaactcccctattatttggtcccttgggagtttttaactctcagacttgtccacactcaatctctaggaatccatcaattacaattaagggtttcctaccccagtaatggttcctgcagaggtgggtttctgctccgttaagttgtgactatctgtacttgcctgtctgcctctccagcttttagggtagtggtttgccctgcaatctcatttctctgacagatgtgagaagagttgatttctcagtttgttyagctttttacttgttgggaggagatggtgacttctaagctccccacttaccagatcggaaaactgggggaggggcagccttccaaatgtgtggagtgatagaaacaatctggcaacaaattgcctcccaaagtgcattcattcagtgctgtctgtgt

SEQ ID NO: 410072 - DNA, 541 bp, Homo sapiens
gtgggtaaacagagagtaaagaaaggctaattagtccccatgcaaataaaattacaacattttagagctggaaatatttttataaaccctttaaaagaaacacagacataatcatgaccatattgaaaggtaagcataaaatattttgtttattattattattttttatctrtaaaaacttgaattcttgtttattattgtctaaatattttatctattattatctaaatattttgtttatctattattacctatttgttatctataaaaacttgagttctattgaatacattttgagaaatcacttaaagtttattaaatgcgagtgaaattgtattcatttttgcgttctccataatacttagcacagtgatttgcacatagtgttcactacgtgttttattaatgaatggagacaaatatctttgacccatgtcaaaggaataaaaataatcaatttttgaaataaactaggctttcagccatatataaaatttaaattagagcctttatataactttcagagctgaacaagaaccca

SEQ ID NO: 410073 - DNA, 541 bp, Homo sapiens
gtgggtaaacagagagtaaagaaaggctaattagtccccatgcaaataaaattacaacattttagagctggaaatatttttataaaccctttaaaagaaacacagacataatcatgaccatattgaaaggtaagcataaaatattttgtttattattattattttttatctataaaaacttgaattcttgtttattattgtctaaatattttatctattattatctaaatattttgtttatctattattacctatttgttatctataaaaacttgagttctattgaatacattttgagaaatcacttaaagtttattaaatgcgagtgaaattgtattcatttttgcrttctccataatacttagcacagtgatttgcacatagtgttcactacgtgttttattaatgaatggagacaaatatctttgacccatgtcaaaggaataaaaataatcaatttttgaaataaactaggctttcagccatatataaaatttaaattagagcctttatataactttcagagctgaacaagaaccca

SEQ ID NO: 410074 - DNA, 421 bp, Homo sapiens
ggaagaggtcccctttacctattcttcaccttgctttcaagatgtagttctgttgtgattcaagcatgtttgaaagacctttttgttgatttcattgtaaaaatktaggctccagaaaaaattttggcagattttctactcttaaaacagttccttccagaatgcaaatgtgaagaattaaaacagccacacaaggctttttttttttttttttctggtcatcctggtaactaatggctttcactatagcagatatagcagaaataaaacttcaaactgagcgctataggcaatgatagaatggattttttgcatatgttgaccaatgttgttaatctcgtgattcagtgattggccttataattacaattagcatagatatactcattgtggtagaaacactatttgctacataactata

SEQ ID NO: 410075 - DNA, 421 bp, Homo sapiens
ggaagaggtcccctttacctattcttcaccttgctttcaagatgtagttctgttgtgattcaagcatgtttgaaagacctttttgttgatttcattgtaaaaatttaggctscagaaaaaattttggcagattttctactcttaaaacagttccttccagaatgcaaatgtgaagaattaaaacagccacacaaggctttttttttttttttttctggtcatcctggtaactaatggctttcactatagcagatatagcagaaataaaacttcaaactgagcgctataggcaatgatagaatggattttttgcatatgttgaccaatgttgttaatctcgtgattcagtgattggccttataattacaattagcatagatatactcattgtggtagaaacactatttgctacataactata

SEQ ID NO: 410076 - DNA, 598 bp, Homo sapiens
ctatcttttgacacattcttctcagtttttcaaccatgtttctgtcattttctagggcccacatcaaaacagctctattataaatttctgcacctcatctattctctcctttgctctgctacagactcagtgactgacaattttgatgagttttttaccacacagtaatgtctttgcaccattgttttcaatggcttttataactcaaaccatctgctcttttttttttctscttttcctgttgtgtaaaacatttttgaaatacagtgagggaaagaaatgcaatcacaaactgctgttttgtgttgtgccgcgcattaattttcaagctgctttgctttgcagcattcatttctccagcagaatagcaaagtgtggatgccttgagggctgaatttgcttttttcttaatcataagtaattagagaaactgccacatgttgttttggatagtgtttaagtgcagaaatgctttgaaaagggtatatatacagccagattaaagatatccaaaggcaaattggtaccttcaaaagctcaaatgggttgatttgttacttcaacactctacaacacctggctctgtataaaagtgaag

SEQ ID NO: 410077 - DNA, 584 bp, Homo sapiens
aattaactaaagatggattaaagacttaaatgtaagaattaaaattgtggaaattctaaaagaaaacctagaaagaaattcttctggacattggtctaggcaaagaattcgtgactcaggcctcaacaaaacaaaatgcaacgaaacaaaatagacaaatgggacttagttaaactgaaaagtttctgtatcactaaagaaataatcaacacagtgaacagacaacctacaaaatgtgaggaaataattgtaagctatgcatcctacaaagggctaatattcattctctacagggaactcaaacatctcagcaagaaaaaaaaaaacaacaaaaaacaagtaagctcattaaaaagtggccaaagggcataaacagacatttttcaaaagaataaattacagtaactttctaaaaggacagttctaaactagcataaccaattcgatgagacctcagtgctggagtttcagctgagtaaaaaccctaggtttgccagtgsgctattaatctccatctattcaagaggtgggaatcaactcatgtcagcaggcagtagtgtcaccctaagaactccagtgaagag

SEQ ID NO: 410078 - DNA, 584 bp, Homo sapiens
aattaactaaagatggattaaagacttaaatgtaagaattaaaattgtggaaattctaaaagaaaacctagaaagaaattcttctggacattggtctaggcaaagaattcgtgactcaggcctcaacaaaacaaaatgcaacgaaacaaaatagacaaatgggacttagttaaactgaaaagtttctgtatcactaaagaaataatcaacacagtgaacagacaacctacaaaatgtgaggaaataattgtaagctatgcatcctacaaagggctaatattcattctctacagggaactcaaacatctcagcaagaaaaaaaaaaacaacaaaaaacaagtaagctcattaaaaagtggccaaagggcataaacagacatttttcaaaagaataaattacagtaactttctaaaaggacagttctaaactagcataaccaattcgatgagacctcagtgctggagtttcagctgagtaaaaaccctaggtttgccagtgcsctattaatctccatctattcaagaggtgggaatcaactcatgtcagcaggcagtagtgtcaccctaagaactccagtgaagag

SEQ ID NO: 410079 - DNA, 593 bp, Homo sapiens
gggtttgaattattcaggtaattgttccttatgtgtagaggttgagtctggatacacaaagttaaaattaaacatttaaaactgaaattatgattgttcctttaaaatgtgtttccctttcattccttttttttagaaaaatacataattattaatctagctrcagaagccagaaatctaggtggcatccttaacattgcactcttccttgcgacttttgttcaactgaccaccaaatgtttgcccattatgttataaatacctcttgaaaacatatacctccttccttccaccacatagttcaagcaaacatcatgcatcaataacttctcatttcaagatgcacccattctgtaatccctccaaattaacgcatcttttatacggcattcactcattcactcatatattcattcattcaagtacatacaggtatacttcattttattccactttgctttattgtgatctgcagataatgtagtttttaaaaattgaaggtttatgtcaaccctgcgttgagcaagtctgtctacaccatttttctaataatgtgctcactttaattatctgtgttacatttttgtaattct

SEQ ID NO: 410080 - DNA, 486 bp, Homo sapiens
agatatcagactcattttaaatataaagatccatattctcaagaatttatttaatgacttagtttgtgaaaatgaataaaatgataatttattgataataaggagagctcaaagtaagatacagatatctgtgttgcttcaatggaaatatgttctaagaaatgcattattaggtgatttcatcattgtgtgaacaaacctgtacagcaggttactsgactgaacactgcaggcaattgtaacacaatggtaagtattatgtatctaaatgtatttactcatataaaatctagagtaaaaacatggttttaaaattaaacaatacccatattggccacttcctgtgaatggagcttgtggaactagaatttattctgggtgagtcagtgagtgaggtttaagtgaatttgaatgcctaggacattgttgtacttgactgtagatttttaaaacacagtaaacttaccctacagtgaatttataaaa

SEQ ID NO: 410081 - DNA, 486 bp, Homo sapiens
agatatcagactcattttaaatataaagatccatattctcaagaatttatttaatgacttagtttgtgaaaatgaataaaatgataatttattgataataaggagagctcaaagtaagatacagatatctgtgttgcttcaatggaaatatgttctaagaaatgcattattaggtgatttcatcattgtgtgaacaaacctgtacagcaggttactcsactgaacactgcaggcaattgtaacacaatggtaagtattatgtatctaaatgtatttactcatataaaatctagagtaaaaacatggttttaaaattaaacaatacccatattggccacttcctgtgaatggagcttgtggaactagaatttattctgggtgagtcagtgagtgaggtttaagtgaatttgaatgcctaggacattgttgtacttgactgtagatttttaaaacacagtaaacttaccctacagtgaatttataaaa

SEQ ID NO: 410082 - DNA, 606 bp, Homo sapiens
gtaaaaatataaagaaaaacaggggtatcattgccacaacagccagtgataacctctagataggatggagaaggttgtgataaaagataggcataatgttattaaaagaacaaaaaaaaattaaacataaaggtaaaaaacaaacttgctttaaaatttattttactgttaataattaaaaatcaatctatagagtgagacaaggtattggaacacatataacaaaataatttatatccaaagaatatattcatacaaatcaattkcaaaaagacagaagccccaattaaaaaggccaaaataattaaaaaggaatctgaaaaaggagaaattccaaatgatgtaaaaacaaaggaaaatatgctcaacttcattagtgatcagtgaaagaaaattaaatccaaaaggagatttatagacaccatgattgaataatttgcctaaaaatagaaactgataatacatagtattagtgataatgcaaggcagctggaactttcatacacttatgatgggggtgtaagttgaaatgactgccttggatcacagtggttttctactactgtagaacataagcaaacattatgatcaattacacttctaaat

SEQ ID NO: 410083 - DNA, 616 bp, Homo sapiens
agtattagtgataatgcaaggcagctggaactttcatacacttatgatgggggtgtaagttgaaatgactgccttggatcacagtggttttctactactgtagaacataagcaaacattatgatcaattacacttctaaatatatttattttagaaaggtgtccacacacaccaagagtcacatagaataatgttcataacaccattaattataataatccaagactagagaaatatgtcttttaatcaacatttaaaaaataaattgttggtatagtcacacaacagaatacaatatagcaagaacaatgaatgaaatgtaactaaatgcagcatcagagtggacattataaatataatgatgagtaaaacaacatgtggaacatataacagctttctagtaatataaaattttaaaacaatcaaaagttaattacaaaacttagagataaatgttttggtagtaaaaaataaaaatgtagcaagaaaatggtaaaatcaagacagtgcttacctttggagaggatgaaggatggaggatatatggattattcagggccatcasagggccttggaaatgtcaccatatgacaccatttcttaactttggtattat

SEQ ID NO: 410084 - DNA, 446 bp, Homo sapiens
ggtgaagttgtttgatggcagaaggagagatatggtagctgaatggcagtttgcaagtgtgtcatattcagagttctcaaattccttgttygtattgtcagtaagcagttgataaaccacttttcactttaaactgtgcctaaaaactcgacccaggatgacgaccactcttactagttgtttgattccatctaacttcattattcagtgaaaaagtttccgttcatgactggaatcataatatcttagtccattcaagtagctgtatcaatgcaccacagattgggtagcttgttaataacaaatttacttcttgcaattctggagtctgagaagtccaagatcaagatagattctatgtctggtgaaggtctactttctagttcacagataatgcgctcttgctgcttcctcacgtagtgaaagaacagccaacttctctcagg

SEQ ID NO: 410085 - DNA, 504 bp, Homo sapiens
gatgttaagtgtgaaaggacttgactacatgtctataatttaacctcagatgttccaaaaatgtgagatgttatctaaataaatgctctttggttttatgatattcagttgacttgagagtaygtggaaatgttctcaatttcctctgcttaaaacattttaacttgtcaaattattattcctttttgagacagaatttcactctattgcccaggctggagtgcagttgtgggatcatggctcactgcagccttgaattcccaggcttaagtgatcctcttgcttcagccttccaagcagcggggactacaggcatgcaccaccatatccatctacttacttttttttttttttttttttttagagagaggttctcactatgttgcccaagctggtcttgaactcctggctcaagcaatcttcttgcctctgcctcccaaactgttaggattgcagacatgagccactgcaccaaaccataattattataactaaacagcaaaa

SEQ ID NO: 410086 - DNA, 625 bp, Homo sapiens
attactagcaagcataattatcatcttggaattcatatctatttggtagtataggaaaattttaaaaagagagtgaaaaagtaaagttctacttgtaaggaaaaaagaatgagaaaagagtgatgttaagtgtgaaaggacttgactacatgtctataatttaacctcagatgttccaaaaatgtgagatgttatctaaataaatgctctttggttttatgatattcagttgacttgagagtacgtggaaatgttctcaatttcctctgcttaaaayattttaacttgtcaaattattattcctttttgagacagaatttcactctattgcccaggctggagtgcagttgtgggatcatggctcactgcagccttgaattcccaggcttaagtgatcctcttgcttcagccttccaagcagcggggactacaggcatgcaccaccatatccatctacttacttttttttttttttttttttttagagagaggttctcactatgttgcccaagctggtcttgaactcctggctcaagcaatcttcttgcctctgcctcccaaactgttaggattgcagacatgagccactgcaccaaaccataattattataactaaacagcaaaa

SEQ ID NO: 410087 - DNA, 589 bp, Homo sapiens
tcaaatattaattctgttttaagttatttgagaaattgttatgctgctttccacaatggctaaactatttacattcccaccagcactttataagcattccctttcctccacaacctcaccagtatttgttattttttattttttaaaagtagccattctgactagtgtgagatggtatctcattgtagtttgatttccatttctgtaataatcagtgatgttgagcattttttcttatgcttgttggtcrcatgtatgtcttcttttgaaaactgtcttttcatgtcttttgcccatgttttaatgtagttgtcttttgctttttaatttgtttaagttccttatagactctgggtattacacctttgaggggtacagtttgcaaacatttctctcccattctgcaggttctctgtttactctgttgatagtttcttttgctgtgcagaagctctttagtttaattaggtctcatttctcaatttttgtttttattgcaattgcttttagtatcttcatcatgaactctatcccagagcctatgtcgagaaaggtatttcccagtttaccttccagggtttctatagtt

SEQ ID NO: 410088 - DNA, 300 bp, Homo sapiens
tatgacatatttaaagtgctaaaggaggaaatcttttatcctagcatagaatattcaccaaaattgttcttcaaacatgaaggagaaatacttcctgagatgaacaaatgctaagggatttcaacaacactagacctgttgtacaaatcaaatcatagttacacattatatcaacagagtgaatgataaaaaccatatgatcatttcaaytagtgctgaaatagcatttgataaaaattcaacatttcttcttaaaaaaacccttatatactgagtttaggaggaagataactcaataca

SEQ ID NO: 410089 - DNA, 609 bp, Homo sapiens
atgattgtaaacacatatggacccaactgcatctatggaaaccagttatatagagcaaatatagaatctggttatatagagcaaatattcttagagatagagagattaacctccatacaaataaagctggagacttcaacacctccctttcagcattaaacaggtcatctagacagaaacaacaaaaaagcattgcacttagtctgccctatataacatatagacttaatagatgtatagagaacattccatccgaatgctcaacatcactgatcatcagagaagtgtaaatcaaaactacaatgagatatcctctcaccccatttaaaatggcttatatccaaaagacaggcaataaaggcctgtgagaatgtggaaaaaatggaagctttgaacactatggtgggcatgtaaattaacacaaccactatggagaacagtttagaggttcctcagaaaactaaaattcagctatcatatgatccagcaatcctattgctgggtgtataccmacaagaaagcaagccagtatactgaagatgtacctgcactcccatattggttgtagcactgtttacgatagctaatatttagaagcaatgtaagtgt

SEQ ID NO: 410090 - DNA, 555 bp, Homo sapiens
atattttttgattgcatacttcctaaaagtgataggtcttttaaagaggtatattaagttaaaatgaggccattaagataggccctaatccaattttgctggtgtccatataagaagagcaaatctgaacacattgacacgtggaatgagcactcatggttcaaagaccatgttacacacagtgagaaggcagccatccacatgccaagaagtggggcctcagaagaaccaagtctgctgatgtcttgatcttggacttctggcctccagaactttacgaaatttaactkattttgtttaagccactcagtctgtggcattttgtcatggcagccctagcaaacttttgtaccttatgtggcaaaatgcgctctgcagaggaacaatctgctagtctaacctctccatccacgttaaattagggatcttaaaatggggaaattatctgaattatctgagtgggttctaaatgccatcacatacatccctataagagggatatagagggatatttgaataaaggacagaagttgaagtgaagatggaagaagagat

SEQ ID NO: 410091 - DNA, 555 bp, Homo sapiens
atattttttgattgcatacttcctaaaagtgataggtcttttaaagaggtatattaagttaaaatgaggccattaagataggccctaatccaattttgctggtgtccatataagaagagcaaatctgaacacattgacacgtggaatgagcactcatggttcaaagaccatgttacacacagtgagaaggcagccatccacatgccaagaagtggggcctcagaagaaccaagtctgctgatgtcttgatcttggacttctggcctccagaactttacgaaatttaactgatttygtttaagccactcagtctgtggcattttgtcatggcagccctagcaaacttttgtaccttatgtggcaaaatgcgctctgcagaggaacaatctgctagtctaacctctccatccacgttaaattagggatcttaaaatggggaaattatctgaattatctgagtgggttctaaatgccatcacatacatccctataagagggatatagagggatatttgaataaaggacagaagttgaagtgaagatggaagaagagat

SEQ ID NO: 410092 - DNA, 555 bp, Homo sapiens
atattttttgattgcatacttcctaaaagtgataggtcttttaaagaggtatattaagttaaaatgaggccattaagataggccctaatccaattttgctggtgtccatataagaagagcaaatctgaacacattgacacgtggaatgagcactcatggttcaaagaccatgttacacacagtgagaaggcagccatccacatgccaagaagtggggcctcagaagaaccaagtctgctgatgtcttgatcttggacttctggcctccagaactttacgaaatttaactgattttgtttaagccactcagtctgtggcattttgtcatggcagccctagcaaacttttrtaccttatgtggcaaaatgcgctctgcagaggaacaatctgctagtctaacctctccatccacgttaaattagggatcttaaaatggggaaattatctgaattatctgagtgggttctaaatgccatcacatacatccctataagagggatatagagggatatttgaataaaggacagaagttgaagtgaagatggaagaagagat

SEQ ID NO: 410093 - DNA, 594 bp, Homo sapiens
actcttttatcatccagttaattttctttatttaaatgtaaattgtagtttcactggcaggagaatggtgagtgtgcccactaggatttctttaattctgaggtttatatattagaaattttctgaaagaactgtaataatgtggttctcttagttctagcactcatctattttatttctgcttttacattgatgttaattttctcagaaatcttatagaaaaactacatatttataattaaatcccatcatataaatacatagtccaactagttttctatttataaaggtaagtattggtggggtaggttgggggagatgtatctcccagttttctctgtgataaaaaatacctattaaatgtcaatctcatcacacatattccccatattccattcatacatatccacmtatagatatcaaacaggggagcaaataaaactacttataacctaagctcaaagcataagtaggagacaaaataataacaacacaaacttcgatacacatataagtagaaagtaaacatcaaacccagcagtcttgagtgatcaccaaaacagaaaggtagatgaagactggtaggagacagtg

SEQ ID NO: 410094 - DNA, 598 bp, Homo sapiens
tactaatatgtaaaacttgtaattaaaaaatttaaaaaataaaagaaaactcccttgacctttggaagttctgtgtactttggaataactgaaatatttcagccaagtctgagaatgttttaagtaacagaatgtaaaaataaagaaataattattttgactgtatagatatataaccattagaaaatgcaacaatttcaaatcactcaagaaagcttgaactaaaattattatatttgatcaatctgtgtcatatgaagtctacaaaaacatagttttagacatgaaaggactcaggaacactctaccttgagccttcctgaggattttgccagagggtgagcttggtcccatcacaagttacctggaggtactaccaaaaaaaaaaaaaagttggggggaggggccgataataaatgttaaactcttagaattttaaatattagtcttaatcaaagtgkactaaatgtaaatgttatgtgtttcctgtataaagtagaaataacatagcccccaaaatgggggagaaataagagagaaagaagggaaagtaggatgaattaatggatatggcagacagagtggtatactggagtgg

SEQ ID NO: 410095 - DNA, 610 bp, Homo sapiens
tattaatatctaataaagtggacttcagagcaaagaaaattactagagaaaaagtcacattacataataataaaaggatcaacttactaggaagaggtagtaattctaaatgtacacaccaaaaaacagagcttcaaaatgcataaagcaaaaactgatagatttgcaaggagaaataggtaaatctacagttataattcagtacttcarcattacctttcagcaactgatagaactcctagaactcctagacagtaaatcagaaaatacttaaaagatatgaaccacacaattattcaccaatagtatctaaacgacatatgtaaaaactccacacaatagcagaataaactttttttcaagtgcccatttaacattcagttatatattccatattctgagccataaaatatacctcaacaaatttataagaactgaaatcatacagtgtgttttctctgactacaatggaatcaaactagaaataaataaagtctacaggaaattctcaaaatatgtgggaattaagcaacatacttctaaatactttattggtcaaaaaggaaatctcaaaggacatttaatacatatacaaaaccaaattaaattg

SEQ ID NO: 410096 - DNA, 495 bp, Homo sapiens
cttcacatagggtatttataattcatatatagtttcttctataatagtagttgctcaatcttcttttttttttttttttttttttagatggagtcttgctctgtcactaggctggagtgcagttgcgcaatctcggctcactgcaacctccgcctccctggttcaagcaattctcctgcctcagctgcctgagtagcctacctgagtagctaaaagttcaggcacgtaccaccatgcccagctaacttttgtatttttagtagagacaaggtttcaccatgttggccaggatggtcttgatctcttgacctcgtgatccacccacctcagcctcacaaaagtgctgggattacaggcgtgagccaccatgccyggccactcaatcatttttatcacaagcaatgtcacttagcaatatattaatagttgtcatactacccttatcagatcaccaggaaaataggtagaaagattaagaaaaatcaaactatcttt

SEQ ID NO: 410097 - DNA, 565 bp, Homo sapiens
ttttcacttccctaagtgaaacaaaatggctagagttggctgctattggatgtatcccttcctccacataaaagtctagagagggctggggttgagtttttcagttctctcacatgggaggctagagcaggctggagttggatatttctcttccactaatttagttaggctctcataaaactcccaatactttagtactttagactctagaaaatgggaatagttttttgtgtgtgtttgtgtgtgatggccttgttaagaagagtagatggtctggcatatttcaaaaggttacttttaccctccctatgcaggaagcttgaagaaatttttctacaatatttcttgtgagaacctggtagattttctggaggtaaaactcccaaaatgtaggtttcccatgtgacttcgtcctcttatattttttcttttatctctctggcttgtccacactaagacttcaataatttatcaattasagctcaggtttttctacctggtattggttcccatggaggtttctgcttatgagtttctgctgtgtcaagctgtgttaccctgtagg

SEQ ID NO: 410098 - DNA, 604 bp, Homo sapiens
gcattctctacagttacaccccctaaggaattggggggaattccttaggaaggtaaaaggaaaaakattataggaaaaaaagaaaaacaaaaaatcaaaataaaaaataattgcaaaagttggaggtgtcagcatttccagatgagaaggaaccagtataagaattatgacaccctaggccgggcgcggtggctcacgcctgtaatcccagacctttgggaggccgaggcgggcagatcacgaggtcaggagatcaagaccatcctggttaacacagtgaaaccccgtctctactaaaaatacaaaaaaattagccaggcatggtggcgggcgcctgtagtcccagctactcgggaggctgaggcaggagaatggcgtgaacccgggaggcggagcttgcagtgagccgagatcacgccactgcactccagcctgggccacagagggagactctgtctcaaaaaaaaaaaaaagaaagaattatgacaccatgaaaaatctgagtgtagtaataacactaaaggatcatactagctctccaacaatggttcttaaacaaaatgcaaatgcagaaataacaggcaaagaatacaaagcatggttg

SEQ ID NO: 410099 - DNA, 604 bp, Homo sapiens
gcattctctacagttacaccccctaaggaattggggggaattccttaggaaggtaaaaggaaaaatattataggaaaaaaagaaaaacaaaaaatcaaaataaaaaataattgcaaaagttggaggtgtcagcatttccagatgagaaggaaccagtataagaattatgacaccctaggccgggcgcggtggctcacgcctgtaatcccagacctttgggaggccgaggcgggcagatcacgaggtcaggagatcaagaccatcctggttaacacagtgaaaccccgtctctactaaaaatacaaaaaaattagccaggcatggtggygggcgcctgtagtcccagctactcgggaggctgaggcaggagaatggcgtgaacccgggaggcggagcttgcagtgagccgagatcacgccactgcactccagcctgggccacagagggagactctgtctcaaaaaaaaaaaaaagaaagaattatgacaccatgaaaaatctgagtgtagtaataacactaaaggatcatactagctctccaacaatggttcttaaacaaaatgcaaatgcagaaataacaggcaaagaatacaaagcatggttg

SEQ ID NO: 410100 - DNA, 601 bp, Homo sapiens
ggaagacataacctcccaagattgaatcaggaagaaattgaaaccctaaacagaccaatatcaagttttgaaattgaatcagtaataaaacaacctaccaaccaaaaagccctgaaccagatggattcacagccaaattctacaacatgtacaaagaggagctggtaccaattctatctaaaccattccaaaaaatctaggaggagggcctcctctctaactatttctaggaagcttgcatygccctaatacaaaaacctggcaaggagacaatgaaaaaagacagctacaggccaatatttctaatgcctatagacacaaaaaaaaaccctcaacaaaatactaggaaactgaatccagcagcacaacaaaaagttattcaccatgaccaagtgagcttcatttatgggaggcaaggtcgtgtcaacataggcaaatcaataaatgtgattcaccacataaacagaattaaaaacaaaatcatatgataatctcaattgattcagaacaagcttttgataaaatccaacatctctacatgataaaaaccctgaacaaattaggcattgaaggaaaatacatcaaaatagtaacaactgtc

SEQ ID NO: 410101 - DNA, 601 bp, Homo sapiens
ggaagacataacctcccaagattgaatcaggaagaaattgaaaccctaaacagaccaatatcaagttttgaaattgaatcagtaataaaacaacctaccaaccaaaaagccctgaaccagatggattcacagccaaattctacaacatgtacaaagaggagctggtaccaattctatctaaaccattccaaaaaatctaggaggagggcctcctctctaactatttctaggaagcttgcattgccctaatacaaaaacctggcaaggagacaatgaaaaaagacagctacaggccaatatttctaatgcctatagacacaaaaaaaaamcctcaacaaaatactaggaaactgaatccagcagcacaacaaaaagttattcaccatgaccaagtgagcttcatttatgggaggcaaggtcgtgtcaacataggcaaatcaataaatgtgattcaccacataaacagaattaaaaacaaaatcatatgataatctcaattgattcagaacaagcttttgataaaatccaacatctctacatgataaaaaccctgaacaaattaggcattgaaggaaaatacatcaaaatagtaacaactgtc

SEQ ID NO: 410102 - DNA, 635 bp, Homo sapiens
tggctctggaccccactcaaatctcatctgaaattgtaatccccatgtgtcaggggagggatcttgtgggatgttattggatcatgggatcttccatggattcccccatgttgttcttgtgatagtgagtgagttctcacaagatctgatggtttaaaagtatgtggcagtcccygcaacctctctttcctgctgccttgtaaatatggtgcttgcttctccttcaccttttgccatgattgtaagtttcctgaggcctccccagtcatgtggatctgtgagtcagttaaacctcttttctttataaattacccactctcagttctttatagcagtgtgaaaatggattaatacatcctcctctcccccaaattttctttatgcactatatttttatgctaaattaacaagacatcaaaatgggaccttttctataggcatgccatgtgaaataatcacatcatggagaatgggtcccctttatgttatgaacattccaattatactcttttagttacttaaaaatgtacaattaagttattattgactatagttaccagttgctatcaaacaataggtcttcattctttctaacttttttttgtatcaaagcatctcatgtgtcccataaatat

SEQ ID NO: 410103 - DNA, 635 bp, Homo sapiens
tggctctggaccccactcaaatctcatctgaaattgtaatccccatgtgtcaggggagggatcttgtgggatgttattggatcatgggatcttccatggattcccccatgttgttcttgtgatagtgagtgagttctcacaagatctgatggtttaaaagtatgtggcagtccccgcaacctctctttcctgctgccttgtaaatatggtgcttgcttctccttcaccttttgccatgattgtaagtttcctgaggcctccccagtcatgtggatctgtgagtcagttaaacctcttttctttataaattacccactctcagttctttatagcagtgtgaaaatggattaatacatcctcctctcccccaaattttctttatgcactatatttwtatgctaaattaacaagacatcaaaatgggaccttttctataggcatgccatgtgaaataatcacatcatggagaatgggtcccctttatgttatgaacattccaattatactcttttagttacttaaaaatgtacaattaagttattattgactatagttaccagttgctatcaaacaataggtcttcattctttctaacttttttttgtatcaaagcatctcatgtgtcccataaatat

SEQ ID NO: 410104 - DNA, 522 bp, Homo sapiens
gctaaataaatcttcaaaactgaacaattcaaagtaattatccaaacagctatttgcttgccctaagcaatgcctacaggaggccactaataatgcagtgcttttgtcagatttgcaaaaggtaatggttttatagggattgctctagtttttgtacctatataatctttttctcctttgtttattctgcttatttattttatcttttyctccctatttcagcacagctagatttgatccatgagaccctagaaaacagaacttgggtcagtggatgaagatatgggggaaggactctctagctaacctgagttactaagtaatatattatctgtcagtattaatgttaagattggaggaccactggtgggagtgttgcagtggggaacataaacactggatcttaatttttgatgtccttaggctaactgattcttttaccagcctttatagggataggaggacagaaaatatactaaaaacaatatactcattaatattcatggaaggcaaggaagccat

SEQ ID NO: 410105 - DNA, 525 bp, Homo sapiens
attcatcagattttgtgacacaaaaagtctgatcattctaaactgcattggaggagctgtccctgagacattagagaaaataaatgtaagtatacaagctctatctgagaaatcaaaaagctagtcatgtcctttatctattggagaagagcagtagttaatcaatatgagctaggagctacaggatcaaggcttaccgataaaataatggtacccctggtagttgagttaagaataaaccatggggtagtaaaagataaggaagacatattcagataattataattataaatgacttttagcctcagcaaaattaattgagaatctcttgatasatggttaagactgagccctaaatgacattgactgtgagatatgactttctggtacaaactctgagagaatttccctgaagtgaatcaaagctagatctattccaatcacaatgcatgagatggatcaaaaatgtgtccagtgattgatcagatgcttgaccacagggttgctgagtataaattttagaaa

SEQ ID NO: 410106 - DNA, 547 bp, Homo sapiens
ctccacttgaagttccaacttgaagtcatttcttaggtcacccttaagaacacaggctgttcaatgcrgacaggtcacctcttgtgttatgctgcctagatgttcatttcaccaaatacatcctaaatcatcacccctaagttcctagtttcacagatctccagggcagggtccccgtgcagccagcttctttgctaaggccaatcaaatgtaatcttggcttctattaataggaaattcctcattttcatctgagaccttttaagtctggacttcagtgtttaaacttttgtcagccttctaatcacaagtatttaacaattctctatagtggtccaatattttcctcatcttgctgtcttctaagctttcccaattcttctgacctctgtcttttactcacttctgaacctggttctacattgtcagctatctttatcagagcctggcaatgtggtaaaacagaaaagtccattttcgggggaaaattcacgaaggcttcagatatttgcatgaaaagaagctgagtgctggttgccaagacaaa

SEQ ID NO: 410107 - DNA, 547 bp, Homo sapiens
ctccacttgaagttccaacttgaagtcatttcttaggtcacccttaagaacacaggctgttcaatgcggacaggtcacytcttgtgttatgctgcctagatgttcatttcaccaaatacatcctaaatcatcacccctaagttcctagtttcacagatctccagggcagggtccccgtgcagccagcttctttgctaaggccaatcaaatgtaatcttggcttctattaataggaaattcctcattttcatctgagaccttttaagtctggacttcagtgtttaaacttttgtcagccttctaatcacaagtatttaacaattctctatagtggtccaatattttcctcatcttgctgtcttctaagctttcccaattcttctgacctctgtcttttactcacttctgaacctggttctacattgtcagctatctttatcagagcctggcaatgtggtaaaacagaaaagtccattttcgggggaaaattcacgaaggcttcagatatttgcatgaaaagaagctgagtgctggttgccaagacaaa

SEQ ID NO: 410108 - DNA, 491 bp, Homo sapiens
cccctgtgatagtctctgtaacatttagggaagaaggggatgatacttctccagatattgcagggggtgtacatccccctgtgatactgttcgtaacgtttagggggaagaggatgatattactccccatatcgaagggattgtacatctccctatatattgtccataacatccaggrcaggagaggatattactactccccatatcacaagggggtggacacccccctcctaaatatgtctaacatccaggcggggacaggaggatatttttccccataacccagagaaagtaaacctcctgtgatattgtccataacatccagtggggagaggatgatatcactccccatattgcagggggtgcacactccactctgatattggccataatatccgggggggtgaagtatgaagtcactacacatatcgcagggattattagtatcagattgtttgaagggctcacagtaaggatagtagtagggcgag

SEQ ID NO: 410109 - DNA, 491 bp, Homo sapiens
cccctgtgatagtctctgtaacatttagggaagaaggggatgatacttctccagatattgcagggggtgtacatccccctgtgatactgttcgtaacgtttagggggaagaggatgatattactccccatatcgaagggattgtacatctccctatatattgtccataacatccagggcaggagaggatattactactccccatatcacaagggggtggacacccccctcctaaatatgtctaacatccaggcggggacaggaggatatttttccccataaccyagagaaagtaaacctcctgtgatattgtccataacatccagtggggagaggatgatatcactccccatattgcagggggtgcacactccactctgatattggccataatatccgggggggtgaagtatgaagtcactacacatatcgcagggattattagtatcagattgtttgaagggctcacagtaaggatagtagtagggcgag

SEQ ID NO: 410110 - DNA, 491 bp, Homo sapiens
cccctgtgatagtctctgtaacatttagggaagaaggggatgatacttctccagatattgcagggggtgtacatccccctgtgatactgttcgtaacgtttagggggaagaggatgatattactccccatatcgaagggattgtacatctccctatatattgtccataacatccagggcaggagaggatattactactccccatatcacaagggggtggacacccccctcctaaatatgtctaacatccaggcggggacaggaggatatttttccccataacccagagaaagtaaacctcctgygatattgtccataacatccagtggggagaggatgatatcactccccatattgcagggggtgcacactccactctgatattggccataatatccgggggggtgaagtatgaagtcactacacatatcgcagggattattagtatcagattgtttgaagggctcacagtaaggatagtagtagggcgag

SEQ ID NO: 410111 - DNA, 491 bp, Homo sapiens
cccctgtgatagtctctgtaacatttagggaagaaggggatgatacttctccagatattgcagggggtgtacatccccctgtgatactgttcgtaacgtttagggggaagaggatgatattactccccatatcgaagggattgtacatctccctatatattgtccataacatccagggcaggagaggatattactactccccatatcacaagggggtggacacccccctcctaaatatgtctaacatccaggcggggacaggaggatatttttccccataacccagagaaagtaaacctcctgtgatwttgtccataacatccagtggggagaggatgatatcactccccatattgcagggggtgcacactccactctgatattggccataatatccgggggggtgaagtatgaagtcactacacatatcgcagggattattagtatcagattgtttgaagggctcacagtaaggatagtagtagggcgag

SEQ ID NO: 410112 - DNA, 560 bp, Homo sapiens
tatggaaaacagtatcgtagaacttagtgaactacaagaatataaatcagagctagatgaaagggcaatgcaggcagtagaaaaattaaaagaaatccatttacakgttacttgtttaaatcaggtaagtttacctgtaatgtgctttcatttatttcactgcaaattatattttggagattttatatatatatatatatatagtgtttcctctgcctctcttgtagcaatctgctttgtagagttgtagaaaaaaatggcatctgttttttcttttaaatatttaaatttccattattattatgagaaaatcaatctttcagagtaatgattctcattatggagtcatttgatgattaagaccagttggcataggaaaaaattgtgatttagaaattatgtgatacttttgaattggtgttaagctacattgttcattgatcactttttcaaattatgaatggattctattactttttatatgaccagattacattaatactaacataattatgatttcaaatttttataaatcagacttaattctgaattcagttatt

SEQ ID NO: 410113 - DNA, 560 bp, Homo sapiens
tatggaaaacagtatcgtagaacttagtgaactacaagaatataaatcagagctagatgaaagggcaatgcaggcagtagaaaaattaaaagaaatccatttacaggttacttgtttaaatcaggtaagtttacctgtaatgtgctttcatttatttcactgcaaattatattttggagattttatatatatatatatatatagtgtttcctctgcctctcttgtagcaatctgctttgtagagttgtagaaaaaaatggcatctgttttttcttttaaatatttaaatttccattattattatgagaaaatcaatctttcagagtaatgattctcattatggagtcatttgatgattaagaccagttggcataggaaaaaattgtgatttakaaattatgtgatacttttgaattggtgttaagctacattgttcattgatcactttttcaaattatgaatggattctattactttttatatgaccagattacattaatactaacataattatgatttcaaatttttataaatcagacttaattctgaattcagttatt

SEQ ID NO: 410114 - DNA, 620 bp, Homo sapiens
tcagtgctttgtgatattattttgatgattttttgactgcattccattccaaaaactaatttactttgagtagaagcagagttaataaagtatgcaaaaatactaatctggcttatttaagtagtctagtgacatatctgagaaaaattttgtgtgagattcaataaaagctgagatttaaagaacaggttactgctggtctccccaagttaacatagtttacctgagatatacacaaaattaacttttatccatctctctctctctctttttttttaagtatttgcttgaggcataatcataatcaacttctaaagttacattttacttgatttgttgtcccaaatgtagacaaaaaaatccataaatagacacaggcacagtggctcatgcctggaatcccaacactttggaaggctgaggctggaggagcccaggagttccagaccagcgtaggcaacatagcaatactctgtatctaaaaaatctgtttaaaaatgtttcaaaaatatttttaaacataaatatgaagatttckgttgttaacaaagtaatgggtagtcattttacatgaactttaataaaacaataatagatgaactgtgttgtgcgttctatgg

SEQ ID NO: 410115 - DNA, 600 bp, Homo sapiens
aaggcagaatactaaagactagccagccctcaggctcatggtggttgctgctattctgttgaacgtcaaccatagcctttagaaaggagcaagtctttgtggaatagacaggatttgaagtgcaacaaaggggtggaaacccagctgaccatgatactttcaagggagtttttccactgaatttgattattttctcatttggcacttctttctgggttttttaatcagcccaaaaactctaggtgattttacttttgtaattgtattctcttgggaattcctgattcctcgtttcaccaaataggtgtgtaactttcttgtttctgcytataataattctggagtctttaaacaaaacgactgtgacttttcatgatgagtagaagataggttttactcatgctacaatcaatattaattccttgcagttcaaagacactgaggccctgtctaataatatagaagttgaacttggacttgggagatgactcctgcctctcatactctctgtggctctgctttctattattttactcataagcttgttttgtctccttgctgagaattgtcaaacatgaaatgtaatttcaggctatagtg

SEQ ID NO: 410116 - DNA, 542 bp, Homo sapiens
gcattgctttttttcagaattttatacaaatggaatcgttcagtatgtagccttttgagtctggctactttcatgtactktatcaacagttattccttattattgccaaatagtaatcccccctataaatactacatggtttgcttattggtttgtcattggaggaatatggactattttcactttttggtaaactataagtggattggaattcacaaagtgctttttgtctgagcataggttttcatttcacttgtgcaaatgcctaagggtaggattgccgagtcacatgtacgtttgactttatcagaacctgccaaattgtcttccaaagtgctgtgccacttctgtttctttaataaatacaggggtattcaagctgtctgtttcttcttgagttttggtagtctgtctttcaaggaattgatctatttcacctaatttgtagaatttagaagcacatacttgtttgttttgtttttgtagtatccattatagccttctagtgtctacaggatttgtaataatattcctttcatttc

SEQ ID NO: 410117 - DNA, 523 bp, Homo sapiens
atcgttcagtatgtagccttttgagtctggctactttcatgtactttatcaacagttattccttattattgccaaatagtaatcccccctataaatactacatggtttgcttattggtttgtcattggaggaatatggactattttcactttttggtaaactataagtggattggaattcacaaagtgctttttgtctgagcataggttttcatttcacttgtgcaaatgcctaagggtaggattgccgagtcacatgtacgtttgactttatcagaacctgccaaattgtcttccaaagtgctgtgccacttctgtttctttaataaatacaggggtattcaagctgtctgtttsttcttgagttttggtagtctgtctttcaaggaattgatctatttcacctaatttgtagaatttagaagcacatacttgtttgttttgtttttgtagtatccattatagccttctagtgtctacaggatttgtaataatattcctttcatttctggtattggcaattt

SEQ ID NO: 410118 - DNA, 690 bp, Homo sapiens
tttcatttcacttgtgcaaatgcctaagggtaggattgccgagtcacatgtacgtttgactttatcagaacctgccaaattgtcttccaaagtgctgtgccacttctgtttctttaataaatacaggggtattcaagctgtctgtttcttcttgagttttggtagtctgtctttcaaggaattgatctatttcacctaatttgtagaatttagaagcacatacttgtttgttttgtttttgtagtatccattatagccttctagtgtctacaggatttgtaataatattcctttcatttctggtattggcaatttgtgttttctcttcttcctttgtcagtctgctagaggcttcctcatttgattgatttccacctcccaccacccctgcmaagaaccaactttggatttcgttgaatttttttcctttactgtttttgtttaaatattactgatttagtctgttttccttatgcctgatttgagtttatttggttctttttttacttgaagtaaataaattgccctgtaagcacatattttgataagatgatgtcatatttattaagttcaaactgttttccaatttgtcttaagttactctctttgacctatgggccatttagaagtacgccatttaacttctcatattaggggatgttctagaaatgttctagattcccagtttaa

SEQ ID NO: 410119 - DNA, 690 bp, Homo sapiens
tttcatttcacttgtgcaaatgcctaagggtaggattgccgagtcacatgtacgtttgactttatcagaacctgccaaattgtcttccaaagtgctgtgccacttctgtttctttaataaatacaggggtattcaagctgtctgtttcttcttgagttttggtagtctgtctttcaaggaattgatctatttcacctaatttgtagaatttagaagcacatacttgtttgttttgtttttgtagtatccattatagccttctagtgtctacaggatttgtaataatattcctttcatttctggtattggcaatttgtgttttctcttcttcctttgtcagtctgctagaggcttcctcatttgattgatttccacctcccaccacccctgcaaagaaccaactttggatttcgttgaatttttttcctttactgtttttgtttaaatattactgatttagtctgttttccttatgyctgatttgagtttatttggttctttttttacttgaagtaaataaattgccctgtaagcacatattttgataagatgatgtcatatttattaagttcaaactgttttccaatttgtcttaagttactctctttgacctatgggccatttagaagtacgccatttaacttctcatattaggggatgttctagaaatgttctagattcccagtttaa

SEQ ID NO: 410120 - DNA, 690 bp, Homo sapiens
tttcatttcacttgtgcaaatgcctaagggtaggattgccgagtcacatgtacgtttgactttatcagaacctgccaaattgtcttccaaagtgctgtgccacttctgtttctttaataaatacaggggtattcaagctgtctgtttcttcttgagttttggtagtctgtctttcaaggaattgatctatttcacctaatttgtagaatttagaagcacatacttgtttgttttgtttttgtagtatccattatagccttctagtgtctacaggatttgtaataatattcctttcatttctggtattggcaatttgtgttttctcttcttcctttgtcagtctgctagaggcttcctcatttgattgatttccacctcccaccacccctgcaaagaaccaactttggatttcgttgaatttttttcctttactgtttttgtttaaatattactgatttagtctgttttccttatgcctgatttgagtttatttggttctttttttacttgaagtaaataaattgccctgtaagcacatattttgataagatgatgtcatatttattaagttcaaactgttttccaatttgtcttaagwtactctctttgacctatgggccatttagaagtacgccatttaacttctcatattaggggatgttctagaaatgttctagattcccagtttaa

SEQ ID NO: 410121 - DNA, 593 bp, Homo sapiens
cagtttaattctgtcatcagagaaaataattcactgaattttaattgtttaactttagggtttgttttatgacccagaatatgatctctcaccaccgccatccagataattcttcaggttttgacatttcccaacctgtctgctggttacttttcagagtacttgggtcattgctatttatattttgtccagagtttcaaattgtgatcagtggaaaygacatgccgtagcatgcatacgccatcctggccagcatcacagatggtcagtatatctttctgttgttgttttgagacagggtctcactctgttgcccaggctggagcacagtgacatgatcagggatcactgcattctcaacctgctaggctcaagtgatcctcccacctcagcctcccgaatagctggtctataggtgtgctgccatgcccagctaatttttgtattttttataaagatgggattttgccttgttgcccaggctggtctcaaactcctgagctcaggctatcctctcacccggacctcccaaaatactaggattataggcatgaccaccacacctggccagtacatcttaaaaataatttctg

SEQ ID NO: 410122 - DNA, 593 bp, Homo sapiens
cagtttaattctgtcatcagagaaaataattcactgaattttaattgtttaactttagggtttgttttatgacccagaatatgatctctcaccaccgccatccagataattcttcaggttttgacatttcccaacctgtctgctggttacttttcagagtacttgggtcattgctatttatattttgtccagagtttcaaattgtgatcagtggaaacgacakgccgtagcatgcatacgccatcctggccagcatcacagatggtcagtatatctttctgttgttgttttgagacagggtctcactctgttgcccaggctggagcacagtgacatgatcagggatcactgcattctcaacctgctaggctcaagtgatcctcccacctcagcctcccgaatagctggtctataggtgtgctgccatgcccagctaatttttgtattttttataaagatgggattttgccttgttgcccaggctggtctcaaactcctgagctcaggctatcctctcacccggacctcccaaaatactaggattataggcatgaccaccacacctggccagtacatcttaaaaataatttctg

SEQ ID NO: 410123 - DNA, 593 bp, Homo sapiens
cagtttaattctgtcatcagagaaaataattcactgaattttaattgtttaactttagggtttgttttatgacccagaatatgatctctcaccaccgccatccagataattcttcaggttttgacatttcccaacctgtctgctggttacttttcagagtacttgggtcattgctatttatattttgtccagagtttcaaattgtgatcagtggaaacgacatgccgtagcatgcatacgccatcctggccagcatcacagatggtcagtatatctttctgttgttgttttgagacagggtctcactctgttgcccaggctggagcacagtgrcatgatcagggatcactgcattctcaacctgctaggctcaagtgatcctcccacctcagcctcccgaatagctggtctataggtgtgctgccatgcccagctaatttttgtattttttataaagatgggattttgccttgttgcccaggctggtctcaaactcctgagctcaggctatcctctcacccggacctcccaaaatactaggattataggcatgaccaccacacctggccagtacatcttaaaaataatttctg

SEQ ID NO: 410124 - DNA, 220 bp, Homo sapiens
gaatgaaattaaaatgatggaaataataaggataaaagctgaaatcaatgaaaaaaaaaaccaaagacataatagagaaaayataaaaagccaaagctgtttctttgaaaacagtattccagttgctaatctctgtggcagccagcctccaaaatggcccgcggtgattttcacttctgctatccatgccttgtgcagttctctctcatattgaatatgg

SEQ ID NO: 410125 - DNA, 220 bp, Homo sapiens
gaatgaaattaaaatgatggaaataataaggataaaagctgaaatcaatgaaaaaaaaaaccaaagacataatagagaaaatataaaaagccaaagctgtttctttgaaarcagtattccagttgctaatctctgtggcagccagcctccaaaatggcccgcggtgattttcacttctgctatccatgccttgtgcagttctctctcatattgaatatgg

SEQ ID NO: 410126 - DNA, 586 bp, Homo sapiens
aaaaaactccaatgatctaagcatccatctcaaaaatcccagcaaattaagctgaatgaaattaaaatgatggaaataataaggataaaagctgaaatcaatgaaaaaaaaaaccaaagacataatagagaaaatataaaaagccaaagctgtttctttgaaaacagtattccagttgctaatctctgtggcagccagcmtccaaaatggcccgcggtgattttcacttctgctatccatgccttgtgcagttctctctcatattgaatatggctgacctgtgttatcaaaaagctagttcaaatttcctaggctagattataaaacacatggcagcttccaccttgctcaccctgggtgaaagtagctaccatactgcaaggacattcaagcaaccctacagagcttaatgcattacattacagaggtctcctgctaacagacagcattgacttgctagccatgttaagtgagacatcttgaaattggatgccctagcctcagtcaagccttcggatgactgcaggcctaatcaacatattgaccaagacagaaccaaccagctaaagcatttctcaaatcagga

SEQ ID NO: 410127 - DNA, 220 bp, Homo sapiens
gaatgaaattaaaatgatggaaataataaggataaaagctgaaatcaatgaaaaaaaaaaccaaagacataatagagaaaatataaaaagccaaagctgtttctttgaaaacagtattccagttgctaatctctgtggcagccagcctccaaaatggcccscggtgattttcacttctgctatccatgccttgtgcagttctctctcatattgaatatgg

SEQ ID NO: 410128 - DNA, 586 bp, Homo sapiens
aaaaaactccaatgatctaagcatccatctcaaaaatcccagcaaattaagctgaatgaaattaaaatgatggaaataataaggataaaagctgaaatcaatgaaaaaaaaaaccaaagacataatagagaaaatataaaaagccaaagctgtttctttgaaaacagtattccagttgctaatctctgtggcagccagcctccaaaatggcccgcggtgattttcacttctgctatccatgccttgtgcagttctctctcatattgaatatggctgacctgtgttatcaaaaagctagttcaaatttcctaggctagattataaaacacatggcagcttccaccttgctcaccctgggtgaaagtagctaccatactgcaaggacattcaagcaaccctacagarcttaatgcattacattacagaggtctcctgctaacagacagcattgacttgctagccatgttaagtgagacatcttgaaattggatgccctagcctcagtcaagccttcggatgactgcaggcctaatcaacatattgaccaagacagaaccaaccagctaaagcatttctcaaatcagga

SEQ ID NO: 410129 - DNA, 586 bp, Homo sapiens
aaaaaactccaatgatctaagcatccatctcaaaaatcccagcaaattaagctgaatgaaattaaaatgatggaaataataaggataaaagctgaaatcaatgaaaaaaaaaaccaaagacataatagagaaaatataaaaagccaaagctgtttctttgaaaacagtattccagttgctaatctctgtggcagccagcctccaaaatggcccgcggtgattttcacttctgctatccatgccttgtgcagttctctctcatattgaatatggctgacctgtgttatcaaaaagctagttcaaatttcctaggctagattataaaacacatggcagcttccaccttgctcaccctgggtgaaagtagctaccatactgcaaggacattcaagcaaccctacagagcttaatgcattacattacagaggtctcctgctaacagacagcattgacttgctagccatgttaagtgagacrtcttgaaattggatgccctagcctcagtcaagccttcggatgactgcaggcctaatcaacatattgaccaagacagaaccaaccagctaaagcatttctcaaatcagga

SEQ ID NO: 410130 - DNA, 586 bp, Homo sapiens
aaaaaactccaatgatctaagcatccatctcaaaaatcccagcaaattaagctgaatgaaattaaaatgatggaaataataaggataaaagctgaaatcaatgaaaaaaaaaaccaaagacataatagagaaaatataaaaagccaaagctgtttctttgaaaacagtattccagttgctaatctctgtggcagccagcctccaaaatggcccgcggtgattttcacttctgctatccatgccttgtgcagttctctctcatattgaatatggctgacctgtgttatcaaaaagctagttcaaatttcctaggctagattataaaacacatggcagcttccaccttgctcaccctgggtgaaagtagctaccatactgcaaggacattcaagcaaccctacagagcttaatgcattacattacagaggtctcctgctaacagacagcattgacttgctagccatgttaagtgagacatcttgaaattggatgccctagcctcagtcaagccttyggatgactgcaggcctaatcaacatattgaccaagacagaaccaaccagctaaagcatttctcaaatcagga

SEQ ID NO: 410131 - DNA, 581 bp, Homo sapiens
aatctgcaatcatctttttcagagactcctgtaaccaagctataaaatgcacatatggttctcttggtccctgttttatagcactaaatgaagggtattgttctccatatgaagtgattttttccaagctctaatgcacactcctctaagctgttctatggcatcawcctgcttgactacttgtgcatgtaaaccagcccagccaccaacccccaaaagttggtctgcagttatattaatttgaggttgggcccaggcattgagagcagcctgaatggaagcttcatctgcccactaagttttaaattgtaagaactgagcaggagttagacaagctagagtaagagtgtcccagtcagtaggaatcatccgactggaaacagcaacattctttaacagtcccatttcaaaaggagaacctggtccatactgatttatagcttgtttaattttttgagtaatttaaaaggaaaaggctcaaatgtagctataatatttccctgttgatctgggggggtgtattcaaacagggaactgccaagcctctaaatcccacttttgtctagcttgctgaattcctg

SEQ ID NO: 410132 - DNA, 581 bp, Homo sapiens
aatctgcaatcatctttttcagagactcctgtaaccaagctataaaatgcacatatggttctcttggtccctgttttatagcactaaatgaagggtattgttctccatatgaagtgattttttccaagctctaatgcacactcctctaagctgttctatggcatcaacctgcttgacyacttgtgcatgtaaaccagcccagccaccaacccccaaaagttggtctgcagttatattaatttgaggttgggcccaggcattgagagcagcctgaatggaagcttcatctgcccactaagttttaaattgtaagaactgagcaggagttagacaagctagagtaagagtgtcccagtcagtaggaatcatccgactggaaacagcaacattctttaacagtcccatttcaaaaggagaacctggtccatactgatttatagcttgtttaattttttgagtaatttaaaaggaaaaggctcaaatgtagctataatatttccctgttgatctgggggggtgtattcaaacagggaactgccaagcctctaaatcccacttttgtctagcttgctgaattcctg

SEQ ID NO: 410133 - DNA, 581 bp, Homo sapiens
aatctgcaatcatctttttcagagactcctgtaaccaagctataaaatgcacatatggttctcttggtccctgttttatagcactaaatgaagggtattgttctccatatgaagtgattttttccaagctctaatgcacactcctctaagctgttctatggcatcaacctgcttgactacttgtgcatgtaaaccagcccagccaccaacccccaaaagttggtctgcagttatattaatttgaggttgggcccaggcattgagagcagcctgaatggaagcttcatctgcccactaarttttaaattgtaagaactgagcaggagttagacaagctagagtaagagtgtcccagtcagtaggaatcatccgactggaaacagcaacattctttaacagtcccatttcaaaaggagaacctggtccatactgatttatagcttgtttaattttttgagtaatttaaaaggaaaaggctcaaatgtagctataatatttccctgttgatctgggggggtgtattcaaacagggaactgccaagcctctaaatcccacttttgtctagcttgctgaattcctg

SEQ ID NO: 410134 - DNA, 316 bp, Homo sapiens
actacttgtgcatgtaaaccagcccagccaccaacccccaaaagttggtctgcagttatattaatttgaggttgggcccaggcattgagagcagcctgaatggaagcttcatctgcccactaagttttaaattgtaagaactgagcaggagttagacaagctagagtaaragtgtcccagtcagtaggaatcatccgactggaaacagcaacattctttaacagtcccatttcaaaaggagaacctggtccatactgatttatagcttgtttaattttttgagtaatttaaaaggaaaaggctcaaatgtagctat

SEQ ID NO: 410135 - DNA, 316 bp, Homo sapiens
actacttgtgcatgtaaaccagcccagccaccaacccccaaaagttggtctgcagttatattaatttgaggttgggcccaggcattgagagcagcctgaatggaagcttcatctgcccactaagttttaaattgtaagaactgagcaggagttagacaagctagagtaagagtgtcccagtcagtaggaatcatccgactggaaacagcaacattctttaacagtcccatttcaaaaggagaacctggtccatactgatttatagcttgtttaattttttgagtratttaaaaggaaaaggctcaaatgtagctat

SEQ ID NO: 410136 - DNA, 509 bp, Homo sapiens
gctgccagtaccccagaacaccaatatcagctagggaaattttgtagaagtcccagatgtactaaatgttctgtgaatacacagagatataattataactgttaccwgcatgtagagtaaagatgagaaggcattggtcatggtggcagctacctcaggagttacaaagcagacgtggttccaggacagtatatgtcagggcaaagctgtcctcggaggctattaggagctgcttatggctcagacattgtaagccagatggtctcattactttcaatgacaaaaccaaaattacttttgcatcagccaatacaacggcctggcaagagcacagaaaaacgccctgtgctgatgcagcacaattccttcattcccttctccaaaaccccctcttccaattccactgaagagagaatctgatggaagtcctgtgtaagcaggctcagatatatctaccactatagatagtagaggtgattcacaaatccaagcctatcaaatacatcata

SEQ ID NO: 410137 - DNA, 509 bp, Homo sapiens
gctgccagtaccccagaacaccaatatcagctagggaaattttgtagaagtcccagatgtactaaatgttctgtgaatacacagagatataattataactgttaccagcatgtagagtaaagatgagaaggcattggtcatggtggcagctacctcaggagttacaaagcagacgtggttccaggacagtatatgtcagggcaaagctgtcctcggaggctattaggagctgsttatggctcagacattgtaagccagatggtctcattactttcaatgacaaaaccaaaattacttttgcatcagccaatacaacggcctggcaagagcacagaaaaacgccctgtgctgatgcagcacaattccttcattcccttctccaaaaccccctcttccaattccactgaagagagaatctgatggaagtcctgtgtaagcaggctcagatatatctaccactatagatagtagaggtgattcacaaatccaagcctatcaaatacatcata

SEQ ID NO: 410138 - DNA, 509 bp, Homo sapiens
gctgccagtaccccagaacaccaatatcagctagggaaattttgtagaagtcccagatgtactaaatgttctgtgaatacacagagatataattataactgttaccagcatgtagagtaaagatgagaaggcattggtcatggtggcagctacctcaggagttacaaagcagacgtggttccaggacagtatatgtcagggcaaagctgtcctcggaggctattaggagctgcttatggcwcagacattgtaagccagatggtctcattactttcaatgacaaaaccaaaattacttttgcatcagccaatacaacggcctggcaagagcacagaaaaacgccctgtgctgatgcagcacaattccttcattcccttctccaaaaccccctcttccaattccactgaagagagaatctgatggaagtcctgtgtaagcaggctcagatatatctaccactatagatagtagaggtgattcacaaatccaagcctatcaaatacatcata

SEQ ID NO: 410139 - DNA, 509 bp, Homo sapiens
gctgccagtaccccagaacaccaatatcagctagggaaattttgtagaagtcccagatgtactaaatgttctgtgaatacacagagatataattataactgttaccagcatgtagagtaaagatgagaaggcattggtcatggtggcagctacctcaggagttacaaagcagacgtggttccaggacagtatatgtcagggcaaagctgtcctcggaggctattaggagctgcttatggctcagacattgtaagycagatggtctcattactttcaatgacaaaaccaaaattacttttgcatcagccaatacaacggcctggcaagagcacagaaaaacgccctgtgctgatgcagcacaattccttcattcccttctccaaaaccccctcttccaattccactgaagagagaatctgatggaagtcctgtgtaagcaggctcagatatatctaccactatagatagtagaggtgattcacaaatccaagcctatcaaatacatcata

SEQ ID NO: 410140 - DNA, 547 bp, Homo sapiens
atgcaaaaaaaaaacagtattaagtttcacaagctgtttgtaatcaaaaatattttctcagtttcagatgctctgctattttattgagtggaaagtcttgcactaaaaagattcaagaaaaataaygttgcttttccttatgtcacaggaaacacttttaatggtaacttgtcagattgtctatgaacaaatgcactttttaagacactgatgaagtcttcttttattcacattgtattttatacaagaacacttcagatgtattggatgtgactgattttaacaaatcctatttgatttgcatcgattggttacatgttctgttcatagtcttttgtgaatcattgcctttttgtttaaaaagatggcctattttgatcttttgattaggtacattcctgtttttgtgacaaaagaaaaactttaaaattgtcacaaacagaaaaataatggctatcagaagtatactttgttttagtgcgagttaccgttactgtagttgtttattgtaaagatggacatttagcattcagtgcagttttcaata

SEQ ID NO: 410141 - DNA, 547 bp, Homo sapiens
atgcaaaaaaaaaacagtattaagtttcacaagctgtttgtaatcaaaaatattttctcagtttcagatgctctgctattttattgagtggaaagtcttgcactaaaaagattcaagaaaaataacgttgcttttccttatgtcacaggaaacacttttaatggtaacttgtcagattgtctatgaacaaatgcactttttaagacactgatgaagtcttcttttattcacrttgtattttatacaagaacacttcagatgtattggatgtgactgattttaacaaatcctatttgatttgcatcgattggttacatgttctgttcatagtcttttgtgaatcattgcctttttgtttaaaaagatggcctattttgatcttttgattaggtacattcctgtttttgtgacaaaagaaaaactttaaaattgtcacaaacagaaaaataatggctatcagaagtatactttgttttagtgcgagttaccgttactgtagttgtttattgtaaagatggacatttagcattcagtgcagttttcaata

SEQ ID NO: 410142 - DNA, 590 bp, Homo sapiens
accgttactgtagttgtttattgtaaagatggacatttagcattcagtgcagttttcaataaaatgtaattaggaaaaaactgcttaattaacaaaaacagagcatagacaacaaaataatattagaagtgatacataaagaaaacgagatatcaacaaaatgatttttagaaaccaacaaaaactgtgtatctgaataacacgataactatattaaaatttcaatcaacggtcacaaaagcagactaataaagcagaaaaaatcatacaaytgatgtcactgtagttataaatactgagtcatgaaaacaaattatttaaacagaatagagaaaaaaatatgggacgtactgcacaccatcaagtagaccatcgtatttataaaaggagtcttagaaaaacaatacagcagaaaagtaataaagagattatttttaaaaagtagctgagaaatccccagatgacaaggtaattaaacaagaagatatactgccaaacaaaaaccttcaactggaataatttcacttcagaaataaaaaaaataagcctttccaaaataaataaaagtggagtgtgttactaaccactag

SEQ ID NO: 410143 - DNA, 590 bp, Homo sapiens
accgttactgtagttgtttattgtaaagatggacatttagcattcagtgcagttttcaataaaatgtaattaggaaaaaactgcttaattaacaaaaacagagcatagacaacaaaataatattagaagtgatacataaagaaaacgagatatcaacaaaatgatttttagaaaccaacaaaaactgtgtatctgaataacacgataactatattaaaatttcaatcaacggtcacaaaagcagactaataaagcagaaaaaatcatacaactgatgtcactgtagttataaatactgagtcatgaaaacaaattatttaaacagaatagagaaaaaaatatgggaygtactgcacaccatcaagtagaccatcgtatttataaaaggagtcttagaaaaacaatacagcagaaaagtaataaagagattatttttaaaaagtagctgagaaatccccagatgacaaggtaattaaacaagaagatatactgccaaacaaaaaccttcaactggaataatttcacttcagaaataaaaaaaataagcctttccaaaataaataaaagtggagtgtgttactaaccactag

SEQ ID NO: 410144 - DNA, 590 bp, Homo sapiens
accgttactgtagttgtttattgtaaagatggacatttagcattcagtgcagttttcaataaaatgtaattaggaaaaaactgcttaattaacaaaaacagagcatagacaacaaaataatattagaagtgatacataaagaaaacgagatatcaacaaaatgatttttagaaaccaacaaaaactgtgtatctgaataacacgataactatattaaaatttcaatcaacggtcacaaaagcagactaataaagcagaaaaaatcatacaactgatgtcactgtagttataaatactgagtcatgaaaacaaattatttaaacagaatagagaaaaaaatatgggacgtactgcacaccatcaagtagaccatygtatttataaaaggagtcttagaaaaacaatacagcagaaaagtaataaagagattatttttaaaaagtagctgagaaatccccagatgacaaggtaattaaacaagaagatatactgccaaacaaaaaccttcaactggaataatttcacttcagaaataaaaaaaataagcctttccaaaataaataaaagtggagtgtgttactaaccactag

SEQ ID NO: 410145 - DNA, 590 bp, Homo sapiens
accgttactgtagttgtttattgtaaagatggacatttagcattcagtgcagttttcaataaaatgtaattaggaaaaaactgcttaattaacaaaaacagagcatagacaacaaaataatattagaagtgatacataaagaaaacgagatatcaacaaaatgatttttagaaaccaacaaaaactgtgtatctgaataacacgataactatattaaaatttcaatcaacggtcacaaaagcagactaataaagcagaaaaaatcatacaactgatgtcactgtagttataaatactgagtcatgaaaacaaattatttaaacagaatagagaaaaaaatatgggacgtactgcacaccatcaagtagaccatcgtatttataaaaggagtcttagaaaaacaatacagcagaaaagtaataaagagattatttttaaaaagtagctgagaaatccccagatgacaaggtaattaaacaagaagatatactgccaaacaaaaaccttcaactggaataatttcacttcagaaataaaaaaaataagcctttccaaaataaataaaagtkgagtgtgttactaaccactag

SEQ ID NO: 410146 - DNA, 522 bp, Homo sapiens
agtgtaaaaagtcagaataggagataacttttgcttgagcccagtaaattgagctgggtgtggcatgtgtgcctcctgtccagctactcagaggctaaggggggaggatcgcttgagccaggagattgaggctgcagtgagccatgatcatgccactgcactccagctggggtgacagagcaagactctgtctcaaaagacaagatggtcattttargccaggcgtggtggctcatgcctgtaatcccagcactttgggacgccaaggcgggcagatcacccctgtcttgggaggaggtaagagcagcaactaaaatgaaacagaagagagacttctgggttgctggtcatatccatttcttaggtgttaactatgtgaaaattttgagttgtatgttcatgatctccttacctgtatgcctcttataccacaataaaaaaaattaagtatgagactaacataatagagcttaaaatgtgcagaaattgagggagctcgcccaaggaaaccattactaaaca

SEQ ID NO: 410147 - DNA, 529 bp, Homo sapiens
gcgtggtggctcatgcctgtaatcccagcactttgggasgccaaggcgggcagatcacccctgtcttgggaggaggtaagagcagcaactaaaatgaaacagaagagagacttctgggttgctggtcatatccatttcttaggtgttaactatgtgaaaattttgagttgtatgttcatgatctccttacctgtatgcctcttataccacaataaaaaaaattaagtatgagactaacataatagagcttaaaatgtgcagaaattgagggagctcgcccaaggaaaccattactaaacagatactaaaagatttcagacaggaggaaaatgatcccaagtggaagatctgggatataagaagaaatgaagagcaggaaaaagacaggtgaatatatggataaaactaaacaaatgtgaaatgtataaaacaatagaagtaatgtcccatgaaatataaaaagaaaaatgataaaatatatcaaaacaaatttgatggatcacaagataattatgctgaataaaaaaat

SEQ ID NO: 410148 - DNA, 529 bp, Homo sapiens
gcgtggtggctcatgcctgtaatcccagcactttgggacgccaaggcgggcagatcacccctgtcttgggaggaggtaagagcagcaactaaaakgaaacagaagagagacttctgggttgctggtcatatccatttcttaggtgttaactatgtgaaaattttgagttgtatgttcatgatctccttacctgtatgcctcttataccacaataaaaaaaattaagtatgagactaacataatagagcttaaaatgtgcagaaattgagggagctcgcccaaggaaaccattactaaacagatactaaaagatttcagacaggaggaaaatgatcccaagtggaagatctgggatataagaagaaatgaagagcaggaaaaagacaggtgaatatatggataaaactaaacaaatgtgaaatgtataaaacaatagaagtaatgtcccatgaaatataaaaagaaaaatgataaaatatatcaaaacaaatttgatggatcacaagataattatgctgaataaaaaaat

SEQ ID NO: 410149 - DNA, 555 bp, Homo sapiens
ctggtcatatccatttcttaggtgttaactatgtgaaaattttgagttgtaygttcatgatctccttacctgtatgcctcttataccacaataaaaaaaattaagtatgagactaacataatagagcttaaaatgtgcagaaattgagggagctcgcccaaggaaaccattactaaacagatactaaaagatttcagacaggaggaaaatgatcccaagtggaagatctgggatataagaagaaatgaagagcaggaaaaagacaggtgaatatatggataaaactaaacaaatgtgaaatgtataaaacaatagaagtaatgtcccatgaaatataaaaagaaaaatgataaaatatatcaaaacaaatttgatggatcacaagataattatgctgaataaaaaaattcaatctcaaaatattagacagtgtatggtttcatttacatgtgttcttgaaataaagttacagagatgaaaaacacattattggttgccaggggtcagggagtgaggaacgtgtttgtgactataaaatgggtagcaaaagggatc

SEQ ID NO: 410150 - DNA, 555 bp, Homo sapiens
ctggtcatatccatttcttaggtgttaactatgtgaaaattttgagttgtatgttcatgatctccttacctgtatgcctcttataccacaataaaaaaaattaagtatgagactaacataatagagcttaaaatgtgcagaaattgagggagctcgcccaaggaaaccattactaaacagatactaaaagatttcagacaggaggaaaatgatcccaagtggaagatctgggatataagaagaaatgaagagcaggaaaaagacaggtgaatatatggataaaactaaacaaatgtgaaatgtataaaacaatagaagtaatgtcccatgaaatataaaaagaaaaatgataaaatatatcaaarcaaatttgatggatcacaagataattatgctgaataaaaaaattcaatctcaaaatattagacagtgtatggtttcatttacatgtgttcttgaaataaagttacagagatgaaaaacacattattggttgccaggggtcagggagtgaggaacgtgtttgtgactataaaatgggtagcaaaagggatc

SEQ ID NO: 410151 - DNA, 555 bp, Homo sapiens
ctggtcatatccatttcttaggtgttaactatgtgaaaattttgagttgtatgttcatgatctccttacctgtatgcctcttataccacaataaaaaaaattaagtatgagactaacataatagagcttaaaatgtgcagaaattgagggagctcgcccaaggaaaccattactaaacagatactaaaagatttcagacaggaggaaaatgatcccaagtggaagatctgggatataagaagaaatgaagagcaggaaaaagacaggtgaatatatggataaaactaaacaaatgtgaaatgtataaaacaatagaagtaatgtcccatgaaatataaaaagaaaaatgataaaatatatcaaaacaaatttgatggatcacaagataattatgctgaataaaaaaattcaatctcaaaatattagacagtgtatggtttcatttacatgtgttcttgaaataaagtyacagagatgaaaaacacattattggttgccaggggtcagggagtgaggaacgtgtttgtgactataaaatgggtagcaaaagggatc

SEQ ID NO: 410152 - DNA, 304 bp, Homo sapiens
tttggttaaaatccagtggaagttctcaaatctcaagaaaatttagttatttgtattatatgtagcattttaagatcacagccagaatcatgactgatggcaacgcatcatgatccatcagacttccacaaattttatataatytttagaatatttatattaataatatatctatacacatacaactttagaaaatatttaacatcatcaaaattatgactgaaaccctattagatttttacaatttatataaggtttaaaatatttatattaataacatacctataaaagtaaccaaaagaag

SEQ ID NO: 410153 - DNA, 304 bp, Homo sapiens
tttggttaaaatccagtggaagttctcaaatctcaagaaaatttagttatttgtattatatgtagcattttaagatcacagccagaatcatgactgatggcaacgcatcatgatccatcagacttccacaaattttatataatttttagaatatttatattaataatatatctatacacatacaactttagaaaatatttaacatcatcaaaattatgactgaaaccctattagatttttayaatttatataaggtttaaaatatttatattaataacatacctataaaagtaaccaaaagaag

SEQ ID NO: 410154 - DNA, 446 bp, Homo sapiens
ggagttcgacacctgcctggccaacatggagaaatcttgyctctactaaaaatacaaaattagccgggcatggtggcacgtgtctgtagtcccagctacttgggaggttgaggcagaagaattgcttgaaccttggggcagaatttgcagtgaacctagatcatgccacagcactccagactgggtgacaaagcaagattctgtctcagagaaaaaaaaagaagatttagtgttatttatcttttggcaatgcttcccatacaatgttaccaactaagttttagcaaagatgtcaaaaaattgaaaacatttgacctaaacggaatggcagtttattgttttttattttattacttttttgagacagggtctcaccctgttgcccaggctggagtgcagtggtgaaatcatggctcactgcagcctcaacctcccaggctcaggtg

SEQ ID NO: 410155 - DNA, 446 bp, Homo sapiens
ggagttcgacacctgcctggccaacatggagaaatcttgtctctactaaaaatacaaaattagccgggcatggtggcacgtgtctgtagtcccagctacttgggaggttgaggcagaagaattgcttgaaccttggggcagaatttgcagtgaacctagatcatgccacagcaytccagactgggtgacaaagcaagattctgtctcagagaaaaaaaaagaagatttagtgttatttatcttttggcaatgcttcccatacaatgttaccaactaagttttagcaaagatgtcaaaaaattgaaaacatttgacctaaacggaatggcagtttattgttttttattttattacttttttgagacagggtctcaccctgttgcccaggctggagtgcagtggtgaaatcatggctcactgcagcctcaacctcccaggctcaggtg

SEQ ID NO: 410156 - DNA, 446 bp, Homo sapiens
ggagttcgacacctgcctggccaacatggagaaatcttgtctctactaaaaatacaaaattagccgggcatggtggcacgtgtctgtagtcccagctacttgggaggttgaggcagaagaattgcttgaaccttggggcagaatttgcagtgaacctagatcatgccacagcactccagmctgggtgacaaagcaagattctgtctcagagaaaaaaaaagaagatttagtgttatttatcttttggcaatgcttcccatacaatgttaccaactaagttttagcaaagatgtcaaaaaattgaaaacatttgacctaaacggaatggcagtttattgttttttattttattacttttttgagacagggtctcaccctgttgcccaggctggagtgcagtggtgaaatcatggctcactgcagcctcaacctcccaggctcaggtg

SEQ ID NO: 410157 - DNA, 446 bp, Homo sapiens
ggagttcgacacctgcctggccaacatggagaaatcttgtctctactaaaaatacaaaattagccgggcatggtggcacgtgtctgtagtcccagctacttgggaggttgaggcagaagaattgcttgaaccttggggcagaatttgcagtgaacctagatcatgccacagcactccagactgggtgacaaagcaagattctgtctcagagaaaaaaaaagaagatttagtgttayttatcttttggcaatgcttcccatacaatgttaccaactaagttttagcaaagatgtcaaaaaattgaaaacatttgacctaaacggaatggcagtttattgttttttattttattacttttttgagacagggtctcaccctgttgcccaggctggagtgcagtggtgaaatcatggctcactgcagcctcaacctcccaggctcaggtg

SEQ ID NO: 410158 - DNA, 552 bp, Homo sapiens
catccccaagacatataatcatcagattctccaaggtcaaaatgaaagaaacaatgttaaaggcagcyagggagaaaggcaacgtcacctgcaaagggaattccatcagacttagcagacttctcagctgaaaccctacaagccagaaaagatattcaacttcttaaagaaaagaaatttcacgtagtatggcagagacagatataccatataataacatggtgttattataaatggttaaaagaaaaagaaatttcaacccagaatttcatgtccagcaaaattaagcatcataagtgaaggagaaacaagatccttttcagacaagcaaatgctgagagaattcattatcaccagatctaccttacaagagctcctgaattaagcactaaatatggaaagaaaagaccatcaccagccactacaaaaatgcaccgaagtacacagactaggaatgctaaaaaccaaccacatacacaagtctgcaaaataactagttgacagcatgacgacaggatctaatccacacataccattactaaccttaaatgg

SEQ ID NO: 410159 - DNA, 552 bp, Homo sapiens
catccccaagacatataatcatcagattctccaaggtcaaaatgaaagaaacaatgttaaaggcagccagrgagaaaggcaacgtcacctgcaaagggaattccatcagacttagcagacttctcagctgaaaccctacaagccagaaaagatattcaacttcttaaagaaaagaaatttcacgtagtatggcagagacagatataccatataataacatggtgttattataaatggttaaaagaaaaagaaatttcaacccagaatttcatgtccagcaaaattaagcatcataagtgaaggagaaacaagatccttttcagacaagcaaatgctgagagaattcattatcaccagatctaccttacaagagctcctgaattaagcactaaatatggaaagaaaagaccatcaccagccactacaaaaatgcaccgaagtacacagactaggaatgctaaaaaccaaccacatacacaagtctgcaaaataactagttgacagcatgacgacaggatctaatccacacataccattactaaccttaaatgg

SEQ ID NO: 410160 - DNA, 552 bp, Homo sapiens
catccccaagacatataatcatcagattctccaaggtcaaaatgaaagaaacaatgttaaaggcagccagggagaaaggcaacgtcacctgcaaagggaattccatcagacttagcagacttctcagctgaaaccctacaagccagaaaagatattcaacttcttaaagaaaagaaatttcacgtagtatggcagagacagatrtaccatataataacatggtgttattataaatggttaaaagaaaaagaaatttcaacccagaatttcatgtccagcaaaattaagcatcataagtgaaggagaaacaagatccttttcagacaagcaaatgctgagagaattcattatcaccagatctaccttacaagagctcctgaattaagcactaaatatggaaagaaaagaccatcaccagccactacaaaaatgcaccgaagtacacagactaggaatgctaaaaaccaaccacatacacaagtctgcaaaataactagttgacagcatgacgacaggatctaatccacacataccattactaaccttaaatgg

SEQ ID NO: 410161 - DNA, 552 bp, Homo sapiens
catccccaagacatataatcatcagattctccaaggtcaaaatgaaagaaacaatgttaaaggcagccagggagaaaggcaacgtcacctgcaaagggaattccatcagacttagcagacttctcagctgaaaccctacaagccagaaaagatattcaacttcttaaagaaaagaaatttcacgtagtatggcagagacagatataccatataataacatggtgttattataaatggttaaaagaaaaagaaatttcaacccagaatttcatgtccagcaaaattaagcatcataagtgaaggagaaacaagatccttttcagacaagcaaatgctgagagaattcattatcaccagatctaccttacaagagctcctgaatkaagcactaaatatggaaagaaaagaccatcaccagccactacaaaaatgcaccgaagtacacagactaggaatgctaaaaaccaaccacatacacaagtctgcaaaataactagttgacagcatgacgacaggatctaatccacacataccattactaaccttaaatgg

SEQ ID NO: 410162 - DNA, 633 bp, Homo sapiens
taaagtaaaatttctacttattttaagattagataacagaggatgtatatgtgtaatgttgtttagagtaatctgacaaaaatgcagttaatattgatctattgcatatacatgattttagaaaggtagtgttttattagtacaaaggttaaacaatggccaggcatggtggctcatacttgtaatcccagcacttggggaggccaaagcaggcagatcacaagtcaggagatcgtgaccatcctggccaacatggggaaaccccatctctactaaaaatacaaaaattagctgggcgtggtgatgcgcacctgtagtcccagctacttgggatactaaggcaggagaattgcttgaagccaggaggtggaggttgcagtgagccaagactgcaccactgcactccagcctggtgacagagtgagaccctgtctcaaaaaaaaaaaattaagtaattaaagccatcttttgcaatgaatggattgctttgaaattcttagaaaactctgccctttatgaaagtttaacccattttttactkcaataaattttatcttaaaaagaaatttctgttctctatttatagtaaacttttctcttttttttctagtttgtattctaaattaacgtggt

SEQ ID NO: 410163 - DNA, 596 bp, Homo sapiens
  misc_feature (1)...(596): n = A,T,C or G
nnnnnnnnnnnnnnnnnnnnnnnnnnnnnnagttagctttgtcatgcatattcccattgcagtgccctcctccctaagatgtgtctttttcctttagagagcctttctctgtttgttatttaggtttacaatgagaaggcgtgtaaagtatttttactgtcttcctaggaaaaaatcactgacttacagtatttatatttatttatttacattcctggggatgaggagttaaagatttcatacattttcttattgagaagatccaagttttcatgtgagcaaaactgaatatgtaaattgatatktaaattatgctgcagataatatggtcaaatgtttacttgtatttaatttgttacacatgaatattgcatatgtaagataatatactaagaaattatcacatttaatgaaatgctttaatcaaattcctgattgaatttttgatatcaatatctttttcattgtttaatccatctttagggtgaacagggctttataggccaaagttatcacttctgtctaaattgtctgagttacagaactttttgaatttattatgttgtcacaggaagtttcttattgctgtttaaagg

SEQ ID NO: 410164 - DNA, 596 bp, Homo sapiens
  misc_feature (1)...(596): n = A,T,C or G
nnnnnnnnnnnnnnnnnnnnnnnnnnnnnnagttagctttgtcatgcatattcccattgcagtgccctcctccctaagatgtgtctttttcctttagagagcctttctctgtttgttatttaggtttacaatgagaaggcgtgtaaagtatttttactgtcttcctaggaaaaaatcactgacttacagtatttatatttatttatttacattcctggggatgaggagttaaagatttcatacattttcttattgagaagatccaagttttcatgtgagcaaaactgaatatgtaaattgatatttaaattatgctgcagataatatggtcaaatgtttacttgtatttaatttgttacacatgaatattgcatatgtaagataatatactaagaaattatcacatttaatgaaatgctttaatcaaattcctgattgaatttttgatatcaatatctttttcattgtttaatccatctttagggtgaacagggctttataggccaaagttatcacttctrtctaaattgtctgagttacagaactttttgaatttattatgttgtcacaggaagtttcttattgctgtttaaagg

SEQ ID NO: 410165 - DNA, 596 bp, Homo sapiens
  misc_feature (1)...(596): n = A,T,C or G
nnnnnnnnnnnnnnnnnnnnnnnnnnnnnnagttagctttgtcatgcatattcccattgcagtgccctcctccctaagatgtgtctttttcctttagagagcctttctctgtttgttatttaggtttacaatgagaaggcgtgtaaagtatttttactgtcttcctaggaaaaaatcactgacttacagtatttatatttatttatttacattcctggggatgaggagttaaagatttcatacattttcttattgagaagatccaagttttcatgtgagcaaaactgaatatgtaaattgatatttaaattatgctgcagataatatggtcaaatgtttacttgtatttaatttgttacacatgaatattgcatatgtaagataatatactaagaaattatcacatttaatgaaatgctttaatcaaattcctgattgaatttttgatatcaatatctttttcattgtttaatccatctttagggtgaacagggctttataggccaaagttatcacttctgtctaaattstctgagttacagaactttttgaatttattatgttgtcacaggaagtttcttattgctgtttaaagg

SEQ ID NO: 410166 - DNA, 551 bp, Homo sapiens
ttgactttgatgatctctatatgcaacttcaattgacataaattaaagtacattcagggcaagagagtttacttaaatattattttgttattcaaaataatcacaaaagcactcatcgtaggaaaacttgtgaggactcaaatatagggaaatactttttctwtctaaggcataattctgtaaaaaaattcaccttaatttgaatatacatgggaaaatatccttgttcaataatagtctatattcactctgttttcttccctcatagaccagccggttcactattattctccaaatgatgtgttcctctctagagtccaggttatctgcatatctaatttttcccacaaattactgttttgaattgcactgaattcaatttaaggggatgccatttataaacagtgcaaatatatactgcacgagggatcttaaaaatcatacgtatggtttgatccacaagctcatatgagcgtgcaatgtcaacttttttcatgtttttttaagtccacttaaattctattttaagccaccatctgcctgtgctgtta

SEQ ID NO: 410167 - DNA, 551 bp, Homo sapiens
ttgactttgatgatctctatatgcaacttcaattgacataaattaaagtacattcagggcaagagagtttacttaaatattattttgttattcaaaataatcacaaaagcactcatcgtaggaaaacttgtgaggactcaaatatagggaaatactttttctttctaaggcataattctgtaaaaaaattcaccttaatttgaatatacatgggaaaatatccttgttcaataatagtctatattcactctgttttcttccctcatagaccagccggttcactattattctccaaatgatgtgttcctctctagagtccaggttatctgcatatctaatttttcccacaaattactgttttgaattgcactgaattcaatttaaggggatgycatttataaacagtgcaaatatatactgcacgagggatcttaaaaatcatacgtatggtttgatccacaagctcatatgagcgtgcaatgtcaacttttttcatgtttttttaagtccacttaaattctattttaagccaccatctgcctgtgctgtta

SEQ ID NO: 410168 - DNA, 551 bp, Homo sapiens
ttgactttgatgatctctatatgcaacttcaattgacataaattaaagtacattcagggcaagagagtttacttaaatattattttgttattcaaaataatcacaaaagcactcatcgtaggaaaacttgtgaggactcaaatatagggaaatactttttctttctaaggcataattctgtaaaaaaattcaccttaatttgaatatacatgggaaaatatccttgttcaataatagtctatattcactctgttttcttccctcatagaccagccggttcactattattctccaaatgatgtgttcctctctagagtccaggttatctgcatatctaatttttcccacaaattactgttttgaattgcactgaattcaatttaaggggatgccatttataaacagtgcaaatatatactgcacgagggatcttaaaaatcatacktatggtttgatccacaagctcatatgagcgtgcaatgtcaacttttttcatgtttttttaagtccacttaaattctattttaagccaccatctgcctgtgctgtta

SEQ ID NO: 410169 - DNA, 505 bp, Homo sapiens
ttttttaagtccacttaaattctattttaagccaccatctgcctgtgctgttagrgcagttagccctcaatcattttaagatgctcccctctaagtactgtgatagtgatagagatgtcaccagtcaagtgtcctaggaagccgactccgagttggagatttgcatgcaaggaggttgaaatgatattcccaacacctgtggaagagcgaaagcaataggattgggtggagcaggaagtcggctggaatgcaatcactatcatggccgcagtgcactctacagggatcttggtgagtttacctaatgacctcaaattggagcaagcaaacaaggccattatatttctgtaccaaccagttctcgcatgtgggatgccttgagaagggacatggatttggatgaaggaactttactgtgctgtgagtattgttgacaggagtcagctgtcaacactcccaggagaaggggaattatgctttagtcactgaggcggcatctagtgtc

SEQ ID NO: 410170 - DNA, 505 bp, Homo sapiens
ttttttaagtccacttaaattctattttaagccaccatctgcctgtgctgttagggcagttagccytcaatcattttaagatgctcccctctaagtactgtgatagtgatagagatgtcaccagtcaagtgtcctaggaagccgactccgagttggagatttgcatgcaaggaggttgaaatgatattcccaacacctgtggaagagcgaaagcaataggattgggtggagcaggaagtcggctggaatgcaatcactatcatggccgcagtgcactctacagggatcttggtgagtttacctaatgacctcaaattggagcaagcaaacaaggccattatatttctgtaccaaccagttctcgcatgtgggatgccttgagaagggacatggatttggatgaaggaactttactgtgctgtgagtattgttgacaggagtcagctgtcaacactcccaggagaaggggaattatgctttagtcactgaggcggcatctagtgtc

SEQ ID NO: 410171 - DNA, 505 bp, Homo sapiens
ttttttaagtccacttaaattctattttaagccaccatctgcctgtgctgttagggcagttagccctmaatcattttaagatgctcccctctaagtactgtgatagtgatagagatgtcaccagtcaagtgtcctaggaagccgactccgagttggagatttgcatgcaaggaggttgaaatgatattcccaacacctgtggaagagcgaaagcaataggattgggtggagcaggaagtcggctggaatgcaatcactatcatggccgcagtgcactctacagggatcttggtgagtttacctaatgacctcaaattggagcaagcaaacaaggccattatatttctgtaccaaccagttctcgcatgtgggatgccttgagaagggacatggatttggatgaaggaactttactgtgctgtgagtattgttgacaggagtcagctgtcaacactcccaggagaaggggaattatgctttagtcactgaggcggcatctagtgtc

SEQ ID NO: 410172 - DNA, 505 bp, Homo sapiens
ttttttaagtccacttaaattctattttaagccaccatctgcctgtgctgttagggcagttagccctcaatcattttaagatgctcccctctaagtactgtgatagtgatagagatgtcaccagtcaagtgtcctaggaagccgactccgagttggagatttgcatgcaaggaggttgaaatgatattcccaacacctgtggaagagcgaaagcaataggattgggtggagcaggaagtcggctggaatgcaatcactatcatggccgcagtgcactctacagggatcttggtgagtttacctaatgacctcaaattggagcaagcaaacaaggycattatatttctgtaccaaccagttctcgcatgtgggatgccttgagaagggacatggatttggatgaaggaactttactgtgctgtgagtattgttgacaggagtcagctgtcaacactcccaggagaaggggaattatgctttagtcactgaggcggcatctagtgtc

SEQ ID NO: 410173 - DNA, 485 bp, Homo sapiens
aggagtgtggagttgtagccggatccctttcactgacacattaaagttagagccaccctaggttaatacacatcactgamtggcctcaaggaataggagtgttggatctatcagtctctcccaaccattaccttggctttgccaagtgctttctgcctgccaagctcactcttagatcagatggggcctccctgccagcagttctacgtcatcccctccgcacctaagtcaactccggagttcacagacctcacttctgatctccaccgcccctcctccccttctacggtgactcaaaacttcaggcagtgaaaataaggagactcacaaactaggagactacagcttcagaccacacattttccactgagccaatacctgagcaaaaactagttttctggagttggggggatgaggaagatttgatattgaaagtgtccttggtggcctttcaaagctcaacatcatctaacaaaaattttatt

SEQ ID NO: 410174 - DNA, 485 bp, Homo sapiens
aggagtgtggagttgtagccggatccctttcactgacacattaaagttagagccaccctaggttaatacacatcactgactgkcctcaaggaataggagtgttggatctatcagtctctcccaaccattaccttggctttgccaagtgctttctgcctgccaagctcactcttagatcagatggggcctccctgccagcagttctacgtcatcccctccgcacctaagtcaactccggagttcacagacctcacttctgatctccaccgcccctcctccccttctacggtgactcaaaacttcaggcagtgaaaataaggagactcacaaactaggagactacagcttcagaccacacattttccactgagccaatacctgagcaaaaactagttttctggagttggggggatgaggaagatttgatattgaaagtgtccttggtggcctttcaaagctcaacatcatctaacaaaaattttatt

SEQ ID NO: 410175 - DNA, 485 bp, Homo sapiens
aggagtgtggagttgtagccggatccctttcactgacacattaaagttagagccaccctaggttaatacacatcactgactggcctcaaggaataggagtgttggatctatcagtctctcccaaccattaccttggctttgccaagtgctttctgcctgccaagctcactcttrgatcagatggggcctccctgccagcagttctacgtcatcccctccgcacctaagtcaactccggagttcacagacctcacttctgatctccaccgcccctcctccccttctacggtgactcaaaacttcaggcagtgaaaataaggagactcacaaactaggagactacagcttcagaccacacattttccactgagccaatacctgagcaaaaactagttttctggagttggggggatgaggaagatttgatattgaaagtgtccttggtggcctttcaaagctcaacatcatctaacaaaaattttatt

SEQ ID NO: 410176 - DNA, 485 bp, Homo sapiens
aggagtgtggagttgtagccggatccctttcactgacacattaaagttagagccaccctaggttaatacacatcactgactggcctcaaggaataggagtgttggatctatcagtctctcccaaccattaccttggctttgccaagtgctttctgcctgccaagctcactcttagatcagatggggcctccctgccagcagttctacgtcatcccctccgcacctaagtcaactccggagttcacagacctcacttctgatctccaccgcccctcctccccttctacggtgactcaaamcttcaggcagtgaaaataaggagactcacaaactaggagactacagcttcagaccacacattttccactgagccaatacctgagcaaaaactagttttctggagttggggggatgaggaagatttgatattgaaagtgtccttggtggcctttcaaagctcaacatcatctaacaaaaattttatt

SEQ ID NO: 410177 - DNA, 531 bp, Homo sapiens
tgagtcactacaatgtacatatgttctcaggaattatggccctacaatttgtatgtgagaatagttcctgtgtcaggcattatggacataagagkaaataaattctagcccctgcctacaaggagctaattcccagcctaagacagattgcaagccaataatttgcagagttgtaagtctaaggaaactgattgggatgtacctaattcgagctgggaatatcagaagaaaaactttttgaaagtcatgagacatgagctatgcctaaaagaataaaaaatagagagagaaataagaataaataaattagggaatgagatgggtataatagtagaaaaaggaaatctctttagataaaacaggttatgagagtatataggaggcttattaactcagtgtggttggagaaaacaggttgaaaggagaaataggagagaaagttacaaagggaatcaaatgtgttagtagttgagggaaaagcaaatattgaatacgacccatagatcttggataacccagtgtttggtagta

SEQ ID NO: 410178 - DNA, 293 bp, Homo sapiens
aacccaatcccagcaaacacaggaaataacmaagatcagagcagaactaaatgaaattgacacaacaacaacaacaacaacaaatacaaaacataaataaaagaaaaagttggttatttgaaaagataaataaaattgatagaccattagcaagattaaccaagaaaagaagagagaaaatccaaataacctcactaagaaatgaaacaggggatattacaactgacaccactgaaatattaaagattattcaagggtactatgaacaccttttggcacataaactacaaaac

SEQ ID NO: 410179 - DNA, 293 bp, Homo sapiens
aacccaatcccagcaaacacaggaaataacaaagatcagagcagaactaaatgaaattgacacaacaacaacaacaacaacaaatacaaaacataaataaaasaaaaagttggttatttgaaaagataaataaaattgatagaccattagcaagattaaccaagaaaagaagagagaaaatccaaataacctcactaagaaatgaaacaggggatattacaactgacaccactgaaatattaaagattattcaagggtactatgaacaccttttggcacataaactacaaaac

SEQ ID NO: 410180 - DNA, 481 bp, Homo sapiens
tatcggcattaagtgcattcatgttgttgtacaaccatcaccaccatccatctccagaacattcttatcatcccgaagtgaaactctgcacccagtaagcaataagccctcattcctctctaccccagcctctggcaaccaccaaactacctttttttttttttgcttttttctgacagggtcttactctgtcrcccaggttggagtacagtggcatgatcatagttcactgaaagcttgaactcccagattcaagtgatccaacccacttcagcctccccagtagttgggactataggtatgttccaccacacctgacttttctttttaaagtagagatgaggtctcactatgttgtctagcctggtcttgaattcttgggctgaagtgatcctcccgccttatccttccaagatgttgggattataggaatgagccactgagcctgactatcattctactttgtttctatgaattttac

SEQ ID NO: 410181 - DNA, 481 bp, Homo sapiens
tatcggcattaagtgcattcatgttgttgtacaaccatcaccaccatccatctccagaacattcttatcatcccgaagtgaaactctgcacccagtaagcaataagccctcattcctctctaccccagcctctggcaaccaccaaactacctttttttttttttgcttttttctgacagggtcttactctgtcgcccaggttggagtacagtggcatgatcatagttcactgaaagcttgaactcccagattcragtgatccaacccacttcagcctccccagtagttgggactataggtatgttccaccacacctgacttttctttttaaagtagagatgaggtctcactatgttgtctagcctggtcttgaattcttgggctgaagtgatcctcccgccttatccttccaagatgttgggattataggaatgagccactgagcctgactatcattctactttgtttctatgaattttac

SEQ ID NO: 410182 - DNA, 670 bp, Homo sapiens
agcgtacatacaccatggaatactacacacctataacataggatgaaataatgtcttttgcagcaacatgattggagctggataccattattctaagtgaattaatgcaggaacagaaaaccacacaaacactgcatgttctcacttataagtgggggctaaacattgagtccacatggacacagagaagggaaaaatagacacaaggtctactgtgggwggagggtggggggagagtgaggatcaaaaaactccctattagatactacgttcgctacctggatgactacgtaatctgtataccaaatcccattgacacacattttacccatataataaacctgcacatgtacccgctgaacctaaaataaatgttggaaggaaataaagttacaaccaactcttgtactattgtgaggaaacaatcatatgtgttgacaaaaaatcagctactaatagatttataatagtatatatgtagcagaaaaatatcagatataacttatatacccaaaagtatgacttaaaaacagcatgacaatctttatgatgggatattgtgcaactactagaagcacattttcagagattatttattaacatatgataatgactacattgagtggtttttagaagcatgaattgaaaccatgtataagcatgactttat

SEQ ID NO: 410183 - DNA, 209 bp, Homo sapiens
gttagcaatcacttagcgtaatcagcccaggatggagggtctgttttgtgaggccaagccagtgttccctctctggtgatgagcagtggggggtgtgtggtacccrtgggagatggactggcttgttcattgggtcaaccgcagcttattggaggtgtcaatatggcacttagggtctttgctcccttgatattctgagggtagaaagg

SEQ ID NO: 410184 - DNA, 481 bp, Homo sapiens
tatcggcattaagtgcattcatgttgttgtacaaccatcaccaccatccatctccagaacattcttatcatcccgaagtgaaactctgcacccagtaagcaataagccctcattcctctctaccccagcctctggcaaccaccaaactacctttttttttttttgcttttttctgacagggtcttactctgtcgcccaggttggagtacagtggcatgatcatagttcactgaaagcttgaactcccagattcaagtgatccaacccacttcagcctccccagtagttgggactataggtatgttccaccacacctgacttttctttttaaagtagagatgaggtctcactatgttgtctagcctggtcttgaattcttgggctgaagtgatcctcccgccttatccttccaagatgttgggattayaggaatgagccactgagcctgactatcattctactttgtttctatgaattttac

SEQ ID NO: 410185 - DNA, 402 bp, Homo sapiens
acatggaaaatgtacatcacatcccatttgttttgggtttttgtcctttttttttctttttttggaaaatagttcaatagtactatctcttccttaatttcttaatgagtgtcaataccaaggggyggctttggggatcttagcccaaatctaagcaaacatataatctgagtaaaactgtgtatatttatcaaatgcagcatcaagacaagccccccagctcccacttggtgctgcctgttctgtaagctcttgctatatatatatatattttttaaaaatcttgggttagtttaggcccagcaggcagcaattttctgctacacatgtttctttctgtttttgtttgtttgtttgtttgtttgtttgttttttgagacagagtcttgctctgttacccag

SEQ ID NO: 410186 - DNA, 402 bp, Homo sapiens
acatggaaaatgtacatcacatcccatttgttttgggtttttgtcctttttttttctttttttggaaaatagttcaatagtactatctcttccttaatttcttaatgagtgtcaataccaaggggtrgctttggggatcttagcccaaatctaagcaaacatataatctgagtaaaactgtgtatatttatcaaatgcagcatcaagacaagccccccagctcccacttggtgctgcctgttctgtaagctcttgctatatatatatatattttttaaaaatcttgggttagtttaggcccagcaggcagcaattttctgctacacatgtttctttctgtttttgtttgtttgtttgtttgtttgtttgttttttgagacagagtcttgctctgttacccag

SEQ ID NO: 410187 - DNA, 402 bp, Homo sapiens
acatggaaaatgtacatcacatcccatttgttttgggtttttgtcctttttttttctttttttggaaaatagttcaatagtactatctcttccttaatttcttaatgagtgtcaataccaaggggtggctttggggatcttagcccaaatctaagcaaacatataatctgagtaaaactgtgtatatttatcaaatgcarcatcaagacaagccccccagctcccacttggtgctgcctgttctgtaagctcttgctatatatatatatattttttaaaaatcttgggttagtttaggcccagcaggcagcaattttctgctacacatgtttctttctgtttttgtttgtttgtttgtttgtttgtttgttttttgagacagagtcttgctctgttacccag

SEQ ID NO: 410188 - DNA, 650 bp, Homo sapiens
ttggaatttcccccttctttatttctgaaataatttaaaaattttattttttttaaacctttgaaagaattcaccagcaaaactctttggatgtggagtttgcttatttttttatttctttagttttatgtttttatgtgcaggtatttgacaattaatttaattactttaataaatgtcaattacttcatatgttccatttaatcttgtgaatttttttataagtttttttcaaggaattcaccctttcatccaagtaatgaaaattagtataaaatgtttcacaatattccattatcttgttaatgtctcttgtgtctacaactgtacagtctcattaatccatgatatttataatttatgttttctttctttctcacagaactaacttttggtcatgatgattttctcctgtttctgttttctgtctcattgatttctaatttctgttttatttcttttcttctacttgttttggacttaatttkctctcttgttttagattttctttttaaggtagaaaattagttcacttgttttgaacttctcttttttagaataagcatttatacaaaaaatttactctgggtctgcttaactttatcccatacattttgatatagtatatttttatttgtattcagttcaat

SEQ ID NO: 410189 - DNA, 582 bp, Homo sapiens
cagttcaatgtatttaaaggtgtttcttatgatttcttccttgagctaaagggcattttaagatgtatttaaatcttccaatagtgtagactttcctgggtagcttgtttttacccatttcaactcattttcattatggtcagaaagcatactttctatgattacagtgttttgaaacttcttgagagatattttgtggtctatagcctattgataaatgtttcatgtgtagcataayagaacatatattctattgtcttagtcaatatcgattaggtcaagttgttgtcaaaattattttatcttaattttctttagttattctgtcagcaatacagcattatgtcttcataattacttgacattttatcattatgaaatagctgtctgttgtaatattgcttgtttggaggtctactttttcttatattaatatagccacataagattgcttttgcttgttgtttccttggtatacttggaaattattttactctcaacttatctataccataatatttggcatgcatctcttataggtacttttattatccagttggacaatctgtgttttatttggag

SEQ ID NO: 410190 - DNA, 582 bp, Homo sapiens
cagttcaatgtatttaaaggtgtttcttatgatttcttccttgagctaaagggcattttaagatgtatttaaatcttccaatagtgtagactttcctgggtagcttgtttttacccatttcaactcattttcattatggtcagaaagcatactttctatgattacagtgttttgaaacttcttgagagatattttgtggtctatagcctattgataaatgtttcatgtgtagcataatagaacatatattctattgtcttrgtcaatatcgattaggtcaagttgttgtcaaaattattttatcttaattttctttagttattctgtcagcaatacagcattatgtcttcataattacttgacattttatcattatgaaatagctgtctgttgtaatattgcttgtttggaggtctactttttcttatattaatatagccacataagattgcttttgcttgttgtttccttggtatacttggaaattattttactctcaacttatctataccataatatttggcatgcatctcttataggtacttttattatccagttggacaatctgtgttttatttggag

SEQ ID NO: 410191 - DNA, 582 bp, Homo sapiens
cagttcaatgtatttaaaggtgtttcttatgatttcttccttgagctaaagggcattttaagatgtatttaaatcttccaatagtgtagactttcctgggtagcttgtttttacccatttcaactcattttcattatggtcagaaagcatactttctatgattacagtgttttgaaacttcttgagagatattttgtggtctatagcctattgataaatgtttcatgtgtagcataatagaacatatattctattgtcttagtcaatatcgattaggtcaagytgttgtcaaaattattttatcttaattttctttagttattctgtcagcaatacagcattatgtcttcataattacttgacattttatcattatgaaatagctgtctgttgtaatattgcttgtttggaggtctactttttcttatattaatatagccacataagattgcttttgcttgttgtttccttggtatacttggaaattattttactctcaacttatctataccataatatttggcatgcatctcttataggtacttttattatccagttggacaatctgtgttttatttggag

SEQ ID NO: 410192 - DNA, 582 bp, Homo sapiens
cagttcaatgtatttaaaggtgtttcttatgatttcttccttgagctaaagggcattttaagatgtatttaaatcttccaatagtgtagactttcctgggtagcttgtttttacccatttcaactcattttcattatggtcagaaagcatactttctatgattacagtgttttgaaacttcttgagagatattttgtggtctatagcctattgataaatgtttcatgtgtagcataatagaacatatattctattgtcttagtcaatatcgattaggtcaagttgttgtcaaaattattttatcttaattttctttagttattctgtcagcaatacagcattatgtcttcataattacttgacattttatcattatgaaatagctgtctgttgtaatattgcttgtttggaggtctacwttttcttatattaatatagccacataagattgcttttgcttgttgtttccttggtatacttggaaattattttactctcaacttatctataccataatatttggcatgcatctcttataggtacttttattatccagttggacaatctgtgttttatttggag

SEQ ID NO: 410193 - DNA, 572 bp, Homo sapiens
tctctacaaaaagatttttctaaaaattagccaggcacagttatctatagttctagctactcagtgcctataattctagctactcaggaggctgaggtgagaggatgagaggatggggcttgagatagggaggcatagttcgcagtgagccacgattgtgccatggcactctaggctgggagacagagccagactctgtctcaaaaaaaaaaaaaaaaaaccacacagggcaaggtatgtcgagaggggtacagaacttccatgtcctctattgtgcatgttaccttcctggtatctcccttgtgttcagcaacccagacattctccaactccagttgttgagggcgcttatgaacgcttcattatgcaggcatgattgatgaagtcattgaccattggtaattaagtcagtcttcggccactmtttcttcctggagcccagggggtgaggctgacagttccaagcctctaatcacatggtttgttcttctgacaacaaccacccctttttctgaagctgtctaggagctttcagtcacccagtcatctcagtaacatcaccaaatgcattc

SEQ ID NO: 410194 - DNA, 572 bp, Homo sapiens
tctctacaaaaagatttttctaaaaattagccaggcacagttatctatagttctagctactcagtgcctataattctagctactcaggaggctgaggtgagaggatgagaggatggggcttgagatagggaggcatagttcgcagtgagccacgattgtgccatggcactctaggctgggagacagagccagactctgtctcaaaaaaaaaaaaaaaaaaccacacagggcaaggtatgtcgagaggggtacagaacttccatgtcctctattgtgcatgttaccttcctggtatctcccttgtgttcagcaacccagacattctccaactccagttgttgagggcgcttatgaacgcttcattatgcaggcatgattgatgaagtcattgaccattggtaattaagtcagtcttcggccactatttcttcctggagcccagggggtgaggctgacagttccaagcctctaatcacatggtttgttcttctgacaacarccacccctttttctgaagctgtctaggagctttcagtcacccagtcatctcagtaacatcaccaaatgcattc

SEQ ID NO: 410195 - DNA, 473 bp, Homo sapiens
ggctttagcaactgggaaaggcaagggaacatattctctccagaacctccagaagggatgcagtcctgctggcamcttgactttagccttaatagacctattttggactttctggcccccagacctctctagttagtagatttgtggtgtattaagccactcaatgtagggtactttgtaacagcagcaaaaagaaatgaacatgaagccagaattggtggcccacacctataattccagctatttaggaggctgaggcaggatggttgctttggcccaggagttcacgataagtctgggcaacaaaatgataccctgtctacatggaaaaaaaaaaattagcgggtgtggtggcatgcacttgtagtcttaggtactagaggccctgagacaggacaatttcttgacctaggagctccaggtctcagtgcgttgtgatcgtgccatggcaccccagtctgagtgacacagcg

SEQ ID NO: 410196 - DNA, 408 bp, Homo sapiens
tctatgcaaataaaaattaataaaatataattatcccggcatagtggtattttcctgtagaacctgttacttaggttgttgaggtgggcagatctcttgagggcgggagtttgaggccagcttgggcaacrtagcaaggctcctctttctacaaaaaaaaaaaattagttgggtgttttggtgctcatctgtagccgtagctatggtgagggtgaggcaggaggatccccggagcccaggaggtcacggctgcagttagctatgagtgcacccctgcattgcagccagagtgacagagtgagacccgttctcagaatacagatacaagtaaagaaatctcagctcagagcagtctgtttgtcactatgcagccttttcaaccccatagctgagcgattgggtttgtgt

SEQ ID NO: 410197 - DNA, 408 bp, Homo sapiens
tctatgcaaataaaaattaataaaatataattatcccggcatagtggtattttcctgtagaacctgttacttaggttgttgaggtgggcagatctcttgagggcgggagtttgaggccagcttgggcaacatagcaaggctcctctttctacaaaaaaaaaaaattagttgggtgttttggtgctcatctgtagccgtagctatggtgagggtgaggcaggaggatccccggagcccaggaggtcacggctgcagttagctatgagtgcacccctgcattgcagccagagtgacagagtgagacccgktctcagaatacagatacaagtaaagaaatctcagctcagagcagtctgtttgtcactatgcagccttttcaaccccatagctgagcgattgggtttgtgt

SEQ ID NO: 410198 - DNA, 576 bp, Homo sapiens
cagcgcggtactctcttgtggttcttgaagrtgccatttctttttcttttttttttttttttgagacagcatcttcctctgtcaccaggctcgagtgcagtggcacaatctcaattcacagcaacttctgcctcccagttcagggttcaagcatttcttttgcctcagcctctgaagtagctgggactacagggatgtgtcaccatgcccagctaagctttgtattttctgtagatacggggtttcagcatgttggacaggctggtcttgaactcctgaccttgtgatccactggccttggactcctaaagtgctgggattacaggtgtgagccaccgtgcctggcctcttttttcagtctttaataaactgctgccatcatttcagaccacttgctattttaggcacttagaaatttttcactggaattcatgtaaagaaagaccatgggtgtttgtactggatttagtattcatccttcgactgcatgactcacccctagtgccataattttactaatgaatttttcagatactactcagctggccactgaacctaaccagcaacccaccctca

SEQ ID NO: 410199 - DNA, 576 bp, Homo sapiens
cagcgcggtactctcttgtggttcttgaagatgycatttctttttcttttttttttttttttgagacagcatcttcctctgtcaccaggctcgagtgcagtggcacaatctcaattcacagcaacttctgcctcccagttcagggttcaagcatttcttttgcctcagcctctgaagtagctgggactacagggatgtgtcaccatgcccagctaagctttgtattttctgtagatacggggtttcagcatgttggacaggctggtcttgaactcctgaccttgtgatccactggccttggactcctaaagtgctgggattacaggtgtgagccaccgtgcctggcctcttttttcagtctttaataaactgctgccatcatttcagaccacttgctattttaggcacttagaaatttttcactggaattcatgtaaagaaagaccatgggtgtttgtactggatttagtattcatccttcgactgcatgactcacccctagtgccataattttactaatgaatttttcagatactactcagctggccactgaacctaaccagcaacccaccctca

SEQ ID NO: 410200 - DNA, 358 bp, Homo sapiens
tcatttcagaccacttgctattttaggcacttagaaatttttcactggaattcatgtaaagaaagaccatgggtgtttgtactggatttagtattcatccttcgactgcatgactcacccctagtgccataattttactaatgaatttttcagatactactcagctggccactgaacctaaccagcaacccaccctcaaccattcagtggtcttttgttcttctctgttcctcctgaatgttgattactctcagaaggtgataaaaacttggatttcttttttttttctttctagagacagrgttttgttctgtcacccaggctgcagtgcggtggcatgatcatggttcactgcagc

SEQ ID NO: 410201 - DNA, 453 bp, Homo sapiens
aaaatacaatacataaacagaaaatattaactgtcagcaaggctatagagaaattggaagctgtatgcattgctttttggaatgtaaaatggtacagcccactgtggaaaatggtttagcagctccttaaaaatatgaagcayagaattatatgatccatcaataccctttaaacgtatatacccaaaagaactgagagcagggactcaaacaggtatttgtacacccgattaacagcagcattattcacagtggccaaaaggtagcccaaacctaatgcccatcagtaggtgaatagataaagaaaatgtaatatatacatacacagagtattattcagccataaaaagaaaaatatctggccagattcaggggcttacacctgtaatcccagtattttgggaggccaaggtgggcaggtctcttgagccccatattttgagaccagactgg

SEQ ID NO: 410202 - DNA, 453 bp, Homo sapiens
aaaatacaatacataaacagaaaatattaactgtcagcaaggctatagagaaattggaagctgtatgcattgctttttggaatgtaaaatggtacagcccactgtggaaaatggtttagcagctccttaaaaatatgaagcatagaattatatgatccatcaataccctttaaacgtatatacccaaaagaactgagagcagggacwcaaacaggtatttgtacacccgattaacagcagcattattcacagtggccaaaaggtagcccaaacctaatgcccatcagtaggtgaatagataaagaaaatgtaatatatacatacacagagtattattcagccataaaaagaaaaatatctggccagattcaggggcttacacctgtaatcccagtattttgggaggccaaggtgggcaggtctcttgagccccatattttgagaccagactgg

SEQ ID NO: 410203 - DNA, 548 bp, Homo sapiens
tatccttataccaaagacaaagagagcacaaaagagagaaatacagcactatatcccytatgaatatataagcaaaaatctcagcaaaatactagcaatactagcaaaatactagcagcaatactgtataatcaaaggattgtaaactatcaccctttgagatttatccccaaaatgcaagggtggttcaacatataaaaaatcaatcagtgtaatatgctgtaacagtaaaatgaataagcacgtgattatttcaattgatgcagagaaaacattgatgaaatacaacacccttctataataaaaatactcaataaactaggcatagaagggatcttctgcaacatgacaatgggatgtacaaaaacccaacagttaatatcatgatcaatgatgaaacactgaaagctgttttcctaacatctagaagaaaaggatggtgcatttgccacttgtattcaacgtagcactggcagttctagccagagcaattaggcaagacaaagaaataaaaggcatctaaattagaaataaaaaataggtgtaaa

SEQ ID NO: 410204 - DNA, 396 bp, Homo sapiens
aactggtgagtcaacctaacatttaaagaagaattaataccatttcttctcaaactcttctgacaaaatatatgaagaaggaatacttgctaattcattttttgataacagcattatccttataccaaagacaaagagagcacaaaagagagaaatacagcactatatcccctatgaatatataagcaaaaatctcagcaaaatactagcaatactagcaaaatactagcagcamtactgtataatcaaaggattgtaaactatcaccctttgagatttatccccaaaatgcaagggtggttcaacatataaaaaatcaatcagtgtaatatgctgtaacagtaaaatgaataagcacgtgattatttcaattgatgcagagaaaacattgatgaa

SEQ ID NO: 410205 - DNA, 574 bp, Homo sapiens
accttccttcaagttcactgattctttgttcagactactcagctattgaatccttctaaagaatttttgttactgtacttttyagctgcagaatttctatttgtttcctttttataatttctctttgtcgatatttctttttggtgggaaatccttttcttggtttcccttagttctttgctgatggtattgttcagctcattgagtacatttaaggtgggcttcctcagggatagtttcattaatttctcttttttcctttgaatgagtcacacttttttacttctttgcatgccttataatttgttgaaaactggacatattgaatattataaagtgacaactctggatactggattctcccccttccctggagtttgctgttactgcttgttgtaagtgttgtttagtgactatttcataaagcttacattctttgttgtgcatggaactgaagtctgtgctcacttagcttcagggtcaactactattttgacaggttccttaaacacctgcagccaaggaaagaaaaaaggtaataggaaagaaaaaaaaacactcccagtcttttttg

SEQ ID NO: 410206 - DNA, 595 bp, Homo sapiens
gtgggagtattttagctgggctcactgccaccccaaacaaaatcatatttctgttaacaaaaaaagaagaatagaaaggatcttgggtagagaacgagtcatatcttccattgagccttaagtgcattatctcatatctttgcaacaaaactatgaagtatttactattatttcctggttttcctcccatgttttacattaggaaactgaggcacagagggcttaactaactgacctagggtcacccagatgatgggtaggaaaactgggatctgaagctaggcagtctttggaagatgattttcaaataatcacaaaaggcaaaagtggaaagtctgtcaagtttagagattggttctgggcacggccaaggtctcttgggcaaactgccagcaggtccctgtgggaggcaattatgatgtcatgtctttcctgctgtaaccacatactctcagactccagatagtcytaaggcagctgtgacaagcatctgtattagcttactagtgaggcagggttcatgggtccaaaaaacttggcacatcagtgcttctgggcagcaaaatggattgggggaggggtgaggcaaaggtgt

SEQ ID NO: 410207 - DNA, 598 bp, Homo sapiens
ttagtgacaggaaaatgggaaggggccctgagtggacctccaaacactcacttatttaatatgtggataaaattctgttgcagaaattaaggtgagtaaatgggtttttaaaaaaatccatagaatgatggttgtggctggcggtttatgtcccctctaagagccatggccagagaggaacttgcaaaggaaagaygcaagatcaggtttacagctgctggtgaagagtccactaaataaccatgctagtaatcagattatcccaacttttgccctcactgagaggctgaaaggaacatagaaaaacatgaatgttttgctgtgacttagatcagtaacttcatgtgtgaatggttgttctggtataagatattatagggagatataaaaagaaaggaagtcaaatacggaaaagagagaggcaagttgtctgcctttttcttcaaagccttctaaaattccacagttttgttgcgtctaggaaaactgttatacacatcatcaaccaagcgacagatctttatttttaattcatcacagaagtctgctgctgaaatgatgcttgagagaaaaaaaatctcttgttggtaagagcctt

SEQ ID NO: 410208 - DNA, 598 bp, Homo sapiens
ttagtgacaggaaaatgggaaggggccctgagtggacctccaaacactcacttatttaatatgtggataaaattctgttgcagaaattaaggtgagtaaatgggtttttaaaaaaatccatagaatgatggttgtggctggcggtttatgtcccctctaagagccatggccagagaggaacttgcaaaggaaagatgcaagatcaggtttacagctgctggtgaagagtccacyaaataaccatgctagtaatcagattatcccaacttttgccctcactgagaggctgaaaggaacatagaaaaacatgaatgttttgctgtgacttagatcagtaacttcatgtgtgaatggttgttctggtataagatattatagggagatataaaaagaaaggaagtcaaatacggaaaagagagaggcaagttgtctgcctttttcttcaaagccttctaaaattccacagttttgttgcgtctaggaaaactgttatacacatcatcaaccaagcgacagatctttatttttaattcatcacagaagtctgctgctgaaatgatgcttgagagaaaaaaaatctcttgttggtaagagcctt

SEQ ID NO: 410209 - DNA, 598 bp, Homo sapiens
ttagtgacaggaaaatgggaaggggccctgagtggacctccaaacactcacttatttaatatgtggataaaattctgttgcagaaattaaggtgagtaaatgggtttttaaaaaaatccatagaatgatggttgtggctggcggtttatgtcccctctaagagccatggccagagaggaacttgcaaaggaaagatgcaagatcaggtttacagctgctggtgaagagtccactaaataaccatgctagtaatcagattatcccaacttttgccctcactgagaggctgaaaggaacatagaaaaacatgaatgttttgctgtgacttagatcmgtaacttcatgtgtgaatggttgttctggtataagatattatagggagatataaaaagaaaggaagtcaaatacggaaaagagagaggcaagttgtctgcctttttcttcaaagccttctaaaattccacagttttgttgcgtctaggaaaactgttatacacatcatcaaccaagcgacagatctttatttttaattcatcacagaagtctgctgctgaaatgatgcttgagagaaaaaaaatctcttgttggtaagagcctt

SEQ ID NO: 410210 - DNA, 598 bp, Homo sapiens
ttagtgacaggaaaatgggaaggggccctgagtggacctccaaacactcacttatttaatatgtggataaaattctgttgcagaaattaaggtgagtaaatgggtttttaaaaaaatccatagaatgatggttgtggctggcggtttatgtcccctctaagagccatggccagagaggaacttgcaaaggaaagatgcaagatcaggtttacagctgctggtgaagagtccactaaataaccatgctagtaatcagattatcccaacttttgccctcactgagaggctgaaaggaacatagaaaaacatgaatgttttgctgtgacttagatcagtaacttcatgtgtgaatggttgttctggtataagatattatagggagatataaaaagaaaggaagtcaaatacggaaaagagagaggcaagttgtctgcctttttcttcaaagccttctaaaattccacagttttgttgcgtctaggaaaactgttatacacatcatcaaccaagcgacagatctttatttttaattcatcacagaagtctgctgctgaaatgatgcttgasagaaaaaaaatctcttgttggtaagagcctt

SEQ ID NO: 410211 - DNA, 421 bp, Homo sapiens
ggagtaatatcctcctagggtattacaaataatttcacagtctgtacacacatggtgtacactcactgtgatattaggagtaatatctacctagtggataacaaataacatcgcagggtgtacacccactttgatattagctgtaatatttttctaagttgttacaaataatatcacagggtgtacgaacagggtgtacactmgctgtgatattcaggagtcgtatctccataatatattatgaataatatcacagggtgtacacccactgtattattaggagtgatatctctgtaggatattacaattaatatcacagggtgtgcagccactgtgatattaggagcaatatctttctaggatattacaaacaatatcacagggtgtatgctcactctgctgtcaggagcaatatctcctt

SEQ ID NO: 410212 - DNA, 421 bp, Homo sapiens
ggagtaatatcctcctagggtattacaaataatttcacagtctgtacacacatggtgtacactcactgtgatattaggagtaatatctacctagtggataacaaataacatcgcagggtgtacacccactttgatattagctgtaatatttttctaagttgttacaaataatatcacagggtgtacgaacagggtgtacactcrctgtgatattcaggagtcgtatctccataatatattatgaataatatcacagggtgtacacccactgtattattaggagtgatatctctgtaggatattacaattaatatcacagggtgtgcagccactgtgatattaggagcaatatctttctaggatattacaaacaatatcacagggtgtatgctcactctgctgtcaggagcaatatctcctt

SEQ ID NO: 410213 - DNA, 631 bp, Homo sapiens
cttttacattgtatgtgtcagagagagaaaagatggcaggtggacttttaacccaaactgtggggccctggctgaggccggtggcctakcgctctaaacaactagatggggtttctaaaggatggcccccctgtttgaagaccttggcagcaactgccctactagtacaaaaagcaaataagctgactcttgggcaaaacctgaacataaaggcttcccatgctgtggtgactttaatgaatactaaaggacatcattggctaacgaatactagacttaccaagtaccaaagtttgctctgtgaaaatccccgtataaccattgaagtttgtaacaccctacaccccgccaccttggtcccggtatcacagagccctgttgagcatgattgtgtagaagtgttggactcaattgactctagcagacctgacctccaggaccagccttgggcatcagtagactggaaactatacgtggatgggagcagcttcttcaacccacaaggagagagatgcgcagggtattcagtggtaaccctgaagccagatggttgccccagggcacttcagcccagaaagctgaactcattgctttcattcgggccttagaactcagtgaggctgagactgtc

SEQ ID NO: 410214 - DNA, 631 bp, Homo sapiens
cttttacattgtatgtgtcagagagagaaaagatggcaggtggacttttaacccaaactgtggggccctggctgaggccggtggcctagcgctctaaacaactagatggggtttctaaaggatggcccccctgtttgaagaccttggcagcaactgccctactagtacaaaaagcaaataagctgactcttgggcaaaacctgaacataaaggcttcccatgctgtggtgactttaatgaatactaaaggacatcattggctaacgaatactagacttaccaagtaccaaagtttgctctgtgaaaatccccgtawaaccattgaagtttgtaacaccctacaccccgccaccttggtcccggtatcacagagccctgttgagcatgattgtgtagaagtgttggactcaattgactctagcagacctgacctccaggaccagccttgggcatcagtagactggaaactatacgtggatgggagcagcttcttcaacccacaaggagagagatgcgcagggtattcagtggtaaccctgaagccagatggttgccccagggcacttcagcccagaaagctgaactcattgctttcattcgggccttagaactcagtgaggctgagactgtc

SEQ ID NO: 410215 - DNA, 565 bp, Homo sapiens
cagctccatcacaagagaatttcacaagcacaagcccggaaggattgcctgtcagacttcacatgacattccaagattgggtttcaccactttgaccaaatgaccctgaagtgaccaaaggcaactgtcctgttctagatggttaaatcctaggtggggaaagcatgttaatggcggagccaggaacatccaagctaggctaataggcaatcacttctcagtccacagtcagccaaggtaaataatgcatgaatgagcataggaaatggactttatagacttaaaaaaaacacaaagaaattcttattatttattttatttaatacattggatacattttagccaatatttttcatcccctttgtttgtcaggactttttatgttaaccagaaaatacaaataacagagtttcacatttttgccattactcttctgacgggcagtatcttctttcagagtagctcttctygcttgagatcttgactagattagttctttattcttcagtttctagtacaagcaagaagataattctgtctcatgttctccagcgtttacattact

SEQ ID NO: 410216 - DNA, 560 bp, Homo sapiens
cccagtctctactaaaaatacaaaatttatctgggtgtgctggtgcatgcctgtaatcccagctactcaggtgggtgaggcatgagaatagcttgaacccagacggcagaagttgtggtgagccaaaattgcgccactgccctccagcctgagttagagtgagactctgtctcaaaaaaaaaaaaaggtctgagaaaaaaatctttccaatccaattctttgccagccaaactaccaaatatgagcatagcaaaaaagttgttttcagacgggtaaaatctcaaaaactttgctttgcatctttttttttctttttttccccacgaagcttcaggaatgtgtgtcactaaaagaggggaataaatgaagaaagaggaagctctgagtttggaaacaggaattacaacaaaagaaagaggcaaattaaatttctatagtgatggtgaagagatatcctaggatgacaaaatgttgcaaytctagagatcagtcactacaaacagcaacagaaggacagaagaatctaggagagttgtctccatcaaaaagaagaaacaaaa

SEQ ID NO: 410217 - DNA, 663 bp, Homo sapiens
atataataataaataattttaagatacatattttcatagaatcaaacatttattgagtacctggaatgtgttggcattatagacataaygtatatttgttcaaaaattttccttaccattctgtagcctatgatctatttaagaataaagagaatatgtacagcacagggcaagtccctaatgagtgactctgatgattggacagaatgtcagggaatagcatgctcaccttgcatctgttcactgaagagatgaggttgaacagtttttagaccaatagaatgtttgaagttgagtatttgacataaaagaaacatttactaagatattcgcctcagtacttcacacttaccatagaaatgaaaatttgaaatagctgaatcagcttctaaacatttcctcattaatcaggaacaaataatttgattacaggagtaagtatgtgagagctatgcctgattctggatctctgctgttagatttgataatctgaaaattcaagtcagtgatcactttgctgggagaaagtattcattcgaatgaagaaacagaactcattgaaatagactgttagaattactattagaaacataaacagaattcagatgtcaagaactggggagagtttgagactttactatacttgcaagctaacaggttaga

SEQ ID NO: 410218 - DNA, 643 bp, Homo sapiens
gaagctgatacaccagcatggactatacactgggttcttccattttttaaaagcaaactttaaagacatatctaccctggtccaataacaataactagagaaaattcaagtgctgttagagagaatccacctctgaggttgggtcmagtggagagctgaacaaaattacagttccatcagtaaaaaggagggatcacaacatgctggggaggcgaccaagagtgtccattttaagcgatgaaggggagaaaaaaccgatccctagtgaaaggggaaaaatacacaagtcactggatattgcgctgtgttttgttcttttccccatggttgttttgtgagatttgagcaatgtttctgcatgaagaaatgtgtcaaggagggggaggttgaaggtggaatagagatagtgtgatctctggaataaagcctccgggctgacagggcctgacggggtgcatagcacagcagagatctccaatgaggaggagggactgatgggcacgcagatgtatttaaggtttgggggaaagttgggaatgatgttgtgaaattcctgacccctgatggcctttatttttcctgtaaagcagaaaggggcaatagccatttgggaagagtgatgggcaaatgggtactaagcaat

SEQ ID NO: 410219 - DNA, 624 bp, Homo sapiens
  misc_feature (1)...(624): n = A,T,C or G
nnnnnnnnnnncatattgaaaatgcagcttttacatgggtacaggattgtcataagaaagacacasctacagattataatatgactgacaaaaaagaaaaatcattagatgacaatgtaaatcaaaaggaaggtgaaggatttaaagctagagatgttaatactggcaaagtgtggtttgatacttgcagaaagaggctttaaaaatgtcaagataacaggagaagcaacgtctgctgaccacgaagcagcagagaggtttccaggtcccattaagaaaatccctgagaagaaaggatatctgtctgaacaggtttttaatgcagatgaaagtgccctattctggagaacaaaaaaggacattaatcagaaaacaggagaagtgagcacaggatttgaagcagggaaaggtaggctaactctactgttttgtggcagatgcagtcgggttaatgatcaggactgcccttatctataaacctgctaaccccaacccttgaaggaaaaagataaatcccagctgccaatcctttggttgtgcagcaagaaggcctgagcaatgagaaccctttttctggattagttccatcaatgctttgttgctgaagtcaggaagtatcttgcc

SEQ ID NO: 410220 - DNA, 624 bp, Homo sapiens
  misc_feature (1)...(624): n = A,T,C or G
nnnnnnnnnnncatattgaaaatgcagcttttacatgggtacaggattgtcataagaaagacacagctacagattataatatgactgacaaaaaagaaaaatcattagatgacaatgtaaatcaaaaggaaggtgaaggatttaaagctagagatgttaatrctggcaaagtgtggtttgatacttgcagaaagaggctttaaaaatgtcaagataacaggagaagcaacgtctgctgaccacgaagcagcagagaggtttccaggtcccattaagaaaatccctgagaagaaaggatatctgtctgaacaggtttttaatgcagatgaaagtgccctattctggagaacaaaaaaggacattaatcagaaaacaggagaagtgagcacaggatttgaagcagggaaaggtaggctaactctactgttttgtggcagatgcagtcgggttaatgatcaggactgcccttatctataaacctgctaaccccaacccttgaaggaaaaagataaatcccagctgccaatcctttggttgtgcagcaagaaggcctgagcaatgagaaccctttttctggattagttccatcaatgctttgttgctgaagtcaggaagtatcttgcc

SEQ ID NO: 410221 - DNA, 604 bp, Homo sapiens
tcttattcaggggtagtcagcctttgttctattaaggtctccaactgatgggatgaagcccacttctgttacagaaggtcatctgttttactcaagtccactgatttaaatgttgatctcatccaaaaacaccttcacggaaacatccaggatcatgttttaccaaatatgtgagcacagtggtccaggcatrttggtacataaaattatccattagactggccttcaataaaatttaataagtaatttaaaaatatcactaccaatccattctatataaatatagaaaagctctcccttgtttttattttcaaaaacagagggactaattatgtattatcaaaaaatactttcattcactatcaattttatcttttccttagatataaattaatgcatgtatgcttcaaataagtcaaatatttgacttatttatttaaataaaaaatagatataaaatatgttgtatatattaaagacatataattatatgcttaacactttataactacaactttatctctcactaaattttttatactactgttgaaagttttaggtggttaaaatcatactcagaagaaaaatatattttaaaaagtaa

SEQ ID NO: 410222 - DNA, 512 bp, Homo sapiens
atacttagtagacctgaatctttttaaagagtaatattttttaatggataaaaatatccgaccatgaagatgtggaagttattacttgaacatgtttcttgttcgacctccatgtttgagatcttggtctttaaatgtataccatattattacattgtatttagagtcaagaaaataccagtggaccctagaataaaattgaatagggagagatgyaagaaatatggttattgacattcaatgtcaggtttaggagaccgagtggaataatgcaaggaaagaccattgactcaggagggacgagagcaagtctcagcttaggcactgtcattaacaacagggtgactactgattgagccttactaattctcatcaacctcaactgtaagtgaaaaaattcagatgacatctgagattccattcagctctaacatgtcgtgcgactgctttgaaatatctaaaacagtttggggttacaaggttggaatcaacgtgccatatgacaaattcaa

SEQ ID NO: 410223 - DNA, 599 bp, Homo sapiens
gtaggacaaatgttaaagcatcaaatttactgaagctagaagcatggttaatataacatctagggaagacattcttggggaccagaatcactcctatctcttctatatrtatacccagtgctagacttccattcgaaagggcagaaagcttacagcacacaactagcaaagcccaaagccagaagagctaactctggttgtgaggggaaccagacacacccagaagagttctgaacaacttaagagtggctgatattacccagttagtaacagcactatcaagccagatctaaacaactatgagtagctttgtatagtacttaatagttcatatagtcagaggaagcaaagacaagaagaaaaatggaaactggcatgaattgactgttgctatttattgattacctttttcagggtagtacatattgttcttacaactttatctcattttaccaagaatttaaataaaccaactatgtgaattaaataataatggaggcaataaaagttattatagaataacgaaaagaaaaaaatgtaaagaaaaggaagaggcaacatgtagggaaaaatgttccctaagtcaacaagcagttata

SEQ ID NO: 410224 - DNA, 599 bp, Homo sapiens
gtaggacaaatgttaaagcatcaaatttactgaagctagaagcatggttaatataacatctagggaagacattcttggggaccagaatcactcctatctcttctatatgtatacccagtgctagacttccattcraaagggcagaaagcttacagcacacaactagcaaagcccaaagccagaagagctaactctggttgtgaggggaaccagacacacccagaagagttctgaacaacttaagagtggctgatattacccagttagtaacagcactatcaagccagatctaaacaactatgagtagctttgtatagtacttaatagttcatatagtcagaggaagcaaagacaagaagaaaaatggaaactggcatgaattgactgttgctatttattgattacctttttcagggtagtacatattgttcttacaactttatctcattttaccaagaatttaaataaaccaactatgtgaattaaataataatggaggcaataaaagttattatagaataacgaaaagaaaaaaatgtaaagaaaaggaagaggcaacatgtagggaaaaatgttccctaagtcaacaagcagttata

SEQ ID NO: 410225 - DNA, 599 bp, Homo sapiens
gtaggacaaatgttaaagcatcaaatttactgaagctagaagcatggttaatataacatctagggaagacattcttggggaccagaatcactcctatctcttctatatgtatacccagtgctagacttccattcgaaagggcagaaagcttacagcacacaactagcaaagcccaaagccagaagagctaactctggttgtgaggggaaccagacacacccagaagagttctgaacaacttaagagtggctgatattacccagttagtaacagcactatcaagccagatctaaacaactatgagtagctttgtatagtacttaatagttcatatagtcagaggaagcaaagacaagaagaaaaatggaaactggcatgaattgactgttgctatttattgattacctttttcagggtagtacatattgttcttacaactttatcwcattttaccaagaatttaaataaaccaactatgtgaattaaataataatggaggcaataaaagttattatagaataacgaaaagaaaaaaatgtaaagaaaaggaagaggcaacatgtagggaaaaatgttccctaagtcaacaagcagttata

SEQ ID NO: 410226 - DNA, 301 bp, Homo sapiens
  misc_feature (1)...(301): n = A,T,C or G
nnnnnnnnnnnnnnnnnnnnnnnnnnnnnnnnnnctcaaataagaagttttacttttagcgaagttgaattcatcartattatttcttataatgtttagtttattgatcttatttaataattttttgttaccctaaggcagcaaaggtatttttctagactcccttccaaaaagttaaaaatgttaagtttgctgttgatacattcagatttctttttaatatatactttggtgtagacaagttattttacctttcccccttctagatagccagttgtcctacaccatctgcttaacatga

SEQ ID NO: 410227 - DNA, 619 bp, Homo sapiens
gccatctcctctatcagcttgaccttctgctattctgtgtatttactggctgkacgttcacctgttcctcttggtgtagtaaagctataaataggaagaagaagcagaaaggttatccgatcaaaatgcagaatatggataaaggtcaaggtggtagggcatgcagttctaattcccaatatatattagacaataaaaatcttacacctcattcttgtggcaaaaattgtaataacggaattgaaatactgtgcaaattatttttcatacaggattgtcgagtcgaaatgaagtaatagtatttgtccattttcattaaacttttagaatgatattctaatgcttatgaaaaagatgccatacgtacaaaatagaaaaacaacaaatatgtatttgaaaattccatatttttacacgttttctttttattcatcattgaatttataatttgaattatatagaaaaaataaagtatatgtgaggtaaatcatagagaccaggaaatccaaagtttgaaagaaactaaactatggcaaaaattgttaaggtaataagttaatttttccttctatttaagttataatatttatagatattttgcacgcatctcaataccttg

SEQ ID NO: 410228 - DNA, 584 bp, Homo sapiens
acaggctggtaaacctgcccacatgtccactgatagggtgggggtgccacactagataaagcatatctctatcttcagcttcattgcagttgtataggatttttgcacagaaggaaaggcagatcataaggacaaagagctctgccagaggaaccgattttatttggaaaagagaatagagaaaagccttgttgaaaacagtgaagatcttagtggagaacaattaagaggaggctgatagctcygccacaagcaaagtggcagaaaaaccaagagacggcaaagagataactaagaagagctcttctgggatcacagacaactctggggatcaggaaagctgtgtacctatgctaggttgcacccactcaggagcaatcagagcaagacatgcacagacttgaaagcattccccaacctgcacacagactcatcaacacaagtgacttaaacataaccccatgagcaaatactgactacacaatatactactttgccacaaggatgactcctaggaagtcaggcttaaaaataatcatagtcatccttggctctctggaataatgtgtgcatgcccaaagctt

SEQ ID NO: 410229 - DNA, 549 bp, Homo sapiens
caataaccttattagacacgtgatttccagatttctcccattctgtcagttatttttcattgtcttcatactttctttgaagcacaaaaggctttaatttttcggtagtccaatttatttatttttctttggtttcttgtgctttaggtgcaatatctaagaaaccactgcctaacccaagttcataaagatttactcctatactttcttctaagagttttatagctttagcttttacatttaggtctttgatgcattttgagttaattttcgtgtatgatgtgaataaaggtctacatccattcttctgcatgtggatatcctttgcagaaaagactattctttcacctattgatgtcaaaactaaactaaccagggatttatgagtttatttctggactctccattctattccattgatctatatgtctatccttatgcctataacacacaatcttgattacttkaagtttgtggtaagttttggaatcaggagtgtgagtactccaaatttgttcttttcatgtcattattgttttggctattcta

SEQ ID NO: 410230 - DNA, 586 bp, Homo sapiens
ggatcgcctgatttacctaaaatgttacgaagcctctctaattgactcattctcccatgctccatgatgaccacttctctcgaacacatayccttctttcccagactcacaacagaggacctccttgactcttactatgtcacaatggaaatagaaaccatcagaaagaaattattgcaacaactcttaccaaacacacaaacctacctatatccacagccatcctatcctttcctactgttacaacagatgttcctcccatccatggccaaaatgtcatctatgcttgggatcctatctccttcttagaaaactactattgatgacctcttctaccccatgtatgcttgcctcttcctttttcctagtagttcttaaaatagttctttcccattaaactcataaactttcctcttttatagccagcttccctaagaactctgtttctggctttacttcctcttcactccttcacctactgtgatctgtcctttgccccagtcactctagtgaaatagcataaggtaatgttctttttgactggcagcacctgacatgtcctctgccttgaatgcttttttccttc

SEQ ID NO: 410231 - DNA, 586 bp, Homo sapiens
ggatcgcctgatttacctaaaatgttacgaagcctctctaattgactcattctcccatgctccatgatgaccacttctctcgaacacatatccttctttcccagactcacaacagaggacctccttgactcttactatgtcacaatggaaatagaaaccatcagaaagaaattattgcaacaactcttaccaaacacacaaacctacctatatccacagccatcctatcctttcctactgttacaacagatgttcctcccatccatggccaaaatgtcatctatgcttgggatcctatctccttcttagaaaactactattgatgacctcttctaccccatrtatgcttgcctcttcctttttcctagtagttcttaaaatagttctttcccattaaactcataaactttcctcttttatagccagcttccctaagaactctgtttctggctttacttcctcttcactccttcacctactgtgatctgtcctttgccccagtcactctagtgaaatagcataaggtaatgttctttttgactggcagcacctgacatgtcctctgccttgaatgcttttttccttc

SEQ ID NO: 410232 - DNA, 565 bp, Homo sapiens
gcatgagcatcccccagagggcttgtgaaacaggattgctgggccccacctccagggcttctgagttaatagttctgggaaggggcccaagaatctgcatttatttatttattttttattttaagaaacaaggtatagatatgttgcccaggctggagtgcagtggctattcacagttgcaatcatagcagactacagccacaaactccggggcttcagtgatcctcttgcctcagcctccccagtcgctgggactgcaggtgcatgtcactgcacctggctcaagattctgcatttctaataagctctgacggtgctaatcaaggaaccatgcaatagaaattgaaactgagaaatttaaaaattattttttagttcattttaakatagcagtaattaacccattatctgttagaataaataacaggttttaatttaaaaagcaatattttcaaaacaaaaaaaagtcacatcatatttcttggaaattctactatcggatgtgtaagaggaggagagtgaaaatagcaaataacaccttggtattattatgaaaatagttttg

SEQ ID NO: 410233 - DNA, 549 bp, Homo sapiens
caaaccagccataacattcccttaagcaaaagcctaatccagaacaaggttctaactcacttcaattctatgaaggctgagagaggtgaggaagctgcagagctagcagaggttggttcatgaggtttaaggaaagaagccgtctccataatataaaagtggaaggtgaagcagcaagttctaatggagaaactgcagtaaattatccagaatatctaagatcattgaagaaggtggctacattaaataacagattttcaatggagactaaacagccttatgttggaagaagatgccatctaagactcgtagctagagagaagatgtcaatacctgcttcaaagcttttaagggtagaataactctcgttaaaggctaatgcagctggtgactttaagttgaagccaattcttatttaccrttccaaaaactccaattcccttaagaattatgctaaatctactctgcctgtgctcaataaatggaacaacaaggtctggatgacagcacatctgtttacagcatggcttactgaatattttaagccca

SEQ ID NO: 410234 - DNA, 625 bp, Homo sapiens
gcaaccctcatggatgacctttgaggtgttcaagattgaagtggaagaagaaactgcagctgtggtagaaattgcaagagaactagaattagaagtggagcctgaaggtgtgactgaattgctgccatctcatgatcaaactttaatggataaagagttgctttttatagatgagcaaagaragtcgtttcttgaggtggaatctactcctgatgaaactgtgaatattgttgaaatgatagcaaaggatttagaatattatgtaacttagttaaagcagcaacacagctgaagaggattgactccaattttgaaggaagttctgtgggtaaaatggtatcaaacagcatcacatgcttcagagaaatcttttgtgcaaggaagagtcaatcaataaggtacagttcattgttgtcttattttaagaaattgctacagctactgcagccttcaccaaccatcagtcagcagccatcaacatcaaggcaagaccctccaccagcaaaaagatcatgactcattaaaggctcagatgattgttagcattttttagcaataaggtattttacattgttttctagatgtaatgctatcacacacttgataggctacagtatattgtaaa

SEQ ID NO: 410235 - DNA, 622 bp, Homo sapiens
gtagaaattgcaagagaactagaattagaagtggagcctgaaggtgtgactgaattgctgccatctcatgatcaaactttaatggataaagagttgctttttatagatgagcaaagagagtcgtttcttgaggtggaatctactcctgatgaaactgtgaatattgttgaaatgatagcaaaggatttagaatattatgtaacttagttaaagcagcaacacagctgaagaggattgactccaattttgaaggaagttctgtgggtaaaatggtatcaaacagcatcacatgcttcagagaaatcttttgtgcaaggaagagtcaatcaataaggtacagttcattgttgtcttattttaagaaattgctacagctactgcagccttcaccaaccatcagtcagcagccatcaacatcaaggcaagaccctccaccagcaaaaagatyatgactcattaaaggctcagatgattgttagcattttttagcaataaggtattttacattgttttctagatgtaatgctatcacacacttgataggctacagtatattgtaaacaaaagttttatatgcactgggaaaccaaataattatgtgacttgctttattgcaaaattt

SEQ ID NO: 410236 - DNA, 625 bp, Homo sapiens
ggtggaatctactcctgatgaaactgtgaatattgttgaaatgatagcaaaggatttagaatattatgtaacttagttaaagcagcaacacagctgaagaggattgactccaattttgaaggaagttctgtgggtaaaatggtatcaaacagcatcacatgcttcagagaaatcttttgtgcaaggaagagtcaatcaataaggtacagttcattgttgtcttattttaagaaattgctacagctactgcagccttcaccaaccatcagtcagcagccatcaacatcaaggcaagaccctccaccagcaaaaagatcatgactcattaaaggctcagatgattgttagcattttttagcaataaggtattttacattgttttctagatgtaatgctatcacacacttgataggctacagtatattgtaaacaaaagttttatatgcactgggaaaccaaataattatgtgacttgctttattgcaaaatttactttattgtggtggtctggaaccraacctgaaatatctcctaggtttacctgtatgctatatggaaaacagtatggaggttcctcaaaaaattaaaaatggaactaccatataatccagcaatcatgcttatg

SEQ ID NO: 410237 - DNA, 592 bp, Homo sapiens
  misc_feature (1)...(592): n = A,T,C or G
nnnnnnnnnnnnnnnnngaattcaatccagctgcagaaatctgcataagtaaagaggagccaaatgttaacagccaagataatggggaaaagaactggaaggcatttcagaccttcacagcagcctccctgccacacaggcccagaggcctaggagggaagagtagtttcagaagtcaggcctgaggccctgctgccctgtgcaacctcaggacatttctccctacgtcccagacagttcagatccagccttggcttaaagggccccagatacatctcaggccacactgctccagagggtgcaagtcataaaccttggtggcttccatgtggtattaagcctgcaggtgtgyagaggacaagagttgaggcttgggagccttcatctggatttcagaagctatatagaaacatctggatgtccaggcagaagtctgctgtgggggtggagccctcatggataacctcttctagggaagtgtggaggggaaatgtggggttggagttcccacacagagtccccactggggcactgctcctctgtgaggagaaggccacaatcctccagaccccagaatggtagatccactgac

SEQ ID NO: 410238 - DNA, 566 bp, Homo sapiens
gggaatacttcctagcagcattgccctaataccaaaaccagacaaaaacattactagcaaagaaaactataaaccaatatatctcttgaacaaagatgtaaaaatcctcaacaaaatattagctagtagaatccagcaatgcataaaaagaattgtacagcataaccaagatttatcccaggtatgcaaggctggtccaatatttgaaaattcattcatgtaatctaccataccaatagactaaagaagaaaaatcacatgaccacatcaatagatgcagaaaatgcatttgacaaaatccagcacattttcatcataaaaactttcagcaaactagggayagagggggaactttctcacttgctaaagaacatctacaaaaaccctaaggtaacaacatacttaatgatgaggagcttacctatagaggaacaaaaataaagaatgacatccaacttctcagaaaccacgtagacaagaagagaggtggagtaaaagtgttcagagaaaaaaactaccaacctataattctgtaccttgcaaaattagcctttaaaagtaaaagt

SEQ ID NO: 410239 - DNA, 566 bp, Homo sapiens
gggaatacttcctagcagcattgccctaataccaaaaccagacaaaaacattactagcaaagaaaactataaaccaatatatctcttgaacaaagatgtaaaaatcctcaacaaaatattagctagtagaatccagcaatgcataaaaagaattgtacagcataaccaagatttatcccaggtatgcaaggctggtccaatatttgaaaattcattcatgtaatctaccataccaatagactaaagaagaaaaatcacatgaccacatcaatagatgcagaaaatgcatttgacaaaatccagcacattttcatcataaaaactttcagcaaactagggatagagggggaactttctcacttgctaaagaacatctacaaaaaccctaaggtaacaayatacttaatgatgaggagcttacctatagaggaacaaaaataaagaatgacatccaacttctcagaaaccacgtagacaagaagagaggtggagtaaaagtgttcagagaaaaaaactaccaacctataattctgtaccttgcaaaattagcctttaaaagtaaaagt

SEQ ID NO: 410240 - DNA, 546 bp, Homo sapiens
cttctttagtaaatgaacggtcaagcagacaaaaattaataggtaaatataagccttgattacagactacaattaacaagtctgacttaaagggcatatacagaacccacacccaacaattagaggacaatagctatgaaggatgttggaccagtgggaagttcccctgtcctgatggggcaagtgactgagcagagacagggttgccatggttgacatatgttattgcttttatttgaatgatgctctgagattggatcctttgtcacctcacaggaacttggagtgcaaacagcacagtacttttctcagtttcctccatcgtgaaggggagagagtgcccagacagtgtgcaaatcctcctctgagsctgaggtaggagaaggggagctgcgggcaactagtaaactgtggtaaactctttgtttactgtcccaaaaaagcctagttcctaaattttttgactatctggtaatcagatcctttggtggaaagaattaaaacacactatgtttatttaattcttctaactcagaagccatgatt

SEQ ID NO: 410241 - DNA, 616 bp, Homo sapiens
cagtgtgcaaatcctcctctgagcctgaggtaggagaaggggagctgcgggcaactagtaaactgtggtaaactctttgtttactgtcccaaaaaagcctagttcctaaattttttgactatstggtaatcagatcctttggtggaaagaattaaaacacactatgtttatttaattcttctaactcagaagccatgattaactggtggtcagcacttaagaagtaattatatagttcaagggcaggcaaaatgaatgcaatacatgtacttttgctatacaaaaacaattttcttacatggaaaacacaagtcacttccctaatttaattcttttacagtgccaaagttggctaatccaataatgttgatgttcctgcactgtgtagaggataaactgaatgctgaaaactcagataccttcagaggccaggcaggtaaatgaaaatgcctgtaagacgatagggagtatttgggaagctcctgctactcaactccagcagactattatttggaaatgggggcatagaattgtcaggtatatccatttttcctaagaaaacagaacctagattgttatgtgtaatttcccaaattttagattttggcactttaat

SEQ ID NO: 410242 - DNA, 616 bp, Homo sapiens
cagtgtgcaaatcctcctctgagcctgaggtaggagaaggggagctgcgggcaactagtaaactgtggtaaactctttgtttactgtcccaaaaaagcctagttcctaaattttttgactatctggtaatcagatcctttggtggaaagaattaaaacacactatgtttatttaattcttctaactcagaagccatgattaactggtggtcagcacttaagaagtaattatatagttcaagggcaggcaaaatgaatgcaatacatgtacttttgctatacaaaaacaattttcttacatggaaaacacaagtcacttccctaatttaattcttttacagtgccaaagttggctaatccaataatgttgatgttcctgcactgtgtagaggataaactgaatgctgaaaactcagataccttcagaggccaggcaggtaaatgaaaatgcctgtaagaygatagggagtatttgggaagctcctgctactcaactccagcagactattatttggaaatgggggcatagaattgtcaggtatatccatttttcctaagaaaacagaacctagattgttatgtgtaatttcccaaattttagattttggcactttaat

SEQ ID NO: 410243 - DNA, 448 bp, Homo sapiens
ccaggcaggtaaatgaaaatgcctgtaagacgatagggagtatttgggaagctsctgctactcaactccagcagactattatttggaaatgggggcatagaattgtcaggtatatccatttttcctaagaaaacagaacctagattgttatgtgtaatttcccaaattttagattttggcactttaatctatacatttgaaacagggccccccccttccctgacacacacacacacacacacacacacacacacacacacacacagaaaaatcaagtctcaggtcagatccagtgtgggctaccaacttccaagttcagttgcagatgaatagacttaaagaattttagacttggaagggacttgagagaaaacctttaagttaattattttcgaagtgtatgtgtgtctgtgtgtgcacacatgcacactttgccaagaaacatttt

SEQ ID NO: 410244 - DNA, 586 bp, Homo sapiens
agaacagatatagtcagattatttgaggaagctgcaatgcgatcagtaatccttgcagtggccaaataagcatccagtgacaatggctcaggaagtatccaatggtattggcactggtgacaaactaatcctatggtatgaccttagctatgccccagttccctttgctcctccttacattttgaacccggttctcctgccttcccattgatcttacaagctgtccaaaatccatcaattttctgcttagtcagaattggtttctgttgtttgtaatcaagaagaccaactagtacagaaaaaaaacataaagaatggtttgcaagtgatctcagcaaaacaggaggaactctagaactgggtttctggtctaaggccaaaggcagtgagcatcctgttagtatttaaagatggaaatctggcaacccatggcaaagtgaattaaattatccttgtaaccacttakcttggttttagcttagcttctctgtacataatagaatgatatgccccatgaacacgaggctgtgggagatcaaatgagtgcctgctgccagagaaccagaaaataatataacgagcatga

SEQ ID NO: 410245 - DNA, 492 bp, Homo sapiens
ctcagaatgcctgcttctgccatattataattctttccttaaaacacacctacgtcttcaagcagagttccctctcaccaaatgactcatgaagaaacaattacagcctggcttacaatagctggccccagctattgtaagtgagctactataggattataactccattcagaggtggccctagcaggcagaacttcaatcactgtctatgttatcagtagaaagatggtctcaggtaagaagttatattgattcatgggctatagctaatggtacaacaagatagggacttgcaagcaacaagagcttggaagagttctacagaactggtattaggagtccggaaaagcagtgtgtgactggacttctccaaaatgggcctataatctcaaaaaaaaatttttttgcatgtgaatgmaaacccaaaggccccaagacagaggaggctcttaaatgtgtagactaaataatctactctgtggatgtcaatca

SEQ ID NO: 410246 - DNA, 636 bp, Homo sapiens
aaggacatgaaaaaaaaaaaacacaccttagaacacaaggaaaggaggctccttcttcagagttaaaagaattaagagctatataaaatcaatgaaagaatgaccagggcaaaataatattaaaataagtctaaaagtattttttggaaatgagtaaacamgggcaaaaaagtaatctaagaaaataagcctttgtcaaaaagtagaactgaaagtacaatgacaaaaacagataggttgttttacattccctccactagaatataaattctgtgagggcatataggtctgtttgtgcattactgtatgtcaagtatctgaacagtgcttcaaatatttatttatttaggcattcaaatatttgttgaatgaataaacaccagctagtctcagtgaaatatacagggaaaggaccagctagctcctgatgctataataatatgataatgaaaggaaccataatatgggcctggggttggtggcactgtaagatcctgaagggaaagtctgggctagaattttaattgagaggggtcaaaagaaggaactatttggtttcttaaaaatatataaagcataacctaagcagagtggtcctgtggcagtatcttggcagtgccttgcttccctgagtac

SEQ ID NO: 410247 - DNA, 636 bp, Homo sapiens
aaggacatgaaaaaaaaaaaacacaccttagaacacaaggaaaggaggctccttcttcagagttaaaagaattaagagctatataaaatcaatgaaagaatgaccagggcaaaataatattaaaataagtctaaaagtattttttggaaatgagtaaacaagggcaaaaaagtaatctaagaaaataagcctttgtcaaaaagtagaactgaaagtacaatgacaaaaacagataggttgttttacattccctccactagaatataaattctgtgagggcatataggtctgtttgtgcattactgtatgtcaagtatctgaacartgcttcaaatatttatttatttaggcattcaaatatttgttgaatgaataaacaccagctagtctcagtgaaatatacagggaaaggaccagctagctcctgatgctataataatatgataatgaaaggaaccataatatgggcctggggttggtggcactgtaagatcctgaagggaaagtctgggctagaattttaattgagaggggtcaaaagaaggaactatttggtttcttaaaaatatataaagcataacctaagcagagtggtcctgtggcagtatcttggcagtgccttgcttccctgagtac

SEQ ID NO: 410248 - DNA, 583 bp, Homo sapiens
aactgcttcttcctaacaactagtatctccatctttaggttgttcccactcctgtgaattatccatattgaaatcaaaatgagctttctgaaacataaatttgactttctctttccttatttgaaattctttaatggctctccactgtcgttggaacttggccaagcatgcagcctaacttttcagcacttttcctcatstaactgtactccagccttttagttccctgcttgtgccatgttttctttcactgctgggatttaacatgaaatttttctctcttcctggaagcttgcccatctttcctccctcttccaccacaacccagaccgtagttgttgggttaacttctacttaatctttaagactaagcttagagtcatatgatctgggataatttccctgctactttcttatatgaggataattattcttcccatttgttttcactaactctctatttatttgagaatgtaacattttgaattgaatctctcccattagactgtaagttctttgaaggcagggactgtatcctgtccactattatgcctatggtaccacaatttgtagcatcatgata

SEQ ID NO: 410249 - DNA, 573 bp, Homo sapiens
aggttgttattacaaaataccataaactaggtggcttatcaacaacagaaatttctttctcacagttgtggaggctgggaagtccaaaatcaaggcaaattcagtttctagaaagggtctgctttccggcttatggagagtaccttcttagtgtgtcctcacatggtagaaagggtgagtgaactaaggatactaatcccatttttaagggctctaccattgtaacttaatcacctcctaaaatcccctaacacctcctaatactatcatcttggggttaggattccaagacatgaatttggagaggaaggatataaatattcaagccacagcaaagtgtatacactgatgctgtcatggagagagccacgaagaccctagcctgattcactgggccaatggcatatctttgaaacatcaggaacattgtcyatttataccctgaactaatctacccaattaataaatcacaattaggtacagacaacctcttgaagtgtgaattccttctttcataagctaagagcaaagaataaagctttaaaaagttatattctctctgaaagagaaaat

SEQ ID NO: 410250 - DNA, 551 bp, Homo sapiens
acatcattaatatacttccattttgaaaaacattttcactggatatagatttctatgttggaaggtattttcttttctgtcattttcatttgaacgtagcattcaattgtcttctgggccccattgtttttattgaaaagtccactgttattcctttgagggaaacattctttccaccttatctcctagctttggctacttaagatttctacttatgttttcagcacttatactattatgttattgggtacaggcttttttttttttttttcaattgtstgcttgggatttatatggcttttttgatctctggattaaggtcttcagttttggaatcatttatattaaacagttctccttttttttcttctttatctcactgactccaattacatgtattttagatcatatcactgttttctctctgtctcaactcctattctttatcttcctctctcttttcttcatgcctgataactccaacagctgtagtataatttgacctgttttcactacctgtttctactagttttcattcaggcagttttgtt

SEQ ID NO: 410251 - DNA, 573 bp, Homo sapiens
ggatccttaaggatctcctgagtgcttgctaaaaagacagagagatcccaggcctccagtccagagagcctgatttatgtctctcattttagtaagcactcagataatactgatgcagacagtcaagagaactctttaagaaaaatagcctaaaaacttacagcatttttatcaggtattaatgtgagacctatagcaaagagwcaagccatttcttacttaaaataagacaatacattttagctctttacatctctggctaaaagctattttctaatcagtgataactctggagcttcattttggaataattagcttaaatgtcagcactagaagttattatcttaatgaagtctttttaaatattaatataatatgttgctgttttatatttttaaaataaataataattttatttttttcctccatccatatttttttttttttttgagacagagtcttgcttgttgcccaggctggagtgcactggcacgatcctggctcactgcaacctctgccgcccaagttcaagtgcttctcctgcctcagcctccaaagtagtgattacaggtg

SEQ ID NO: 410252 - DNA, 607 bp, Homo sapiens
ccacataaaaactaaaagaagctatcagtgaaacttttttgtgatatgtggattcgtctcacatacttaaacctttcttttcatacaacaggttgaaaacactctttttggagaatctgtgaagggacatttgggaggcctttgaagcctacagggaaaaattgtacatccctggataaaaactagaaagaagctatctgtgaaactgctttgtgatgtgtggattcaactctcagagttaaaactttcttgtaattcattaggttggaaaccgtctaattgttgaatgtgcgaagaaatattttggagaccattgtggcctatgtggaacaagagaacatccccagataaaaactagaagtaagctatctgtgaaactgctttgtgatgtctggattcatcttatagagtttgaccgtttttttaatacagcatgttggaaacactctttatggagwatctttgaaggtatatttaaaggccctttgaggcctatgtggaaaaaccgaatatccccagataaaaactagaaaacagctttctgtgaaactgttttgtgatgtgtgggctggactaacagagttaaagcttcattttgattcagcag

SEQ ID NO: 410253 - DNA, 544 bp, Homo sapiens
ttgattcagcaggttggaaactctttttgggtattctgtgaagggacatttgtgagcccttgaatcctattgggaaaaactgaatatccccagataaaaactcagaaaaagctgtctataaaactccttagtgatgtgttgatgcatttcagagttaaacctgccttttgatacagcacattgaaaataatctttttggagaatctgcgaagggacatttgggagcccattgagtcctatgcagtaaagctgaatatctccagataaagactaaaaagaaattatctctgacacggttttgtgatgtgtggattcatctcacaaagttaaaccttcctttggttcagcaggtcagaagccatctttttggagaatctgtgaagggttattttgtgtcccattgaggcctatgkggaaaaatggaatatccccagataaaaactagaagaaactatctgcaaaactgatttgtgatgtgtggattcatctcagagagttaaaatttcctgtgattcagcaggttacaaacactctttttgtagaa

SEQ ID NO: 410254 - DNA, 655 bp, Homo sapiens
tctttttgtagaatatgtgaagtgacatttgggaggccattgaggcctacagaaaaaaaccaatatccttagataaaaactggaaagaagctatctgtgaaactgctttgtgatgtgtggattcatctcacagagttaaacttttctttggattcagcaggttggaaatactctttttggagtatctgcaaaggcattttgggtgtctattaaggcctatggggaaaaactgaatttccacatataaaaactagaaagaagctatttgtgaaactgctttgaggtgaaagtawgcatctcacagataaacttttttttgatacagtctgttgaaaacactgtttttggagaatctatgaagggacatttgagagcccattgagacctatgtggaaaaactgaatatccagaaattaaaccaagaaagaagctatctgtgaaactgctttgtgatgtgtgaattcatctcatatggctaactttttcttttgattcagcagattggtagcactctttttagagaatctgcaagggacattttagagtgcattgagaccaatggggaaaactgaatattcccctataaaaagaagaaagaatctagctctgaaactgctttgtgatttgtggattcatcacagaatggttaaacttt

SEQ ID NO: 410255 - DNA, 655 bp, Homo sapiens
tctttttgtagaatatgtgaagtgacatttgggaggccattgaggcctacagaaaaaaaccaatatccttagataaaaactggaaagaagctatctgtgaaactgctttgtgatgtgtggattcatctcacagagttaaacttttctttggattcagcaggttggaaatactctttttggagtatctgcaaaggcattttgggtgtctattaaggcctatggggaaaaactgaatttccacatataaaaactagaaagaagctatttgtgaaactgctttgaggtgaaagtatgcatctcacagataaacttttttttgatacagtctgttgaaaacactgtttttggagaatctatgaagggacatttgagagcccattgagacctatgtggaaaaactgaatatccagaaattaaaccaagaaagaagctatctgtgaarctgctttgtgatgtgtgaattcatctcatatggctaactttttcttttgattcagcagattggtagcactctttttagagaatctgcaagggacattttagagtgcattgagaccaatggggaaaactgaatattcccctataaaaagaagaaagaatctagctctgaaactgctttgtgatttgtggattcatcacagaatggttaaacttt

SEQ ID NO: 410256 - DNA, 645 bp, Homo sapiens
ttacagagataaatctttattttgatcaagtaggttggcaacactatttttgacaaatctgcaaagacacatttgggagcccattgaggcctatgtggaaaaactgaatatcaccagataaatagtagaaagaatctatctgtgaaactctcttggtgtgtggattcatctcacatagttaaacctttctttggatacagcacttttgaagcactctttttgtagaatctgtgaagggagatttgagagcatattgtttcctgtgaaggaaaattgattattccaagattaaaactaaaaagaagctacgtgtgaaactgcttagtaatrtgtggacacacctcccagagttaaacctttcttttgattcaccaggttggaaacactttttttgaagaaaatttaaagggacattcgggacctcattggggcctacggggaaaaacaaaatatcctcagataaaaactggaaagaagttatgtgtgaagctgctttgtgaagtgtggattcattccccaattctaaacctctcttttgattcagcaggttggaaacaatctttttttgggaatctgcaaagtgacattcaggagaacattaaggcttatggggggaaaaacaaatgtccccagaaaaacgagaca

SEQ ID NO: 410257 - DNA, 600 bp, Homo sapiens
ggcctctggggaaaaaacgaatatcctgagacaaaaaactagaaatgagctatcagtgaaactgctttgtgatgagtggattggtctcacagagttaaacattatctttgagtcagcagattggaatctctttttatgtagaataaatgcagggacatttgggagcccattttggcctgtgtggaaaaacagtacatccccagataaaaactataaagatgctatctgtgaaactgctttgtgatgtgtggattcatctcacagacttaaacaattattttgattcagcaggttggaaatactcttttgggataatctgtgcagagacatatgggagcccatggagacctataaggataaatcaaatatccccagataaaaactagaaagaaactatgtgtgagaatgctttgtaatatgtggatgcatctcagagttaaacctttgttttgattctccatgctggaagcactctttttgtagattatgggaagacacattctacaaaatgcaaagrtgcgaagctatctttgaaattgctttgtaatatgtctatttatctcagagctaaacctttctttttattcaccgggtaggaac

SEQ ID NO: 410258 - DNA, 506 bp, Homo sapiens
ctcattgaggccaacgtcaaaaaatcgaatatactaagataaaaactagaaaaaagcaatctgacaaacaactttgtgatgtgtgcattcttctgacagaattaaaacttcacattcattcagcagtttgaaagcactgttttgtagaaaatgcaattggatattccagagtgcattgaggccttcagtataaaaggaaacatcttcagataaaaactagaaagaagctttctgagaaactgctttgtgatgtgtgcattcatctcacagatttaaacgtttctttggattcagtggtttggaaagagtgtttttgtccattctgtgaatggacatttgggagttaatcgtggtaaatggcaaaaaagtgaatatcctaggataaaagctagatagaagctgcctgagaatctgttatttgatgtgtgcattcatctcacatacttaaacctttcttttctttcaccastttttaaacactgtttttgtagaatttgtaaagggat

SEQ ID NO: 410259 - DNA, 576 bp, Homo sapiens
actgttttgtgatatttgcattcatctcaccaagttaaaactgtycttggattcagtagttgggaaagagtgttttgtccattatgggaatggacatttgggagctcacagaagccagtggtgaataagtgaatatccctgaataaaaactagatggaagcaatctgagaaactgttacatgatgtgtgcattcatcttgcagagttaaaactcttttcattcatcattttggaaacactgtttttgtaccatcttccaagggttatttcagagagcattgaagcttatggtgaaaaaggaaacaacttcagataaaacagagaaagaagctttctgagaaactgctttgtgatgtctgcattcatctcatagaattaaacctttctttggattcagctgtttgaaaacactgtttttgtcaattctgtgaattgaccattggcagctcgtgtaggctaatggcaaaaaagaaaatatcccaggaagaaaactagaagaaacctatttgaaaaactgccttatgatgtgtgcattcacctcactaagttaaacctgtctattcattcagcagtttg

SEQ ID NO: 410260 - DNA, 576 bp, Homo sapiens
actgttttgtgatatttgcattcatctcaccaagttaaaactgttcttggattcagtagttgggaaagagtgttttgtccattatgggaatggacatttgggagctcacagaagccagtggtgaataagtgaatatccctgaataaaaactagatggaagcaatctgagaaactgttacatgatgtgtgcattcatcttgcagagttaaaactcttttcattcatcattttggaaacactgtttttgtaccatcttccaagggttatttcagagagcattgaagcttatggtgaaaaaggaaacaacttcagataaaacagagaaagaagctttctgagaaactgctttgtgatgtctgcattcatctcatagaattaaacytttctttggattcagctgtttgaaaacactgtttttgtcaattctgtgaattgaccattggcagctcgtgtaggctaatggcaaaaaagaaaatatcccaggaagaaaactagaagaaacctatttgaaaaactgccttatgatgtgtgcattcacctcactaagttaaacctgtctattcattcagcagtttg

SEQ ID NO: 410261 - DNA, 583 bp, Homo sapiens
attctgtgaatggatatttgggagctcattaaggccaatggggtataagtgaatatcccaggataaaaagtagaaggaagctaccttataagctgctatatgatgtgtgcattcatctcacagagttaaacctttctttggattcctcagtttggaaacactgtttttgtccattctgagaatggatattttggagctcattgaggccaatggcgaagaagsgaatatcccaggataaaaactcgaagaaacctatctgagaaaccgctttgtgatgtgtgcattcatctcacagagttaaacctttcttttcattcagctgtttggaaacactgtttttgtaggatctgcaaaggaatatttcactgagcattgaggcccatggtaaaaaaggaagcctcttcagataaaaactagaaagaagtcttctgagaaactgatgtgtaatgagtgaattcatctcatggagttaaatctttctttgtatacagtactttggaaagtgtatttttgtccactctgtgaatggacatttgggagttcattgcagccaatggcaaaaaagaaaatattgcaggaaaaa

SEQ ID NO: 410262 - DNA, 462 bp, Homo sapiens
atggacatttgagacctcattgatgctaatggtgaaaaagtgaatatcccaggataaaaacttggtggaagctatctgagaaactgctatgtaatttctgcattcatcttgcagagataaaacttactttggattcagaagtttggaaacactgacactgtttttgtmcaatctgcaaagggatatttctgacagcattgagggctgtgatcaaaaaggaaacatcttcagataaataatagaaataagcttttggagacactgccttgtgatgtgttcattcgtgtcacagagttaaacctttctttggattcagtagtttagaaacaatgttatttttgcattctgtgaatggacatctgggagctcattggggccaatggtgaataagggaatatcccaggacaaaaactagtagaaagttatttgaaaaaatgctttgtgatgtttttattcatctcc

SEQ ID NO: 410263 - DNA, 562 bp, Homo sapiens
aaacctttcttttcattccgcagcttggaaaaactgttttcatagaatctacaaagggatattttggggagatttgaagtctatgttgaaacaggaaacatcttcagataaaaactagaaggaagttttctatgaaactgctttgtgatgtatgcattcatctcacagagttaaaccttccctcaaattcagtagtttggaaacactgcttttgtccaatctgtgaatggacatttgtgcactcattgaggccaatggcaaaaaaggsaatatcccaggataaaaactagtcagaagctatctgagaaaatgtttttttatgtgggcattcatctcacagacttaaacctttcttttcattcagcagtttggaaacactgtttttgtcgaatatgcaaaaggatatttcgtaaagcattgagacctagggtaaaaaaggacacatttttggataacaagtacaaaggagttttccaggaaaccactttgtgataagtgtgttcatctcacagagttaaaccttgctttggattcagtagtttgtagagagtgtttttgtcca

SEQ ID NO: 410264 - DNA, 562 bp, Homo sapiens
aaacctttcttttcattccgcagcttggaaaaactgttttcatagaatctacaaagggatattttggggagatttgaagtctatgttgaaacaggaaacatcttcagataaaaactagaaggaagttttctatgaaactgctttgtgatgtatgcattcatctcacagagttaaaccttccctcaaattcagtagtttggaaacactgcttttgtccaatctgtgaatggacatttgtgcactcattgaggccaatggcaaaaaagggaatatcccaggataaaaactagtcagaagctatctgagaaaatgtttttttatgtgggcattcatctcacagacttaaacctttcttttcattcagcagtttggaaacactgtttttgtcgaatatgcaaaaggatatttcgtaaagcattgagacctagggtaaaaaaggamacatttttggataacaagtacaaaggagttttccaggaaaccactttgtgataagtgtgttcatctcacagagttaaaccttgctttggattcagtagtttgtagagagtgtttttgtcca

SEQ ID NO: 410265 - DNA, 562 bp, Homo sapiens
aaacctttcttttcattccgcagcttggaaaaactgttttcatagaatctacaaagggatattttggggagatttgaagtctatgttgaaacaggaaacatcttcagataaaaactagaaggaagttttctatgaaactgctttgtgatgtatgcattcatctcacagagttaaaccttccctcaaattcagtagtttggaaacactgcttttgtccaatctgtgaatggacatttgtgcactcattgaggccaatggcaaaaaagggaatatcccaggataaaaactagtcagaagctatctgagaaaatgtttttttatgtgggcattcatctcacagacttaaacctttcttttcattcagcagtttggaaacactgtttttgtcgaatatgcaaaaggatatttcgtaaagcattgagacctagggtaaaaaaggacacatttttggataacaagtacaaagragttttccaggaaaccactttgtgataagtgtgttcatctcacagagttaaaccttgctttggattcagtagtttgtagagagtgtttttgtcca

SEQ ID NO: 410266 - DNA, 554 bp, Homo sapiens
cggcagtttggaaacactttttttgtactgtgaatggacattcggaagtgcactgaggctattgtgaaaaaaatcttctgattgaaagtagaaagaaacttcgtgagaaactgctttttgaagtgtgcattcatttcacataggtaaacctttcttttcattcagaagtttggaaacactgtttgtagaaactgcatagggatatttgggagygcattaacacctatgatgtaaaagaaaatatcttccaataaaaactagaaggaagctttctcataaactgcttgtgatctgtgcattcaaatcacagggttaaacatttcttctgattcagcatcttggaaacagtgattaatccattccacaaatggacattgggagctcattgaggccaatagcgaaaaagtgaacataccatgttcaaaactagaaggaagctatttgagaaactgttttgtgatgtgtgcattcatctcaccaagtaaaacctttcttttatttcagcagtttggaaacaccattctgtagaaacttctaagggatattcagaaaca

SEQ ID NO: 410267 - DNA, 529 bp, Homo sapiens
tcagcttttctccataggccacaatgggctcccaaatgtttcttcaccaattctgcaaaaagagtgtttccaaactgatgtatcaaaagaatgttttaactctgggagatgaatccaccyatcacaaagcagtttcacaaatagcttctttctagtttttatctgaggatattcgatttttccccaaaggcctcaaagggctcaaaaatgtctttttgcagattctgcaaaaagatcgttttcaacctgatgaatcaatggaaaggttaacctctgtgagattaatgcatgcatcccaaagcagttttacacatagcttctttgtagttttcatctaaggatattccgttttcccccaaaggtctcaataggctttgaaatttcccttcacagattctttaagaagagtgtttccaatctgctgaatcaaaacaaaggtttaactctgttagatgaatccacgcaacagaaagcagtttcacagatagcttatttctagtttttgtctaagtatgttattcttatcacc

SEQ ID NO: 410268 - DNA, 536 bp, Homo sapiens
tccacagatcacaaagcagtttcacacatagtttctttctaggtttaatctggggatgttcagttttttcccgtaaaactcaatggaatcccaagtcccttcacagattctccagagtgttttcaaactgctgaatcaaaagaaagttttaactctgtgagattaatccacacatcaaaaagtagtttcacatatagcttctttatagttcctatctggggatattcagctcttccacayaggccttaatgggatcccaaatatttcctcacagattctccaaaagtagtctttccaacttgttgaatcaaaataagctttacctctgtgagaagaccctcacatcacaagaagtttcaaggtatcttctttgttctttttatcagggaatactcagttttgccccataggcctcagtggacacccagatatccctttacacattctccaaaaagagtgtttccaacctgctgaatcaaaagaaaggtttaactctgtgaggtcaatccacacatcacaaggcaatttcacagata

SEQ ID NO: 410269 - DNA, 536 bp, Homo sapiens
tccacagatcacaaagcagtttcacacatagtttctttctaggtttaatctggggatgttcagttttttcccgtaaaactcaatggaatcccaagtcccttcacagattctccagagtgttttcaaactgctgaatcaaaagaaagttttaactctgtgagattaatccacacatcaaaaagtagtttcacatatagcttctttatagttcctatctggggatattcagctcttccacataggccttaatgggatcccaaatatttcctcacagattctccaaaagtagtctttccaacttgttgaatcaaaataagctttacctctgtgagaagaccctcacatcacaagaagtttcaaggtatcttctttgttctttttatcagggaatactcagttttgccccataggcctcagtggacacccagatatccctttacacattctccaaaaagagtgtttccaacctgctgratcaaaagaaaggtttaactctgtgaggtcaatccacacatcacaaggcaatttcacagata

SEQ ID NO: 410270 - DNA, 383 bp, Homo sapiens
tatcccaggataaaaacaagaaggaagctctctgaaaaacgaaattgagatgtgtgcattgttctaacagaattaaacttttcttcggattcagcagattggaaacactgtttttgtccattctgtgaatggacatttgggagktcactgacaccaatggtgaaatagggaatatcccaggattaaaactacaaggaagctatctgaaaaaaaacgctttgtgttgtgagcattcctttcacagagttaaaactttcttttcattcagcagtttggaaacactgtttttgtagaatctgcaaagggataattcagagagcactgagacctatggtagaaaatgaaatatcttcaaataaaaacttcagggatgctttctgaga

SEQ ID NO: 410271 - DNA, 593 bp, Homo sapiens
acaaacatcttcagtcaaaaactagaaagacgtttctaagaaactgctttgtgatgtgtgcatccatctcacagatttaaacttttctttggattcagcagtttctaaacactgtttttgtccattctgcgaatagacttttgggagctcattgaggccaatgttgaaaaagcgaatatccctggataaaaaccagaaggaatctatttgagaaaccgttttgtgatgagtgccttccttkcacagagttaaaactttcttttccttcagcagtttggaagcacagtgtttgaagaatctgcaaagggatattgcagagagcattgacgcctaagtttaaaaaggaaacatcttcagataaaaattagaaagaaactttgtgagaaactgctctgtgatgtgtgcattcatctcacagagttaagcctttctttggatttagaagtttggaaacactgtttttgtccattctgtgaatggacctttgggatctcattgaggccaatggcaaaaaagcaaacataacatgagaaaaactagaaggaagctatctgagaaacggctttgtgatgtgtacattcatgtcacagagt

SEQ ID NO: 410272 - DNA, 593 bp, Homo sapiens
acaaacatcttcagtcaaaaactagaaagacgtttctaagaaactgctttgtgatgtgtgcatccatctcacagatttaaacttttctttggattcagcagtttctaaacactgtttttgtccattctgcgaatagacttttgggagctcattgaggccaatgttgaaaaagcgaatatccctggataaaaaccagaaggaatctatttgagaaaccgttttgtgatgagtgccttcctttcacagagttaaaactttcttttccttcagcagtttggaagcacagtgtttgaagaatctgcaaagggatattgcagagagcattgasgcctaagtttaaaaaggaaacatcttcagataaaaattagaaagaaactttgtgagaaactgctctgtgatgtgtgcattcatctcacagagttaagcctttctttggatttagaagtttggaaacactgtttttgtccattctgtgaatggacctttgggatctcattgaggccaatggcaaaaaagcaaacataacatgagaaaaactagaaggaagctatctgagaaacggctttgtgatgtgtacattcatgtcacagagt

SEQ ID NO: 410273 - DNA, 519 bp, Homo sapiens
cagatttgaaacactgtttttgtgcagtttgcaagtggagatttcaagagtttgaggccaatggtagaaaaggatatatcttcgtataataagtagatacaatcattctcagaaactactttgtgatgtgtacgttccactcacagagtttaacctttcttttcatagagcagtttaaacactctgtttctaaagtctgcaagtggatatttggacctctttgaggccttcgttggaagcagggtttcttcgtataatgctagacagaggaattcttagtaacttctttgtgttgtctgtactcaactcacagagtttaaccttcctttagacagagcaggtttgaaacactctttttgtggaatttgcaagtggagatttcaagtggtttggggcyaatggtagaaaaggaaatatcttcgtataaaaactagacagaattattctcagaaagtactttgtgatgtgtgcattcaactcacagagtttaacctttcttttcatagagtagtttggaaa

SEQ ID NO: 410274 - DNA, 619 bp, Homo sapiens
taacttctttgtgttgtctgtactcaactcacagagtttaaccttcctttagacagagcaggtttgaaacactctttttgtggaatttgcaagtggagatttcaagtggtttggggctaatggtagaaaaggaaatatcttcgtataaaaactagacagaattattctcagaaagtactttgtgatgtgtgcattcaactcacagagtttaacctttcttttcatagagtagtttggaaacactctgtttgtaaagtctgcaagtcgatatttggacctccttgaaagctttgttggaaaagttagttcttcatataatgctagacagaagaattctcagtaatttttttgtgttgtgtgtattcaactctcagagttgaaccttcctttagatagagcagatttgaaactctctttttgtggaatttcaagtgtagatttcaagcgcttttgggacaatggtagaaaattaaatatcttcctagaaatactagasagaagcattctcagacactattttctgatgtgcacgttcgactcactgagattaacctttcttttcatagagcagtttttcaacactctgtttgtaatgtctgcaagtggatatttggacccc

SEQ ID NO: 410275 - DNA, 495 bp, Homo sapiens
ggaaacgggacttcttcatataatgctagacagaagaatactcagtaacttctttgtgctgtgtgtattcaactcacagagttgaacttttctttagacagagcagatttgatactctcttttcgtggcttttgccagaggagatttcaagtcattggaggccaatggtagaaaagaaaatatcttcgtataataackaaacagaatcattctcagaaacttctttgtgatgtgtgcgttcaactcacagagtttaacctttcttttcatagagcaggttggaagcactctctttgtaaagtctgcaagcagatatttggacctttttgaggccttcgttggaaacgggatttcttcatatactgctagaccaaagaattctcagtaacttctttgggttgtgtgtattcaattcacagagttgaacctttctttagaccgagcagatttgaaactctcctttcgttgcttttgcaagtggagatttcaagcgat

SEQ ID NO: 410276 - DNA, 495 bp, Homo sapiens
ggaaacgggacttcttcatataatgctagacagaagaatactcagtaacttctttgtgctgtgtgtattcaactcacagagttgaacttttctttagacagagcagatttgatactctcttttcgtggcttttgccagaggagatttcaagtcattggaggccaatggtagaaaagaaaatatcttcgtataataacgaaacagaatcattctcagaaacttctttgtgatgtgtgcgttcaactcacagagtttaacctttcttttcatagagcaggttggaagcactctctttgtaaagtctgcaagcagatatttggacctttttgaggccttcgttggaaacgggatttcttcatatactgctagaccraagaattctcagtaacttctttgggttgtgtgtattcaattcacagagttgaacctttctttagaccgagcagatttgaaactctcctttcgttgcttttgcaagtggagatttcaagcgat

SEQ ID NO: 410277 - DNA, 495 bp, Homo sapiens
ggaaacgggacttcttcatataatgctagacagaagaatactcagtaacttctttgtgctgtgtgtattcaactcacagagttgaacttttctttagacagagcagatttgatactctcttttcgtggcttttgccagaggagatttcaagtcattggaggccaatggtagaaaagaaaatatcttcgtataataacgaaacagaatcattctcagaaacttctttgtgatgtgtgcgttcaactcacagagtttaacctttcttttcatagagcaggttggaagcactctctttgtaaagtctgcaagcagatatttggacctttttgaggccttcgttggaaacgggatttcttcatatactgctagaccaaagaattctcagtaacttctttgggttgtgtktattcaattcacagagttgaacctttctttagaccgagcagatttgaaactctcctttcgttgcttttgcaagtggagatttcaagcgat

SEQ ID NO: 410278 - DNA, 495 bp, Homo sapiens
ggaaacgggacttcttcatataatgctagacagaagaatactcagtaacttctttgtgctgtgtgtattcaactcacagagttgaacttttctttagacagagcagatttgatactctcttttcgtggcttttgccagaggagatttcaagtcattggaggccaatggtagaaaagaaaatatcttcgtataataacgaaacagaatcattctcagaaacttctttgtgatgtgtgcgttcaactcacagagtttaacctttcttttcatagagcaggttggaagcactctctttgtaaagtctgcaagcagatatttggacctttttgaggccttcgttggaaacgggatttcttcatatactgctagaccaaagaattctcagtaacttctttgggttgtgtgtattcaattcacagagttgaacctttctttagaccragcagatttgaaactctcctttcgttgcttttgcaagtggagatttcaagcgat

SEQ ID NO: 410279 - DNA, 624 bp, Homo sapiens
tgaggccaatcttagaaatggaaatatcttcgaattaaaactacacagaatcgttcgcagaaactagtttgtgatgtktgcgttcaactcacagagtttaacgtttcatttcatagagcagtttggaaacgctctctttgtaaagtctccaagtggatatttggagctctttgagcccttcgttggaaacgggacttcttcatataatgctagacagaagaatactcagtaacttctttgtgctgtgtgtattcaactcacagagttgaacttttctttagacagagcagatttgatactctcttttcgtggcttttgccagaggagatttcaagtcattggaggccaatggtaggaaagaaaatatcttcgtataataactaaacagaatcattctcagaagcttctttgtgatgtgtgcgttcaactcacagagtttaacctttcttttcatagagcaggttggaagcactctctttgtaaagtctgcaagcagatatttggacctttttgaggccttcgttggaaacgggatttcttcatatactgctagaccaaagaattctcagtaacttctttgggttgtgtgtattcaattcacagcgttgaacctttctttagacc

SEQ ID NO: 410280 - DNA, 624 bp, Homo sapiens
tgaggccaatcttagaaatggaaatatcttcgaattaaaactacacagaatcgttcgcagaaactagtttgtgatgtttgcgttcaactcacagagtttaacgtttcwtttcatagagcagtttggaaacgctctctttgtaaagtctccaagtggatatttggagctctttgagcccttcgttggaaacgggacttcttcatataatgctagacagaagaatactcagtaacttctttgtgctgtgtgtattcaactcacagagttgaacttttctttagacagagcagatttgatactctcttttcgtggcttttgccagaggagatttcaagtcattggaggccaatggtaggaaagaaaatatcttcgtataataactaaacagaatcattctcagaagcttctttgtgatgtgtgcgttcaactcacagagtttaacctttcttttcatagagcaggttggaagcactctctttgtaaagtctgcaagcagatatttggacctttttgaggccttcgttggaaacgggatttcttcatatactgctagaccaaagaattctcagtaacttctttgggttgtgtgtattcaattcacagcgttgaacctttctttagacc

SEQ ID NO: 410281 - DNA, 472 bp, Homo sapiens
ctgactaaacagtacacagcatctctattaattttcacaatggcacctgagcgcatcttcaattttacctcaaaataaaaagcttaatttaaaataaaacatctttctccataagatcctctggaaaaaaaaggaaaaaaaaaaccccgccatactgacatataattgattgaaatgctcaaatcaatcagttcagtcaattttgacactaayacatgcatgcatgtaacccattcccctaccagaaaatgaaacatttctattgctacagaaagctgcttctaaccatttccagtcaaccctccccgaagagcaacgaccaccaatctggttttcatattcatgtattatttttgctagaaactgtctacttctttgtgtcctggcctctctcactcagcatgacactttttatatttgtctatgttgttgtgtgcatcagtagtttggggctttttaatgctgtgtatgt

SEQ ID NO: 410282 - DNA, 576 bp, Homo sapiens
gaccctccgtctgttgcagtccttcagtgtcagtatcccttcagataagataagatgtgttcccttccacacgtatcccaaatagagttgtctcttctggaaatccctcttctcaacctcaaagggctacagtgacagatatccttcttttcttcgtttctgtcataacaacttccagatgacacaactcatttgcttgaagattttttttttccaagacacagccaacattcccttaccacgtgagtgggctgttttgggggtccatatgcatctttgataaaattctgggtgacttgggacttctgccttccataagttctgcttccctgaaatggrctaagcaacattaattagactagctgtaaaatatccagaatattggtttccctaacaagtattgattcctgggtgaatgtggaagacactgacaatttcacagaagaattttctctgcccttacagaatgttcaatgtagtgaggaataccaacatattaaatgaaccaaaatctataaatccatccatacacacctctgcacatgaaaagacaatcacccagatgtagagggaatt

SEQ ID NO: 410283 - DNA, 576 bp, Homo sapiens
gaccctccgtctgttgcagtccttcagtgtcagtatcccttcagataagataagatgtgttcccttccacacgtatcccaaatagagttgtctcttctggaaatccctcttctcaacctcaaagggctacagtgacagatatccttcttttcttcgtttctgtcataacaacttccagatgacacaactcatttgcttgaagattttttttttccaagacacagccaacattcccttaccacgtgagtgggctgttttgggggtccatatgcatctttgataaaattctgggtgacttgggacttctgccttccataagttctgcttccctgaaatgggctargcaacattaattagactagctgtaaaatatccagaatattggtttccctaacaagtattgattcctgggtgaatgtggaagacactgacaatttcacagaagaattttctctgcccttacagaatgttcaatgtagtgaggaataccaacatattaaatgaaccaaaatctataaatccatccatacacacctctgcacatgaaaagacaatcacccagatgtagagggaatt

SEQ ID NO: 410284 - DNA, 576 bp, Homo sapiens
gaccctccgtctgttgcagtccttcagtgtcagtatcccttcagataagataagatgtgttcccttccacacgtatcccaaatagagttgtctcttctggaaatccctcttctcaacctcaaagggctacagtgacagatatccttcttttcttcgtttctgtcataacaacttccagatgacacaactcatttgcttgaagattttttttttccaagacacagccaacattcccttaccacgtgagtgggctgttttgggggtccatatgcatctttgataaaattctgggtgacttgggacttctgccttccataagttctgcttccctgaaatgggctaagcaacattaattagactagctgtaaaatatccagaatattggtttccctaacaagtattgattcctgggtgaatgtggaagacactgacaatttyacagaagaattttctctgcccttacagaatgttcaatgtagtgaggaataccaacatattaaatgaaccaaaatctataaatccatccatacacacctctgcacatgaaaagacaatcacccagatgtagagggaatt

SEQ ID NO: 410285 - DNA, 596 bp, Homo sapiens
gccacagtcctgcccatcttcaatcccactgcccaccacttttggactcttatttcatgcatttgtaatataaaatttatctttcaggtgtttgagtctctgctcatgctattccttctgataggagtgctcttcttacatgtatatacctaggtgatgcttatttcattcttctagaagcagcagggatattatctcctccaggaaggctaactataattctcagtttggttctgtgtctctcctctctacttgattatgtgcataccagcatatcacacagtacttattggattgaaattctcttcttcatttcttccttctgcaaacatgtactgggtcactactctatggatagagcttgtctagatgctggaataaaacataaaaacaaaacaaagaccttrgtgtaatgtactatacagggaagggaatcagataataaatacatatgtagtaagccaggtggtggtatgtgctatggtaatggaatggagggatgtgggctgagatttcaaacagaattaatggtcagggagagccttagtaatgagatgctatcggaacagagatgattaaactgctggaatgagcca

SEQ ID NO: 410286 - DNA, 553 bp, Homo sapiens
ggtctgacaggtggccagggccagatcacagagggtcttgctggtcacagtaaggactttgtcttcttctctgagtaaaagggaagacagtggagtttttgagcagaggagtacctaaccaactgatatttaaaaaatactagtctatcaaagatattatggaggaggataaagactggagtagaaagaagataggagattatttcagtaattcaggagcaccgttcatgctgttaaaactggggagcatgagaaatgtgcagatggggaatatttccaaagatggggaaaacaggattttttcattgattgactaagagtgagaataagaataagaacgagaaagtayttaaggatgatcacaaggtttttagcttgagaaagaatagaagaatggaattgccatttacagaggtaaagaaggctgtgagggacacaggctggagagaggggttagaaaatcaagcatttgcttttggacatgttaagtttgagatatatattagacatccaagtggggatgttgagtaagcagttggatatgtgggtttgg

SEQ ID NO: 410287 - DNA, 553 bp, Homo sapiens
ggtctgacaggtggccagggccagatcacagagggtcttgctggtcacagtaaggactttgtcttcttctctgagtaaaagggaagacagtggagtttttgagcagaggagtacctaaccaactgatatttaaaaaatactagtctatcaaagatattatggaggaggataaagactggagtagaaagaagataggagattatttcagtaattcaggagcaccgttcatgctgttaaaactggggagcatgagaaatgtgcagatggggaatatttccaaagatggggaaaacaggattttttcattgattgactaagagtgagaataagaataagaacgagaaagtacttamggatgatcacaaggtttttagcttgagaaagaatagaagaatggaattgccatttacagaggtaaagaaggctgtgagggacacaggctggagagaggggttagaaaatcaagcatttgcttttggacatgttaagtttgagatatatattagacatccaagtggggatgttgagtaagcagttggatatgtgggtttgg

SEQ ID NO: 410288 - DNA, 503 bp, Homo sapiens
catcacttcttgtgatagagaaggagttcacgttctctgtgtatgaatgagtccattcatctgatttggaatactgataaactgattttgtctactctttcaacatgtgtctttcctttctccctccytcctcttcctacttttttttttttttttttaactacggggtccccattcagaggaagtaggccctgactgctttttaggacaagtgacatgagctctgtaatatgaaacgcatgtcctgtgctgtcagacactacttccgggggtatcttcctattcactctcatgttgagttgctgtaagtttggcctgtaatgagaggtgggaggtaggatagatgtctatagaatggagaatttgttaagctcttgcccttgatggggaagagagctgtgataatccctgcagaacttgtggctagagatgtgatccaggcagctctagttcagatggcaaaagggtgatttaccagagagctgcttgtttcccaattagta

SEQ ID NO: 410289 - DNA, 588 bp, Homo sapiens
ttcggagtggaaatgatgctgaaactccatctggcagagggaaggagagagactagcaaggtctgctgggtggagggtggggctccaagggagggactgatacctgcgtgtcctgcccaccctcctaacctgagtctctctcgggaccaccctaatgactagtgttacctctgaccagcgtctttgctcctctagggaccacccttagacgacagggctcgtacctactaaatgcctcttatgattatctstttaccggtgttctcctcagcattacctatggcaacgagaccaagttcagacaggaaaacataatctgattagttctccaagaatgaagaagacaatctgttttcattttgtaacaaacccgaacccagccttcattcattcaacataaatgaaactacatattcccttggcgtgaaatttatttcttcctaattctatcctctatcaatctctaaaccacatttcagacaaatggtagacttcataactctttaaaaaatcttccagaatagatttatttaaactctgtcaagaaatcaatgcgattttatttattaacataagtaaactactatg

SEQ ID NO: 410290 - DNA, 588 bp, Homo sapiens
ttcggagtggaaatgatgctgaaactccatctggcagagggaaggagagagactagcaaggtctgctgggtggagggtggggctccaagggagggactgatacctgcgtgtcctgcccaccctcctaacctgagtctctctcgggaccaccctaatgactagtgttacctctgaccagcgtctttgctcctctagggaccacccttagacgacagggctcgtacctactaaatgcctcttatgattatctgtttaccsgtgttctcctcagcattacctatggcaacgagaccaagttcagacaggaaaacataatctgattagttctccaagaatgaagaagacaatctgttttcattttgtaacaaacccgaacccagccttcattcattcaacataaatgaaactacatattcccttggcgtgaaatttatttcttcctaattctatcctctatcaatctctaaaccacatttcagacaaatggtagacttcataactctttaaaaaatcttccagaatagatttatttaaactctgtcaagaaatcaatgcgattttatttattaacataagtaaactactatg

SEQ ID NO: 410291 - DNA, 525 bp, Homo sapiens
tgctgggtggagggtggggctccaagggagggactgatacctgcgtgtcctgcccaccctcctaacctgagtctctctcgggaccaccctaatgactagtgttacctctgaccagcgtctttgctcctctagggaccacccttagacgacagggctcgtacctactaaatgcctcttatgattatctgtttaccggtgttctcctcagcattacctatggcaacgagaccaagttcagacaggaaaacataatctgattagttctccaagaatgaagaagacaatctgttttcattttgtaacaaacccgaacccagccttcattcattcaacataaatgaaacyacatattcccttggcgtgaaatttatttcttcctaattctatcctctatcaatctctaaaccacatttcagacaaatggtagacttcataactctttaaaaaatcttccagaatagatttatttaaactctgtcaagaaatcaatgcgattttatttattaacataagtaaactactatg

SEQ ID NO: 410292 - DNA, 552 bp, Homo sapiens
attttaattttaatttgcatttccttcatgaattatatggttgaacaatttttcatatgctgcatatcctcctttgtgaagtttctgtttaaatcttttgcccacctgtaagaatggtttgtctgtttttttttctgataaatttttaggagttctttgcacatactggatacctaygttgcaagtaacttctactattttgcatcttatctttcccatctcttagtggtgtcttagatgaatggaagtttctaatttcaaaggaataaaatttatgatcttttcctttatagttagtgtctttgcacacattttttggacgattttaaagaaatcttgtcgtgaaagtattttctagtttgtgaaaatattttcgtatgttattttctagaagttttattgttttattaaagtcaggattcattttaaaattagtttcattccatgtggatgtctaattgctatggcactacttattgaacaaagaatcctttcattattgcactgcaatgtaaattttatcataaattagatgaccatatgtgtgtgaat

SEQ ID NO: 410293 - DNA, 576 bp, Homo sapiens
gcttggtaattgtgacattgaagagaggaggctttgttttcttacccgcatttgatgcattgtggaatggagagacccttagatataattttattaagargcttggacctcagtactctgagggaacccaggtgcaggagtgcactgggacctcatcaagactgaacaggctcacagggaacttggggctttttgtaccttcccctccaagttgtcattcttagagtgacttattacatatctaggatgcatatatatatatatatatacacacacacacacacatatatatgcatatatatatacacacacacatacatgcacatcaagttctgagatatatatatatatatcagatatatgtatctcaaaacttgatatgtgtagatagatacatagatatagatatatcctagatatgtgtgtgtatatatatatatataaaatatacttgatatgtgtgcatatatgtacacatatcatatagatatatatcagcacactcttcataattgtggaatgtgttggaaaaatatgattaaaactaaaatcttcttccaacccagaaactctctc

SEQ ID NO: 410294 - DNA, 576 bp, Homo sapiens
gcttggtaattgtgacattgaagagaggaggctttgttttcttacccgcatttgatgcattgtggaatggagagacccttagatataattttattaagaagcttggacctcagtactctgagggaacccaggtgcaggagtgcactgggacctcatcaagactgaacaggctcacagggaacttggggctttttgtaccttcccctccaagttgtcattcttagagtgacttattacatatctaggatgcatatatatatatatatayacacacacacacacacatatatatgcatatatatatacacacacacatacatgcacatcaagttctgagatatatatatatatatcagatatatgtatctcaaaacttgatatgtgtagatagatacatagatatagatatatcctagatatgtgtgtgtatatatatatatataaaatatacttgatatgtgtgcatatatgtacacatatcatatagatatatatcagcacactcttcataattgtggaatgtgttggaaaaatatgattaaaactaaaatcttcttccaacccagaaactctctc

SEQ ID NO: 410295 - DNA, 599 bp, Homo sapiens
ggtacctatgatattatagtgactcaggaaaattgctgcttccctgtgacagcactcatacccacacctctaatggacaggaagcactgtgttttcccacaggcagtcagcagcatcaaaccagattcttagccacagggcaccagtgggtcatggaaagggcatagtgcacacaaaaggtaactttaatgaggtgtttctgctcagaggctcctccagggtaacttgatgtaaatttaaaagacaaagggaaaagaagtcaccatttgggcagtggcacagtgtctgtrtacttactgctcagtctagttttttccttctacttcttctagatctgtcatcttttttttttctcagaaattttcaggagcagaatagaatggcaaaagtgaggacttaatggggagaactttctggggactaaaacctcagaaaatcctgcctttggaaaatctagttactttcccacatgttgtcccttgaaatatctgaattaacaggtgactatatgcctgggattcctgcctccgtctggtctactcctgttgtcctggtgtaatgataaatagcttcccatttcactctcaaaagtgaaattc

SEQ ID NO: 410296 - DNA, 599 bp, Homo sapiens
ggtacctatgatattatagtgactcaggaaaattgctgcttccctgtgacagcactcatacccacacctctaatggacaggaagcactgtgttttcccacaggcagtcagcagcatcaaaccagattcttagccacagggcaccagtgggtcatggaaagggcatagtgcacacaaaaggtaactttaatgaggtgtttctgctcagaggctcctccagggtaacttgatgtaaatttaaaagacaaagggaaaagaagtcaccatttgggcagtggcacagtgtctgtgtacttactgctcagtctagttttttccttctacttcttctagatctgtcatcttttttttttctcagaaattttcaggagcagaatagaatggcaaaagtgaggacttaatggggagaactttctggggactaaaacctcagaaawtcctgcctttggaaaatctagttactttcccacatgttgtcccttgaaatatctgaattaacaggtgactatatgcctgggattcctgcctccgtctggtctactcctgttgtcctggtgtaatgataaatagcttcccatttcactctcaaaagtgaaattc

SEQ ID NO: 410297 - DNA, 570 bp, Homo sapiens
tactgtccttgcactgttgttaaataagacaagatatggttcatatccagatgaggaaaaatattaagagatctacttggtaaggtagatgtaatatgagtacaatgatgctatggtacagtatatgtgttataattaagtagttccaaaatgtgatatcagcacttagagagtagcaattatgtgtgtgtgtatgtgtgtgtgtgtgtgtgtgtatggtgggtttggtagaggaagtttgagtcgaagaagttggctattggcaaaatttcttccagcaagaattctaggctgaggtwctggcatgggttgcaatacctggaagaatcagtgtgtttcacaaaggtgagtacccacacccatacttctttctctactgctcccttttttggcaacttagaagtattaaagtagcaaaagtaaaacctcactttccttccagaatgttacattatcttctcttttacagcaacatatctgcttcaattttctcagttctttgtcatcttttatctccaaataaatctgtattcacatttccctgtttctctgaccaaggatagcgttccc

SEQ ID NO: 410298 - DNA, 616 bp, Homo sapiens
agagagagagaaagtagatcgatagctttaaaaagatctgtttatgttacaaaggtttagaaaagagacatttaaaccagaatacaggatttaaattggatagccagtgaaggtaacatttgaattgagtttagaaagatgataagtggacagtaaataagggtgtttgctgaatataataaataaccatagtattgaattattacataataataaaatatccattgattcatcctgatataaataaattaatgaataaataaatgagagaatccttycttacaaaataattttaaatgataaatatgtggaatcaaggacacagaaaatcactattagaacaccatagagataatcaccttaggcaaagtccactgatgaatgctaaaattagagatggaacttttaaagagaaatgagatactcaaggcctctcctctgaaatacttataacttactgtggtggtgtaacacatgttcatacactttttgataattttttttttctagaaggtaaagcttaattttctcccctcaagtaatgtctgaatttagttacttccatgaattaagtatggaaataaactgtcttgttttgctctaactgcataacaaa

SEQ ID NO: 410299 - DNA, 533 bp, Homo sapiens
ttttaaggcatattcacaccataagcaatctccttttctccgttgtccagtaacatatttcctatttccatcagagacctcatcagaatgacctttaccatctatatttatatcaatattctgttcatgattatttatcatctaagaagttggaggcttcctgtctagctctcctcccttttttttctgagtcttcaccagaatcaccaagtaatgtaggctttttytagcatacacctaaagactcttctagcttctaccaattaccctgtttcaaagctgcttatctaattttacacacatattacagcagcaccctacttctcattacaaattacttggtgtgctcaggctgccataacaaaatactatagaatgggcagcttaaataagaaaaaaaattatgtttttgtagttctgtaggctagaagtctgagatcaatatgttggcatgtttgacttctggtgagggatctcttcctgatttacagatgcctccttcttgtgtatactcaaatgatggagagaggaag

SEQ ID NO: 410300 - DNA, 618 bp, Homo sapiens
tacttttctgataaaagcaaaagcatgcaaaagttatactatgagaacactgaatacatatagaaaaattagagtatccatatcaatattaggcaatgtaaacgtcagagcaaggaatattccagggatacagcagtacttctcataatgatgaagagatcaatttatcaagaggctaaaacaaaactaatgtgtatatacctaataactgagattgaaattattaatgaggcaattaaaagaatagaataatatcatttataatggamtattttaatacctctctcaataatttattaaaattacttactgagaaatttagtaaggatatacaacttttgaacacaactgttaagcaaaccaatccaattatttatggataactccaccccaaaacactagaacacatattcattttaattgtacaagtaatattcaacaagataaaacatttaatgccaaaatgattttcaattaatgtaaaatgactgaaattattcacagtatattgaactagaaatcaataacatatttgtcaaaactcacaaatatcagaaatgtaagtaaacatgtctaataagtccaatatgtctaatgtctaataagtcaaaaatcata

SEQ ID NO: 410301 - DNA, 529 bp, Homo sapiens
aagaagaaaacagaaaagcagctaagccattttcccttggctgaataggtagtcagttctgctataacgtgacatgtgcattttaaacaattcttttgctacacaatattgcataataaaaatcacaaggattatggaaatatggagaaacaacacaaaaattttctcagtgacatactttttaaaaggtagaatcctaataaaaattacagcaaattttatttatgttaagtagttaagaaatgcaaaagtagtacataaatatattagaatgccttggaaaagayctgacacttgctacaggaagtgctgatgttaggtggctcatttttctgaaatgttggaaggagcattacttaaagttggatgtgaaatttcaacacatccaacacatgcggatgggaatggttaattgtcctttgcattagtaccaaacattacaattgcagcaaatagtttttatttttgacactgaggcatgattttattctttcgggatgtaatctcttgagtcatgcatctctgagtg

SEQ ID NO: 410302 - DNA, 571 bp, Homo sapiens
gtgtgtcttttgtgtattcctacacagctcaattcagctggatgtagttatctgcattcaactagggtttatcagaaacaaatcatgcctaagcaaacatgaaattttcattatatttaaattgttgactaatatatcaattgcatggagtaaattgttttaaaacaagcattatagcagaactgactgyatatgcttgtgaagataaaatataaaatcatagaagctgtggctgttggagagtaaatattgaaaatatgccttagaaaggttatagggctgcatctgctattatatatgtcatttatttcaatgtgttttataggctgaagtcttcttattggctgacagagaatttattttccagataaatgcacccaagttaaagatttgcatttgtatcttctttttttgcttagcacaaatcactttgcacctttggttcttggcaaacagcatcagttgaagaaattttgctggcaacatttgacaaatatacccatttaaatggttcttatatctaataccatattaaatattttctcctaaaaataatatcctttgttccacc

SEQ ID NO: 410303 - DNA, 557 bp, Homo sapiens
taatacctatttatttcacctgtacagttttgattttgtgtgtgtgacataatttgtttgccataagaagggcaatttttctgctatttgtttgtataatttattttacacgaaagagaaaatgtcatcttatcattccttcagtattaatttgtattatatggcataagcatatatgctcatttatgttctgatattatttacttgattctgctactctcattttcctctttggtaaggttagcccataagcagcagggattctcttctgattctccatgccatacagcttacctgggcaatctctccatgtgataaaggcccaccccattttggaattgtgctatttagttgaatttatatgaaacatttcatttaactctcaaaccaaattccctgcaacttttactttgttacaaatgaaaatgakttccatttgccattcccacctttccccccttaattttggagaaagaagacatgttctttatttgattcgttttgagacaactttttaattttgtcagtttgatgcctgtgtggtgcatctcaatgct

SEQ ID NO: 410304 - DNA, 555 bp, Homo sapiens
aaccatcattttcagcaaactaacacaggaacagaaaaccaaacactgcatgttgtcacttataagtgggagctgaacagtgagaacacgtggacacagggaggggaacatcacacactggggcctcttgggggtggtgggttaggggagggagagtgttargagaaatacctaatataggtgacaggttgatgggtgcagcaaaccaccatggcacgtgtatacaaaaaaaaaaaatccctagcaactgagaaaataagataatcattaactccaagaaaaataaaatgtcataaacaaaaggaaatataatcataggttatttcctggctagctgtaatatacctaagtggtcataagaaggtaaatactgaattttgatctaactaaaacttataactatattaggggagtgacaaaggaaggaagtttgagggaagggtagaaaagaggtaagagaactaaaagatatccttatctgccataataggaagttaatagggaaggtctaaaacagaaagtttaggaaatagcagtataagcatgttacttaga

SEQ ID NO: 410305 - DNA, 532 bp, Homo sapiens
gcagaagtctgccccagggtcagagccctggcagagagcctctgctagggcagccctgagaggaaatgtggggttggagcccccacacagaatacccactaaggcactgcctaatggagctttgggaaggggactgtcattatccagaaccaagaatggtagagccagcagcagcttgcatcctcagcctggaaaagccacaggcactggactctagcccatcagagcagccatgtggrctgcattcagcaaagccacagaggcagagctaccaagaccctgggagcccatccctgcactagtgttctttggatggggaacatggtgtcaaaggagattattttggagctttaagatttaatggctgctctgctggattttggacttgcttggggtctgttgcctctttcttatggccgattcctcccttttaaaataggaatgtttacccaatgcctgcaccaccattgtgtctgggaagtaaataacttgtttttgatcttacaggttcataggtagaagaaactcatct

SEQ ID NO: 410306 - DNA, 539 bp, Homo sapiens
gttgtctaaactaaaataggtatctcaggcttaaaaaacaaacaaacaaaaagaacacttgatttattttcctccaccaaggaactagccaaacaaacaaacaaacaaacagacctgctactcctcctcttgaacccatctttgcaaaattatgactgagacagtgaaagagatctaacctagctgactccatcttgttactaacctttaagctgtccttgttcatttctgggcataggctgaactaactttgggagaaacttagtttatagtttaaaacagagatgataacagccctttcccaaaacaaacctccttcttccctgaggactagactgcctttgtaggactaacaaattagccacaagattcgaaattatggtttaggagtcaygcagctggagactacaagattctgaccctccctaaactgctcctaagatcattgcttgagatattttgcagaccctgcacatgatggatcagctggcaccacccagatcaataaattggctcatctaatcttgtagtccctaccc

SEQ ID NO: 410307 - DNA, 636 bp, Homo sapiens
aatgttttagcctttccagactccgtacaaatgactaaatgaagattggatcgtattttcaggcactgcaccaatgatagaaaattctcaacttggggtcaaaagcaagggcagctttcgtttttcttaaatatgcttctgatcaaatatctaaagtgttgaaagaaacctaacccttaatagcacaatttacaggagtgcataatttcctaggactgacatttagttccaaatgttttaaagtcaattacaacatcatctcaccctatagtaagctgtccatatattctcattattatttttaaattatttctattaaatcagcttcatttgaactttaaccataaatgcataaatcgtttttgggaagggggtacagtcgcgcttgaagagcaarggattttgtcattgcgggagttgtctggcttcagaataatattggaataatatattttcgtgtttcatattttagaaaaaccttttacatatgtgctcccaaaccaatctttttttattttttattttttttattattatactttaagttctagggtgcacaacttgcaggtttgttacatatgtatacatgtgccatgttggtgtgctgcactcgttaactcgtcatttacattaggt

SEQ ID NO: 410308 - DNA, 609 bp, Homo sapiens
tacatgacctcgcttggagtaatcaagttttacacaaaagtttagtaaaattattatatagggaaaatgtgtcctcagcactcccaatcccacatttctacatggttttcctattttgttaacctcatcttaaacttgcagattcccagtgatagtgtcccattttctcttattaaagtgtatccaacagactgaggcattaggaacgtgatgtgatggctttcccagaagcatttgcattttaacagagagatgtttcaaaaattatttgamccaagaggaaaaattacacatgtataattcgaaggaaagtacctacagacttttccatcatctctgactgcacagagatgcctgtgtaaccaaagccatttccctcttttcctgctaagtaaagcccaattttcatagaaagggaatgtgctcagccacaggcaatgagtaacaatttatctaaaccagtcatgccaatcccattccagttcaccaattaaagttctaagagtagacatataacgcagtttccacaaatataaggagaagtctcctagtgattttgggggaaaatatctcccctagaaatgagggggaaggtattttttcctttca

SEQ ID NO: 410309 - DNA, 542 bp, Homo sapiens
gcggcagtgacacctgaattcctgggatgggggtggttggcgctcaaaaatggttggagtctgacaatttggaaacgaagcagctacctttgaatatggaagaggattgtggttatgttaatattttacttctgaatatgcactttcgccaaaaggaaaaatttggatgggctatagatttagttggaaaaagttggggtattgtaacaagacaaagctgggtttacatgtcatctcttctattctactaaatgacattaggcaagttagtcaatgtgagtccttttcttcatttgtaagatgtagataggaaaatttatcactctagtttgtcatagtgattaaattagactatacaaagacttagaaggcatttgagtgttagcgagctttatactttccagaaatctagtgaataaggataaccaaggaaagactgggtagattttgtgttcgattctatgagacttctaggctagcagcctggaattcatgtgtakttactaaagcatgccagctccgtagtattttatgatttactg

SEQ ID NO: 410310 - DNA, 585 bp, Homo sapiens
tttttgaataaatagaattatgaatgtattttgttttattttttttcatgtacatattttctgatttttctctaatgaacatgtattcattggcttagaattaatgtattggcttatacgygttaaattgacaaaacaataaaattgaacccaaatgtaagaagataaaactataacactcttagaagacttaggagttagtctttatgattgactttttagatttaataccagaagtacaagcaaccaaaggaaaaaaaaaagataaattgaacttcattcaaagtgaaacattgtggtatgaataataacatcaggaagttaaaagaatccacacaatgaaataaaatgttatcaaaccacatatctgataaggaacttgtatccagattacataagtatcacaattcaatgacaatataacaaataacccattaaaatgggtaaagtgttagacatttctcccaagaagttatacaaatgattaataagcatcatcatttactaaggaaatgcaaattaaactacaatgagataccccttaaaatccactaggatggttataatgtaagagatagacaataa

SEQ ID NO: 410311 - DNA, 517 bp, Homo sapiens
ttgagatcagactagagttaagagctcttgagtcatgttagtgtttttgccttgctgcctgaacattaatgtattgctggtggatgatatcagaatgtggcctggggagtaaccaatggggaacagatgatcaggaggctgcctgcaacatcagagggttgtgagagtctgagctacagtagcactgtttaccttccaagtcaggaggacatttttcaatttttaaaattaaattcaatgtctctgatttcctgaaaaagtgaaactaaccatattcagatttttcctgaggaaaaaatcacttaaaatattgaaattgtctactttaaaagtttaaacrttgtaaatctaagattttattcaataaatgtgaaaaatactaaaaaattattgttaattgattttagttaaagaaaaaggtaaataaacaaaagtgaaggaaaaggggtgagttaaaaggaaatatatactgagaataacagatatgagagagaaagacaacgaatgagattatata

SEQ ID NO: 410312 - DNA, 614 bp, Homo sapiens
ctatggcttccttgggcccccagagggctgggagtcataatttggcacaatgagtgagagctgagagaaagtgggcctgggattaaatcctgggcagagaaattcccaagggctggcagaggtgagaggatggggtaggagccttgggctctgctcctgctgcatcctgaactgggatacctcaactgcagtgtggcgactgtgctgtgagctctagatcacggctggcatcatgggcgtgtgacctgtgcagttacacaggtccttgctcttggtttcaggctctgctgccgttgttgtttaggagttagtagttttttaacaaggggcctaacactttcatttttcactgggtcttgtgtagtcatggcttcaggcactgtggagttgtcactaatgtactgcaccctttggatgatgaagatgaggcacaagaggctgaggagttgagactctgtacaarttcctaccttccccatggaatcctggagacttctggctttgggcaagtctcctttccgaggggttgctccctattccccaggaccctatacacacctgagccagtgtcctccacggtgattcatgcgatcctttcaggcagttccctcttt

SEQ ID NO: 410313 - DNA, 528 bp, Homo sapiens
cctcagagtgtcccgctgcctccttcttcctgtccctttcctctgggctggggcagcccttcctgactctgtaacacatgcctcactccagctccaagtcaggtcacacctcggagccctgcgtcctgtatccccgataggctcctgaaggctgggcctttccaggatggccttctggcctgtctctgccccaaccctgaccctccctacctccatagaggtgagcaggaagactggcacttacatgacaccgggcttggagcactggctgctcgtctcaaagtagtcagctatgaaattctgtggaatctgccgggaggtgtagctgaagcagcaggcggtcggcgtgtcagcagcaactgyggagaaaggaagagaataagcccgagtcacagctcagaagaaaaggccaggcagcttctgatccccgagcagttgaggaaggcaggcttgctcagaccaagtgactggaaggcatttgggcatttttgctgagaaatgtctctttgtttctgtctgtatccttct

SEQ ID NO: 410314 - DNA, 528 bp, Homo sapiens
cctcagagtgtcccgctgcctccttcttcctgtccctttcctctgggctggggcagcccttcctgactctgtaacacatgcctcactccagctccaagtcaggtcacacctcggagccctgcgtcctgtatccccgataggctcctgaaggctgggcctttccaggatggccttctggcctgtctctgccccaaccctgaccctccctacctccatagaggtgagcaggaagactggcacttacatgacaccgggcttggagcactggctgctcgtctcaaagtagtcagctatgaaattctgtggaatctgccgggaggtgtagctgaagcagcaggcggtcggcgtgtcagcagcaactgtggagaaaggaagagaatragcccgagtcacagctcagaagaaaaggccaggcagcttctgatccccgagcagttgaggaaggcaggcttgctcagaccaagtgactggaaggcatttgggcatttttgctgagaaatgtctctttgtttctgtctgtatccttct

SEQ ID NO: 410315 - DNA, 632 bp, Homo sapiens
ccactgcttcaaggcaagaaagctccactgcttcaaggagagagggccccactgcttcaaggaggaagagctatcaatgggccaagttttgtgacagccactcttaccatcagccctagcctataaagaaggcgggaccactaacttcttagaaatgctggtgctcctctcaccagggagtcctggtggctttggtgaatagtgcattcccatggaacataatctggtgagtcttctggcctcatgtaatgtatccactccagcatgaccacttccatgactcttttaatcccttccttctccatctgtcatggcaattcgggtattttaacttcactcggcatgagccattgctttctcaggcttctggagcctttctgacaacaaatctgtaccaacccctggggtccttctcaagaggttacagcctatatccggaaagaatactcccaagtcagtaagttrtctcttatcgaggcttatattccaactccttttatcaagcaccctcaaaatccaaacccaagtctacttcccctgctcaggctgacacatgcttgctaaattctgctagtgctttagagtatagtcccttttctcccttattaggaatataatttattgacacaaga

SEQ ID NO: 410316 - DNA, 536 bp, Homo sapiens
caatatttgcaacttcatgcatgtacacagtgatcaaagtggctattatttaaaaaaatcaaaagtcccttatacagtcttatcattacttttcagttagtattgggtatttgaaattacatgctgaaacacagaataacctttttagagcctaggaccactcaggtcttgctctgaccctggttggagctcatccttcgggaaggagacaaaagcccccaaatttaccagagaatggaagaaagatgggatgatccctcctcagcttttgcattcctccatttttgatccttctaccccttgactcataatttagacacaagtaaatgtctcgcctgcttgggtttgaggtaaacrttagttcagggttaattggatgagctgaaacactctgagcatggagagaaaggatctagtcatggccaaccactaatcccacagcccccgccactgcatggtagctgtcctgccctgagattaatccccaatgacagttttttcctgatctcctccactgtgctgaattccattctatt

SEQ ID NO: 410317 - DNA, 524 bp, Homo sapiens
tcttacttctaggcatttgtctctcatggttctttctatccatggagtttgcaaactccactttctcttctgctttctctctcctgctttctctgtctgcttttcaagatttctgtcaaatgctacatcttctccgatcctcccagaccaaagtggcccatctccacctcctctgacacaccacagcctrtgacaccctcattccacatttattgggcactgctcccagtgccagatactggggtaacctagacatgtaccatcccagccctcaggagcttacattctagggggtggaatgggaaagggggaaatgatcctcaagcgaacaagtatacaaagtaatttccaatggtaaccaatgctttgaaagacctaaaacaggctatggtgtgtgggttctttaggaaaggtcagaggaggcctctctaagaaggtgacaattaatctgagccctacaagatgaggaagattcagccataaaacaagccagaggtaggaaagcatccaggcagagaaaccag

SEQ ID NO: 410318 - DNA, 626 bp, Homo sapiens
cttgtcctctgtccctcattgcctggtatggcagacactcagggctattttgtaaatttcaatcccaactacagttaacccagtggcagagcctgtgcagtattcctttccatgtgtccaggcagtcaccatattctttccagctccctgggttgcctcatctctaacagggtcctgctccctcaaatcctgcctggctgccaagagagaagtatagatcataaaattcaacctcatccctcctctccaratcctgaggcttggcttttactctatggctttgtgaaaagcagaagcaataatccaaccacatgtcttcttaacaaggaaatattttacttttaaatggaagggcgcagttattaaagggtcaaagaccaactcaaggcagggatgggctgggtaagttagggactctattctttgaatcttcagaggcccaaatacaggaaatgtcagggcaaagaaaagaagaggaaagaaaaggttggtaggaatttgacaggtctgtttgtgactgcttaagatgatgctaaggcctttttgggaataatatttaaaattctaaggaaattgaacacttaaacaaaggatttttagcaaagcaattttacttttgcgcagag

SEQ ID NO: 410319 - DNA, 626 bp, Homo sapiens
cttgtcctctgtccctcattgcctggtatggcagacactcagggctattttgtaaatttcaatcccaactacagttaacccagtggcagagcctgtgcagtattcctttccatgtgtccaggcagtcaccatattctttccagctccctgggttgcctcatctctaacagggtcctgctccctcaaatcctgcctggctgccaagagagaagtatagatcataaaattcaacctcatccctcctctccaaatcctgaggcttggcttttactctatggctttgtgaaaagcagaagcaataatccaaccacatgtcttcttaacaaggaaatattttacttttaaawggaagggcgcagttattaaagggtcaaagaccaactcaaggcagggatgggctgggtaagttagggactctattctttgaatcttcagaggcccaaatacaggaaatgtcagggcaaagaaaagaagaggaaagaaaaggttggtaggaatttgacaggtctgtttgtgactgcttaagatgatgctaaggcctttttgggaataatatttaaaattctaaggaaattgaacacttaaacaaaggatttttagcaaagcaattttacttttgcgcagag

SEQ ID NO: 410320 - DNA, 618 bp, Homo sapiens
tcctgctgactaaaaccttgcttcwtgaaaggaggccatgctccatgacatagatgaggcccagggaactcaaaggttgttggcagcaagggagatagggcataatgtgtaagagtggatactctcacccccctaggcccccctgttaacatgagtaaaagccgcttcagcacccatgggtggcatctgccaaggtcactggtacatggggacaaaaagacagaaaacggggatgcctgctttctctccatcaaaccctgagttatcactaaaagaagggaaggaaatgagggtcacctctatttcttgtctttcagaatgggcgatcagctgtcttcaccacccccagcttatactcctctagagtgtatcctgaaccactgggactgctttgaccctcagactctggaggaaaatggctcatagccctctgcacaaaggtttgggcaaattatgaaggactggcttggcctcaggaagaaaccattcatttcgatatcatccagcagttggagcttttctgtaaacgtgagggcaaatgctctgaggcccatatgtgcaggctttctataccgtgcagggcaatccagaccttagctgacaatgtagaattaatcc

SEQ ID NO: 410321 - DNA, 618 bp, Homo sapiens
tcctgctgactaaaaccttgcttcttgaaaggaggccatgctccatgacatagatgaggcccagggaactcaaaggttgttggcagcaagggaratagggcataatgtgtaagagtggatactctcacccccctaggcccccctgttaacatgagtaaaagccgcttcagcacccatgggtggcatctgccaaggtcactggtacatggggacaaaaagacagaaaacggggatgcctgctttctctccatcaaaccctgagttatcactaaaagaagggaaggaaatgagggtcacctctatttcttgtctttcagaatgggcgatcagctgtcttcaccacccccagcttatactcctctagagtgtatcctgaaccactgggactgctttgaccctcagactctggaggaaaatggctcatagccctctgcacaaaggtttgggcaaattatgaaggactggcttggcctcaggaagaaaccattcatttcgatatcatccagcagttggagcttttctgtaaacgtgagggcaaatgctctgaggcccatatgtgcaggctttctataccgtgcagggcaatccagaccttagctgacaatgtagaattaatcc

SEQ ID NO: 410322 - DNA, 605 bp, Homo sapiens
aaccttgcttcttgaaaggaggccatgctccatgacatagatgaggcccagggaactcaaaggttgttggcagcaagggagatagggcataatgtgtaagagtggatactctcaccccccyaggcccccctgttaacatgagtaaaagccgcttcagcacccatgggtggcatctgccaaggtcactggtacatggggacaaaaagacagaaaacggggatgcctgctttctctccatcaaaccctgagttatcactaaaagaagggaaggaaatgagggtcacctctatttcttgtctttcagaatgggcgatcagctgtcttcaccacccccagcttatactcctctagagtgtatcctgaaccactgggactgctttgaccctcagactctggaggaaaatggctcatagccctctgcacaaaggtttgggcaaattatgaaggactggcttggcctcaggaagaaaccattcatttcgatatcatccagcagttggagcttttctgtaaacgtgagggcaaatgctctgaggcccatatgtgcaggctttctataccgtgcagggcaatccagaccttagctgacaatgtagaattaatcc

SEQ ID NO: 410323 - DNA, 538 bp, Homo sapiens
agggcctttttagcaagtcgcatttcttctttttcaatttcagatgagcccatttcaaagtagcctaaactctttcttaaaggaccttactgatataatacacagcaactaaattccaatattcagaatcttttctaacaaattccttaatgctgcagccttggtatttggcacaggcttttagcaccaaaataagacagaccatagttcaaccagcacgtgcaataccttgtaatgggtatggcaaaaggtagtgcccagacaggacagcatggtgaatatcacctgggaacttgggagaaakgcatattctgagccccacttcctttcttaatagactagggcccagcaacctgtgttttcacaaggctccaggtaattctgatgcatgtaaggtttaaaactcacttccatttcacaaggtcctcaccaaattacctcctactttctcatttcagccagttccacacttcagtcagggcctgtgacttttaacaaaccctgtgtctctgcacagatgcagatctcgtatctctca

SEQ ID NO: 410324 - DNA, 534 bp, Homo sapiens
ggaccaggaattctcttgctgattcctcaatttttataactgtctcttttaacagcttccagaatgaaagtggctgaggctggcatgtctgtgccaaccccaccaagttctggtgccaagtgcatcattgatctcagagtcaaatccctgagtgacctggaagcaacaagacactgttacgtttgtggcagattaggaagcagggacccaggccctagggacgtcccttcaattcctgaacctacccctacccaagcaaccacactctgggactcttcttaacatgcatttcaacttatctagactatttaatttttgtaatgtatttctatgcgttcttgactgcttgtcagaagggacytcacaacaccctctacgccccttcctcagcccctccagtcacacagcggctgacacatattcaggcacatggctattctttgtggctctcatacaaggtgggtggctacgttcagctttttctagaggacattgttccaaagctgtcaaccaacaaatatttatagaacatta

SEQ ID NO: 410325 - DNA, 590 bp, Homo sapiens
gttcagtctccagtctagtaagtggcacttaataagagcctactcaccctcagtagccaagtgataaggagaggcacctgccagatggagggtggttggggagttcgtgttgggatatgctgaagtcttggggtagggacaggtgaggttgagagggtcacagcaccaactcatcaccctgggcaggcaggaacacaatctgcttccctatcatgcccctgccacagggcctgcaatattcagttcatacagacattgtcctttgrctcctggctgcagtgtgactgagttctgcagaaaaacccctctggtggctaccactgaaaggggctcagggcaaagcctcttcccccggtccagctctgtgacttgtctgccctccattgcctgcttctcagtgtaggaagagggagatgggccctgacttttgtgcatgtccaggtagcacaggcttattttcagtgggggtgcagcttctgcaagtggcacctggaaaggctgtctccacatgtgcttgcaccagcctccagtggggaaagcctctgctgtgtctgcaacagtggatgagggagaaggaaatgatccctctc

SEQ ID NO: 410326 - DNA, 590 bp, Homo sapiens
gttcagtctccagtctagtaagtggcacttaataagagcctactcaccctcagtagccaagtgataaggagaggcacctgccagatggagggtggttggggagttcgtgttgggatatgctgaagtcttggggtagggacaggtgaggttgagagggtcacagcaccaactcatcaccctgggcaggcaggaacacaatctgcttccctatcatgcccctgccacagggcctgcaatattcagttcatacagacattgtcctttgactcctggctgcagtgtgactgagktctgcagaaaaacccctctggtggctaccactgaaaggggctcagggcaaagcctcttcccccggtccagctctgtgacttgtctgccctccattgcctgcttctcagtgtaggaagagggagatgggccctgacttttgtgcatgtccaggtagcacaggcttattttcagtgggggtgcagcttctgcaagtggcacctggaaaggctgtctccacatgtgcttgcaccagcctccagtggggaaagcctctgctgtgtctgcaacagtggatgagggagaaggaaatgatccctctc

SEQ ID NO: 410327 - DNA, 561 bp, Homo sapiens
gtgttgcttttttaatagtgaatgatggtaaaagtgtttgctttgttttactttaggaagaaggtgccagaggcttactgtttgcttaaactcacagaaggccctrtgcatcttgtttgcagctgaatctccagtgctctgctcatggtatgtattcaatacatatttacagaataaatgaatgagtaaatgaataaagagaataaagagtgttaactgaacagatggaagggataaagcagaacatgtggtctccaatttttattcattcattctctgtccattataggctagaatggggataattcccaaagatacgaagaaatcgaagcccaagatgggtggcttctcagtcccttgacttggatgaagtcctctctatcagctgagaaaacacatggtagagattgatgatctttgcagattcttgggaggcagacaggttgtggaatattgaagatgagaaaatagcaaccagctttccaaaaaaggagggagaaagaaaatagacgatagactccatcaacttcagagtggtcagctgcctctagactagtcaag

SEQ ID NO: 410328 - DNA, 549 bp, Homo sapiens
attgctataattaaaaaaccaaaaccaaacaacaacaacaacaacaacaaaaagaaaacagtaagtattgctaaggaattagagaaattggaactcttgtacattgctgatggaatataaaatggtgcaaccattgttaaaaaccgtttggtggtttctcaaaaaatcaaacagggaattaccctatgacccagcaattgtacttcaaggtayatactgcaaagaattgacaacagatacttaaacaaatacgtgtacatgaatgttcacagcaacactattcacaatagccaaaagatgggaacaaaccacatgtccataaaagaatgaatgaataaataaaatgtgacatatgcatataatagaatattattcagccataaaaaggaacaaaggactgatacatgctacaacatgcaggtaccttgaaaacattatgctaagtagaataaatcagacacaaaggtcatatgtgggtttcatttatatgtaatattcagaatagaaaaatctgtacagatagaaagcagattagttgttccaggggct

SEQ ID NO: 410329 - DNA, 591 bp, Homo sapiens
atatctattggtaaatcggacagtttgatgtttattttaacagtttctgggggaaataaatcccagaatawacaaagttatttgcttcttttattgcctcatgaaagaggtcccttttataataaagttttatttgtgaagagactgaaagagtaatgtcttgtaaatttaaatttaaacagtaaactatgtggtttcagtcctcagaaaccactttattttcctcgtcttattttccttcccttctgttgaattttttttttctactatagcattttccacttacaggagtctcttttcttctcaatgctcctttttaaagcctcctttctttggggaaaggggagatatgatatcttttcctagcaacaggaacagacagtaggtattttttaaacacattttcctgccaactccattgctttgatttcctctgagttccattttgttcattctgtccttcatgctggagaaattcctttattgtctgaaggtgatcctttataggacagtgactaatcataggcataaagtatcagttaaacaagatgaataagctctagagatctgcagcatgacaatgtgcctata

SEQ ID NO: 410330 - DNA, 591 bp, Homo sapiens
atatctattggtaaatcggacagtttgatgtttattttaacagtttctgggggaaataaatcccagaatatacaaagttatttgcttcttttattgcctcatgaaagaggtcccttttataataaagttttatttgtgaagagactgaaagagtaatgtcttgtaaatttaaatttaaacagtaaactatgtggtttcagtcctcagaaaccactttattttcctcgtcttattttccttcccttctgttgaattttttttttctactatagcattttccacttacaggagtctcttttcttctcaatkctcctttttaaagcctcctttctttggggaaaggggagatatgatatcttttcctagcaacaggaacagacagtaggtattttttaaacacattttcctgccaactccattgctttgatttcctctgagttccattttgttcattctgtccttcatgctggagaaattcctttattgtctgaaggtgatcctttataggacagtgactaatcataggcataaagtatcagttaaacaagatgaataagctctagagatctgcagcatgacaatgtgcctata

SEQ ID NO: 410331 - DNA, 576 bp, Homo sapiens
tcaaatgcacccacagccatctgcatttctcttggattgttttctgcccatcagggggatcatgaggttcctggtagacactgagcagaccatgcccttaacaccaactaaatgcacccagggccaggaggaggcaggaagtgcaaactccaggcaggcaggcaggcaggcgggcacacctctctcggcaagtttcctcttcttgttagaaggattcagtgatacatgtatttaagtgctaatgtgatgccyaggagacaccctatttccctttgtaaaaaaggcaatttctcatggctggataagtctacagggataccagcctctcttcaaccacccaattttatttggaaactcaaacagcacctcagtttcataaaaacctaaaacttaaacacaacacttggttgtaagtgagccaacagtttcttgtctctttctctgctcaaggcttaaggccatgtctccccaactacgttcagtggaagaaaagatcccctggacaaataagtttgagaactgttgttgcagtacttctcagaacctttaaaacacaaatcctcatccgcagggatc

SEQ ID NO: 410332 - DNA, 561 bp, Homo sapiens
tggttaaggaggtgagaatttcgagtctggtaattyttctattaaacagaaatgtgacttcatactcctgagcctcgaagcctggacttaaatattaatccccagtgggtgaggctgtgtaccaggtctagctacataatttgcagaccccactgaaaaagcaaatgtggatctcttggtcatgtgtcatgaggaatgtaaaggcagttatagcagagcattaaaccaagtgtggggcccttagcaccagggccctctgtgactgcacaggtcataggcccatgcagctggccctgtctggccctgtcttgtttccatccacaacgatgggggaggacagagtctggaaggttgaagagggaggcactagacactcgtgggtagagagagcgctctgggtgcagtgtgaagagtgggtcacggtgagcaggggtgctcggggctgttggagctccatgctgagatgggataaggtctgcccagatgggtggggaaggaatgggagaggagcgggaccctctctctggggaggttgccctgcagctttctggccctccctgt

SEQ ID NO: 410333 - DNA, 608 bp, Homo sapiens
ctttgaggtttgttctgttgccaagagtactcttcttagctgtttctttccctgattttctctcttaaattagctagcctatgatttagcttgttactcttacagagctaccagcctccttttaattatttaccatcaaaatgtccattgtttttgagagtgtccttaggcttgaacttccccacactctatttataataaagtattttttttttcactctgtcacccaggctggagggcagtggcgcgatctccgctcaccgcaagctccgcctcccgggttcaagcgattctcctgcctcagcctcctgagtagctgggactacaggtgtgtgctaccacgcccagctaaatttttgtatttttggtagagacggggtttcaccatgttagccaggatggtctcaatctcctgacctcgtgatccacctgcctcggcctcccaaagtgctgggattgcaggtatgagccactgtaccyaccctaaagtaatttctttttgggagagcttcagagccctcttttttatgatttgcttcttcctctgaataaaaaccaagctttgggtgcttggcatggggtagtagcctctggtcttcttattttgc

SEQ ID NO: 410334 - DNA, 551 bp, Homo sapiens
atttattctttattgaatccattctccattatggatatttggattgcttccaagttctttattattattaatggtgttgcaatgcatggccttgtgcatcttcttatagttttgccaatgtatcttttgaatagattactcaacatggtgtcgctgagtaaatatctagcaaggtatcagcaaatcttcctctggaagagaggtgaaattttgcattcccaccagcagagcaaaagtgcttgcttccccacagtctggtcaactgtttatgtgatcaaacttttggatttttcccatccagtgataattgagaactagaatctcagagaagtgtaaaattatacttctcttactattagcactgttgagctttttgtaggtcacttgaatttgcttatcaattgtttcttagtttcgttttacaatagagtgttatcggtcttttcttctcaaattctaaaagctctgtttatgtgaagaataatcgctttgggtgaygtaagtggcacatattttccccagtttgtcatttgtcccctttttacattact

SEQ ID NO: 410335 - DNA, 560 bp, Homo sapiens
caccttgtaagaagtcatcaatatcatccccaggtgattcagaggaaggccctgtgaccccaggccccttttacctctatcacgtacagatgcggtattgagagggaggagagggaaggaagtctgcttgtaaaggcagaaatagcttcactaaagtgtttgaactttgatgggactgcaaacttacctgctttaaattagaggagactgtggttttaaaaaaattcttaaaaacattttttagtcaacaagttcatacctctgaatcgtcaagactggaagcttgagaatagtagattactatagaaatgaaagaacactgccttttctccacccctgctgccaacactaccccccccaaacatttgtgttgtagtgactaaaattggactctaccatatatagcttatttgaatgttcccttacatttctcctggagttctctttttttggtccagaagtatctttcccatatcaacagacccacattttcctttccagttgtcaaatkatatgtatcaggtgggctggaacagactcaggtagtttccacaaagcag

SEQ ID NO: 410336 - DNA, 515 bp, Homo sapiens
aaatcttgtacagggctcatatcttccattatcttctctttattccccttaattaaacccaagggattatattctagagaaattgtggtattctgtcccattccttctctctgccttttctttccatacctgtatatgtacacctaaaaaaaacccagtcacatgtatcctgccaataatcactagcaagttctcttttattgtagttttaattagctttttggcctttaaaccataagtccacttgtcagcgacagattggattattagttttattctcatgaaatttttagttaaaactcatttttttattatatgcrttatgagatatgcatctagaatattcataaatgattttacttctcattattgatgaactttggtccctgtgtcttcattagtgcttaggtttaccaatttcctttgatttggaggagattattcataataaatgctaaaaaattgaatctagttcataactgaaccaaacatatctactgtgattcattttttct

SEQ ID NO: 410337 - DNA, 543 bp, Homo sapiens
aataaatctaagattcttgatattaaattattaacccatttatggtactaatctaaatggcattatgtctacatttttttttttttttttgagacagagcttcactctgtcgcccaggctggggtgtagtggtgcgatctcgactcactgcaagctccgcctcccgggttcaagcaattctcctgcctcagcctccctagtagctgggactacaggctcccgccactgcacccggctaattttttgcatttttagtaragatagggtttcactgtgttagccaggatagtctcaatctcctgacctcgtgatccacctaccttggcctcccaaagttctgggattacaggcatgagccactgtgtgcggccttatgtctacatttttatacatatgcacacacttaggcttgtgtatatacctagtttgtatatatacctagtttagtactgtaattcatcaaatttaagatagcattaattatataacacactattatcttatctacccttaagagaaaacaatcctgccaattacagtgtg

SEQ ID NO: 410338 - DNA, 543 bp, Homo sapiens
aataaatctaagattcttgatattaaattattaacccatttatggtactaatctaaatggcattatgtctacatttttttttttttttttgagacagagcttcactctgtcgcccaggctggggtgtagtggtgcgatctcgactcactgcaagctccgcctcccgggttcaagcaattctcctgcctcagcctccctagtagctgggactacaggctcccgccactgcacccggctaattttttgcatttttagtaaagatagggtttcactgtgttagccaggatagtctcaatctcctgacctcgtgatccacctrccttggcctcccaaagttctgggattacaggcatgagccactgtgtgcggccttatgtctacatttttatacatatgcacacacttaggcttgtgtatatacctagtttgtatatatacctagtttagtactgtaattcatcaaatttaagatagcattaattatataacacactattatcttatctacccttaagagaaaacaatcctgccaattacagtgtg

SEQ ID NO: 410339 - DNA, 618 bp, Homo sapiens
agagatctatcgatgctgccccttcacttaagtccagcaagaatcactctggaacaaggattgtcaaatataagcacttcccctactcctctactgagttctggaggtttgagagaagcacaaatagttgctttgtgtcgtttctgccactgcctccttcctttttcttgcttacagggaattctgtaggagtgcaatttgaggtcaaaatacataagcatttaagacattgctttgcttcaaatccttgaataaatattaacttattcatcatctcattacccctgagagttgggaaagcagagcccaaatagaggttagaatgttataatcccatctataaattacagtgcttgtcatatttactaaaygaaagctttaaggttttaagaagcttttctaaatgtgatctctccatccctatcataggatttgctcaaaatggatttgcaaagagaaaaaaaatttaatgtcacactgccatgataagtcaaccaaccatctcatatatcaaaggagagaggcagagaaagaaaaggaggaggataaagaagaggaggaagaggacgaaaggaaaaccaagaggaggagaagccacttcttactttggattaatgt

SEQ ID NO: 410340 - DNA, 436 bp, Homo sapiens
gtgggtggaggcgtggtaaaatctctcaccacaacagattttaaaatttctccttatatttctgtaaatttttgctttatatatcttgaagttatgttattcggtgcctataagtttatatctgacacttctttcatgtgaaccaaaatcttttatcattatatgttaacgctatttattggcagtaatattattttgtctgataattatatagttayacctgctacatatttatagtatttgcctaatatattcattacttactgatacataacaaattgcccttaaccagtagtggctcaaaacaataattcacatttattatcctctcagacactgtgagttaataattctggagagacttagctgggcagttccagcttggagttggagttaaggtgttggctgagaaaagtcatttgaatgcctgattaga

SEQ ID NO: 410341 - DNA, 553 bp, Homo sapiens
ttgcatgcttcttgtcagcatgagaggcaagccctggtctaagtgacaccgaggttgcagccagggtgtctctgacagggctgctgtcctcagatgtgaaggctttgctcctcagcctcttgctacagacctccctctcacattaactcctgccaggacttttggtttcggtttctgacagcagaaataagttctaccctttccctctgttgtcctccacacttcccctcctcctaccctacttccttcacccttcttcctcccaccctagtaggaaatcccccccctgcccccacccccagtcccagtctgagagggacaaagaagaagagaggaatagagaagggactgagaaagggagttgccagagacctcrctgcatcttcggggcttggtgatcactcacaaatctgcaaattgtgccctgtacaactcaagaggacaccagtcctctcaagtcaccaaaatttgcatatttattagcacacttttcagacagatggcagtaaagtgtcttgagaaggaacagtctgaagctctggagtggggttaa

SEQ ID NO: 410342 - DNA, 553 bp, Homo sapiens
ttgcatgcttcttgtcagcatgagaggcaagccctggtctaagtgacaccgaggttgcagccagggtgtctctgacagggctgctgtcctcagatgtgaaggctttgctcctcagcctcttgctacagacctccctctcacattaactcctgccaggacttttggtttcggtttctgacagcagaaataagttctaccctttccctctgttgtcctccacacttcccctcctcctaccctacttccttcacccttcttcctcccaccctagtaggaaatcccccccctgcccccacccccagtcccagtctgagagggacaaagaagaagagaggaatagagaagggactgagaaagggagttgccagagacctcgctgcatcttcggggctkggtgatcactcacaaatctgcaaattgtgccctgtacaactcaagaggacaccagtcctctcaagtcaccaaaatttgcatatttattagcacacttttcagacagatggcagtaaagtgtcttgagaaggaacagtctgaagctctggagtggggttaa

SEQ ID NO: 410343 - DNA, 510 bp, Homo sapiens
gggaatggcgtgaacccgggaggcggagcttgcagtgagccgagatcgcgccactgcactccagcctgggcgacagagtgagactccgtctaaaaaaaaaaaaaaaaaaaaaaaaagacctttaraatttcatttgggttaaatattgcccccttcctgcagctttttaaaatgcgcattcctctaacgggaatccatagtaattccctactttctttgcgaagttattggatcttttccctcattagaaaggcccgagtatgtctgggaattaaactgccactcaaccccacatttacttacatctttaccaccgcgtctattcctctctcaccccgcccccatggcccaagtctttagcctggcattcacgtaccctcactggcaatcttggggaaagcctcagaaaatggtacagcagaaagcccagcgtggaggagccagttgggagactcagcatgtgggcaccctgcttctctgcgcagagcctcctctgtcataggtagatcc

SEQ ID NO: 410344 - DNA, 509 bp, Homo sapiens
atggactaattttgactacgttataatttacataaaattcaaaaaaggggccccagttaaaagaggtgtgcctctccccagggatatcctgtggccacagctgcctttggaagaacaagcccagacagatgtaagcgtggtgcactgtcaggagctgggaagacctggcttccctggtctctgtcatggcaggggaaccccagcctggttctcactgtgggcccccacccccttttgaactrcgcattctagtggtggggaatctgggcttagaagctgcagtcatgcagactgaagcaaaccacttaacctctctgagcctcagtttcttcatctgtgaaatgcagctactaacagcagaagttgtaaggaatccaactccacgagggcaggatttttgttttgttcactcctgtaccctcagttcctagacagtgactggcacatagtaagtgttcaataaacatttgttgctgagtaaagacaaagcatatagagcagttcccagg

SEQ ID NO: 410345 - DNA, 520 bp, Homo sapiens
agagattactccgtgggacagaaacagtactgggacaggacactgccctgcttgtctctagatggtgagggcaagtggagagcctagaagccagggaaaggcatgactgctggcagaggacagagccccagagtacagaagggaaagcctaggtccaggatttccacccttactccaatggcagcaataatacccccactgatattcgcagttttctcagcttttgaatatacatcatcacattgctcgatcacccacccttttccttttacaaaggaggaaccgaggccaggagcacacaggtgggcagatgcccagtgcccagaccagcatctcctccccaagcctcagcctgacaagagctaccagccygcccgttgcatagaggaggtcactgaggctgagggaccttggcccagggtggccgggcacagggaggaagctgaaagctagcaggagggctgaaagcagccatgtgaaagagatgatgaagatggcctgggatcatggggcagagcat

SEQ ID NO: 410346 - DNA, 461 bp, Homo sapiens
tatttctctgaggttcttttatttttcttcattctattttcttcgtagaaatttatgaaaacataatttcataaaaatataatttatgttttcttcatagagaaaacagaatgaagatcttatgaagattcttgcataatctccatcartctatttcaaagtttacagacattttattctgtcaattaaagcctccttttgagttttcatatatatatgtatatacttgtatatatatgtatataaatgtatatgtgtatatataccatttttatatatgttcatattcattttgactgctttaattttcaacaccagagtttccatttggttcttttataaatataacttatatttcttatttaatattctctatctgataaaacattgtcttcataccttcttttatttatttaagcatgttttctttttaacttttttggaacatattattatcagct

SEQ ID NO: 410347 - DNA, 516 bp, Homo sapiens
atataacttgtataaaatgaaagaaagattcagttatgtaacagagactactttggcccacatgctccttttgttttttcccaattctacaaatatgctgttcacattgtcactgaaatccaactcttccattcatgcactagatgccatgttcttttgcctattcaaagatgtggatccagtggtttactcacatcatcctgacaccataatttcttctctctcttctagatattttccctcagcttacacatacattgtaatttctaccgtcatataaagcaaatcctctcttgacctcattttcctctccatctcacaccaatatttcattcttattgacatcaaaactctctgaacattttatctactctctttttccaatgtcttcccattcaytttttattgattccttcctaacagtctgtggtctccaatccttcattacatgtgctgtcgtcaaagtaaccagtaaccttcatatggtcaaatacaatacttaagcctcagacttca

SEQ ID NO: 410348 - DNA, 628 bp, Homo sapiens
cggctaatttttgtattttcagtagagacggtgtttcactatgttgcccaggctggtctcgacctcctgggctcaagcaatccgcctgcctgggccttccacagtgctgtgattacaggtgtgagccaccgcacctggtcctattgactcytaaagtcaagtggctaggttttccttgtgttcataattttgctgacttattattcagactggcaaaatgatttctgtgtaatgattttctgtgaacatgcttttatagttattttcgggctcttttgagtcagtgttcaccaatgcaatctataatattacatggttagattctcaaaggagttctcttttttgttctcaaatttgaatatccagtggcagaactaacggttctggatcatataggaccacaataatgacttgttgcctcctgttgagtttatgtcagcagaaactaaatgtttttaaacatttaaacttctcaaactgggttgcatgttttctaataccttggtttctggcccaatatctttcttcttccaaggttgagatctgtgatttgctgcaactaaatctcatatatttaggtcatattgtacaaatgaagcattgcaaatgaatgcagcgataatgcata

SEQ ID NO: 410349 - DNA, 628 bp, Homo sapiens
cggctaatttttgtattttcagtagagacggtgtttcactatgttgcccaggctggtctcgacctcctgggctcaagcaatccgcctgcctgggccttccacagtgctgtgattacaggtgtgagccaccgcacctggtcctattgactcttaaagtcaagtggctaggttttccttgtgttcataattttgctgacttattattcagactggcaaaatgatttctgtgtaatgattttctgtgaacatgcttttatagttattttcgggctcttttgagtcagtgttcaccaatgcaatctataatattacatggttagattctcaaaggagttctcttttttgttctcaaatttgaatatccastggcagaactaacggttctggatcatataggaccacaataatgacttgttgcctcctgttgagtttatgtcagcagaaactaaatgtttttaaacatttaaacttctcaaactgggttgcatgttttctaataccttggtttctggcccaatatctttcttcttccaaggttgagatctgtgatttgctgcaactaaatctcatatatttaggtcatattgtacaaatgaagcattgcaaatgaatgcagcgataatgcata

SEQ ID NO: 410350 - DNA, 587 bp, Homo sapiens
atttcactgatatgcagaagttcctaggtgaaggaacttgcccagggttgcacagcttaaaaaatgtaatctggattttaatgtcttctcactgcaatctgatgctccttttaaaaaatattccactgtagtcttttgtagcaatgaaagtcactttgtcttcccccttggccatgcttatgaatagcagaggaagtccttgactttctcttcacctcatgctacaggactgttatgaaattagaaagaaagaagtttgtaatcmcataagaccatgtgtccttcattaattaattcaggaataatttattaagtatcacatctaccaagcaccgtagtaagttatgaggataatagaagacaagacattcatggttactgaaacttagaatctgagaaaagtgaccgaacatgggataatcaatcacattaaagtctgagacatgatttgaaggggaagtatagggtttgttgaaagtacttagtcaaagcatcaaatccgatcaatgggaaaggtggttaaaaaaatttccagaagaattgctatttaatcagaaactctgaaggtcacaaagagggaaaagaca

SEQ ID NO: 410351 - DNA, 578 bp, Homo sapiens
ggatctaagtcattttaacaggactgagatatctcattatagttttgatttgcattacttgacaattagtaatgttaagcaccttttcatatacctgtttgtcttttgtctgccttcttttcagaaacgtcatattcaaattttttgcctatttttgattggatcattagattttttgcctgtagagttgttttagctccttacatattctggttcttaatcttttgtcagattggtagcttgcaaatattttgtctcattctgtgggttgtctcttcactttgttgattgtatcctttgctgtgcagaagccttttgacttgatgtaatgtcatttgtccatttttgttttggttgcctgtgctcacgatgtattgctcaagaaatgtttgcccagaccaatgtcttagagattttccctaatgtgttcttgtagtagtttcatagtttgaggtcttagatttaagtctgtaayccatttttatttaatttttatatatggtgaaacatggggtctagtttcattcttctgcatatgtatatccagttttcccagcaccatttattgaagagactga

SEQ ID NO: 410352 - DNA, 560 bp, Homo sapiens
ccctctggctgtagcagggaatgcatataccctcatatatcatgtgttgttgtttctctcctacatgagtaattaattaatctttgtaatgatgcataaactgctagattttttcagttttgcatttagttttatgtaaaatatcataaatttatttaaagatgtttctcctaaatctcatgaaatgttggtattttaaccatatcatataactgaaactctataacctcaattttgtagtaatttagcatatgaaaaaaaygtggaaaattgcatatatgtagctaattcaactaaaacgtagtaactttcaaattctttttttaacccaagatacaagtccaagtggcatcaacagcaagcctatgtgggaattcctagataggttagtgagaaaagtggacttttatgactgaaggtccatccagcaagttatttgatgttacaccaaccatttttctattcttaactttcataatgacaaatgttaagcatctgttttctgatgctttagagtattataaaaatgtaatgaagccatttgaactatctaagtaccc

SEQ ID NO: 410353 - DNA, 580 bp, Homo sapiens
gaaagcaacccaactaattctattcccaagacaagtaccttctctgaacttcatatagatgtcttccaaaactgaaacacattcagaaatctttatatagcagtttctgtgtttgctatataatgtcttcttgctggtcacttgttattttatacaccatcttgatttgctgaccgtgattctcaacagccagtagaactgtggattctggaactaaaccaagtatcatcacacctttacttaattgtacaatttaaataattaaaacagtgtaattagactgtaacacaaggggtacatgtttgaggggatggataccccattctccatgaagtgattatttcacgttgcatgcctgtatcaaaaaacatctgatgtacccgaaaaatatatacagctactatgtattcacaaaaattaaaaaatgtttttaaaaagtatcatcacacctaggtcagycaccactttttatttctcaatcatatataaactgagacacaccatgtaatcaactatcaggaattattccatgaaagcattaataaaaatgacatagttattagggatgatcataacattg

SEQ ID NO: 410354 - DNA, 539 bp, Homo sapiens
cttgtaatgtgttttatcatttaaaaatatgcacacatattgactttacattttgccttaattaaatctagtaattgacaattttcaaagagtataaaaatgagaaaattctggaattaccatcaaactttaaaatggataaaaattctttctctattttctggattgtcttgaattatcttcatggatctactattttaaaaaacttctttttatctctattccttgctttcaaactttccttgtaactgctcaragactgcagtccaactaaaaacagtcataattctatattgttaactttgtagtgaaaaataaagcagagaaaactaaaaacaatagatcatatgaaaatctctatttttgtggcaaattcaaatgtattttaatggtcttgttttgatcactttatatattactggaggagatatcagtgaatcaaacaaaatctatatcccaagtgtcatagactgtagcagaaaatagttagtcttgtgaaaaaatgaataagaatgcatgattcttaaacatctaattaa

SEQ ID NO: 410355 - DNA, 597 bp, Homo sapiens
gaaacaacagacaagcaaaaagcaagcaaataaaataaagttgtgatataaaggttattaaataaataaagaaagtactggaataggaataacagggagaaaactactttaaatgacaagatcatggaaggttttttttttaaggagatamtaaaacatctattttcaacaaatggcctggggttgaaagcatcatcattacttaggagcttatttgaaataaagaatctcaggacttactcaaaactttctgaatctgtgtctgcttttgaacaaggtctctagatgtcagatgatttgtaagcacaataagaagccataatgtaaaggaaaagaaaaagccaaccatggtgggttggcatgctgcagtcagtaaaatcatcatgtgcaaaggccctgtaacaggaaaaatcttagtatgaattttagagtctccatggaattcaaacatttattcccatgcaagcagatttaatcccattagaagcgcataagaaaagttgctctgccacttcctgttattaagaacataaaatcatggtccatcacccattttttttccggtaaatcccagaaaaactgtttagaggtatctgt

SEQ ID NO: 410356 - DNA, 601 bp, Homo sapiens
tggtttaaacactttgacacaagtagacttgtaaaatagttggtaacttaaaaccaagccctaaaatggtaatcattcacatttgtttcatctatgattmctttgtgacaaccatattgtaaaatacctaaatattggtgctattatcagattttgttttgcttcccaaatagccaccagcatgatgctgaggaattcactaatttatataaagagatgaattattgaacaatcataaattatctaatatgatttctaggtaagcagagattaagaaacttattttaaaagtccaataagtagaaaaaggaatattaacttttctgcaattaaaatcaaagaaaatttttcataagttgtccctgtaaagattctaaaaaatgtatagcttctgctggcctgacacacattaaaaaagagagagatggaaatagatagtatcattcagcattcagaagcttgaagagtattaggttatttgaaactctgcttttagcaattaggcctttgggcatacaaaccctttgaaaaatcagataattgcaggtttgaatttttttttaaatgctttaaatgtggttaaagcaacactcaattgatc

SEQ ID NO: 410357 - DNA, 590 bp, Homo sapiens
cttaagattatcactcctgacagtagtagtttttaaacattttaagctatgatattatttgaatcctgaaggtgtttgtatacaatggtagcatttcatgtaaatatacaatgattatctggatatctgtggaaaatctttgtattttttatgtccagacctgtgtagttgtaaattaattgaataataaaataatgctggtaaagttctatttaaagtattggctagcaggtactgtttttttataatcaagagggctcagatgacattgatacacatgctcaaatagttagttgcatgtggtagatttagatcttatgattacatttcaaggttagayatataaaaaccctacatttgaaggaagtctggtttaactatggtattgaagtttgtcagctttctaaaggacaattttcatcctattggcttatcttttgccttttttaaataaaggaggccagagtaacagatattattttttttgcatggttacatgaatattacagattcattatttgcgtatttattgtttttttcctcaatctttaaaagattgaaggcaaacttacagacttgttttgatcatc

SEQ ID NO: 410358 - DNA, 590 bp, Homo sapiens
cttaagattatcactcctgacagtagtagtttttaaacattttaagctatgatattatttgaatcctgaaggtgtttgtatacaatggtagcatttcatgtaaatatacaatgattatctggatatctgtggaaaatctttgtattttttatgtccagacctgtgtagttgtaaattaattgaataataaaataatgctggtaaagttctatttaaagtattggctagcaggtactgtttttttataatcaagagggctcagatgacattgatacacatgctcaaatagttagttgcatgtggtagatttagatcttatgattacatttcaaggttagacatataaaaaccctacatttgaaggaagtctggtttaactatggtattgaagtttgtcagctttctaaaggacaattttcatcctattggcttatcttttgccttttttaaataaaggaggccagagtaacagatattattttttttgcatggttacatgaatattacagattcattatttgygtatttattgtttttttcctcaatctttaaaagattgaaggcaaacttacagacttgttttgatcatc

SEQ ID NO: 410359 - DNA, 610 bp, Homo sapiens
ctatcttcttgccttatgaagaagctatgtcttttcagtcaataatgctacattttcacaacaaaaagaatctatagaatttttggagccaatgagagaataagtggatatgtttacctatattatgttgggtttgtttagtgatttgcggggctaaggctaaaaatctattttatgcaactgccaccctttttttccttaattgccttccaacatagagagtagaatttccatatgaaggtgatttttaatctgaaataagcaatctcaattttgtatgtgtgttgcaccttggtgaatatttctttcatttgggccaaattacactaacaggactctttctggtccaagtgccagaaacccacttacaaggcttatacaaaacaggacttttatagccttgggaaataaaaatctacctgggaaggtctaagcttctgacagagctgagtccaggtgctcaaatgatattttcaggactttctctttcctttgtttgagtatgcttccttttagggtgaygttagtctctgtcaagccttcctttaaggtagaagaaggattaatagcagatccaggctcacatcctattcacttagcagtactggtt

SEQ ID NO: 410360 - DNA, 605 bp, Homo sapiens
aacattaggtatgcaacaagatgcaaaatccaggctcttattttctaaaactcactatttgtatgagcttcatgacttaaagtatgacaggaagttattggttttgaaattctgatactagaaattacaaatatccagtagaacttaataacacatatgtattagtccatttttgcactgccaaaaagaaatatctaagtctggataatttataaagaaaagagatttaattggctcatggttccacaggctgtacatgaagcatggctgaggaggcctcaggagacttacaatcatggcagaaggtgaagaggaagaaggcacctcttcacatggtcagagcagaggaagagtgagaaaggggaggtgctacacacttttaaataaccagatctcatgaaaactcactcactatcacagggagagcaaggagaagttctgccctcaggatccaatcacttcccaccaggcccctccttcaacactggagattacaatttgaaatgagatttgggtggggacacaaatccaaaccatatcattcygcccgtggcccctcccaaatctcatgtccttctcacattacaaaagacaatcattccttc

SEQ ID NO: 410361 - DNA, 505 bp, Homo sapiens
tttagttggcacatgattccacaggctgtactggaagcatggcctgggaggcctcaggaaacttacactcatggcagaaggtgaaaaggaagggggcacttcttcacacgaccagggaggaagagagcaaaggcggagatgctacacacyttaaaacaaccagatcccatgagaactcactatcatgataatagcaagggggaaatttgatcccatgatcaaatcacctcccacaaggcccctcctccaacactggggtttacaatttaacatgagatttgggtggggacacaaatccaaaacatgtcaacatttattatttaaaacattaccttgtgtgttttaaaaattgatatttctctgaagtatattcttatgacaaaatcatttatgtctggaaattatctacgtagtttcaaaaggtaaaaataattaaatcagtaagacattagagataatctaagtagcaaaagtgctatagagatatggaatatcaaagtggaga

SEQ ID NO: 410362 - DNA, 567 bp, Homo sapiens
tgctagccatcttttcagtgctcagcagccacatgtgcctagtggctgtcatatatggacagtgcaaatatagaatatttccattattattgagagctctattgaatagcactgatacacccatgaatttgtttcacggtattatttctatggaaaactccacaagtggttggaataaattttggataaccaacagattagtaagttgaaagctacctataattaattttgagtcatgtgtctccatgaacataaccatctgcaatgaataatcttattttgatgataaataaaacattttattttccatccaaaattaaagaaatgctgtgcygtgacattacgaaaatagcaagatacaatctagcctattaggctttacaaaacattcatttctagtgtgtgtctgtggggggcatgtgtatacacaatcttttagaggcaggggatatttttgatttcatgatgattgtaaaattgaatatatttgagctaagaaaaaaaataagtatggtggctgctattgatggaaattgtgtggccctttgtccttcacccctggtgatt

SEQ ID NO: 410363 - DNA, 608 bp, Homo sapiens
atcaatattttatagtttttcagtgtacatatattatgcccacttgaataaatttattcctgagtattttttgatgctattgcaaatgagattgttttcttaatttctttatcgatagtctgttgttactgtacagaaatackactgatttttgtgtgctgatcttgtatcctgcaacttgcctgcattttcttatcatttataagaggtttttggtagagtctttagtgtcttctatatatgaactaatgttatatgcacacagaaacaatttagcttcttcctttttaatttggatgccttttcttcctttttcttttctttctctctttgctttttgcctacatgctctagtgaggactttcagacctatgttgaatagaaaggataagagtgggaatccttgtcttattcctgatcttagaggaggattttcagctcttcaccactgagtatgatgttaggtgtgggcttgtcatatatagcatttattatattgaagaacattccttctttacctagctgttgagagttctaatcatgaaaagatgttgaattttgtcaaaagtttttctaaatctgtggggatgatcataagatttttatcc

SEQ ID NO: 410364 - DNA, 608 bp, Homo sapiens
atcaatattttatagtttttcagtgtacatatattatgcccacttgaataaatttattcctgagtattttttgatgctattgcaaatgagattgttttcttaatttctttatcgatagtctgttgttactgtacagaaatactactgatttttgtgtgctgrtcttgtatcctgcaacttgcctgcattttcttatcatttataagaggtttttggtagagtctttagtgtcttctatatatgaactaatgttatatgcacacagaaacaatttagcttcttcctttttaatttggatgccttttcttcctttttcttttctttctctctttgctttttgcctacatgctctagtgaggactttcagacctatgttgaatagaaaggataagagtgggaatccttgtcttattcctgatcttagaggaggattttcagctcttcaccactgagtatgatgttaggtgtgggcttgtcatatatagcatttattatattgaagaacattccttctttacctagctgttgagagttctaatcatgaaaagatgttgaattttgtcaaaagtttttctaaatctgtggggatgatcataagatttttatcc

SEQ ID NO: 410365 - DNA, 562 bp, Homo sapiens
ttattataatatagttgaatttttatttaccrtgttacttgttttctatatgtttcatggcttttttgttcctttatttctcttttactgtttgttttgcattaagtaaatatagtaaaatattttagtttatttaatgagtttttcacaatattcttgagttatttattattattattattattattattattattattattatttgagacagggtcttgctgtgtcacccaggctggaatgcagtggctccatcatggctcacggcaacctccacctcctgggctcaagccacatccttctacctcagtctccccagtagctaggactacaggcatgttccaccatgcccagttgatttttagattttttgtagatacaggattttgccatgtaacccaggctcaaactcctgagctcaagcaatcctcctgctttggcctcctaaagttctgagattacaggtatgagccaccatgcctgaccttcttgagttaattttgagggatctatgtagggtttataatatacaacttatcagaatctattttagatgtatact

SEQ ID NO: 410366 - DNA, 461 bp, Homo sapiens
tcctcctgctttggcctcctaaagttctgagattacaggtatgagccaccatgcctgaccttcttgagttaattttgagggatctatgtagggtttataatatacaacttatcagaatctattttagatgtatactaatttaatccaagtgagattcgaaaacattactttactcctatctctatttcctcttctctttttgtgatattattattaaacatattatttytaattgtattacagaaacaacataaattattataattattactttatataatttgatgtctattaaaaaagctgaaaaaagaaaggagtgcagtatatatttttgatgctatctatgccttcttatttactatttctaattttcttattttatcctgtatatataagttaatatcttgcttccactcacgtcctttatgttactgttaaatatttataaaaattttaaaaag

SEQ ID NO: 410367 - DNA, 569 bp, Homo sapiens
ttgcagtttgttatacagcagtagttaaccaatatacttcataatttaaaattaaaaattttctccttgtccaaactgcctggcgtaaaattcaggctctgccacccccaaggtgtgtgatgctgggcaagccacacaatcttttgtgcctcagttttctcatttgtaaaattgagatattatatatctattttggagttgtttaggattattgagctgatacttattcaaaactcagaatagggaccccagcatataataaacgctatacgtgaatcatgtattattatttattragtgctttctatgttcaaagaatttaaatggtttcagttgagctaagttttactgttataccaacttcacagatgaataaacttaggccagagaaattcagaaacacagctagtaagtgaaggggtgggaatccaaactaacattgcagatatcaaagcctcctcccttcttcaataccccttaatgtataaggtgccaaattgcttattaatatacaaggtacatatgaataaaataaagcaatatttatgagatgtagccaaagctaaaat

SEQ ID NO: 410368 - DNA, 569 bp, Homo sapiens
ttgcagtttgttatacagcagtagttaaccaatatacttcataatttaaaattaaaaattttctccttgtccaaactgcctggcgtaaaattcaggctctgccacccccaaggtgtgtgatgctgggcaagccacacaatcttttgtgcctcagttttctcatttgtaaaattgagatattatatatctattttggagttgtttaggattattgagctgatacttattcaaaactcagaatagggaccccagcatataataaacgctatacgtgaatcatgtattattatttattaagtgctttctatgttcaaagaatttaaatggtttcagttgagctaagttttactgttataccaacttcacagatgaataaacttaggccagagraattcagaaacacagctagtaagtgaaggggtgggaatccaaactaacattgcagatatcaaagcctcctcccttcttcaataccccttaatgtataaggtgccaaattgcttattaatatacaaggtacatatgaataaaataaagcaatatttatgagatgtagccaaagctaaaat

SEQ ID NO: 410369 - DNA, 569 bp, Homo sapiens
ttgcagtttgttatacagcagtagttaaccaatatacttcataatttaaaattaaaaattttctccttgtccaaactgcctggcgtaaaattcaggctctgccacccccaaggtgtgtgatgctgggcaagccacacaatcttttgtgcctcagttttctcatttgtaaaattgagatattatatatctattttggagttgtttaggattattgagctgatacttattcaaaactcagaatagggaccccagcatataataaacgctatacgtgaatcatgtattattatttattaagtgctttctatgttcaaagaatttaaatggtttcagttgagctaagttttactgttataccaacttcacagatgaataaacttaggccagagaaattcagaaacacagctartaagtgaaggggtgggaatccaaactaacattgcagatatcaaagcctcctcccttcttcaataccccttaatgtataaggtgccaaattgcttattaatatacaaggtacatatgaataaaataaagcaatatttatgagatgtagccaaagctaaaat

SEQ ID NO: 410370 - DNA, 534 bp, Homo sapiens
tgaatccaggggtgttaacagcaacaacccacaggccccacttccatgccacctcacaagataagatccactggcttggaattccagacagctaccagtagtggcattgtacctccctaagaaggagctcaaagggaagagctgggctgtcatctttgctgttcagatgccttagctgttccggcctttgggctttgaagaatctgagctgacccagggtggaagagaamccccagcctagcacaacacagctgctctacccaaacatagccagactatgctttaggtgggtgtccaatcccattcctcttcactgggcaggacctcccaactggggcctgcagccacccccaccaagctctccaggtgacaaagatttgaattatccctgagatggcactcacagagggagaagtgggttaccatctttgctgttttaatgacttagcaactccagcctttgggctttgaagtatctgagacgactgaggactgaagtagacccccaacacagcacagctgttctaccaaaac

SEQ ID NO: 410371 - DNA, 632 bp, Homo sapiens
ggaaacaatctcagaacttgatgctggttctctgaaataagacagtcagacacaaataaagaaaaaaaaagaaataaacaaagcctccaagaagtatgggttatgtaaacaggccaaatctacaagtaattgacatcactgaaagggaggggaaggaagaaaacaacttggaaaatatatttcagaatattgtccatgaaaatatccccaaccttgctagagaggacaacagtcaaattcagtaaatacagagaagtccttcaagattctacacaagaagataatcaccaagacacatratcattatgttttccaaggtcaaaataaaagaatgttaaaggcagctataaggaaagggtgagtcatctacaaagggatccccgtcaggctaacagcagacctctccactggtaccctacaagccagaagagtttggggttttgtcttccacatccttaaagaaaatagtcttcaaccaagaatttcatatctagccaaactaagctcctaagtgaaggaataatacaatccttctcagataagcaaatgttgagggacttcattaccaccagacctgccttacaagagatcttgaaaggagcagtaaatatagaaaggaaaaactgctacca

SEQ ID NO: 410372 - DNA, 632 bp, Homo sapiens
ggaaacaatctcagaacttgatgctggttctctgaaataagacagtcagacacaaataaagaaaaaaaaagaaataaacaaagcctccaagaagtatgggttatgtaaacaggccaaatctacaagtaattgacatcactgaaagggaggggaaggaagaaaacaacttggaaaatatatttcagaatattgtccatgaaaatatccccaaccttgctagagaggacaacagtcaaattcagtaaatacagagaagtccttcaagattctacacaagaagataatcaccaagacacataatcattatgttttccaaggtcaaaataaaagaatgttaaaggcagctataaggaaagggtgagtcatctacaaagggatccccrtcaggctaacagcagacctctccactggtaccctacaagccagaagagtttggggttttgtcttccacatccttaaagaaaatagtcttcaaccaagaatttcatatctagccaaactaagctcctaagtgaaggaataatacaatccttctcagataagcaaatgttgagggacttcattaccaccagacctgccttacaagagatcttgaaaggagcagtaaatatagaaaggaaaaactgctacca

SEQ ID NO: 410373 - DNA, 605 bp, Homo sapiens
agtctagctaagcccatcttgagggaaggtccagggacaaatttggaaaaaattataggataggcaacagataaaggtatgaagtcataaaggaaagaatttgagcaacatattaaagagtaatactggtaactgccctgggtktgcttgcctaccagacacccaatcttgcaagactgacattaaaagtcttgcctccactgttctttttgtctacaactccattctttgagtttggatgggtgaatgtgtttcttgcaatcgctttctaaagaaggcataaatgaatattactgccattctccagcctctgtccctatgatctacctctggcctacatgccttgttctggccaaacagaaaagatgattgaactccagggaataaaaaagcatggtggacttctgttccaagatggctgaacaggaacagctctggtctacagctcccagcatgatcgacacacaagatgggtaatttctgcatttccaactgaggtacctggttcatctcattgggaacggttaggcagtgggtgcagcccatggagggctagccaacgcagggtagggcatcgcctcacctaagaagtgcaaggggttagg

SEQ ID NO: 410374 - DNA, 617 bp, Homo sapiens
gcagtgggtgcagcccatggagggctagccaacgcagggtagggcatcgcctcacctaagaagtgcaaggggttaggggatttccctttcctagccaagggaagccatgacagactgtacctggaaaaaaggggacactccctgctaaacactgtgctttttcaatggtcttagcaaatggcacatcaggagattatatcctgcacatggcttagtgggtctatgcccaaggagccttgctcattgctagtgcagcagtctgagattgacctgcaaggcagcagcctggcagggggaggggtgtccacaattgctgaggcttgagtacgtaaacaaagcagctggggaagctcaaactgggtggagcccaccacagctcaccaaggccagatgcctcagttgactccaccactgggggcaggacatagctgaayaaaaggcagcagaaacttctgcagacttaaacgtccctatctgacagctctgaagagagcaatggttcttcaagcatggcgcttgagctctaagaacagacagactgcctccccaagtgggtccctgaccccagtgtagcctaacttggaaacacctcccagtaggagctgactgacatctca

SEQ ID NO: 410375 - DNA, 617 bp, Homo sapiens
gcagtgggtgcagcccatggagggctagccaacgcagggtagggcatcgcctcacctaagaagtgcaaggggttaggggatttccctttcctagccaagggaagccatgacagactgtacctggaaaaaaggggacactccctgctaaacactgtgctttttcaatggtcttagcaaatggcacatcaggagattatatcctgcacatggcttagtgggtctatgcccaaggagccttgctcattgctagtgcagcagtctgagattgacctgcaaggcagcagcctggcagggggaggggtgtccacaattgctgaggcttgagtacgtaaacaaagcagctggggaagctcaaactgggtggagcccaccacagctcaccaaggccagatgcctcagttgactccaccactgggggcaggacatagctgaacaaaaggcagcagaaacttctgcagacttaaacgtccctatctgacagctctgaagagagcaatggttcttcaagcatggcrcttgagctctaagaacagacagactgcctccccaagtgggtccctgaccccagtgtagcctaacttggaaacacctcccagtaggagctgactgacatctca

SEQ ID NO: 410376 - DNA, 583 bp, Homo sapiens
tggtgcctgtctcttggcgacccagagtccagtatagcagagccaccctgcctgagtcaagacagaatcctgtcctttggggaccagcaatcctggccctgtggattagtcacacacccagccctgtggggccccaggcctagggcccagtgaagcagccacctcccaggcacctgaactgatgtggtgtcccggtctccagggaaacagagccttggctgagctgtgactcctgctgtctgggtcaaacagccacagatccccacctccctgaatctgattcccttccagaatctgacatgctgaggctccctgcctccctagggagtaggaccattgttgccctgctcctcaagccccagagaataaatcacagctctaccccatcattcctgagttcttgctgctgctgcaccgagscttatggagcctaggctactgccttttcctacttccagagtcatcactacaagatacccactcccctggtgcccaagttgatactgtgccccattagtgtggggactgactgttgtgccctgctagccatggcttgagcctctggaacaccccttcttcctta

SEQ ID NO: 410377 - DNA, 564 bp, Homo sapiens
ggattctgagttctaactattccttttaccttataccaatgaaagcctaatcaatgagtgcccacatatttatatgactagctgcaaaatacctcttataatatctttttagtagttggagaaagacaaatggaatttcatgaggtcatcaattatcctaagcttgaatatgtcaaggagtataagataaatggattcttaacaactcaaaggtgagacttttccaataagtttatcatttacctggaatgtaggaagagactttaaactagtcttayctgaaaacacaactacagattttactgatattattcaatttttttctggatcttatttgagtatgttctttcagtaagttttctaaaaatattactgaataactttaagtgcaaaaaattatggggaagtatttacccataaatttgagggcatacatttttcatatctagatttgatctatgttccccaaagccattagagctgtgtctacccacagctaatataatacccaatagtgaacagttggaggctttttctctaagctcaggaacaagacaaggatgc

SEQ ID NO: 410378 - DNA, 560 bp, Homo sapiens
aagtaacctacaaattcagcataacccctatcaaaatttaatgtaattcttcccagaaatagaaaaaaaatcctaaaatagccaaagcattcttgaacaacaacaacaacaacaacaaaaagctgtaggcatcatactacctgatttcaaaatagactacaaagttgtagtatcaaaacagcatgataccagcatggaaacagacacatcaaccaatggaatagaatagagagcccagaaataaacccataaaaaycttgatttttgacaaggttgtcaagtatgtacagcgggaaaaggacagtctcttcaatagacgatgttggaaaactggctatacacatgcagaatagggaaattggatccttttctcactccttgtacaagaatcatttcaaaacagaataaagatttaaatgtgagatctgaaactgtaagactactaaaagaaaacataggagaaaagctacattacattagtctgggcaatgatttcttgcctcaaaggcacaggcaacaaaagcaaaaataggctaatgggattatatcaaactaaaaag

SEQ ID NO: 410379 - DNA, 646 bp, Homo sapiens
tatacaaggtgaccaattgttgacaactgattctaaaatgtacatggaaagtcactttatttcaagtgttgattctgagaatattccccaataaatctcctgcaggcaaattttggcctcacagcttgttttctggaattccaacatagkacagcgactttgcaaaacaggaaagctgaaaattcacacaacgtggttattcattatgactcagtagttctacttctccagaacaacattatattagtctcaaatacccatcaatgtggaatggatatgtaaattttggtctatacaccgaaatgctatataaaaatgaaacaaattatgattgcacgattacatggaagaaagttgtaactataacagtaagtaagagaagcaaaacacaaaaggatatttaaataggattgcaaaaattttaaacttaggaagaagcaaaactaaactactttggttagtgatacatacatacatacatacacagcaaaattataaagtaaagcaataaatggttacatgggatgtggaaagaggtttttgtgattcagaaagacacagagggcctctgggatgatggtgtgctgtatttcctgatgttagttatagttacactagtgtttttctatgccattatagcgcacat

SEQ ID NO: 410380 - DNA, 550 bp, Homo sapiens
ggacttgaattttgcttcagaccaaatgggcctaacagayatatacaaaactttccattcaacagcagcataataaacattctctagtgcacatgaaacattcttcaggatagaccaaatgttaggccatgagacaagtcttgacaacttcaagaatattgaaattatatttagtattgtttctgaccacaacagtatgaaactagaaatcattaacaggaggaattttggaaaattcagaaatacgtgaaaattaagcaacatgatcctgaacaactaatagctcacagaagaaatcaaaagagaatttaaatattttgagacaaaaaacaatggaagtacaacatgacaaaacctgtgggatacagcagaaacatttctaagagagatgtttatagcaataaatgactacattaaaaaagatcccaaatacataacctaatattatgcttcaaggaactagataagaaaacaaactaaactcaagctcagcagaagaaaggatataataaatattagaacagaaataaattaaataaataaaaaacag

SEQ ID NO: 410381 - DNA, 432 bp, Homo sapiens
accatatggccaaaagcaatctacaaactcaatgcaattccaatcaaaataccaccatcagtcttcacagaactagaaaaaacaatcctaaaattcataaggaatcaaaaaagagcctgcatggccaaagcaagactaagcacatagaaaaaatctggaggcatcgcattacccacttcaaactatastataaggccatagtcaccaaaacagcatggtactggtacaaaaataggcacatagaccaatggaacagaatagagaatccagaaataaacccaaatactaacagccaactaatctttgacaaagcaaacaaaaccacaaagtgacaaaaggacaccctattcaacaaatggtgctgggatagctggcaagacagatgtagaagaataaaagtgtatcctcatatctcatcttacacaaaaatca

SEQ ID NO: 410382 - DNA, 386 bp, Homo sapiens
tagaaataattcaggacttatttacagatgtgttggtgtgccaatgtagccatgtgatccactgatcttatattgtatattattatccagaagtatctggcttgacagcccaattaaggtgtcagctagagaaaacatacatttgtggttaagacagtattctccaggaagctgtatgtgcactaatcagttaatatatgatgctgttcccgcaataactagaatatatgcagctatttttactccttgactgtcattctcagtgacccacttctatggcttgtgctttctttccccacakatttagattccattaagttagaggttctagatttcaggggcaaaaacatcttccaggcaacacagtaggattccagtaaacatga

SEQ ID NO: 410383 - DNA, 600 bp, Homo sapiens
aggcagcaatatttgctgttctgcagcctctgctggtaatacccaggaaaacagggtctggaatggacctccagcaaactcccacagactgagcacctccaacaggctgagggacctgattgttagaagaaaaactaacaaacagaaaggaataacatcaacatcaacagaaaggacatccacaccaaaatcccatctgtaggtcaccaacttcagagaccataggtagataaaactacaaagatggggagaaactagagcagaaaagctgaaaattgtaaaaccagagtgccccttctccttcaaaggattgcagctcctcaccagcaatggaacaaagcaggacagagaatgactttgatgagttgatagaagtaggcttcagaaagtcagtaataacgaacttctctgagctaaacaaggatgttcraacccatcgcaaggaagctaaaaaccttgaaaaaagattagacaaatggataactataataaacagtatagagaagaccttaaatggcttgatggagctaaaaaccatggcatgaggactacgtgaaaaatgcacaaacttcagtagcctattccatcaagtggaagaag

SEQ ID NO: 410384 - DNA, 523 bp, Homo sapiens
aaaatggagaaattaaaacaataatattattaacaaaaacaaaatgctaacatttattgagtgtttccaggtactttccaggtatctcatttaaattcatcacaaccctataagataacctcccttttactgattaagaaactgaggcatagtgagattaagaaagacgatcaagggctcatatctcataagtaacaaagtcaaaattcarccccaaccaagtctgttcagagccagagtacataatcatgaaagacacaataaatagcaggttttgacttaaaatgctggggaccatacaatgtcatctgctaaaacaatctctgtttatgcttgctgtcctgacatgattattaataactccctttttcatgcccaaagctgtccagtttaggtaatatatgtaatggtcaccctaccttgaaagtccctcccagatatcatgattctaaaagtatgaaaagaaaaattagaacttgattcaattaggtgatgaggggcacactgtagtgtaaagaaatgg

SEQ ID NO: 410385 - DNA, 498 bp, Homo sapiens
tttttttaacttttattttacgttcagaggtgtaagtgcaggtttgttacataggtaaacttgtgtcatggaggtttgttagagattattttgttacccaggcattaagcctaatacccattagttattttttctgttagtctccttccttccaccctccaccctccaccctccaagaggccctagtatgtgttgttcccctctatgtgtctgtgtgttctcatcatttatctcccacttataagtgagaacatatggtattcggttttctgttcctgtgttagtttgctgaggataacggcctccagctccatctatatccctgcaaagaacaaagaacatgatcttgttcttttttatggctgcatagtattccatggtgtatatgtaccacattttctttatccagtctatcattcatgagcatctaggttggttctgtgwctttgctattgtgaatagtgttgcaatgaacacatttgtgcatgtgtctttatg

SEQ ID NO: 410386 - DNA, 552 bp, Homo sapiens
tgattttgtggaagattagatggttgtaggtgtacagccttatttctgggctctctattcagttccgtttgtctatgtgtctgttttcatacctgacacatatgccatgccgtgtttgttttggttactgtagacttgtggcatagtttgaagtatggccatgtgatgcctccagcattgttctttttgtttaggattgccttagatatatatatttatctaatatatatatatatakagagagagagagatagagagagagagagagagtttttctaattctgtgaagaatgtcattggtagtttgataggaatagcattgtatctataaattgctttgggcaatatggctattttgacaatattgattcttgctatctatgaccatggaatgctttgccatttgtggcatctctgatttatttgaactgtgttttgtaattcttgttgtagagggattacacctccttggttagctgtattcctaggtagtttttgttattgttgctattatgaatgggattgtgttcttgatttggctctcagcttgga

SEQ ID NO: 410387 - DNA, 556 bp, Homo sapiens
tatttaggcagacagagagaaagggatgctcttcctcagtatgtctgcagcaatggcatcagggtgtgragtttatatgcaagcttaaagaacttggctcagggcacaggccggtttctttaagtgttttgatccacatcctaaacatctttatcagtgtctgggaatgttcaaggtcccagctcaggttaagcctgacaggaaaaagaggcagctggcagggtcacacagtgcttaaggcattctgtgtttcttaggacacagaaagaaagtggggaggactagaggaccctacagtttgtgttttcaacttaaaataattattttcaatggatcgttatttgttagccatcatttctttcctctattgtttcttcaaagatactaaagataatttttaccctttatataggtcagttattgtatttgatagttcttaagaatcgaaatcttttgctgtttctgactctgacagatagtaactggttatctcctgcatttttcaactctttttagttcatattttattgaattcatcaataggagagccaatggg

SEQ ID NO: 410388 - DNA, 527 bp, Homo sapiens
ccatgtcctcttctagtagtttcatagtttcaggtcttagatttaagtctttaatcattgtggtttaatttttgtrtatggtgagagataggggtgtagttttattcttccacctatggctattcagtttttccagcacaacttattgaagagactgccatttgcccaatatatgttcttgaggtctttgtcaaaaatgaattggatgtaaatacataaatgtatttctgggttatctgttctgttctgctagtctaagtttctgttttatgccacccccttgctcttttggttactatggctttacggtatacttcaaagtcaggtagtgccatgcctccagctttgatcttttatctcagggttgctttggctatttggtttttgtgtgaattttagtgttgttttttctatttctataaaaaatgttattgacactttgatagatattgcactcaatttctaaattgttttgggtggtgtttatattttagcaatattaattcttccaatgcataagaatggga

SEQ ID NO: 410389 - DNA, 527 bp, Homo sapiens
ccatgtcctcttctagtagtttcatagtttcaggtcttagatttaagtctttaatcattgtggtttaatttttgtatatggtgagagataggggtgtagttttattcttccacctatggctattcagtttttccagcacaacttattgaagagactgccatttgcscaatatatgttcttgaggtctttgtcaaaaatgaattggatgtaaatacataaatgtatttctgggttatctgttctgttctgctagtctaagtttctgttttatgccacccccttgctcttttggttactatggctttacggtatacttcaaagtcaggtagtgccatgcctccagctttgatcttttatctcagggttgctttggctatttggtttttgtgtgaattttagtgttgttttttctatttctataaaaaatgttattgacactttgatagatattgcactcaatttctaaattgttttgggtggtgtttatattttagcaatattaattcttccaatgcataagaatggga

SEQ ID NO: 410390 - DNA, 392 bp, Homo sapiens
cctctgcactgccctagcagaggttctccatgagggttccacccctgaaatacacctctgcctggacatcatgcatttccgtatcttctctgaaatctaggcagaggatcccaaacctcaattcttgwcttctgtgcacctgccagaccaacaccacgtggaagctaccaaggcttagggcttgaaccctctgaagccatggcccgagctgtaacttgtcccctttagccacaactggagcagctgggatgcagtgcacacagcaggggtccttagacccgccccaggaaactacttttcccgcctaagcctctgggcctgtgatgggaggggctgccatgaagggttcttacatgccctagagacatttttccctttgtcttggagattac

SEQ ID NO: 410391 - DNA, 392 bp, Homo sapiens
cctctgcactgccctagcagaggttctccatgagggttccacccctgaaatacacctctgcctggacatcatgcatttccgtatcttctctgaaatctaggcagaggatcccaaacctcaattcttgtcttctgtgcacctgccagaccaacaccacrtggaagctaccaaggcttagggcttgaaccctctgaagccatggcccgagctgtaacttgtcccctttagccacaactggagcagctgggatgcagtgcacacagcaggggtccttagacccgccccaggaaactacttttcccgcctaagcctctgggcctgtgatgggaggggctgccatgaagggttcttacatgccctagagacatttttccctttgtcttggagattac

SEQ ID NO: 410392 - DNA, 571 bp, Homo sapiens
gagccagtagttttgtttttctgatatgtctttctctggtttggtatcaggataatactggcctcatagaatgagtttggatgtattccctcctccactattttttggaatagtttgagtaggattggtattagttctttaaatgtttggtagaattcagtagtaaaaatgttgatttcattacttattggtctgttcaggttttggatttcttctgattcaatttggttggttgtatgtawctaggaatttgtccatttcttctagagtttccaatttattggtatatagttcctcctattagccactgatgatcctttcattctctgcagtgtcagttctaatgtcttctttttcatttccaattttatttatttgaatcttctctcttttttcttagtctgactaaaggcttgtcaattttgtttaacttttcaaaaaaaccaactttttgtttcatgaatcctttgtattttttaatttcaatttcatttatttctactctggtctttattatttctcttctgctaattttgggtttggtttgctcttgtctttctaattcttttaa

SEQ ID NO: 410393 - DNA, 571 bp, Homo sapiens
gagccagtagttttgtttttctgatatgtctttctctggtttggtatcaggataatactggcctcatagaatgagtttggatgtattccctcctccactattttttggaatagtttgagtaggattggtattagttctttaaatgtttggtagaattcagtagtaaaaatgttgatttcattacttattggtctgttcaggttttggatttcttctgattcaatttggttggttgtatgtatctaggaatttgtccatttcttctagagtttccaatttattggtatatagttcctcctattagccactgatgatcctttcattctctgcagtgtcagttctaatgtcttctttttcatttccaattttatttatttgaatcttctctcttttttcttagtctgactaaaggcttgtcaattttgtttaacttttcaaaaaaaccaactttttgtttcatgaatcytttgtattttttaatttcaatttcatttatttctactctggtctttattatttctcttctgctaattttgggtttggtttgctcttgtctttctaattcttttaa

SEQ ID NO: 410394 - DNA, 596 bp, Homo sapiens
ctcagccacaggtgggtagagcatcaggtgggttcttggggtccctgattccaggacttggctcatggatggcattgctggacctgccttgggccagagaggagcccagtgtcctaaatggtgagtcccaggccaggcagcattcaccacgagctgactgaagagctcttggaccttaagggaacatgtatggtagctggcagtactcactgcgggcctgtagtgttagtggcaataggataagkctcctctgcttttggaaaggggagagaagagtgggaagcactgcatcttgtggtctgagtgacaggtcagctacaggacaatagaataccagatagacttctaaaattttttgactctagtctctggctcctggatgtcacctttgcacccatgtgtggcctaggggaacttgccaccctgaagggaaaaacacaggcctggctggttttgccacctgctgattgtagaggcccaggtccttgagtgaacataggcttgacacggagtggttacagcaggccttggacaagaccctgtgctgtgctaacttcaggactgactcagctcagtcttgtgtcaagggccacaag

SEQ ID NO: 410395 - DNA, 639 bp, Homo sapiens
aaagcactcctcagcaaatgtaaaagaacagaagttatatcaaactgtctctcagaccacagtgcaatcaaactagaactcaggattaagaaactcwctcaaaaccactcaactacaaggaaactgaacaagctgctcctgaatgactactgggtacataacgaaatgaaggcagaaataaagatgttctttgaaatgaatgagaacaaagacacaacataccagaatctctgggacacatttaaagcagtgtgtagagggaaatttatagcactaaatgcccacaagagaaagcaggaaagatataaaattgacgagctattgtctaattttattccttactgatatattaagttacagccccatcagcaatgtatgacagtgctcattttactccatcttgccaacacagttgtgttactaaattctgattattgcaaatctgttaagtaaaactaatatcctaaaattaggagcaaggttcaccatatttcatgtgtttaagaagcatttctgtttcttttttctgtgaactatgacattattattgactgcgtctctcccctttgaattgttaatcttttaaaaatcaatttctggaatatctttgtataatagggagattcgcccttagtctga

SEQ ID NO: 410396 - DNA, 639 bp, Homo sapiens
aaagcactcctcagcaaatgtaaaagaacagaagttatatcaaactgtctctcagaccacagtgcaatcaaactagaactcaggattaagaaactcactcaaaaccactcaactacaaggaaactgaacaagctgctcctgaatgactactgggtacataacgaaatgaaggcagaaataaagatgttctttgaaatgaatgagaacaaagacacaacataccagaatctctgggacacatttaaagcagtgtgtagagggaaatttatagcactaaatgcccacaagagaaagcaggaaagatataaaattgacgagctattgtctaattttattccttactgatatattaagttacagccccatcagcaatgtatgacagtgctcattttactccatcttgccaacacagttgtgttacyaaattctgattattgcaaatctgttaagtaaaactaatatcctaaaattaggagcaaggttcaccatatttcatgtgtttaagaagcatttctgtttcttttttctgtgaactatgacattattattgactgcgtctctcccctttgaattgttaatcttttaaaaatcaatttctggaatatctttgtataatagggagattcgcccttagtctga

SEQ ID NO: 410397 - DNA, 452 bp, Homo sapiens
acctataactggatatctgcttcaaaagtggtagtgttataatttcttttatcacatctcttaaagctgtaattataactmccttacatcatttgattttttaataaaaggaatattaaacagtaaacgtttcacatgaagtttacaggtatcaagtattctgtttgctgtaataacctgaaccttatatttctgagaaaaatacacatagatcttgaagttatatgcttgagataaatagttaaaattacaattagttatttctatttttatcaataaatagaaaaattatgatagtaatattaagaagacttaatatctataaagggaaatttgaccaggagtctcctcttatgatggattcatagatgttttatgttttgggttctttttgctcctttgtatatttcatgttttgaaaataaggataggtttttcttttcatgcttcaa

SEQ ID NO: 410398 - DNA, 558 bp, Homo sapiens
agaggggaaagagaagtgagaaaagatggcactaccaggaaagaacccctctccccttttgggttagaagtctgcctagagccacagggctttgccagagcccatcaagcgtgaacmtcttcctctgtggaaatacactaagccaagagagtgattgaggtttatggtctcaggaattttagcctgaaaaatgggaggggaaagaaaggtggaggaataaggaaaagtgaaacattatcaagactgaggtgatcagacaggtcctcttcatacttaccaggaaaattgtttttcacagcaactatttcattgactgtactggcaagagaaagaaaacacatctgaaatgtgcctgagatttactcttgtattgggttcttatagtctgcccttcagggtccatcctgcactcttaaactggagccattccaggcccactctgtccccctaatgcctagtcacctactgggcatctctgcacctcttctctccttctaaatctcttcacctcttcggggcttctcagattcatctacccattcctataggatgcagcac

SEQ ID NO: 410399 - DNA, 600 bp, Homo sapiens
cctgcaaggttgggctttcctgcgaagggttaggggtggggactctgtggaagttcttggaaggcataacctgctcctagggaaatcaatgactctgttatttctcttccttgcaacttggtggggagaggtaatggccaggtcaatcctgagtctgatttattccagttctaccactcaggatttttgatgccaggttctatggtcttttcactatactgtactgtaagagaatgcaaggataaagctgggctggatgggtagaattgagagtcatctacaacaagacattcattaaagctgagagaatacataagtataaatcattggaatgcagaaaggcaaaargaaggctgaacgcagacttaaaaaatacatacctctaggaatggagaagagagggcacagaaaggttaggctcagaggcagacagagggttcccatgaggagagtaaagtttctcactgtcaatcatcctggaaagaagcagaccctagggtagaagatgtaagctgaggagggaactgttttcctttcttgaggcttcctggtggctgcaacttagactttagttgggagagagagatttaagactacttc

SEQ ID NO: 410400 - DNA, 608 bp, Homo sapiens
gggttcccatgaggagagtaaagtttctcactgtcaatcatcctggaaagaagcagaccctagggtagaagatgtaagctgaggagggaactgttttcctttcttgaggcttcctggtggctgcaacttagactttagttgggagagagagatttaagactacttcatctggagagaggtaagctgatccttctcacttgatggcaggccagggtattgaacctgtggattctaagagcagccrtatctagtatctcattttaagttttctgttaatttccttcagttattgctatgcattcagtgcattgtaatgaacgttgcagcttagtcttcattgtcattgtagagaactgacagaagagcttgtgcccatgcttagggcaaagcgtgtattgctaggagcatcttctctatatgagaagagcagcaactggaaggatgcaggttgcaacagggcacaatgcaggtctacagccaagtgggatggtggtctaagcaagatgctggctgaagtggttggggacagcaagagtaatgtataaaaaagatttttgcatccatgatattttggaggttattatcacatgccaaaagatcaaactggc

SEQ ID NO: 410401 - DNA, 592 bp, Homo sapiens
ttaaagtgaaataaacacattattaagcaataataatgccattaacaaacttgcacttattgggactaagtactatcaataaataattgttaagttgcattgatatgttagtttgaattaatcaagactggaggaaaaatgtatccrttcaagaactactgtagagaagaaagaaaagatttccaatgtgatcttctttggttcctcaggcccacagagtccctacactgcagacttccttagtgcttcagcctggagttcaccaagctcaaactccaagaatcttcctccattgtcaatcttcctgaatgcatgagcattagtctagctgttctgattgaatccagagggacacagatgtgttatctttgggccaccagtacctttggtacttaagaggttcataaaaaaaatcacccagagacatcaaggatgatgcacaaattcagtgccaaattctactaagagatcaattaaaatgaaacctggaaggtgacaatgtgattgaagacatagaggtcattcatgtccacagtaagaacagtaaaggagagaaggggaagccagatgaaagggaataaagagtgaattg

SEQ ID NO: 410402 - DNA, 503 bp, Homo sapiens
accttggtacaatactattaactattaacttacggaccttatttgagtttcttcggttttacatatactttttttggtgtatattactatgaaattttatcaatttgtgtaggtttgtgtaaaaccactaaagcaggatacataattgtccatcaccacataaagggaatcatttagtatgcaatcctctgcaagtggattttttcatttggcataatagccttgagagcaatccaattgttgcaagtatcaatagttcattcttttttattgctgaatagtattcaattgtatgaatgtaccacactttgtttaccctttcacccttagaggaatatctgtgttctttctagtttgaggatattacaargaaagttactatgaacattcctttctaggtttctgtgggaacatgtgttttctttcctctagggtaaaagcattatactgagggaaagaatatacacacaaaaagtgcttgattctctttgtttgaaatacta

SEQ ID NO: 410403 - DNA, 530 bp, Homo sapiens
agacagaggggaagctggtggttggttaagagacggacagatgctgggggaagagaaagttttcaaaattggctcttggggcagtggcagatgtatgtgagaytgtaacatggaaggtttttcttcttttcacaggtgaacttcatgaccctataaaaggtacaatcatggcttctctgaagtccttggtaaacaggcaatttgtgacatgtttaggagcaaacctttccttcatcttcagagaggcctgtaatccattcttattatagaatcctaggggtttcgcctcctgccagacctgttttgtccatttcttagagtaaggaggctaagatccactttactttcttttacccattactcggcaaaatcatcaggctagataaggggttcattactggaggtccatggataaatttcatgggaaccctgacctcctgaaatcatatacagtgtttgatttatgtttgtacaggttatctttcacaagatttttttaattggagaaaatgtgtacaaatttattaatg

SEQ ID NO: 410404 - DNA, 445 bp, Homo sapiens
ctgcaccctagatgacgggttgatgggtgcagcaaaccaccatggcacatgtatacctatgtaacaaacctgcatgctgcactttctttcatgtatcccagaacttaaagtaaaataaaaaaataaataaataaataaaggccagaaaaattggccaaaaaatctgaatagaaaaagatatacagatagtaaatgagcatatgaaaatatgcttaacatcatatctcactagggaattgcaaattaaaacaacaatattaygcaactatacattttaaatggtcaaaatcaaaaaaataaaaaaccctcacagtagcaatttttgtcaaagatatagagcaataggaaatctcatttattgctggcaggaatgcaaaatggtaatgctgttttggaagacagttggtagtttcttagagaggtgattatactcttgctatgtcat

SEQ ID NO: 410405 - DNA, 569 bp, Homo sapiens
gaggattccaggaaggaatgcasaatgtgacaaaaatgatgtaactgttacaaatgtgtgaaacaatctctctgagttgagttgggggaaaagtttctgatctgagtaactttgtaaatgagtggagcctgtaagcttaaaggcaaaagaaaatgtacacaagctctgcactctacttgataaaattgttttccccaaggttataggttaataattctgatactgctctacaggtacactgtaattgaactcctaagcaaatgaatgggggctgggggaatccaggtttctcactgttggagttagaagttacagataagcaagagaaaggtgctagaatgatcaatgaggtaatgaattagacatcagtatgaattcatatttagttaaatataaatacagattatttataaatatgtatataaaagaaatatttataaatatgtatatttatgagttattatacatacatatatttccttgctctgtcaaataacaataacaatagtaatgagtacccctagcacccagactgtggtttctaataccattctcaaaaaaaaaaaaga

SEQ ID NO: 410406 - DNA, 547 bp, Homo sapiens
gggctgggtatagtgtcatttatgttccagagttatcttttggacaaagcctgacttcacctgaatcacatcttcttcaagcatcaccccattgtaccgtttgcctcattcccttatagttttctcctgagagcacttcctcactgcattatttgcatcagaatcctcttctcaagttctgcttctgtggaacctggccaaagacagttggtaacaggagtggtcacaaaaagcaggccataataaggaatattgcattggattgttcaactggctaaatgtcaatgagtaccctatggtggtatttggagtactgaccgttgctgatatgtggtagcagtgtgattgttaaaactttcaattgtggtgaacttggacttagaagaggtggaagatgaatttgctygtgggtatctctgactctgagaaatgcagagatgatagtgatgataaggattgtggcattggatggctgttgctaagcatgattggagcaccaaagacagaaaatagcaggctcgtatttattaatccaaaaatttagagc

SEQ ID NO: 410407 - DNA, 574 bp, Homo sapiens
tcttgcagctgataatgaggcaaggcattcaactgtaagggttggagaactttagagagaatgaaattcttagcccagacaagtctcctgagccaaagtcagggccctyataaggaaggagtgtgactctgagacttgggataatggggatatctggattggtatacttaactccttaagccctgaaatttttcttttgtcccaatgaccatgcaggaagatagcagtcttcttgctagaacagcatggaaagaccacaaaaatgtcttacaggataatgcctgactttcccaggatctgcccgtactttctctgctggcaaccagagcaatgaattgggtcaaagctcatcatagaaaaactggggaagtgctgctctttttaagggaggagagggatttgacactgaaggagctgaagagcctacctgacatattctggctacaactgggagaacatacctggaagtaaattctgagggtgctggattgataaggatggaatatgaaaccaaataagggagaatttttttatgtggcactttcccatgataagtgcactggagactgattgt

SEQ ID NO: 410408 - DNA, 600 bp, Homo sapiens
gagagtagccacaggtctataggtcagcctgccccattcagttgttcccgaaattctcttctcgcttccaaatatccttttgattaattgacaaaaaattgtatagatacacatatatatacaacttttatatgcgtgtacagcatggtgttttgaaatatgcataattgtgaaatggctcaattgagctcattaatatgcattacctcacatatttataaataatgggatacttaaaaaaatcttatcttaatgtgattttttaataatgaaaacctgcctactctacctcttcacaaaaactgtaacaaaattaaatataataataactaacgttctcgaagagctttctattgtccaatccctgagctaaacgctttatatcttataaaagcattctgcaccaaacaaccctctgaggaaggcaagattattatttacattttatgaaaaagggaaacaaagcctcagagagamtaagtaattttcctaaaaccacactctgagtaagtgacggagcctggataaaaacacgggtctttccagagaaaagcacatgcacttatgcaacaccctccactgcacagagataaacagatt

SEQ ID NO: 410409 - DNA, 562 bp, Homo sapiens
tcctcttgttaatttctaaattcttacagattctacttataaacatagaatggcctccatattgtatcattaaatgcagagaccaagggcacagtacaaagggtcctattttaaagatctgtgtgtgtgtgtgtgtgtgtgtctgtgtgtgtaaaaatttttggaggaatgcactaaaaaattttttttatgatagttaacttttaaaactgggtctgaaaggtctaagatggaaggaagagttttacttcatgtgcttttatactatttgaaaattttgctatctgcatgtattactatttattttcagggttatagtgtttattaagtatgtaacagtaggagttggctcaaaattatctggaaaaataagaagtaaacaagattgccaaaatgttgatgataagtgaagctagataatagamccatggtgattcataacattattctctccttttatgtatattagaatttttcaccataaaattttaaaaattaaacattgatatattctagctataatttaggtctgaaatgggctttgcaattcgaaacacttgta

SEQ ID NO: 410410 - DNA, 517 bp, Homo sapiens
aagtgaactttattcattataccttttagcctaagagtccattttgcttattactgtcagcatccaccaccttttcccaatattataatgtcaagtttaattccagctgaacactttttcatatccttgtagtcatgtgagcctccagttaaattttattcctctattggttgtttgttctaatttttattatttgcacacatacgtgtatactttctcacctcatttatttaagtaggatctaggtagaagtrtgggtttattggagtatgggaactgtagatactggtgttccagttactatctttttgagtgaaaataaaatacctatgtatgtctgactgtcaaatatttgatctcttttgtaacttgctgttttttatattaactatttagtcatacaaaaataatgtgtgttaaaataaagtgccataattatgaaaatatgataccattttctttccttctctcctcctttattcctttttttctccctccttcccttccttttgtggta

SEQ ID NO: 410411 - DNA, 591 bp, Homo sapiens
gtttcagaaggtgttcccagtatgaataagcccaggtctggagagttccatattttaaactgggatgccctttcatcacccaacaatccttcattgaatacatactgacaacctagtatactgtattatgcctgatacctatttagcatgtcatgaaaaagaaaacaaattgctgacaatgctgagaaaaggaaagaggaaagctcttcaatggccctttttcctatgaattattttgtttatattctgttgtcttttcatgtcaagccaaaggcatagatggtctacrtccttataaacatctatgactgtggtaagctagttgctcaccttcagggtaaatggtctgagagtgggctgctgacctgatagctccgtcaaaaggttagaaggaatccaagaaaggctaagctcaaaggactccatcacagccaaaggcctcatgcctttatttattattattattattattatttagagaaagagtcttgctctgttgcccaggctgcagtgcagtggcgcgatctcggcttactgcaacctccgcttcccaggctgaagtgattctcctgcttcagcctcccaggtagc

SEQ ID NO: 410412 - DNA, 564 bp, Homo sapiens
tttaacactctccttaaaacatgacatatacacactcactgagtcactctgctgctgatgggtcggctttatggtttgagtcaataatggtaaacagcaaggaatgcccagaaaaaaaaacaacttagaatttcccatgtcaatacactgtattacattgctttttgaagtaatgtgtcatctggaagaaagcaaatcctgtgctggccattttgggggtatrtatatttctttgagcgaaacaggaactatagctacacagttatttctctagaggctagaataacattcagagtttgtagttaaatgtttttactatacacaactacagccttccaactacctttcaatccaatacagatgttataaaaacactgccagagaaggcagattgaaagatagccccaaatgtgaattattaccccaaatggacttttcctcttggaagaaaatgttcttttattaaagagatgtccatagaaagatgatagagataatatctatatctagttctattatagatcagatagatagatagatatagtatatctccatctagtctat

SEQ ID NO: 410413 - DNA, 587 bp, Homo sapiens
ctttaaaagagtaaaccattccattctaattcctgttaaattgagaagttcaccaattataacaccagcaaatgtataaacatctagttatgcaattcatataatataacccttgtttctctaagtcacatcaatcttggagataagaaattatcaattacaaggaattacttacgagtattattgttctatttaacatttttcctaagtgctttatatayaacattaattatttaatattcataacaactctaggaggtagataccgatattattccaatttacagatgaggatactaagctacaaagaacctaagtagcttgcccaaggccacacagctagtaagtaaagaagttggaattcagacccaaacagaatagctctagaggccatgtcataatcccaaagctaagagctgtctgccaaatgttgttcacttctctctcttgcagttattcagcactttttgtactttctacctgatgactacattcttcaaccaccccatcataaccgccatcactattttgggagaagagttcagttctttttccccatcaatcaaaagaagacctttaaatttaca

SEQ ID NO: 410414 - DNA, 587 bp, Homo sapiens
ctttaaaagagtaaaccattccattctaattcctgttaaattgagaagttcaccaattataacaccagcaaatgtataaacatctagttatgcaattcatataatataacccttgtttctctaagtcacatcaatcttggagataagaaattatcaattacaaggaattacttacgagtattattgttctatttaacatttttcctaagtgctttatatacaacattaattatttaatattcataacaactctaggaggtagataccgatattattccaatttacagatgaggatactaagctacaaagaacctaagtagcttgcccaaggccacacagctagtaagtaaagaagttggaattcagacccaaacagaatagctctagaggccatgtcataatcccaaagctaagagctgtctgccaaatgttgttcacttctctctcttgcagttattcagcactttttgtactttctacctgatgactacattcttcaaccaccccatcataaccgccatyactattttgggagaagagttcagttctttttccccatcaatcaaaagaagacctttaaatttaca

SEQ ID NO: 410415 - DNA, 567 bp, Homo sapiens
agttctttcagccaaagaaggtaggccaaataaattcccagggcctgcgatgaggaatactggtatatcataacatccctgtgttacattcaccgtgttttctttccctgctcaactgtatgaatcagtgacttagttcaggatatgcatacttccactctctcctatgttgagatgagttcttctgcccgccactcaatatgtgggaaaacattttgtacttaaaactgttaaactgagtatctccagattcaaatgtctcacaggatgcctggaagtttataagcaagtatgactcctggtgggttccttttaatatcycaaaatctctagcgaaaatatgcagattgcttttagcctttattgttgcaattattttgctcaaagtaaaactggctttcaattttttccttcttgtaccaatatcttaatttttctttaattttttataaaatttcataataaatttggataacatacataaactacagataatttttaatcactaaaattaggtagtttgccagtttgttgagaggattaaaatgagttatataagtaaagcac

SEQ ID NO: 410416 - DNA, 578 bp, Homo sapiens
aaatgtatttgttccagagatttctgaaaatgactcaaataatatatataacatatatataaaatattatatatataacatatatataatattatatatatatayacacacacatacacatacacacacacacacacacacacacacattttctttatccactcattgattgatgggcatttgggctggttccatatttttgtaattgcaaattatagtgctctaagcatgcatatgcaagaaactttttcgtatgacttcttttcctttaggtagagaactattttaaatagtaaaaagaaacaacttgaacatggcataataagggaaaggtgaagtaaattatgatatgcccataaagtgaaatacggtgttgtcatttgaaatcaggtttgggaataatataatatacaatgtaggaaatgtttagtgttaaaaagtcagtacataaaattttatttacagtattatcatagccataaaaagataaaaagttggaaataaaatgaaggctaatactccttggtggtatgattaattttccaattttgtaagcctgcttttacataattttaaaa

SEQ ID NO: 410417 - DNA, 635 bp, Homo sapiens
ttttattgctgctttaacaacgtactacaaattgggtggcttaaaaagcaacaacaagtttattgtctcacaattactaaaggtccaaaatcaaaaagttggcagggccatgttccctctaaaaccagtaggggaatcctttcttttgtcttccttgcttctggtggttgttgggaacctttcacattcctgagcttggagctgcataattccatgtcttcatcatcacatggcggtgttctccctgtgtgtttctatcttcatttgagtgataccagtcattggattaggagcctaccctactgcagtatgacctcatcttaactaataaggtcatggkgctaggacttctacatgtattttgggggagacacagttcaacccataacaccaatagaaactacggattttttttttcttatagcacaattgctgttagctgttacagctatcttgaaataccatttatagtcatcactaatttgaaattattatagttattaaagctattgctagagcatatattttaaagtgttaataaagaaccgcattattaccatatcaaaatgaaaaatatttcaataactatgtcaatataattaatttcttttgtaatactgtgtatgttgttttag

SEQ ID NO: 410418 - DNA, 570 bp, Homo sapiens
atctttttaatgtctatggaatctgcaataaagtcccccttattatatatgatattaaaaatatattctcattttcttgattaatttttcttgaagtttatcarcttttacatttgttttcaaataactatcttttgccttaattttctctaatatatatttgctttctattttattgatttctactcttaatttttttctgttttttagggtttagttttttttccagattagtttcttgagatggaagcttatatccttgatatttaatccttctttgtttctaaaagatgtactcaaagtaatatcttttcctctgagtactgcattagctgcatagaacaaatcatacatattttaatatttttgaaaatgacaaatgaaaaattgtatatatttataatgtacaatgtgacattgcacattatacacgttttgatatatgtagacattgtggaatgattaaaccaagttaactaatgtatccagcacttaacatattgatgttttgtgatgaagacattcattacaatttgttattgttaactctagtcaccatgctgtacaata

SEQ ID NO: 410419 - DNA, 571 bp, Homo sapiens
aactcattatgtgttcatgatataacatgctatgctgttcatagttatgaagttatatcctcaactgtggttgaacccttgaaaatatgctataatcacagatttttttcccctgtattttacacctttaacacaaatagaaagacaatattgcaasagggctgattaaataaagctactttcctctggaaaccaggaattctagtattattgcaggggtggaagttgaattcggggcttcatgcctcagttgggcttactgacctctgttccaatgggttctttggaactgttgaccctcatgatttacacacaaacaagcttttagtggccaatacgtattggtaaacattatataacctctgtagaaaggttccaagaagtcttgtgttaagaaaacctattttattttttaactcagagtttcttttccgcttctctagaccttatatttcttttttctttcctttagctttttaatttggaaataatttcaaacttactgaaaacttgcaataagaatagtaccaagaacatccatgtatcctttgcctagattcactattgttaa

SEQ ID NO: 410420 - DNA, 571 bp, Homo sapiens
aactcattatgtgttcatgatataacatgctatgctgttcatagttatgaagttatatcctcaactgtggttgaacccttgaaaatatgctataatcacagatttttttcccctgtattttacacctttaacacaaatagaaagacaatattgcaacagggctgattaaataaarctactttcctctggaaaccaggaattctagtattattgcaggggtggaagttgaattcggggcttcatgcctcagttgggcttactgacctctgttccaatgggttctttggaactgttgaccctcatgatttacacacaaacaagcttttagtggccaatacgtattggtaaacattatataacctctgtagaaaggttccaagaagtcttgtgttaagaaaacctattttattttttaactcagagtttcttttccgcttctctagaccttatatttcttttttctttcctttagctttttaatttggaaataatttcaaacttactgaaaacttgcaataagaatagtaccaagaacatccatgtatcctttgcctagattcactattgttaa

SEQ ID NO: 410421 - DNA, 593 bp, Homo sapiens
tttttgccatgttgcctaggctagtcttaaactcccaagctcaagtggtctgcttgcctcagtctcccaaagtgctgggattacaggtatgagccactgggctggctgagattaacatttggtttggtaaaatgggtacagtagattgccctccccagtgtgggtgggccacatccaatctgttgaaggtctgaatcgaataaaagcctgaccctcccctgagtaagagagaatgctccttgatggactgtttttaagttggaacatgggtgttctgcctttggactcatacttgaactggaacttacactattggcacttttgattgtcaggtgtttggactcggactgcaaccataccattgactctcctgggtttccagcttgctgactacatctcttggactttacctccataatcacatgagccaattccttacagtaaatctttctttctctcagtacagatatagatatagatatatatcctgttggttctgtttctcaggagaactcagactaatatactcccttagtcatgcaatcatcataagctatttggcaygacagcatcctgaatggattgctatttga

SEQ ID NO: 410422 - DNA, 615 bp, Homo sapiens
tctgcagagctgtgctggccattggcctttgaccttccaggatttggtcaaaaaaattttttttccaggatgctttcagatgtcaaagcatttgtgaacattttacttctgaatccatgttggtattaaagtaaagaagtaatcccaaatattaatctactgtctgattttttttattatagtgctcttaaactattgtggagttatttttgcttctctattctaaaactgggaaaattgattttgagtcatgacatcaaatttttcctcatctccttatccattaatttgttaatgggttatytggtggttttaaaacatgtccataaattctttgacacaactcctttcaaagctggagtctaattccctgccacttcaatgtccaccagaggtagcgactcacttttaacacaccaaatgtggcaagaagtcatgatctgtgacctctaaagatagcccataaaaaatatcaccacttccatttgctctcttttatgttgtccacttttgggggaagccagctgccatgttgtgaggatacttaaatagccttcagagacacctgcatggggaggaactgagaccttctgtcaacagcctgcatgtggaaga

SEQ ID NO: 410423 - DNA, 576 bp, Homo sapiens
aaatagccttcagagacacctgcatggggaggaactgagaccttctgtcaacagcctgcatgtggaagatacaccgtgtaaatgcctcctccaactccactcaagccttcaaatggctgcagccctggctgatttcttgactgtaacctcatgcaattccccagccagaaccacccagctaagccactctgaattcctgcagaatccatgagagacaatatatgattattgttgttttaaggcactaagttctagaggactttgtgaagtggtactaatccagttgtcttgtcmagacaaggtgttgcctttattcatacaacaaatatttattgagcatctagtcaagcagtctgttaggtgctgcttgtaccaaaatcaacagacaaaacatagtacctgcctttaaagagcttataaccttgtgatggatacaaatttaaataaatgattatctaattattaaattacaataagtgtgccaggtaatagggttatgagtgccatgattttcaacccaaagttcaggaaaggtttacccgaagagctgacatataagctgaaacttgaggaatg

SEQ ID NO: 410424 - DNA, 619 bp, Homo sapiens
aataaataatacaagtacaccaagatatatgtaaaaagaagtacattacaatgcatataacaaaattttggaaacctaaatgcccataatcagagtattagctaagtaatatatgacatatgcaatactggacttctttgcagcagttgcaaagtgtaacttgtatactggtatggggaaaggtccatggaatgttaaggagtgaagaaaaagagcactgtgtggatagactgcaatataaatgggatcaaattatacatagcatgtaaacacatgtgcatgcattaggaagtttaggaagatatatgtcaaatagtaatagtggctattccatgggggtaggattatggaaataatttttattgtttttataacttgaactttgaataacagttattgaaagatattttttgccaggtgtgatagctcatgcctgtaatcccagcagtttgggaggatgagayggaaagactgcttgagcctaggagttcaaaaccagcctgagcaacatagtaagactctgtctctaccaaaagcaaaaaattagccaggcatgatggagtccacctgtagtcccagctactcaggaggctgaggtgagaggatcatttgagcctag

SEQ ID NO: 410425 - DNA, 600 bp, Homo sapiens
agttcccctattcaccgtaataccacagttaggaaaagaatgggagtgggagtagagatagtggagtattgttattgttccttattccccttacaagttattagtctatcacccacatatataaatcccattattgaatctgtgtagcattcagattagcatctattagctttcattttcatctactcatcttagcaatttcttcccaaagccagattttctacatctgagcctcatcatcattcttggctacttttctttgcagtctcgaccttctggtcttcatttcagcaggctactttcctggatctcgttgttacccagaactgttccatttgaggaattttataatttcctgtcatttcttttttattcccctcctactgctcttcaatttcatgtcttcgctattamattgtgcctccaattttttccttaactagattccttctggcttcagtatttttttattgttttcttttttaatttaatctaaatcttttcagtcaatctctcaaacaaccctttcattcatatttcagtagacaatatgttgctaagttttttttaaccttagttgacaataaaggaacttcattg

SEQ ID NO: 410426 - DNA, 608 bp, Homo sapiens
gcattgtgaggcaatttcctctttgtgtgaacatcacagactgtacttagacaaacctagatggtatagcctgttgctcctaggctacaaacctgtacartgtgttactgtattgaatactgtgagcagttgttacacaatggtaagcgtcaatatttgcatatctaaacatagaaatggtacaataaaaacgaggtattatagtcttataggaccaatgtcatatatgcagtccatcgttgactgaaagtcattatgaggcatctgactgtacctgaaataagcaagaataagataggtaaagacagactgttcaaaatgcatggcatcttggcaggggacccagaaggaagtctgggacgatccaacaaaagaaggaaacttgacataaacaaaaattggctaaaacctaggaggcaatgagggtgttaattgttttagggctttttgataaagagctttagagttgaaggaggcattctctaggatgaaggaaagccagtgtcttaggattttaaatcttatggaaaataaaaacatctctttctggtgatgtacgaactggccagatgtcactggactgaagcttttagcatttttaaaccaga

SEQ ID NO: 410427 - DNA, 608 bp, Homo sapiens
gcattgtgaggcaatttcctctttgtgtgaacatcacagactgtacttagacaaacctagatggtatagcctgttgctcctaggctacaaacctgtacagtgtgttactgtattgaatactgtgagcagttgttacacaatggtaagcgtcaatatttgcatatctaaacatagaaatggtacaataaaaacgaggtattatagtcttataggaccaatgtcatatatgcagtccatcgttgactgaaagtcattatgaggcatctgactgtacctgaaataagcaagaataagatargtaaagacagactgttcaaaatgcatggcatcttggcaggggacccagaaggaagtctgggacgatccaacaaaagaaggaaacttgacataaacaaaaattggctaaaacctaggaggcaatgagggtgttaattgttttagggctttttgataaagagctttagagttgaaggaggcattctctaggatgaaggaaagccagtgtcttaggattttaaatcttatggaaaataaaaacatctctttctggtgatgtacgaactggccagatgtcactggactgaagcttttagcatttttaaaccaga

SEQ ID NO: 410428 - DNA, 608 bp, Homo sapiens
gcattgtgaggcaatttcctctttgtgtgaacatcacagactgtacttagacaaacctagatggtatagcctgttgctcctaggctacaaacctgtacagtgtgttactgtattgaatactgtgagcagttgttacacaatggtaagcgtcaatatttgcatatctaaacatagaaatggtacaataaaaacgaggtattatagtcttataggaccaatgtcatatatgcagtccatcgttgactgaaagtcattatgaggcatctgactgtacctgaaataagcaagaataagataggtaaagacagactgttcaaaatgcatggcatcttggcaggggacccagaaggaagtctgggacgatccaacaaaagaaggaaacttgacataaacaaaaattggctaaaacctaggaggcaatgagggtgttaattgttttagggctttttgataaagagctttagagttgaaggaggcattctctaggatgaaggaaagccagtgtcttaggattttaaatcttatggaaaataaaaacatctctttctggtgatgtamgaactggccagatgtcactggactgaagcttttagcatttttaaaccaga

SEQ ID NO: 410429 - DNA, 418 bp, Homo sapiens
tgctatgctgcacatgacttcgagttgcagtgattcgcccggaggccgcggcttttagtcctacccacacaccctcacagcctgggcaccccgctcggcagccccaccccgcgcccgctctggcctccggggaaagcgggcggccgggagaagtcgcgagggactacttcgcctccttctctcgcgggcgcccccggttcgggcagcggckgcggcggcggaaggagcgggcggcgtgagcgcttccgccgcccccctcgcggctcccctctctcgggcgtgaggagctggcccgctgagctgctggtgggcactggctggcggggaacctgcagccgctcttgtcctctcccgccgcttctcgggatcctgccccccggacccgggcccgcccgctcttctccggccgggtgggaac

SEQ ID NO: 410430 - DNA, 418 bp, Homo sapiens
tgctatgctgcacatgacttcgagttgcagtgattcgcccggaggccgcggcttttagtcctacccacacaccctcacagcctgggcaccccgctcggcagccccaccccgcgcccgctctggcctccggggaaagcgggcggccgggagaagtcgcgagggactacttcgcctccttctctcgcgggcgcccccggttcgggcagcggctgcggcggcggaaggagcgggcggcgtgagcgcttccgccgcccccctcgcggctcccctctctcgggcgtgaggagctggcccgctgagctgctggtgggcactggctggcggggaacctgcrgccgctcttgtcctctcccgccgcttctcgggatcctgccccccggacccgggcccgcccgctcttctccggccgggtgggaac

SEQ ID NO: 410431 - DNA, 410 bp, Homo sapiens
  misc_feature (1)...(410): n = A,T,C or G
tctgttccaggcatgaagaaaagcaaagcaaaaagttctttgtcctatacaggtttaatcaaagtaatatggggagcaacaaaagggcagttggctggatgaagagggttgaaaaatgtggtgcctttttttgttgttgttttgtgacagggtctcctatttgcgcccacagggtnncctttaacttcctgggctcaagtgacctgcctaccttagcctcccraagtgctgggagtacaggcatataccactgcacccacctggtcttaaactttacagaaagacagtagtgatgacgttaacagaaggagaggtgagaagaggagatctagcagcatttgtttagccggctattataaacatcaggctacagacaaatcgagagattgggcccaagatacagctttact

SEQ ID NO: 410432 - DNA, 590 bp, Homo sapiens
tgtcttttctaagaaaaataatatgtgaaaaataacagtcttgttcagaaaggcttttcaaaatttcattttctatatttaatattctattgttatttatgtaattttaaagtttgctttccctccagccacagagaaatattgcatacattatattcagactagcaataacaatacacatactatagggagaaattcaatggaattacttcttttctattactataaaatgtacatttgttcawagtgtttcctcagcactttccccagcacaaaggtgttaaatgagccttattcctgaaagtgttaacagatgcctaactttctcctctcccaaaccaataatatagaataattctctcaataaatacaaacaggcaaatgttgctagatgcttttatataaaagtgtgtggtcacattcttccctgcagggtaggggatgtgaaggtaatcataatggttaacatctattgggtgcttactgcctgccacagcctcccttccatgcgctttacatatgttaatactgctgaccaagagacaggtactattaatatcatccccattttagtggtaaggaaatgaaaa

SEQ ID NO: 410433 - DNA, 590 bp, Homo sapiens
tgtcttttctaagaaaaataatatgtgaaaaataacagtcttgttcagaaaggcttttcaaaatttcattttctatatttaatattctattgttatttatgtaattttaaagtttgctttccctccagccacagagaaatattgcatacattatattcagactagcaataacaatacacatactatagggagaaattcaatggaattacttcttttctattactataaaatgtacatttgttcaaagtgtttcctcagcactttccccagcacaaaggtgttaaatgagccttattcctgaaagtgttaacagatgcctaactttctcctctcccaaaccaataatatagaataattctctcaataaatacaaacaggcaaatgttgctagatgcttttatataaaagtgtgtggtcacattcttccctgcagggtaggggatgtgaaggtaatcataatggttaacatctattgggtgcttactgcctgccacagcctcccttccatgcrctttacatatgttaatactgctgaccaagagacaggtactattaatatcatccccattttagtggtaaggaaatgaaaa

SEQ ID NO: 410434 - DNA, 621 bp, Homo sapiens
  misc_feature (1)...(621): n = A,T,C or G
ggattttaattcatgttttctgactcaaaccaaatctagcatatttacataatacgattctgtcaatctcattatccttgttctcaacattgaagaatgggctatatctctattggtaatttataaaatatacccctaaatgaaatcatgattatgttatataaatatattgctatgttaaaatattatgttcattataaacactccaaaataaaatttcaaaaatgaaagcaacaaagaacaagtaaaaataaaatttctaaaattttatttctgtttcttaaaatcaycttgtgtacatcctggggttttttcacccctttcagagaccacttgagtactggagtcagttcttcttcactgtatacatcagactaggagatccagcctatctgtgcttcttcagaaactctcttagaaatagcttcttgtcatatcagtattggatgtcagttccagttcatagccacacttaaaactaaatgacacaatagtaataggagaatatggcccccatccatgagtatagtacaatatggtaggagggggtcttctgctccctcgtcatccatcaggataaaaatatggtgtgacaaggcagacccacagnnnnnnnnnnnn

SEQ ID NO: 410435 - DNA, 470 bp, Homo sapiens
actagagaaaatcctggcataacaaattggcccgttagctacatagtaaggaccaatccaatagtaaagtctactggagcctgattaccatgtatgaaagccactatctaataatgaatcactgttacataacagaaaattctaatctattattcccaaggacaataatgaaaatataattctaagaagagccatggcactatgtgagaacatagagtatgaaatgtgatataatacacaattgcaatttcacagattgcttgttcattaaattgtatcatttctccagcatcacctayactgctgaaggttttgccaaacaaaagcatgttctagccagaatacaaatgggtcggggggaaccctactgatttcaaaagaaaatgcactttgagggcaaaaggcaaatctttttaagtaaataggtgtatgcaactctgcttgtaatagttgaatatgaaacacaaggg

SEQ ID NO: 410436 - DNA, 622 bp, Homo sapiens
catcttccaactgcttttgactgcttccttcctgcaggcaaggagagttgcgcagctatggctatttctgcattccagcagaccgtttccagtgttctgggtattgagtgttagactactggtagtagtggcttcctgatcccagcttcccaacccgtgggtctgaattacagcacgatgtttttaagttaattggtccagtgaacctgttgattctcacctcctgaatatggtaagacatgagctcccacactaggtggcgttctgtgattaatttctggaggcttacaaaggagctcattcttctcatccttgcaataattgcataagcacgtaagtccctataataaatccctttctgcttaaaatacctcaagcgcctctttttcctatacaagtgcttgtttggttcacctgtctaatgccaagtcattctaaaggtccaattcaaatgtccattcatccaggaattctgagtcatcctcaagataggcaacaacaaacaggggagtattcctgatcgaagtttatgttttcttctatacactgccatagcaycctgtacatactgctgtcattatatatcagagtataaggttttcctaatgtttatctttctttc

SEQ ID NO: 410437 - DNA, 537 bp, Homo sapiens
gctgatacagtaaataaaaagacttccaaatagtataaaatagtacaacttcagttttatagaaataaaaacattttaaaatgtatcaaatrtgccttaaaagataatctggaaaaatttacaacataatgtcataatggctatctcttagtagcagaagtagagattatctttattttcttcttttataatcacatggacaaagaaaactatctaaaataaagtgatctgagctctaataataaacatttaatagtaaatacctaatttttaccattagtttttactattagtaaggcagttacactatagtaaggcagctctatctacctaatctattttgaatatttggttaaagacattatctttaattctgacataaccctagaaagggttattatccccaaattacagatagggaaactaaagcttcaagagggtaagtgattcgcacaagatcacatcactgagtaaggatttaaacccctgctgttctagttctgctgtgactggaaaggaaaacagccactcatatca

SEQ ID NO: 410438 - DNA, 484 bp, Homo sapiens
actgagaaactgagaattctcaaaaccagcaaagccctgggttctttttgtttaggagcccttccttagcttacttctctcatttactgtttatcataagcagtaagaagaaatcaggcaaacagcttcaaccttttgcttgaaaactccttagcttaaccactcagtacattaggtacattttctgcctcccacattactgccatgacattgttgctaagctttcagccactaaayaaacattccctttcttccattttccaatatggttttcttcattttcatttaagccctcactgacgctctatccaaagatcttcaagcttccagtaagtctcttcggaacttcactaaaactcgcctcaaagaccttccagcttttatttactgtctgagtcctgagtccaaagtcattcccatgttttagtatttgttacagcagcactccattttcaggtcttcagaatctgcattagtcaaaaat

SEQ ID NO: 410439 - DNA, 582 bp, Homo sapiens
ttaacacacagcacaagtagcctcggttagcaaggccctatttgggaggaagtcacatatttaaaatcgaaggctaacctgattaagcccgccaaacttaacctgtctttttcatcgcttacttctagttgatctattttaaactccccactagcaagtcacatagcaaatctcccacgaacttccttacagataacttccgaatgtgggtcactacagtaacggttgcttaaagttatttccaggaaccagttggcagctcttgtccacttcaagctgattaagaccaccgamccttcaactgggcctgcatgaatgcccaaagagaggtgactgtttgatgtcagagggccaaaacctccttcctcagatcatggtgatactgccatttttcaaacatgcattctatgaagagctgtgtaacttgactacatgtatgcagatcctaactaactcacttttccttacccccaatctttctcccccacaccttggagaaccttggtactctattccaaaaacatccttaaaatcccatctttggagaggtgggtttgagatttgttctcccatctcctcatt

SEQ ID NO: 410440 - DNA, 477 bp, Homo sapiens
aatcaatcaacaatgtagatattttgaacccctcccatgaatcagtaatattcttaatggcatctaaaatggcaaatcctttccagaagatttttaatttactttgcycagatccatcagagaaatcactatgtatggcagctatagcctcataaaatgtattttttagatattaagactcaaaaattgaaattactccttaatctatgggctgggctgcacatggatattatgttagcagtcatgaaaacaacattaatctccttgtacatttccatcagagctcttggattaccaggtgcattgccaatgagcagtaatattttgaaaggaatctttttctgagcagtaggcctcaacagtgggcttaaaatattcaaccaaccatgctgtaaacagagtgctgctatcccgactttgttgttccttttatagggtataggcagagtagatttagcatcattcttaagggcccta

SEQ ID NO: 410441 - DNA, 566 bp, Homo sapiens
actctgttgctttcagaccactggaggcagtaagctgtactatgatgatgtgtgggagagcagatgcaaataaataatatgctaaagattcagtcaccttattcctctacaatacatttacctgcattggtatctctcatgaaacctactcaaatgcagtcatgtcagcagttgcccactgcagctgaggtggtcccaatgcttcaggctcagagctggcatacagcacaccagatctgctcagtctcagaacttaactccaaaacccagaggctgacagagctgagttgctgtttctagaatgactatctcaagaaccgggcaaggcataatggaacccattagtaaattcagcagaagaaggaagaggcaggaaaataagaagggggaatgtactagtctgtcttcatgtttctataaaaaactacctragactgggtaatttataaagaaaacaggtttaagtggctcatggttccatgggctgtacaggaagcatggctgaggaggtctcaggaaatttacaatcatggtggaaggcaaaggggaagcatgcacatcttcac

SEQ ID NO: 410442 - DNA, 566 bp, Homo sapiens
actctgttgctttcagaccactggaggcagtaagctgtactatgatgatgtgtgggagagcagatgcaaataaataatatgctaaagattcagtcaccttattcctctacaatacatttacctgcattggtatctctcatgaaacctactcaaatgcagtcatgtcagcagttgcccactgcagctgaggtggtcccaatgcttcaggctcagagctggcatacagcacaccagatctgctcagtctcagaacttaactccaaaacccagaggctgacagagctgagttgctgtttctagaatgactatctcaagaaccgggcaaggcataatggaacccattagtaaattcagcagaagaaggaagaggcaggaaaataagaagggggaatgtactagtctgtcttcatgtttctataaaaaactacctaagactgggtaatttataaagaaaacaggtttaaktggctcatggttccatgggctgtacaggaagcatggctgaggaggtctcaggaaatttacaatcatggtggaaggcaaaggggaagcatgcacatcttcac

SEQ ID NO: 410443 - DNA, 595 bp, Homo sapiens
agtattggaataagctgaagatagccatccaaacagtattaatatgttttaaacgtacaaaacatttcatatgacttgaggatttttgtaagttagaaattcgactcactagcatggattacaccttaaataaatatagtttcttccctggtgttttcatacatcatggagcaaatttatrtttctttggtaaacatttgcttattaaataaacgtttgcctgaagttgaaaggggatgctatatagagctcccctaattgctctgttagctcatttgacctccagaggccctgggatccaaagagctgcacccccacctcaggaagcctggagaaagccaggcagcagcaggacagtgagattttgttcaacaaatctgtattcatagccagatactataatgggagttggaaaatacaaagatgtgaggggctctcagcttgtctgtaatgaagtgatcagggcagggcaagagtgtcagattcagtcatgtaggagcagccctgtgcagaaagaaccccacggccagggagggaggctcaagggaacatatggctgtcaccatatgggagtcgagagggctgagaagaaaga

SEQ ID NO: 410444 - DNA, 595 bp, Homo sapiens
agtattggaataagctgaagatagccatccaaacagtattaatatgttttaaacgtacaaaacatttcatatgacttgaggatttttgtaagttagaaattcgactcactagcatggattacaccttaaataaatatagtttcttccctggtgttttcatacatcatggagcaaatttatgtttmtttggtaaacatttgcttattaaataaacgtttgcctgaagttgaaaggggatgctatatagagctcccctaattgctctgttagctcatttgacctccagaggccctgggatccaaagagctgcacccccacctcaggaagcctggagaaagccaggcagcagcaggacagtgagattttgttcaacaaatctgtattcatagccagatactataatgggagttggaaaatacaaagatgtgaggggctctcagcttgtctgtaatgaagtgatcagggcagggcaagagtgtcagattcagtcatgtaggagcagccctgtgcagaaagaaccccacggccagggagggaggctcaagggaacatatggctgtcaccatatgggagtcgagagggctgagaagaaaga

SEQ ID NO: 410445 - DNA, 602 bp, Homo sapiens
aacaatcttcaaagcctttctcagagtgagttcgctctccggaggcttgctttccacattctcatggcattaggaaacctcagggggatggtatctgcctctgtcacacaagggaatgaatgtaacatatagtattggaataagctgaagatagccatccaaacagtattaatatgttttaaacgtacaaaacatttcatatgacttgaggatttttgtaagttagaaattcgactcactagcatggattacaccttaaataaatatagtttcttccctggtgttttcatacatcatggagcaaatttatgtttctttggtaaacatttgcttattaaataaacgtttgcctgaagttgaaaggggatgctatatagagctcccctaattgctctgttagctcatttgacctccagaggccctgggatccaaagagctgcacccccacctcaggaagcctggagaaagccargcagcagcaggacagtgagattttgttcaacaaatctgtattcatagccagatactataatgggagttggaaaatacaaagatgtgaggggctctcagcttgtctgtaatgaagtgatcagggcagggca

SEQ ID NO: 410446 - DNA, 595 bp, Homo sapiens
agtattggaataagctgaagatagccatccaaacagtattaatatgttttaaacgtacaaaacatttcatatgacttgaggatttttgtaagttagaaattcgactcactagcatggattacaccttaaataaatatagtttcttccctggtgttttcatacatcatggagcaaatttatgtttctttggtaaacatttgcttattaaataaacgtttgcctgaagttgaaaggggatgctatatagagctcccctaattgctctgttagctcatttgacctccagaggccctgggatccaaagagctgcacccccacctcaggaagcctggagaaagccaggcagcagcaggacagtgagattttgttcaacaaatctgtattcatagccagatactataatgggrgttggaaaatacaaagatgtgaggggctctcagcttgtctgtaatgaagtgatcagggcagggcaagagtgtcagattcagtcatgtaggagcagccctgtgcagaaagaaccccacggccagggagggaggctcaagggaacatatggctgtcaccatatgggagtcgagagggctgagaagaaaga

SEQ ID NO: 410447 - DNA, 605 bp, Homo sapiens
aacagaagatctttttatttagcatttcacaaaatataaggctactcctcttgagacttcaccttgagctgtaattttctagctacccatgggtcagagacaggcactagaacttggttagacttactccacctcagattaggagcaattaccgtttgggaaaagaaaagcaaactgaaggatggaacagtctacctagaagatgtttcaaygatcggataactagcattatgactagttccccgccagaatatgccgcctcagccttcccttccaaacgctgcaatctcctttccgttacctatcttcggggttgcagttttgttctaagagcagaggagcatttgcatctgcggggcgaaggtgctgagtgggaggagcggccactgcatgcccacagaggaagctgctgtgacagccctgctgctcctgctgagcaagggaactagagtggcccagtctccacctgggtctggctccgttcccgaagctgattcaggaattgagtcatcattcgcaacctgaagtcaaggaacatcttagttagatttaaaacactgtatttcaataatatctaacagtttaaaaatacccccacatttaac

SEQ ID NO: 410448 - DNA, 605 bp, Homo sapiens
aacagaagatctttttatttagcatttcacaaaatataaggctactcctcttgagacttcaccttgagctgtaattttctagctacccatgggtcagagacaggcactagaacttggttagacttactccacctcagattaggagcaattaccgtttgggaaaagaaaagcaaactgaaggatggaacagtctacctagaagatgtttcaacgatcggataactagcattatgactagttccccgccagaatatgccgcctcagccttcccttccaaacgctgcaatctcctttccgttacctatcttcggggttgcagttttgttctaagagcagaggagcatttgcatctgcggggcgaaggtgctgagtgggaggagcggccactgcatgcccacagaggaagctgctgtgacagccctgctgctcctgctgagcaagggaactagagtggcccagtctccacctgggtctggctccgttcccgaagctgattcaggaattgagtcatcattcgcaacctgaagtcaaggaacatcttarttagatttaaaacactgtatttcaataatatctaacagtttaaaaatacccccacatttaac

SEQ ID NO: 410449 - DNA, 594 bp, Homo sapiens
tactccacctttctaaaaagctatctgacatattgacagtacataatgacagctaaaatttcttatcctttaattcagaggtgatctttttgaaacctttaataaggaaatacaaaaactaaatctgtcacccaaactggagttcagtggcacaatcactgctcacttcagcctcaacctctctgggctcaaatgatcctcccayctcagactcccaagtagctgagactacaggcacacgccaccacacctagctaatttttgtagagacagggttttgccatgttcctcaggctggtctcaaaactctgagatgggctcaagtgatctgcccatctcggcctcccaacatgctgggattacacggatgagccaccatgctcagccaataatttttataattggaaaaaactgcaaaaaatctaaatgtttaacaatagaagaatcaataaaccataatatgcccatacaagagatagcaaaaagacattaaaatgttttcaaagaatatgaactatagagtgttcatgatgtataagtgaataaagcagaacataaaagtgtatatataatgtgatcccttttatgtatatt

SEQ ID NO: 410450 - DNA, 594 bp, Homo sapiens
tactccacctttctaaaaagctatctgacatattgacagtacataatgacagctaaaatttcttatcctttaattcagaggtgatctttttgaaacctttaataaggaaatacaaaaactaaatctgtcacccaaactggagttcagtggcacaatcactgctcacttcagcctcaacctctctgggctcaaatgatcctcccatctcagwctcccaagtagctgagactacaggcacacgccaccacacctagctaatttttgtagagacagggttttgccatgttcctcaggctggtctcaaaactctgagatgggctcaagtgatctgcccatctcggcctcccaacatgctgggattacacggatgagccaccatgctcagccaataatttttataattggaaaaaactgcaaaaaatctaaatgtttaacaatagaagaatcaataaaccataatatgcccatacaagagatagcaaaaagacattaaaatgttttcaaagaatatgaactatagagtgttcatgatgtataagtgaataaagcagaacataaaagtgtatatataatgtgatcccttttatgtatatt

SEQ ID NO: 410451 - DNA, 594 bp, Homo sapiens
tactccacctttctaaaaagctatctgacatattgacagtacataatgacagctaaaatttcttatcctttaattcagaggtgatctttttgaaacctttaataaggaaatacaaaaactaaatctgtcacccaaactggagttcagtggcacaatcactgctcacttcagcctcaacctctctgggctcaaatgatcctcccatctcagactcccaagtagctgagactacaggcacacgccaccacacctagctaatttttgtagagacagggttttgccatgttcctcaggctggtctcaaaactctgagatgggctcaagtgatctgcccatctcggcctcccaacatgctgggattacacggatgagccaccatgctcagccaataatttttataattggaaaaaactgcaaaaaatctaaatgtttaacartagaagaatcaataaaccataatatgcccatacaagagatagcaaaaagacattaaaatgttttcaaagaatatgaactatagagtgttcatgatgtataagtgaataaagcagaacataaaagtgtatatataatgtgatcccttttatgtatatt

SEQ ID NO: 410452 - DNA, 506 bp, Homo sapiens
atgaaaatttagaccatgtaaaaagaaaagtaaaccccacaaaatccatagagacacatgcagatacacagaggttaagagaaaaagaggaaaaaataaatatactggaggaatttagattctgagactgaaggatgagataattcagattaactccccctctgaacacaactggaaaaaatataaaggatattttcttgaaggcattatagaatcaagaagatggtaaagaatggccaagccaagatmctggaagaatggaggtctgagaaggtgagccacgcatatggggccatcttccccttggggcaccttctgattctggagagcatcgctgagcaacaaggactccatccagggctgaaggcacataaattggaatccaaggcccccgaaagccagggagcttggttaatttggactgggatcctgaaggggtactctttaaaagcaaagaccaaccagaagttggcaggccctcataggcactgcagcttagttctgaa

SEQ ID NO: 410453 - DNA, 600 bp, Homo sapiens
actaaactatacctaagggcttataagagacgaaaaaaaatccctcattatgtctttgcttcaactcacccatgacatgagaaccaatactggtatttgggtgaagcttcaaaacaactgaaactatggggaatgtttcaaaccagttaagcactgacataaatgactgagaaactccggtttccttaaaataagcaaaatattcatttgttttgatattattttttgatgacacaagtgtccatctgtagtagctagtcaataaatattggttcatgctacctgtactgaatgtttttgtgctacatggtcaattgcataattgccagtttaaggtacagcattaagagcaaaacaattcacggtgaaataccccacccatgttttcytacacatctgtgattcaacaaggaatgtaatgattcacagtattggcattaagtttatattgaggttgcccttttgtaactgagaagtagggctgggttgtcactgtgatcttcccaatcccttccacatccaaaccctcacttcccttctcagccccactttgaatgacgccaagttaaaacactaatgtagacatcctctgtcataaag

SEQ ID NO: 410454 - DNA, 576 bp, Homo sapiens
accataatatttataagtgttatgaaatttataagttctgaaatttacacaattctttcagtggttagcaaaccatactactattatagactctattatatttcataaccacatattatacacaacatgagaagatctctgtttaagagtcccacctatggtatttgtaaaaccattcaatcaggcaaaaacaaattaaaaaagtaatatcagatagtaatacactagaaaaccaaaccttgaacaaacatttggggatccccaggcttacaaatgtattggtttctattgggtaaagtcttggctttctcattttatatcatttaaacaaaggaaytgaaaattatattttaaaataaaaaccataatctaaaactaatctaagaaaatactgagaaaaaatagcagtaaatttatatattttatcttctgtaatgaaaactaaggggaaaaaggcatgctaaaagcaactagttctaaagtaacttcatgaatgtaccacacagaatacttaacagctttaaaaagcagttatgaaatgcccatttgaacatcagatgccacggacagaacaag

SEQ ID NO: 410455 - DNA, 624 bp, Homo sapiens
ctgtttccaagttctaacataaattcagttgtctagccaggcgtagacatataaacacagaagttattgctgctcatggttgcttaaggtttcaaaagtttgaaatacggcaagtctttgatgctctttcttccatccccagaagctaaaagttatcctgtacattttctcatgtaaacatacttttaaaaatcaactgtcttggcagaactatacaatttttacgttgaagatagatgagaaaaaaatggcacattttccatttcttttgaaaaccccttgggaaggtaccatgatagtctcttagtaagtctaatacagagagcatattattgcctcagagtaatctacctctgtcaactttgattactggaaacagtaaaaatttttttttgcrcatgctatcatttatttctctgttttaaaatggtttttaccatatctagatcatatagctgttacatcatttaaccctttaatcctcgtttaatcttggtgttataaataagtacagtatatatgtgatgcttatcaccagtcctatccatgtatctcgtcattttgattgtcagaatattattagattccttaggatgagatcataaagacaatatttcctgtgtt

SEQ ID NO: 410456 - DNA, 578 bp, Homo sapiens
aaaaaaaaaaaatatgctgaggttactaagatctacagggagaaggaatcttctattagtgaaattgtgaaggaaaacaaaatttgtgctggttttgctgtcacacctaaaattgcaagggtttcgccacagtgcatggtaagtgcttatttaagatggaaaaggcattaaacttgtgagtggaagacaggcacagaaatgtgctccaattaacagcaaaactgggtttgatactatccaagaattcaggcatccactgggggaacatacaccccatggctcagaggggactactgtacacaaaaccatacactcatcataattcaaagacaatatccaaatttcaaattaaaagcaggactaaaacttcaaaaataaacaattagagacaaatgmctattagaacagcattagaaaacataagacactacagaacaaattcaaataaatttgaaaacctaaaggaaacataattcctgaggaaatatagatggccaaaattgaccctattataaataaaaggcttaaacggcccaatttctggagaaaaaagcagcaaaatttatgagggaattatc

SEQ ID NO: 410457 - DNA, 606 bp, Homo sapiens
ttaaggttggctggggttgatgtgaggacagaggtttgtagtctgacttctcagtatccagcacagcaacacattcatttgaaattgtgtttgatgccatccctaggtttaatgttrtaaaataccacagaaataagaaaaacttcaaattttgaaaccaccctaacaatgatgaactcaataactaaaaatatatatatctatatatatctatatatatatctttataagcttagctatatctgtcagactctttgcaaataaacatccttgaacactttactttctgtagcacagaaaatattttaggactggtgtatataggtagtgttagggaatagaccactctcaaaaacattgtcgtagttttattgtccagaagcactttttaaagctccttgtcggtgagtatatggaattactggtaagtatccacaaagcttccagaatagaggtgaaaaatatatatccaatatgtggttcaaattggaatctgctgataagtaacagatgatgaacattaattggataaaattttagtggctgtgaacctgtcacattcagttaatattatcctagattagcaaatgaggaaaccaggcgaaa

SEQ ID NO: 410458 - DNA, 606 bp, Homo sapiens
ttaaggttggctggggttgatgtgaggacagaggtttgtagtctgacttctcagtatccagcacagcaacacattcatttgaaattgtgtttgatgccatccctaggtttaatgttataaaataccacagaaataagaaaaacttcaaattttgaaaccaccctaacaatgatgaactcaataactaaaaatatatatatctatatatatctatatatatatctttataagcttagctatatctgtcagactctttgcaaataaacatccttgaacactttactttctgtagcacagaaaatattttaggactggtgtatataggtagtgttagggaatagaccactctcaaaaacattgtcgtagttttattgtccagaagcactttttaaagctccttgtcggtgagtatatggaattactggtaagtatccacaaagcttccagaatagaggtgaaaaatatatatccaatrtgtggttcaaattggaatctgctgataagtaacagatgatgaacattaattggataaaattttagtggctgtgaacctgtcacattcagttaatattatcctagattagcaaatgaggaaaccaggcgaaa

SEQ ID NO: 410459 - DNA, 553 bp, Homo sapiens
ggaaacacgtggtttgaagcatttcagagaagagatagaatggaatactcaacatgtgtctgaatatatatctctaaaagatgtctttttwaaaagtactataactacattatcattagcacacttttaaaataaactccaaatcaagtacttaagtgtttggttttttttttttaaaacggagtttcgctcctggttgcccaggctggagtgcaatggcatgaccttggctcactgtaacgtctgcctccctggttcaagggattctcctgcctcagcctcctgagtagctgggattgcaggcatctgccaccatgcctggctaattttttgtatttttagtagagacggggtttcaccgtgttggccagcctggtctcgaactcctgacttcaggcgatccacccccgttggcctcccaagtgctgagattacaggtgtgagccaccgcgcccagccatgtttagtgttttctaattgtgttaaatgtcaactttccttgatgaggtcctcttactgtgattgtttaacatttctcttaggcatatgaggt

SEQ ID NO: 410460 - DNA, 478 bp, Homo sapiens
tccaatatcttgtatgtactatacataataaagttggttcatcatcataactggggctttttaaagccagaaccccatcaagaattcccataagtaggaacatttccagaagtggtagggtacagtaagattttttgatctgctggtaaacgctgacggggatacccacttaggctattttattttgaaagagcgatgaaaatttgagcaaatgatagcttccagatacagtaagtcctcacttaacatcattgatagagtcttagaaactgccactttaagtgaaacgacgtataacaaaagcagttgtatcataggttcattgatataaacaagagttaagttcctggagcrtatttgctggccatgaaaacatcaccaaacttctaaataaaagccccaaacgcttctaactattaagcattgaaataaatgtgagctatacatacatttaagtaagattaataagaacaagtaa

SEQ ID NO: 410461 - DNA, 588 bp, Homo sapiens
aaaatcagcggcaatagctcctaattccctctttgtaattttcygggcattaaaaataactggtcagttaggaggtggctaactctgctcaatggttgtgcaaaagcttaggataaaatacagaaacaggagctgaggaggcttctttcccttttcagtgttgtggcttcatataaaatctacatgtgagctctaatactggtccacgcatgcctgtgtggctctcagcgttctagaggccaaggctaagctcactataatataaatgaataaatgaatcaggactgttgagttctcctttcaatccccaagtcaagcacagtgtctaccacataatgtcaaataaatatttatggaaaggaagaaagggaaggaaaaaataaaccaagagaatgaaacagttagatcatgaatggcgctggtatccactgggttcccgtatttcttaagaaaatgaaccctctaaacaaaatagcccaagttttaagtttgttgaaacttcccttaaagatcagttctggggacataagagaaagattttgctactgctaacaaagtttgcaaaactttgaaaagaaaggttttggc

SEQ ID NO: 410462 - DNA, 628 bp, Homo sapiens
taccttgtccttctccttaagttcctggctcaacctcatctccatagatgatcttgctttcaatttggatggaaaaaagccaaaaagaccaaaacagaaacactttggagttcagaaggaatgagaagccgttcagtgtagcagctttgctcacagaaggaacttggagggttcacagagtgttcttaatacctttactattggttttcctaatggggaactgcatgtcatcaagaaagggtgttccttgaagatttgtggaaattttattattttatgatgtcagataaatgaggtgtattgatctaaaaaattgagggatcttaagctttggtrtattctctggacagtaagtagtgttttgtattagctccattggttttcatgtatcctcattgtctgcttcttctcaaattcctttggttgtccacagggttatcttagtccttgggtaattacatcttttccttttgacttcagcactgctacttggttgactactcaagagccattttgaactccacccacacttctcactaactttctaactggtttccctttctcaaatcattttcccattacagccttcaggatgaattcttatatcatttgatcgtcgaaaattctt

SEQ ID NO: 410463 - DNA, 625 bp, Homo sapiens
atcccaactagaagtctcctggctcctagttcaaataataaactaatacttaaccatttttatagttattttaaaggttttatttttaataacaaatacgagtagaattatatcagttatctttccagtgacacttaagattttttccttaattagcctatttaaataaactatagttttatataaccaaatataacttcatagttacattcctgtcataaattctctttgctattcctatttcaaaatattaaattcaatattttaaatgtaatatttataccaatattttaaatataatatttataccaatatttaaaatagagattagttgtcaccttttattttastctatttattaaattttattttaaacttttatttataagataaattgataggtccattgaaatatttctctaggttattgaaaaaagtatgttatatttataaataccaattattcagaaatttggtgaataagtccatcattcaatctggttcaggactatttggaggatttgttctttcgaaattatctcaatgtttttggctatctattataggagtattaaaccacaataatctttaccaagttattcaaacatatttcccatatgttatg

SEQ ID NO: 410464 - DNA, 562 bp, Homo sapiens
tcctgttctttcaaaagtcatatccagtgtagatgagtgccccaatgcacaggaaagtgctaggagaaataaaacaaaaaactgctgtcctgtgaaatagtaatatttttcaatagctagggaccacgccttgctgatgagggaagccaggctgaactgagcattgtaaacagactgtgacaatctaccggaagaaaagaagggatgggaggaatcagtaaacaagattcaaggaatgggtaaatctttcattaaatactatggactaaacctcctcagtggagmgactagcaatatttcactgaaacaggcagtgacaatatgcaagcagattgctttttatccaggatggaattcagaaacctttgttttccctgttctctgacatgtggcactttacttaactaggaatttatgaaacaaactgcagcagtatttgcaacacctccaactgtgtcaccaacggaaatcatgtatgtcatatcacatatcacatttcaattgtaggagatattatggaataccattttcatggaccaatacttctaaaatataatgttct

SEQ ID NO: 410465 - DNA, 562 bp, Homo sapiens
tcctgttctttcaaaagtcatatccagtgtagatgagtgccccaatgcacaggaaagtgctaggagaaataaaacaaaaaactgctgtcctgtgaaatagtaatatttttcaatagctagggaccacgccttgctgatgagggaagccaggctgaactgagcattgtaaacagactgtgacaatctaccggaagaaaagaagggatgggaggaatcagtaaacaagattcaaggaatgggtaaatctttcattaaatactatggactaaacctcctcagtggagagactagcaatatttcactgaaacaggyagtgacaatatgcaagcagattgctttttatccaggatggaattcagaaacctttgttttccctgttctctgacatgtggcactttacttaactaggaatttatgaaacaaactgcagcagtatttgcaacacctccaactgtgtcaccaacggaaatcatgtatgtcatatcacatatcacatttcaattgtaggagatattatggaataccattttcatggaccaatacttctaaaatataatgttct

SEQ ID NO: 410466 - DNA, 537 bp, Homo sapiens
gctttgtcacaatccatgaaatgggaaggagatgtaggaagagtaaacagacactgctctgccacaaaagaataacatgggctgctttcttctagcactagcaaaggcttgaatatagttggagatcttccatgaagggaatttgggatgcaaacacacggttttacctatttaattgtctttgaatcatacagttttctcaakgtctgttataagtataattttattgcaaggttcagattaagattcaagtttgtgtattcctgagaatgataaaagcagtagtattgagaggaactctatagattaaacagagtagccaaggaaacattatgtcaataaaggaattggcatgatagagatgaaaatctctctccaaatctgataatagactactagactaacatatattttattcctcaaggaaaactatgttacaaccaacatttgtataattttccatttttttttatcatttagcaaattgctaaatatattatcttctgtgagtaagcttcaaaaataagattaaatgtg

SEQ ID NO: 410467 - DNA, 550 bp, Homo sapiens
tatgcactccctgaatctaaaataaaagttgaaattatatagaaaaggaacctgctgagaactaggtaaccaaaataatgatgactgtgatgrttaatactgagtgtcaatgtgattggattgaaggatgcaaagtattgatcctgggtatgtctgtgagggtgttgccaaagagattaacatttgagtcagtaggctgggaaaggcaggccaccctcaatctgggtgggcacaatctaatcagttgccagtgtggccagaaaaaaaagcaggcagaagaaagtggaaaagactagactggcttagcctccaagcctacatctttctcctgagctggatgcttcctgacctcaaacatcagactccaagttcttcagctttgagacttggactggcttccttgctcctcagcttgcagatggtctattgtgggacttgtgatcgcgtgagttaatgctccttaataaactcctctctctctctttttctctctatctatctatcaagatagatatagatatatatcctattagttctgtccctctagaga

SEQ ID NO: 410468 - DNA, 569 bp, Homo sapiens
agatgtgcttgtgccagtctattccatccctcctgcagcattgctacttaacttctccaggcccagcgaattcctagcttgatcatagaattccattggtagctttgcatggttttcaacagttgtctaggctgcttattttccctcactttccaaattcatctgatctgagcatatatggcttatgcattatagtttacatactatggtttatgactaaggatgtaacgatttttgactttgttttattgcacttgagctatatcaaattaaactggccttcttgttaatttatcattggtaaaatatttcatatgcatttttttgttaatcctgtacttcaaacctacgaatagcttgcttaattgtattttatgaactgaactgcaatgacctcatacttyggctttacctttgtaataaattgacattagtaaaaaaatgttagtaagtaatgtggaatattgctaatatcattgggcttgacatttgcttggaaggaaaactaggagacacatcttttgaaagacaaatccatatacaatacattctgtaatatttttctcata

SEQ ID NO: 410469 - DNA, 585 bp, Homo sapiens
cgattgcgacagatttttccatagctgagaaataagcacttattcattggtcctggaggttctgaatttttaaaactcatttgtttaaattttacataggaagggccttcttgcttcttcctgctaattttctgtattagtccatttccacacttctataaagatactacctgagactgggtaatttatttmataaaagaggtttaattgactcagagttctgcctgactgaagaggcctcaggaaacttacaatcatggtggaaggtgaaggggaagcaagggatgtcatacatggcagcaggaaagagagagagagaggaagtgtcacacttttaaaccatcagatctcatgagaactcacttactatcacgagaacagcatgggagaagctaaccccatgatctaatcatctcccaccaggtccctcctttaacatgtagggattacaatttgagatgagatttgggtggggacacagaaccaaaccatatcatattctaaacagttctataaaacgttgttttcttttatactcttctcctgtatttaaaccagatacaggaatttgtgttagtgacatga

SEQ ID NO: 410470 - DNA, 585 bp, Homo sapiens
cgattgcgacagatttttccatagctgagaaataagcacttattcattggtcctggaggttctgaatttttaaaactcatttgtttaaattttacataggaagggccttcttgcttcttcctgctaattttctgtattagtccatttccacacttctataaagatactacctgagactgggtaatttatttaataaaagaggtttaattgactcagagttctgcctgactgaagaggcctcaggaaacttacaatcatggtggaaggtgaaggggaagcaagggatgtcatacatggcagcaggaaagagagagagagaggaagtgtcacacttttaaaccatcagatctcatgagaactcacttactatcacgagaacagcatgggagaagctaaccccatgatctaatcatctcccaccaggtccctcctttaacatgtagggattacaatttgagatgagatttgggtggggacacagaaccaaaccatatcatwttctaaacagttctataaaacgttgttttcttttatactcttctcctgtatttaaaccagatacaggaatttgtgttagtgacatga

SEQ ID NO: 410471 - DNA, 507 bp, Homo sapiens
aaatccatgcttcatagtttctcactgactttgaggtaagagtgattaggttttagggcaggtgaagaaattaagtaatttgccaggcaccatggctcatgcctataatcccagcattctgggaggccgagtcaggtagatgaagtcaggagttcgagaccagcctggccaacatggtgaaaccccatctctactaaaaatacaaaattggccgggcttggtggtgcacgcctgtagttccagcttcttgggaggctgaggcaggagaatcacttgaacctgcgagacgggggttgcagtgagccaggatcgcaccattgcactccagcttgggcaataagagagaaactccatctcaaaaataaataaataaataaataaataaataagaaaagaaaaaagaaaagaaaagaaattaagtaacttaaccttaaaaaataaayaaataaaatgtcaaaaaaaaaaacttgaaacaagaaaatgtatagagcagatttcaggtttcat

SEQ ID NO: 410472 - DNA, 521 bp, Homo sapiens
aatactattattgtcactcttttaccaatgagtaaccatctgaggcaggttccattattgcccccattatacagatgtaggtactcttagtacccccattttacagatcagtacactatagcacaggcaggttaagtaagtttcacaaaagttacacagactgataagtaacaaaagtagggtttgaacccaggcattctctgtccttagcttctgctctaacttctacatgatggaacctcaatcttgctgctggcttttgaatgttgttgggcgacagagcgagactctgtctcaaaaaaaaagaaaaagaaaggaagaaaagaaaaataccagtttgccttctcttcattgatgcaatcatcaatgtgtacaaatatgtgtgtgtgtgtgcrtgtgcgtgtgtatgtacgcacatgcctgtacatgcctgcatgtgcgtaagggttagaggagttatgggaggggtataggattttggaaagctaccttttacaaataccaagaactctaataaacag

SEQ ID NO: 410473 - DNA, 521 bp, Homo sapiens
aatactattattgtcactcttttaccaatgagtaaccatctgaggcaggttccattattgcccccattatacagatgtaggtactcttagtacccccattttacagatcagtacactatagcacaggcaggttaagtaagtttcacaaaagttacacagactgataagtaacaaaagtagggtttgaacccaggcattctctgtccttagcttctgctctaacttctacatgatggaacctcaatcttgctgctggcttttgaatgttgttgggcgacagagcgagactctgtctcaaaaaaaaagaaaaagaaaggaagaaaagaaaaataccagtttgccttctcttcattgatgcaatcatcaatgtgtacaaatatgtgtgtgtgtgtgcatgtgcgtgtgtatgtacgcacatgcctgtacatgcctgcatgtgcrtaagggttagaggagttatgggaggggtataggattttggaaagctaccttttacaaataccaagaactctaataaacag

SEQ ID NO: 410474 - DNA, 579 bp, Homo sapiens
ttaattctcttccatctcccaccctaggtttttaaatgacctcttcaaattatcttatgactcaaagaagttaaggaaattgctaaatatcacatggttaacaaatgtcacagctaaaattccaactggcagctctaaaaccctattacattatacaatmttgctaaggagtgatgaatggtgtattggaggtgagaaagaacagagcatatagagaggtttggtcaatagtgtaaaaataaaacaatttgattctagagcaaatttgattgtcaccctttttcattttgatttattgaaacctcagcaaatcttgaccctatgttatacactggggtaacaatacaataagacctacatcttgtattgaaaggtagatgataatttagtgagggatacaagccaatataagaccacagtaaacttggtcattgtcatctcagagctggacattaagtaaacagtggaaagatattcagacatagaacaggagaagcgagaatcagaagcttttccaaaaatagttaccagggattagcaagttactccgtacacaagatcctgtgctaatacagaatt

SEQ ID NO: 410475 - DNA, 549 bp, Homo sapiens
tttattcagtaatggttattgcaatgaaaatacccattccatagtaaactgtatgtgtattcaaggaggtaaaggaagacaaagttttttcttaaaaaaaaagttacgtagctcttttgagaaaattatccttggctataaggatcagcaacaagtatgatgtcagtttgatgttggacaggcaattgttgggcaaatgacctggtgagttttgttttttttgtttgtgtgtttgtaaggttgcaatggcctttgtgcaaggttgtggtgtttgcagagtcttttgtggtagccttgttatcaggcattcacgcatgagaaacctttttcatggccttccttggccctatttgtctgtttttaacacaagtgattccatttgcattcactttcacattagctatcttctctttggcaaatcacttatctttcttggtacttcagtatctttgctacagaatgggaagaaagagttctcactagatgatctacragatcccttccaattctgaatttttttattcatatgtaacccaccaaggcttcacc

SEQ ID NO: 410476 - DNA, 564 bp, Homo sapiens
tgattttaaagatcttcctcctctattttcaccttctcgtctaactgattttaattgttctctaaagttatgagtaacacagtttatagcaatttccacacatttccctaagaaaaatgctgccataaacacacataattaaaatatgtgaagtatcaggttatcaacattatattactaaataagactaacacagtaattactcccaagaaggcatgtataggtctttctgtgtgggtgttcatatgtgcaacactgaaggggaagaaggctgtrgcaggaaatgtatcccttaggaaagagtaggaatgtaatcaagtgcattttgattccaaggaaatgactacattgacttcaacatttttcacatgaaggttgcaggaccttgtactgactatcaagtttcagctcaaagttaccaggaagaaaggctgtcctcagctgtagtagcctggatctctaaactctgatgctcttctctattattcattttaaattttgcataatgcataccattatctgcaagttgtttgtgctttttggtatttattatctcagttttct

SEQ ID NO: 410477 - DNA, 423 bp, Homo sapiens
tcactgaaaacaaattttggagattaagatagtttaatgcaggcacatgaaaaggggaaaattattgctacataaaattgattaaaatattaataatcagaaaacatagtggatgtctacaaatcaataaaatgaaaaaatgtgtgtaaagatacaattcatagaaaagaccttctaaaaagatgctcaacttcactagtaatcaagatagcactaaatttaaaaattagataccatttcagttgtactagattggcacaattttgaaattaaaacttgtagtagtaaagatgycagaaaacaaaacatttttagagtattcacatggatatacatggtgacagtacacgtatatttcattttaattgtcttatatatggatatgtcacgattatttcatacatttatctagtgatggcattt

SEQ ID NO: 410478 - DNA, 572 bp, Homo sapiens
aattctaaccctgatggtaaatgagctaaatgtcccacttcacttaaaagacgtaaagtggcaagctggataaaaagacaagacccaaccatctactgttgtgaaaagacccatctcatatgtaatgacacccaaagtaaagggatgaagaaaagatctaccatgcagacagaaaacaacaaagaggaggagtcactattcttatatcagataaaacagacctaaaccaataaaaaactaagaargacaatgaaatacattacataatgataaagggtatagtccagcaagaagtcttaactatcctaaacatacatgcacctaacactggaggacccagtttcataaaacaagttcttcttggtctataaaaagacttagaccaccagacaataatagagggatatttctaaatcccactcacatcatgagacagatcatcaaggcagaaaactaacaaaaaatactctggccgtaaactcaacacttgactaagtgggccttatagacctctacagagcacttcacccagcagccacagaatatacattcttctcttctgcacatggaac

SEQ ID NO: 410479 - DNA, 576 bp, Homo sapiens
gaaagcaaaccacatttcaatggatgcattaaagttgttcataaaaattcaacattcttacatgataaaatatttttaagcagtagaaaaagaagaaaacatcctcaatttgattaagggcatctgtgaaatgcctacagatgatatcacgctcaatggttaaaggcccattgtttctagctaagatcagaaacatgcaaagatgtctacattcattacttctatttaacattttactcagcatattaaccagtgcaacaaagcaaggaaaactaaaattaatatagattgtaaaaatgattaaaactctcctgtgtagacattattatatttgtaaaaatcttgaggactctacaaaaaaaagtaaatgaataagtgaatttagcaaggttataggacactaggttgctgtaaaaagtattagattggtgcaaaaataattgcggttttygccattaagggtaataattataattccatatactaacaattaataaataaaagatacaatttgaaaaccagttatatttaaaagagcatcaaaaattaaatattaggaataaatataacaatatt

SEQ ID NO: 410480 - DNA, 576 bp, Homo sapiens
tcttcctcttataaggacaccagatgtattggattaaggccccacccttatgacctcatttaactttaattacctctttcagggccctatctccaaatagagccacatggggaattagagcttcaacatgtggactgagagaacacacaattcatccataacactgccagtgaatctttaagaatacatttgaaaaaaagtaagtctgtattttctagtgcttgcataactggtgcattgtaaaagcattctaaatgctaatctggtaattaagttccaactaacatatgaattctataactaaagaggtcatgtgaggagtcactacaaaaccaaatatttataaacaagataaaagttaaatcttagattctgtaatgaagaggaaccctaacaaccaaaatgtactggcattgcctcatcagaaaccattaaaaaaaacaaagataagcaagtcaaggttcatgatattttgaattcatagcayggtctaggatactatatttagtattgtcactgtgaaatttgacataggtttttatcaattcttgtaaatttttaatttatcaaccataa

SEQ ID NO: 410481 - DNA, 584 bp, Homo sapiens
tgttgatcttatttagtatcacggacgcatatgccattgctaatgatcctcaaatgtgtaaatccagctgaggtctttgccttgagccttctacctaaaagtttcctgactcctcactcaattcataccttaaactatgttcatccttcccaaaacttattctgttttcttatgattctgattataaaggaatagcttcaccattcagtgtccaacacagaaatctgtgcattatatttggatgttccctttccatatccaatcaatgcaagcaatcaccccacaatgtctgaactactttcaactttccagagtcagtcccctctccttayagctgattttaggtaaatgtgattctttttagggattactgccatattcttctaaaagtaataccttccttaagtccttgtggctttgtgacttatgcaaactcccttaaccccagaacaaaatatccaagtactaatcctcagaacttgagaatgtgttattttatacgggaaaaggtagtttgtagatatgattaagattaaacaatttaacttggggagattaacctggattatccaggtgagcccaat

SEQ ID NO: 410482 - DNA, 584 bp, Homo sapiens
tgttgatcttatttagtatcacggacgcatatgccattgctaatgatcctcaaatgtgtaaatccagctgaggtctttgccttgagccttctacctaaaagtttcctgactcctcactcaattcataccttaaactatgttcatccttcccaaaacttattctgttttcttatgattctgattataaaggaatagcttcaccattcagtgtccaacacagaaatctgtgcattatatttggatgttccctttccatatccaatcaatgcaagcaatcaccccacaatgtctgaactactttcaactttccagagtcagtcccctctccttatagctgattttaggtaaatgtgattcyttttagggattactgccatattcttctaaaagtaataccttccttaagtccttgtggctttgtgacttatgcaaactcccttaaccccagaacaaaatatccaagtactaatcctcagaacttgagaatgtgttattttatacgggaaaaggtagtttgtagatatgattaagattaaacaatttaacttggggagattaacctggattatccaggtgagcccaat

SEQ ID NO: 410483 - DNA, 603 bp, Homo sapiens
aaaacagaatctgcagtgagaccaatactaaactgctcttaaggtcactcttccacttgagccaacagtctttggaatcaaacatgatattgtttgtgataggaaacatgacacttcctaaggaaaatttctgatgaccaacctaatgatttgcatgcaagtgatagtcaataacttgacaaaataagtatatagatggaatgcagagaagagatacagaaagcatagtagcaaagctttgattttacttgtaaagggtaaaattaaagcattataaatgtccttccctcaacagtaaccaaatatgctgaacaatagcttccaactttggcgtattaccagacctccatgaaaaatagtctctgagctcratctgagaataaaaaaagaaaaataaacaagaattggaaacaattgaaaagttatttatgagcattcacagatgacatttactagaatatgagaggagttaataaagtttggccttgtctatgtattacatagaacttcaatctgggatttttgcataaataagaaaataaaagttgaatatgattagttgacaagctgataatgagaaaatgttctgacacatttatagct

SEQ ID NO: 410484 - DNA, 585 bp, Homo sapiens
aaccatttttactgctcaagaaaattctccaccttcaccatccttcaaccatccatgtgacctcattcttcttagatgctggacaagagctcaagactcactgagtgtgggtacccagaaaggctgtcacactggccctttgctatcactggtagagggcagctacctctcatgatgaggcaaggggcaaatgagctgctaacacaccgccgtccaaggacagtagaactaaaggagcaytgtaacaccccctctgggactttggagtcacaggtaccctcacctggacaccaccacgttcccctcaaggcgacatgcctggtctgaccacaggccctgcatggagcttgctcctgtgtcagtgcctggagcagccagctgggtcccgcatttgctctctcacatgctccctcccataaaggagcacagcaggccaagcagagaggggcactcttgctctgagtccagtgagggggccaagaaaaattctgcatcactctaacaattcataatttggacatcttttttctacaggtagaaatctttatagaaatctcagcaggagataggtataacctaattcat

SEQ ID NO: 410485 - DNA, 468 bp, Homo sapiens
tgtattttgagaatactgagataagaatttaatgaaaattaaggtaaaatagaaaatcttaatttaagtatttatacaattacagggaaatttacatgaaaaaggtcacttaaaaatgaatataaagcaaatgtaaatacacttctctgttcatgccatrtagaggatgaatttgtttctggacaggtttagagagctctctaaccttctgtcttctaaatttccaattaaaatatgggcacagggagtagaggaatgtgtttgtttacagttggcaaaaactgatttcctgtttctaagaaaaaaaagcttttcaaagcctttttggacttcaaatagctcttgcaaaacaatattttgatgagctaagtgtaaatgaatcaggaacatatggattggatttccattgagatacacatgggtttaaacataagctgaagagaatgcctggtaagttatacttagaat

SEQ ID NO: 410486 - DNA, 587 bp, Homo sapiens
attgtgctaaatctgttctgtctgtgctttataaatggaaccacaggctgggcgcagtggctcacacttgtaattccaggattttgggaggctaaggtgggtggatcacttcaggtcaggagttcgtgaccagcctggccaagatggtaaaacttcgtctctactaaaaatacaaaaattagcctggtgtggtggcatgcacctgtagtcccagctactcasgaggctgaggcaggagaatcacttgaatcctagagctggaggttgcagtgagccaagattatgccactgcactccagcctgggaaacagagtgagactccatctcaaataaataaataaaaataaatggagcaacaaagcctagatgacagcacatctgttgacagcatactttaataaatattttaagcccactgttgagacccactgctcaggaaaacaaaaatttctttcaaaatattactgttccttgtcaatgtacctagtcagcaaagagctctgatgaagatgtagaaggagagtaatgtttttgtgtctgttaacatgacattcattcagcaacccacggatcaagaagtcatttca

SEQ ID NO: 410487 - DNA, 587 bp, Homo sapiens
attgtgctaaatctgttctgtctgtgctttataaatggaaccacaggctgggcgcagtggctcacacttgtaattccaggattttgggaggctaaggtgggtggatcacttcaggtcaggagttcgtgaccagcctggccaagatggtaaaacttcgtctctactaaaaatacaaaaattagcctggtgtggtggcatgcacctgtagtcccagctactcacgaggctgaggcaggagaatcacttgaatcctagagstggaggttgcagtgagccaagattatgccactgcactccagcctgggaaacagagtgagactccatctcaaataaataaataaaaataaatggagcaacaaagcctagatgacagcacatctgttgacagcatactttaataaatattttaagcccactgttgagacccactgctcaggaaaacaaaaatttctttcaaaatattactgttccttgtcaatgtacctagtcagcaaagagctctgatgaagatgtagaaggagagtaatgtttttgtgtctgttaacatgacattcattcagcaacccacggatcaagaagtcatttca

SEQ ID NO: 410488 - DNA, 468 bp, Homo sapiens
aaatgatcatgacttattgaagtctcatwatcatatttagcagtaaaatatttttaaattaagtatttttaagtgtacttttttaatacataatgctattgcatgcttaatatgctacagtagaatgagaagtaactttcatatgcactggaaagccaaaaaatttgtgcgacttgctttattgtggtggtctggaaccgaacccacaatatttctgatttatgcctataatactaaagtgatccatttttatttctccttcaaattactgaacacttacatgcttctccttctcagagtgatcctttgggttatcatcccagggacagagagggtagttaagaaacttaacaagaaaataggttcactgacaggtctggatgaaaaggatgccatgtttggctaactagactgttggagtgtactcaagggcataccagacaggaagagcaagagggaaagctccat

SEQ ID NO: 410489 - DNA, 545 bp, Homo sapiens
cattcttactacttgggtaatttaagaataagcttaaaggagtctcagtctgtgaatacaacccaggttactggaagaggcaaatatatatcactctggaagattcccctttattccagtcttctaagaattcttatagataatgtgtcaagaaaaatgagcaggttacagytaagaacccacaaaacagttaaggaaaaaggcatcatagagagagcagaagaaatatcacatagagctaacattgatttgtgaagtttcagatatttaactattagacacagtttgcaaattatctagtatttgacattttaaagaaattatgttagatatttaaaatgggaaaatgggaataattcattaccaagtgacaaatagaacttctgtagatgacaactataatatttgcaatttaaaaactcaatgaatagatttatagtagattagacactgttgaagagaaaattaatgaactggaatgaatatataaataaattatccaaaatatagcaattctacacttagatttagatgtggatacacag

SEQ ID NO: 410490 - DNA, 533 bp, Homo sapiens
aaagaaccaaataattaaaaatgtgtttgccagcctctcctcacatgccagcaggagtggaatgggtgaaacgttgcttttcattatatgtcatactagaatctgattttaattgtgagcctttactrgtgggataacttttttttaaatcttaaaaatgacttttttttttcctgtaataataagtaagtataagaacgaggatggatttttgatcattcccagattttggtcttgttacatggggaagaagcagatttggagatgaaaaaggaaataattggggggacattgaggtagcgatattaagtaggcctatagataatcaggttctgagcactggggagaaatttgggcaggggtacatgttttggagtcatcagcacatagatgttaattgaagtcatgcaaatgaaccaagtaactcagaggataagagcaaaagaagactaaggctggagactcctaatttatgaagaaaagaagaaagatgagtctgtaagtagaagaaagcaggaatataacaaaaatca

SEQ ID NO: 410491 - DNA, 553 bp, Homo sapiens
gtacattctgtgttcacacaagaacaaaacagcctaacaatgcatttcttggaatgtatcaccattgttaaacaacacatgatggtggaggtttactttaagtcatgttctcagattcagctttataactgagatgtgtacttcaggcttgcatgggaattgtctgtacrgcccacaaactggcccccaggtctttgggactccttcctgtaacttagtgctctgatatggagaatagatatatgattggcaccacaagtctcagctgacacattttattgtataaccttacctgtaagttatttttcagtcacactttgcaggcaattttttgaattacttccacagagggctaatgatttattatatcaaatgacaaaagatatatttattaattggaaggtttctgagaaggggttatctcatctacgaattgagaataaaaagaaaatgtagaattttaatagtaggcgcatatctccattttattttgcattccagaaaaaaatttttttaagacggggtcttgctctgttgctcaggctggaatgca

SEQ ID NO: 410492 - DNA, 637 bp, Homo sapiens
attcaaatttccacacttttagaaattacagctctaacattttaatccataattctataatcccaaatccctgaaaatagtaagcatttccataactccttcggaagccaatttgacctgaacctctatgatgttatttgtggtcctgaaaactcctttccgtgtcactgttcgtgcattttagtgccgaaatgttaatgtgtttgattactgggttgtgcccaggccctgatgtagatgtcatatgatataaaatatgtatagagtattaacttttcaaaaatgaaaaaaattataaattytgaaaaattctaaactctgaaatcagactttcaggattcaggtatgattcagatataattttttaaaaaagagcatttgactgacaagtaactttagcaaaacatatcagtctgctttttaaaatttattcattgatccatttaattaacaagtatttattgagtattaaggctggtgatataattgtgattgaaactagaaacagtctaatgggcatgacaaaacattattgtcactcaaatgaatatatacaaactaagttaactgctctaaaggtattttgatatcactcagagtgcaaaataaatgttttttttttttttttttttttttt

SEQ ID NO: 410493 - DNA, 637 bp, Homo sapiens
attcaaatttccacacttttagaaattacagctctaacattttaatccataattctataatcccaaatccctgaaaatagtaagcatttccataactccttcggaagccaatttgacctgaacctctatgatgttatttgtggtcctgaaaactcctttccgtgtcactgttcgtgcattttagtgccgaaatgttaatgtgtttgattactgggttgtgcccaggccctgatgtagatgtcatatgatataaaatatgtatagagtattaacttttcaaaaatgaaaaaaattataaattctgaaaaattytaaactctgaaatcagactttcaggattcaggtatgattcagatataattttttaaaaaagagcatttgactgacaagtaactttagcaaaacatatcagtctgctttttaaaatttattcattgatccatttaattaacaagtatttattgagtattaaggctggtgatataattgtgattgaaactagaaacagtctaatgggcatgacaaaacattattgtcactcaaatgaatatatacaaactaagttaactgctctaaaggtattttgatatcactcagagtgcaaaataaatgttttttttttttttttttttttttt

SEQ ID NO: 410494 - DNA, 637 bp, Homo sapiens
attcaaatttccacacttttagaaattacagctctaacattttaatccataattctataatcccaaatccctgaaaatagtaagcatttccataactccttcggaagccaatttgacctgaacctctatgatgttatttgtggtcctgaaaactcctttccgtgtcactgttcgtgcattttagtgccgaaatgttaatgtgtttgattactgggttgtgcccaggccctgatgtagatgtcatatgatataaaatatgtatagagtattaacttttcaaaaatgaaaaaaattataaattctgaaaaattctaaactytgaaatcagactttcaggattcaggtatgattcagatataattttttaaaaaagagcatttgactgacaagtaactttagcaaaacatatcagtctgctttttaaaatttattcattgatccatttaattaacaagtatttattgagtattaaggctggtgatataattgtgattgaaactagaaacagtctaatgggcatgacaaaacattattgtcactcaaatgaatatatacaaactaagttaactgctctaaaggtattttgatatcactcagagtgcaaaataaatgttttttttttttttttttttttttt

SEQ ID NO: 410495 - DNA, 625 bp, Homo sapiens
gaaagctatgtatttattcacatttaaatcctagcagcatcccatttgctcagctatggaatgcatattttgctccacctctgctaatctaaatccttaaatcaaaaccataatgaaactttagaccccagatgaatcaggagtttcttacaaatcaaataaagttaggattaacatttctgaactcagctaaagaaatttagatcacagcacaggcttatctgaagaataaaattggtgatcaaggaaagcaagaaagaacaacaaattttgagcacagactaygtacctagaatggtggtattacgtgactattttcatttaatttttttcagtggaaatttaggccgtgtaagtaattcatccaaggccatgcagctattccaactgctggtccatgttctttctgtcactccctgatgtctcctagaggtggtctggagaggtctgcagagaccaccaaccatgagagggtgcccctcccagactctacctcaaggctagtaatgccctcttttctctcccactgcaccctgccccatggcagtggccacatggtatggttaccacgtgtggttcctcactccagtagggggagttccaaacaggattatgccacaaccca

SEQ ID NO: 410496 - DNA, 625 bp, Homo sapiens
gaaagctatgtatttattcacatttaaatcctagcagcatcccatttgctcagctatggaatgcatattttgctccacctctgctaatctaaatccttaaatcaaaaccataatgaaactttagaccccagatgaatcaggagtttcttacaaatcaaataaagttaggattaacatttctgaactcagctaaagaaatttagatcacagcacaggcttatctgaagaataaaattggtgatcaaggaaagcaagaaagaacaacaaattttgagcacagactatgtacctagaatggtggtattacgtgactattttcatttaatttttttcagtggaaatttaggccrtgtaagtaattcatccaaggccatgcagctattccaactgctggtccatgttctttctgtcactccctgatgtctcctagaggtggtctggagaggtctgcagagaccaccaaccatgagagggtgcccctcccagactctacctcaaggctagtaatgccctcttttctctcccactgcaccctgccccatggcagtggccacatggtatggttaccacgtgtggttcctcactccagtagggggagttccaaacaggattatgccacaaccca

SEQ ID NO: 410497 - DNA, 577 bp, Homo sapiens
agactaagtccaatgaaaatacatttcaagataaaaactgtaagaagttcattcaatcaataactatcttaagattgaaataatttaaaagaatcaagcagaaatmctggagttgaaaatgcaactgacatattgaagaatgcatcagaatctcttaatagcagaattgatcaaacagaagtcaaaattagtgagcttgaagacaggctatttgaaaatatacagtcagaatagacaaaataaaaaagaataagacatacctacaggatctagaaaataagcttaaaaagggcaagtctaagagttattgaccttaaagaggaagtagagaaagatatagggataaaaagtttattcaaagggataatatcagagaacttcccaaacctagagaaagatattaacattcaagaagatataacaagaaggttatagaataccaagcagatttaacccaaagaagactatctccaagcatttaataatcaaactctcaaaggtcaaggataaagacataatcctaaaaggagcaagagaaaataaacaaatgaaatgcaatagaggtccaatatgtctg

SEQ ID NO: 410498 - DNA, 550 bp, Homo sapiens
ctactgcctatgttcactcaaggccctagggctcaacaattagcaggtggtgaagccagccaggtttgtgttcttcccttcaggttggtgagttccccaggccccaggcaggtccagagactctgtttgggagccaatgattggaatcaaaagccttagaaatctacctggtgttctattctactgtggttaagttggcactcaaaccacaaaatgaagtccttcccactctttcctcccctttccacaggcagaagagcttttccccatggccaccaccaccagcagcccataaggagttctgccrgatgcctgcgactcacccttcagggcagtgggctccgctctggcccagggcaggtccagaaatgctgtccaagtgcctaggccagaacttgggaatcccaagagcctgcttgttactctatctcactgtagccaagtgggtacttagggtggaagacaaagaactctttatttttccctctgcttttctcaagcagatggagtctttcactgtagtcaccatagtttgaatgtgctgagtatc

SEQ ID NO: 410499 - DNA, 609 bp, Homo sapiens
ttgtagaaagagtcagatgtgagaatatggtagcctagaccagagtgatggttatgaggatgsagagaagagggtatgttaaagagatatttaagagaaagtcttggatggggctggtaattaatgacatgcagcatatgaataagaacaaactgagaaggatggctctcaagtgttatccttggcagtggggagatggtggtgcttgtcactgaggtgggctcccccacaggaagatcaggcctgtgataagataaagaagatgaggagtcagtatttactaggatatacaactgcctgtactttggctgacatcagcatgtcgtaatcatggtgacactggtccttaggaaaagagaaagactgtgtattttttccagtctcataagatctcagaaagaccaaaacagcatgtatacagatttcatagtgattcaatacaattaaaagtttatttaaattttaatggatgtctattggtgtcaaaggggaacatttaactgcgttgccttgaataattttactatgtcaataatctgtcaccttttaaaatcataaccaaaggtccttcaggccacaaggggcttcctgaagccacatagtgcatgg

SEQ ID NO: 410500 - DNA, 609 bp, Homo sapiens
ttgtagaaagagtcagatgtgagaatatggtagcctagaccagagtgatggttatgaggatggagagaagagggtatgttaaagagatatttaagagaaagtcttggatggggctggtaattaatgacatgcagcatatgaataagaacaaactgagaaggatggctctcaagtgttatccttggcagtggggagatggtggtgcttgtcactgaggtgggctcccccacaggaagatcaggcctgtgataagataaagaagatgaggagtcagtatttactaggatatacaactgcctgtactttggctgacatcagcatgtcrtaatcatggtgacactggtccttaggaaaagagaaagactgtgtattttttccagtctcataagatctcagaaagaccaaaacagcatgtatacagatttcatagtgattcaatacaattaaaagtttatttaaattttaatggatgtctattggtgtcaaaggggaacatttaactgcgttgccttgaataattttactatgtcaataatctgtcaccttttaaaatcataaccaaaggtccttcaggccacaaggggcttcctgaagccacatagtgcatgg

SEQ ID NO: 410501 - DNA, 516 bp, Homo sapiens
aatagcaactgtgttttcttcctggcttgaacatggttatccaaggctgtgatgcttgcagttgtggctaccatcttggtatctagaggaaaagcaagataatcacagagaaaccagctttcatccttgaactcactttcaagcattttaaatatgcaaaggagtttatytgtcaagccagttttagttgaatatctataacctgcagctgaatgcatcctaagcgatatacaaagattatgaaatccattcagacaagaacaacataatgaccaaagaaatgagaccaagtagggcatgcttacttttgcagatgcctatagtttacaaagaagcaataccacaaaagaaggctggaaagttggggccagttctaaaagaattcatggctaggctgaggaacatgaatttatcctgaaagcagtggtggagagacattgaaggcactgaagcaaattaatgtccctgtccgagcagtataacaggaaagttgttaatcatagggcagaaatgtag

SEQ ID NO: 410502 - DNA, 516 bp, Homo sapiens
aatagcaactgtgttttcttcctggcttgaacatggttatccaaggctgtgatgcttgcagttgtggctaccatcttggtatctagaggaaaagcaagataatcacagagaaaccagctttcatccttgaactcactttcaagcattttaaatatgcaaaggagtttatctgtcaagccagttttagttgaatatctataacctgcagctgaatgcatcctaagcgatatacaaagattatgaaatccattcagacaagaasaacataatgaccaaagaaatgagaccaagtagggcatgcttacttttgcagatgcctatagtttacaaagaagcaataccacaaaagaaggctggaaagttggggccagttctaaaagaattcatggctaggctgaggaacatgaatttatcctgaaagcagtggtggagagacattgaaggcactgaagcaaattaatgtccctgtccgagcagtataacaggaaagttgttaatcatagggcagaaatgtag

SEQ ID NO: 410503 - DNA, 609 bp, Homo sapiens
gctgccccacaccctgtcggggtgttacagaagttcatgtaccacattatctttttagcctctaaataattctagattctgaaacacatctggccagaggtttcagatggattttggacctgtaaaatcatactgtagtggacactattacatttttctgtagggttctatctcactatttgttcttactgagagagcccatttatgcatggtatttacacaaaatttgtacctggttgctctgaggatggggtttattttctggagatattatttccttaccaattttcttatcaattttcctccatctttataactattgggtgttttacccacatcttcagttcagttcagcatgtattgcttgcctcttctgtccaggcaccatgcttggtgccaggagggatgcagacatgagtaagatactgtgaaccacttaagagcaacctggtggcagttgtagacatgtaaataacattcatcttttasgaaaggttaaatgttataaagggcagagttacaaacaaaatgctgagggatcaaagaggaagaataatacacgtcaagggaggcttcacagaggaggtaacatttgagcttaagcatcca

SEQ ID NO: 410504 - DNA, 596 bp, Homo sapiens
cacaaaagcccaaagtaaagataaccttatatttcccagattgtgagcatagaaaattattccgagtcgtcacacaaaccaattttcgcacctggacttgatccaggtacacggctgatagagacacactctkccctcctcctcctctcttttttgtgtactcatattaactttgaggaacccatcttgagagctcttggctgacttctattttaagaacctagttcagccattataattagtccctagtttgtctggaatcctctcgggcattcaaactgttccaagatcctaaataagtccttttcagaattttccactggaatatccctaatggcagaagaaagtcaacttacctttgggggcctgggtccctaactcaaaatggaaaatgctattgaagtcctttattttgccataaagaaatagaaagttctgtatacactttgtgtttttccatataatagatctgaattgtattttattttttaaaaccgttaatattttaaattatttatcattgagtaaaatggatggtccaggatgatacactgtgcctatagctttgagcattccccagcacactgttaaggcgt

SEQ ID NO: 410505 - DNA, 596 bp, Homo sapiens
cacaaaagcccaaagtaaagataaccttatatttcccagattgtgagcatagaaaattattccgagtcgtcacacaaaccaattttcgcacctggacttgatccaggtacacggctgatagagacacactctgccctcctcctyctctcttttttgtgtactcatattaactttgaggaacccatcttgagagctcttggctgacttctattttaagaacctagttcagccattataattagtccctagtttgtctggaatcctctcgggcattcaaactgttccaagatcctaaataagtccttttcagaattttccactggaatatccctaatggcagaagaaagtcaacttacctttgggggcctgggtccctaactcaaaatggaaaatgctattgaagtcctttattttgccataaagaaatagaaagttctgtatacactttgtgtttttccatataatagatctgaattgtattttattttttaaaaccgttaatattttaaattatttatcattgagtaaaatggatggtccaggatgatacactgtgcctatagctttgagcattccccagcacactgttaaggcgt

SEQ ID NO: 410506 - DNA, 596 bp, Homo sapiens
cacaaaagcccaaagtaaagataaccttatatttcccagattgtgagcatagaaaattattccgagtcgtcacacaaaccaattttcgcacctggacttgatccaggtacacggctgatagagacacactctgccctcctcctcctctcttttttgtgtactcatattaactttgaggaacccatcttgagagctcttggctgacttctattttaagaacctagttcagccattataattagtccctagtttgtctggaatcctctcgggcattcaaactgttccaagatcctaaataagtccttttcaraattttccactggaatatccctaatggcagaagaaagtcaacttacctttgggggcctgggtccctaactcaaaatggaaaatgctattgaagtcctttattttgccataaagaaatagaaagttctgtatacactttgtgtttttccatataatagatctgaattgtattttattttttaaaaccgttaatattttaaattatttatcattgagtaaaatggatggtccaggatgatacactgtgcctatagctttgagcattccccagcacactgttaaggcgt

SEQ ID NO: 410507 - DNA, 550 bp, Homo sapiens
tattgtacattctgagactaatcaaggtcttctctgatttcagtcccagtgataattaggtagctctgtctttcctaagttgaatgctctgtggctacagggctacttgagacattccctctcagccctcatagctggctagctggtttcaacacagtattatttatgttcataaagtcctgaaacagtagtgcctctgtcccccagccacattaatcactcctctctctgtgtgcgaccactgaaccgcacacgtgcctcacattcctggcttgtttagtatattcccagtactgggctaagtggttttacatggaagatttcatttagcctgtgcagcaaccctcagacataggtactactattatgtggattctatagatgcagaaactgaggstgtaaataaactgtgatcatacagctaagaaaatggcacagctgggattcgaatatccatctgcctgattcctgagcctgagttcttcctctctgctctacctgttgcctctttgtttataaattggcttctcccattggtgtctaaactctt

SEQ ID NO: 410508 - DNA, 541 bp, Homo sapiens
tctctcttcttagaggttcatctgtttgaacttctgtctctgagtgctatcagctccctgggtacctgtgattatttaattacctgattattagctgaatatttgtcttaaagtgtttgcatattattgaagaaaaataatcaatttcttcagaaatgattcacagaatatgttcttaagattcaaaagtggaaggtaaaattatgaatgaatttatgatgtaattccaagtcagagaaatcaaggaaaaatgtagtctctagctcctgtattgacctttctccagyagagtctctttgaagtgaccttctctctccgtcttcagagcagatgacctgtctttgcaagcaggcttctgaggcaattatttttggttgactttcaggttaacattaaaggcaaaagagggacccaggcttaaaaagaaatgtttgcagcatggaccagagccagacttatggggttctctgccttctacactcctctagtgagtggttcttaactttggctgcacattagaatcacctagatatctggaatt

SEQ ID NO: 410509 - DNA, 564 bp, Homo sapiens
cctactatgtactcccaaaattaaaaattaaatagattataaaaacaaacaaaaaagaacaattgctaatggagaaacaaaggggtgagagttctcactgacttagctatagaaaaccaacctacaagtaagaatcaagcggaagatttgtcctagctccctgggtgctgattgtatatatccttacttctgaagatgtggtctagaccagcagcagcagcagcagcagcagcagcagcagcagcagcatcacctgggattttgaaagaaatgcagaatctcagcccttgacctagggaatcagagtctacattttcacaaggtctccaaatgatgcatctgccatggtgaggtttgagaagcctgacctagatagacacagggcggaagagaatgaccaagggtggggaaatgccagctctgggcttcatacaaggccaagcatggtttttgttgacmccttatttagctgatacatcatgatggttcttgattctcaatgctctcctagaaattttccctgtgacccaagggaagtccctttaaatggtgtttttcctgtcc

SEQ ID NO: 410510 - DNA, 619 bp, Homo sapiens
tgctttaacagcatcctgaaaatttctatatgttcattttcatttaactgaaaatactttctaatttctcttttgatttcttctttaatccatttagtatttacaagtatataattgtgtattatttagtttccatcatccaaataattgggattttccagagatcttttcataatcgatttgaatttacttccattgtggtcagagaacatacttagtatgacatgaacacttycaaatttattgtaacttgttttatagcccagaatattgtctatcttggcaaatgctctgtgtgtctttgaatacactgtgtgttttgctgttgctaggtggagtgttttataaacgtcaattatgtcaagttgcttaacagtgactttcaaatctttgataagcttgatgactttctttttacttctgtcaatcagagagctaattattgaaatctccaagtataattttggatttattttgttctctttgtagttctaacaatttttgctttatgtagtttgaagctctgttattgtgtgccactgttactaatttgccactccaattttcttttgattagtattagtatggtatatcattaaaaataatttttaaattattt

SEQ ID NO: 410511 - DNA, 622 bp, Homo sapiens
agcgggccgcaccctcccacctgggctcttccttctaacgtcggggccgagtgggattcgctttcgcctagatctcggtgggtcgggccccgcgcccgggttttacaggcagcaggtttagcctcttggagacgccggacctcgcagacaggtgcccaactccagaaacagcccagaggaaagggtgttgggggcttgaggtgcatttaggaagacactttctggaggcacttattgacaccrttcaggtgtaggcagaccccaaagcaggggtgagatgagtgccggttccagggtgacccagacacgcacagttcccgaaggtgaaggcggtgcctggcagatatagcccggcgcccagcacttgttaaaccacctggccaggcaggtgctcctggttagccccctatgattggaaagtcgattttaagccattttaacttatgcagactctttcttggtcaagatactgtgaaccagtttggagggggcgccacttagcatctgagttgcatctctttcaggaaggattctaaccctccgattttgcttcagaatttttgccaaaccgggtccagcctctctgttgaagctgatctgcccacaccagttctgaaacagg

SEQ ID NO: 410512 - DNA, 546 bp, Homo sapiens
taagccaccacacctggcctgaaacaatttttaagaagtgatttagttgcaagttggctcagatcctctgtttaaacattatgaattctcctcaagttatcagaattgactaacttttagttaagccccattccatggcaaatagaacataccttaggctagggacaaatttattgcatctttatatatttgtgaaatttagcattctgcctctaaatttcctgtaataaaaatactcttagaatgatccttcttgaaaggacgtgattctaaggaagtcactgaacataaataactaagtaaagaaggagggggagggcattccagagaggtttctcatcactgctatttgcatggatttttacctgggggcagccagttactaactctgagctgctttcaggaacttccaagtacacggagttcagggatctcctttttcctattaacttggttataatggtttccaggattaataaacaaactcaaagtttggcmcaggaagcagctctcatgttataaatcatagcacccacaactttacca

SEQ ID NO: 410513 - DNA, 398 bp, Homo sapiens
acagatatgtgccaccaagctcagctaattttgtatttttagtagagatgggttttctccatgttggtcaggctggtcttgaactcccgacctcaggtgattccggccttggctcctaaagtgctgggattacaggcgtgcagacacccatcctcaccataaataagatacctcccaacctacacacttccaaggatgagattggagagctactttaatactctgggtgcactcatttccaaaggcgtactttcaccttctgatgtggccctctgttagggcctcgggtttattgtatatattttgktggatcaggacatgctaagtcctgacctcagaggcatgcttggtggcgtggcctctgttagggcctcgggtttattgtatatattttgttg

SEQ ID NO: 410514 - DNA, 529 bp, Homo sapiens
atgcaaatacaggtgtctttggtagaatgatttatttttgaaggtgggggggtatatacccagtaatgggattgcttgatcaaatggtaactctatttttagttcatcaagaaatctccaaaatgccttccactatagctgaactaatttacattcccaccaacagtgtataaatgttcccttttctctgcagcctagccaatgtctgttattttgtgactttttaataatagccattctgactggggtgagatagyatctcattgtggtttgatttgcattaattaaacacctttagcaacatattagtaaacaatttatctttattgagttttacggactcaattaatcctgcctagtcttccttagtactcttaatatttgtaatataagaaatgttacttttatcacataatttatccttcattttaaatgaacaaaaccaatattgatttcattttcagcattgaaaagaaacaactagcatatcttctttcataatatgcagtcttgtggttattcattaatt

SEQ ID NO: 410515 - DNA, 582 bp, Homo sapiens
gtgttaatcaaattagctgggtgaataaagttcaagtaattgctttattcccaatagaaaaaagtgaaaagggggtgaggagtggggatgtggagagtgggaaagatyatataaaattatagttatgctgtgtttctcactgctggtcacagccagaatttttctagagagaagtatcacttgtgaagctggccaggtggaaaatgactagttttattaaaaatagcagtaacgaaaaagcatctacctactatcaaatatactttaatatgagtataaactgtgagcatggctctggtgctctagccatctacaggctaggaagtgtgtcatgttttgttcaaacagactaagagtttaatcaaagcagacaggtagcactaagtatcaaaagaaaaaaaagtggtccctcttatctctccaactcatgcctttattttggtaatgtgaagattacagaaggaaattgaagaggtatacggtggtagtctagtaaagaaggctctgaccagagggaatctttggctctgggaaattttcccccacacagcacaggaaatattctgtagccccagctgagcc

SEQ ID NO: 410516 - DNA, 502 bp, Homo sapiens
cctggaaaattcagtggttgtgttcatgtttagggtttgctatggtcttgttgcaaagatacacacttgaagatttatatagagyagacttggcttcacctctgcacctgttcattcactttttctgtcaaaaatatatttactggtagttttctacaaaatattttacaattaacccattttcaaaaatattataacaacatattcagaaatatagtgaaaagagactttaaaatttttcaatcatacattttcagctataatctaaacatctcagttaatcttatttttactacctagtatctaaataatctttttaggaacagaaaaaacatgtcattttacttctgcttctataaaactatcttttgggaatgggaacctggtacttaatctctctctctttctctctcacacttgctctctggctttcttttttaattcaaaaataggttgaggttatctataggtaaagtcatcaccaaattttttccaattactg

SEQ ID NO: 410517 - DNA, 555 bp, Homo sapiens
tgctcatgcagaagatgaattggttgcactcagtgatgtctaaaaattcctttcagctccttctcctttgtcataatgtttcaagttccatcattaaacattgatttcttctagtttctaaggcttttaggttttcaaggattgccattaaaatgcgaacctgaggggagaaataacatattagagtgtttttagmccatatatttgaggagcttttgaatgatctcttaaggggcaggccatttgggaataaggcatgggtgatctgccaggacaaagggggctaggaggatcagggagggacacaaatggggtgacagaggagacaacagacataaagaataactaaatgctagtttcttttacatatattttatcaattcctgcagaaaacctgggatttagttattaccatacccatatttcatatgaaaaactgaacttcaaagaccgaacatgacacatgtacagttatttggagaagcagagatagcatgggaacccaggttgtaggatgccagggtctatgcccatattcttcccactgcagccagc

SEQ ID NO: 410518 - DNA, 555 bp, Homo sapiens
tgctcatgcagaagatgaattggttgcactcagtgatgtctaaaaattcctttcagctccttctcctttgtcataatgtttcaagttccatcattaaacattgatttcttctagtttctaaggcttttaggttttcaaggattgccattaaaatgcgaacctgaggggagaaataacatattagagtgtttttagaccatatatttgaggagcttttgaatgatctcttaaggggcaggccatttgggaataaggcatgggtgatctgccaggacaaagggggctaggaggatcagggaggracacaaatggggtgacagaggagacaacagacataaagaataactaaatgctagtttcttttacatatattttatcaattcctgcagaaaacctgggatttagttattaccatacccatatttcatatgaaaaactgaacttcaaagaccgaacatgacacatgtacagttatttggagaagcagagatagcatgggaacccaggttgtaggatgccagggtctatgcccatattcttcccactgcagccagc

SEQ ID NO: 410519 - DNA, 508 bp, Homo sapiens
atttcaaatcttcttgctattgtgaaatatacaatataatattgtcatcctactgtgctatcgaacatcagaactaatttcctctgctaattttatgtttgttcttattaactaacctttcttcatccccttcatgcaaaggcacccttcccagtctctcatatccaacattctactgtctaccttcatgatattaaatgttttgctgtcacatatgagtgagaacatgtaatatttgtctttctgtgcctggyttattttacttaacagcctccagctccatccatgttgctgtaaattgcaggattttattctttctttatgtctgaatagtattccattgtgtatacacaccacattttctactgatggatacttaggttgattccatatcttggctattgtgaatagtgcttcaataaatatgggggtgaagatatcactttgatacactaatttccttcctttgaaaaaattctcagttgcgagattgctggcttgtatggca

SEQ ID NO: 410520 - DNA, 508 bp, Homo sapiens
atttcaaatcttcttgctattgtgaaatatacaatataatattgtcatcctactgtgctatcgaacatcagaactaatttcctctgctaattttatgtttgttcttattaactaacctttcttcatccccttcatgcaaaggcacccttcccagtctctcatatccaacattctactgtctaccttcatgatattaaatgttttgctgtcacatatgagtgagaacatgtaatatttgtctttctgtgcctggcttattttacttaacagcctccagctccatccatgttgctgtaaattgcaggattttattctttctttatgtctgaatagtattccattgtgtatacacaccacattttctactgatggatacttaggttgattccatatcttggctattgtgaatagtgcttcaataaatatgggggtgaagatatcactttgatayactaatttccttcctttgaaaaaattctcagttgcgagattgctggcttgtatggca

SEQ ID NO: 410521 - DNA, 508 bp, Homo sapiens
atttcaaatcttcttgctattgtgaaatatacaatataatattgtcatcctactgtgctatcgaacatcagaactaatttcctctgctaattttatgtttgttcttattaactaacctttcttcatccccttcatgcaaaggcacccttcccagtctctcatatccaacattctactgtctaccttcatgatattaaatgttttgctgtcacatatgagtgagaacatgtaatatttgtctttctgtgcctggcttattttacttaacagcctccagctccatccatgttgctgtaaattgcaggattttattctttctttatgtctgaatagtattccattgtgtatacacaccacattttctactgatggatacttaggttgattccatatcttggctattgtgaatagtgcttcaataaatatgggggtgaagatatcactttgatacrctaatttccttcctttgaaaaaattctcagttgcgagattgctggcttgtatggca

SEQ ID NO: 410522 - DNA, 610 bp, Homo sapiens
tcatacagttgtacatctagctaagctctccttggatttccagaacacatttgagttgatatattcaatcacttgaacctagaacatgttaartgctttataagtttagcaattatttttattgtatgtacaactgcatggttgatgccttctttcagatgtatcagaggtatctcaaactgtatgttcaaaacaagtcacctgtatgttgtctgccaccaatatggtttttctccagtgtttctgtttcagtgagagctaccacctaccatctagctataaaagccaaaaacctggtagtcttctttgataattgctgtttattaatttacccacaaaaaatatcacgaatccctctatctctatatcaatctttaattcccccatctcttgcctaaattatggcaacaatgtcctaaacttttaccccaaaagctcttctttttgcaactttgcagctggagtgatcttttgaaaattaaaattaatttgtgtcactcttccttatgtcttacccaattaaaaatagctccatgatcttgggataagagcaagtgcctcctcatggtcaggaaggcttgtcattggcattgacttctccaggttcctt

SEQ ID NO: 410523 - DNA, 603 bp, Homo sapiens
aacaaaacacatgagcaaaggtgaagagatataaaatggcacataggagagaaaagaataatctggtttgttgggaagtggctggaaaagagactggcatgattgtgaaggtctgtccatgtcatgcaaaagaatatgaacttcatcctcaaggattcttaagcaaaagagggatacaagtacatcattaacaacatatactgggggtagaaaatggcctgctggatttggcgggagaacaaactaaaggctagaagaatagttcgaagactgttaaaataatctgggcaraggatgttatggttgtgagctaagcagtatgaattgaaagaaaggtaaaaattcaagatgtgatcttcttaccaactcaaagtcactgtaaaggtccaataatcctatccctctggcacaacctccattcacttgaaagtagcagtattaattttggcaaagcaagacaccctagtaaaatgtaaaatatagataaccacctcaggctgcatcctagaatcgctgtgatgggtagtaaaagccatcctcagccagctgctaagtcagactccatagaaattcttaacagcaataataaaaataatatagccc

SEQ ID NO: 410524 - DNA, 603 bp, Homo sapiens
aacaaaacacatgagcaaaggtgaagagatataaaatggcacataggagagaaaagaataatctggtttgttgggaagtggctggaaaagagactggcatgattgtgaaggtctgtccatgtcatgcaaaagaatatgaacttcatcctcaaggattcttaagcaaaagagggatacaagtacatcattaacaacatatactgggggtagaaaatggcctgctggatttggcgggagaacaaactaaaggctagaagaatagttcgaagactgttaaaataatctgggcagaggatgttatggttgtgagctaagcagtatgaattgaaagaaaggtaaaaattcaagatgtgatcttcttaccaactcaaagtcactgtaaaggtccaataatcctatccctctggcacaacctccattcacttgaaagtagcagtattaattttggcaaagcaagrcaccctagtaaaatgtaaaatatagataaccacctcaggctgcatcctagaatcgctgtgatgggtagtaaaagccatcctcagccagctgctaagtcagactccatagaaattcttaacagcaataataaaaataatatagccc

SEQ ID NO: 410525 - DNA, 567 bp, Homo sapiens
tgctttcttttctaacccagaagcacattcattgtatagtgtttactaccttataagcacataatcagagaaagcctttctgtattctgtgaattcaacaagttaatcccttatggggcaatcctcctgcaaccctgttattacacaaaggttttatgtcacaccatccattccccagtcttctcttctgcagagttctaataatcagaggtttcagacctaataagaaaatctgaacaattccacatttcactttccctgtaacttgaggatagttcccattaatttattcagcaaataagctgagtgcctatgtgttagacactcctctgaattaataggattaatagctggctgaaatagatataaagtttatttgctagtgagtgaaataagaatgaaacaatgaatgccacaaataagtacaaattgagaaaagtgatgtggaaaaaatcaacatgcatastaggataattaatttagtatgccatacaggatatagggcagagaggagaaggggggagaaaggtttgtgagaaagtaatgtagaaatagagatcaaaggct

SEQ ID NO: 410526 - DNA, 515 bp, Homo sapiens
ggctaggattacaggtgtgcatcagcaggcccagctaaggaatmatagattttgaatgcagtacccatgtcccttaagagtttttaaaacacagatcaatctctattatatatggatttaatttttgatacaggtttgataaggggtccaaattttattttctctggaagaaagtctgctgtgccagtattatttataaattaatttatattttgtctctgaatccaattaggtccttggtcatgtattaattttttatttttatatttcagatataaaaatttatatagaatgaatatataatttacaatataaaagttatataaaaatgtgaacattaatattttatttttatattttggatctgtttcaaattgatgtactctaaaaatacttatgtcataatcataattattttgtgttgatttaaggacaggtgccctataatacttcctaatgtctggtgagtcatgtgctttattagactactttttcatactcttatttgttcttta

SEQ ID NO: 410527 - DNA, 515 bp, Homo sapiens
ggctaggattacaggtgtgcatcagcaggcccagctaaggaatcatagattttgaatgcagtacccatgtcccttaagagtttttaaaacacagatcaatctctattatatatggatttaatttttgatacaggtttgataaggggtccaaattttattttctctggaagaaagtctgctgtgccagtattatttataaattaatttatattttgtctctgaatccaattaggtccttggtcatgtattaattttttatttttatatttcagatataaaaatttatatagaatgaatatataatttacaatataaaagttatataaaaatgygaacattaatattttatttttatattttggatctgtttcaaattgatgtactctaaaaatacttatgtcataatcataattattttgtgttgatttaaggacaggtgccctataatacttcctaatgtctggtgagtcatgtgctttattagactactttttcatactcttatttgttcttta

SEQ ID NO: 410528 - DNA, 559 bp, Homo sapiens
gcacatttagtagtcatattctaagagttcctatggttaaaaagaaaacaaataaagaaacaaaatcccatgccattgcaagctgtaaaagtaatcttgctgtacatttcttatataaatggaaaaaaacatacatggatttttagaaaacctactttttattgcttaaagaaagcatccaaatgggattaaaaatatagttttgttggcagggatgcatattatttgttgtcgagagatggctaaagagtctttttaactaattttttttttctctaaatagctccttctactctttcagattttttttctgatttcttctcctctgtccctcacaaccaccaaatcacacagagatacttataggcaagtaagaacagagagagagagagagagagaraaaaaaagcatctattgagaagcaatatatcatgattgtgctaggtactttcatttgtatttgtatttcatcttatagctatcctcttgctgtggtttggatgtttcctgcctctaaacctcatgttaaaatctaatccccagtgttggaggtggggcc

SEQ ID NO: 410529 - DNA, 575 bp, Homo sapiens
gttcttatcacaattctctgagcaaatgatgcccttataggattgtacttttcagatttagtacctctgcacatttagtagtcatattctaagagttcctatggttaaaaagaaaacaaataaagaaacaaaatcccatgccattgcaagctgtaaaagtaatcttgctgtacatttcttatataaatggaaaaaaacatacatggatttttagaaaacctactttttattgcttaaagaaagcatccaaatgggattaaaaatatagttttgttggcagggatgcatattatttgttgtcgagagatggctaaagagtctttttaactaattttttttttctctaaatagctccttctactctttcagattttttttctgatttcttctcctctgtccctcacaaccaccaaatcacacagagatacttataggcaagtaagaacagagagagagagagagagagagaraaaaagcatctattgagaagcaatatatcatgattgtgctaggtactttcatttgtatttgtatttcatcttatagctatcctcttgctgtggtttggatgtttc

SEQ ID NO: 410530 - DNA, 614 bp, Homo sapiens
ggttgattcggtgtatctaatgcaaatatttggcatatctctattgccagaccatgccattaaatgtcaattttttttttctagtaagaaaatagagtccttagtgtctttaaatttaatcagtttaaagagccaactcctgaaactccacgatatggtttaaatctgtgtccccaccaaatctcaggtcaaattttaatctccaatgttggaggtgggcctggtgggagatgattggatcatgggggtagatccttcatgcatagtttagtaccatccctttgttgctgttcttgtgttactgagtgagttcttgcgagatctggttgtttaaaagtgtgtagcccctccygcttcaccctattgctcaccctgctgccatgtaagatgtctgctccccatttgccttctgccataatcagaagtttcctgaggcctccatagaaacagaacagatgtcagcatcagtcttcatgtatagcctgtggagccatgagccaattaaacctcttttctttataaattgcccagtcttaagtatttttttttataacagttggagaatagcttaatacagaaaattgttactgaggagtggggcattgctatgaaga

SEQ ID NO: 410531 - DNA, 587 bp, Homo sapiens
cagaattcttcctccagttaaaactaatcaaaaattcctgcacttcccagtaacagttggaagccccagctgcagcgaactttggggataatattccagcctgtgagagctgctgcattggttgctcccagaaaagccatggaggcctaacccctgccccagtctgtgctgatagtgggacttgaagtcaaaacaaaaaattctcaaatgtcgggatttratgttgttgttgttgtttttttttttttggtgggggtttggacttagtgggagcctgttaattctttttattttctgttgctcttttgttatggaattgtctatcctatgcctgtcccaccatatattttagaaacatataatttgtttgatttcacagctggaggggaattttcctcagaatgaatcataacctgagtcttacatatatccaattttggtgatatttagatgaaaatctagaccacagacttttaagattatgctagaatgagttaagaccaggagctattgggttaaaatgaaagtactttatatgtgagaagtacataagttttgggggtgacagaggcagaatgctgtaattt

SEQ ID NO: 410532 - DNA, 587 bp, Homo sapiens
cagaattcttcctccagttaaaactaatcaaaaattcctgcacttcccagtaacagttggaagccccagctgcagcgaactttggggataatattccagcctgtgagagctgctgcattggttgctcccagaaaagccatggaggcctaacccctgccccagtctgtgctgatagtgggacttgaagtcaaaacaaaaaattctcaaatgtcgggatttgatgttgttgttgttgtttttttttttttggtgggggtttggacttagtgggagcctgttaattctttttattttctgttgctcttttgttatggaattgtctatcctatgcctgtcccaccatatattttagaaacatataatttgtttgatttcacagctggaggggaattttcctcagaatgaatcataacctgagtcttacatatatccaattttgrtgatatttagatgaaaatctagaccacagacttttaagattatgctagaatgagttaagaccaggagctattgggttaaaatgaaagtactttatatgtgagaagtacataagttttgggggtgacagaggcagaatgctgtaattt

SEQ ID NO: 410533 - DNA, 382 bp, Homo sapiens
tgcagccctgaagatccagcaagcagctgagaccttccaggaatcttggcagctgttatgcaggctaggccagcagtagtagaggcagagagagtgagaacctggagtagggccgtctttgagacacagggagaagggagctgctgaatggttatggagcatccctgtttggagcagtggggcaaatagagtttaaaatattggtaacttaattgacttwtccaatactgtactatggaagaaagcagagctaaaactcaattcttctttttttctccttcgtagtctaatatactgttgttgttgctgttgttgttgttgtttgtttgttttggtctctgagcaccctccacttgcaggttctgtcagtccatgtatggtc

SEQ ID NO: 410534 - DNA, 591 bp, Homo sapiens
tctggtgtctcttcattctgtgtatgcccttgccattgttccatctgtgaggggcatcctttctgcagaaattaaaaattgcctcgctgagagaactttttgtctgaatgctgacttttccttgcagaactgagaaacaaacattttgcatttctaatgagtatgaaaattttttgtatagtgttttattacggatttattttactttaaactacatgtgaatagataaaaaaatataaataattagcttttttaaagcacatataaatattattagtttgtaaatttttgcaacttttaaaattcattttgtttatatatgcttttgaaatgagctcatgtttatataaatatatttagtttatttaatttaactcctgttagtatttcaaaatatattattttgtcatttatcccaattgatatagccatcyttatttctgtgaacattttggttagtttttcaactgaattttaaattccagatttgctcttgttccctgattctgaatgggtatttaatgggaatttcagtaagcttttaatttcacatcactatctgtaacttcacaacaacagacaattgacttc

SEQ ID NO: 410535 - DNA, 591 bp, Homo sapiens
tctggtgtctcttcattctgtgtatgcccttgccattgttccatctgtgaggggcatcctttctgcagaaattaaaaattgcctcgctgagagaactttttgtctgaatgctgacttttccttgcagaactgagaaacaaacattttgcatttctaatgagtatgaaaattttttgtatagtgttttattacggatttattttactttaaactacatgtgaatagataaaaaaatataaataattagcttttttaaagcacatataaatattattagtttgtaaatttttgcaacttttaaaattcattttgtttatatatgcttttgaaatgagctcatgtttatataaatatatttagtttatttaatttaactcctgttagtatttcaaaatatattattttgtcatttatcccaattgatatagccatccytatttctgtgaacattttggttagtttttcaactgaattttaaattccagatttgctcttgttccctgattctgaatgggtatttaatgggaatttcagtaagcttttaatttcacatcactatctgtaacttcacaacaacagacaattgacttc

SEQ ID NO: 410536 - DNA, 627 bp, Homo sapiens
gtgctcacccaggcggagggtgccttcgtggcctcactgattaaggagagtagcactgatgacagcaatgtctggattggcctccatgacccaaaaaaggtcagtctgcagccacctctatctccttataaacatttttgagaggtaagagggacgtttaaggtctggcaccgcaatcaccaacttttatctttttgtttgtttaaataaaagcaacctctttatagatcctataatgtatgagttgtgaagttcagtgtaggtagttagagacatgagctgaaggctgaattttctgggctctgggaattcatgcacccactcattgtgtctacttctagaaatgcatctttatgtacaactttttccctattttgctattgtctgtcttggaagaggtccctctgtagactatatagaaaatgagtagtggaggagaatctactgctggcatttgttatacattttatacaagtgtataaaactgtacagtatattatttagtttaacactataaactaaataatatatcaacractactctacagccaatgttatgctggatatgagagttctgagattcaggaaaaaaatcagaaaccactctctttaatgggcttttatggg

SEQ ID NO: 410537 - DNA, 600 bp, Homo sapiens
agtccagctgatactggttagaatcaagatcaccatcaaaggacctcagaaagacatctggttcattataatctcatttccatgctaaatgacactcctaccagcacaatgacagctgacaatcaccatgacaatggccagaagaagcaataaaggtacaaaaaggaagcacactctggttcctaggaagttcacaacctatttccagaaaagacatgaatattcctccctttgtttttaatgcccagtcctttcattggagaaaccctatattttaaccmctttacccctcactagcagagaagccaatttgtgagtcatgttcctgcttctcaattccatggccatcaaataaatcctgcagtgcttgacactcactttctgtttcatgtattggctttgtgacaccaaatagggaaagactccatcttttgggggactggttttgtctgcaatgatactaatatcagacatatttgactttaaagcaaaaatgttacttgagaagaaaaggagtattttataataataaagtagttaattcttcaggaagatgtctcaaaatacctgaaacaggtggaacccactgcagtgtgacaa

SEQ ID NO: 410538 - DNA, 536 bp, Homo sapiens
cttttgggggactggttttgtctgcaatgatactaatatcagacatatttgactttaaagcaaaaatgttacttgagaagaaaaggagtattttataataataaagtagttaatycttcaggaagatgtctcaaaatacctgaaacaggtggaacccactgcagtgtgacaaagccgctataaccagactgcccctccggattcctcctctctggggaggacatctctgaaagaaaggcagcagcctcagtcaggggcttatagataaactcccatctccctgggacagagcacctgggggaaggggcagctgtgggccaagcttcagcagacttaacctttcctgtctgctggctctgaagagagcagcgggtctcctcgcacagcacgcaagctctgctaaaggacagattgccttctcaagtgggtcccttactccagtgcctgatgactgggagatacctcccagcaggagttgacagacacctcatacaggagagctccagctggcatctggccagtgcctctctgggaca

SEQ ID NO: 410539 - DNA, 613 bp, Homo sapiens
caacccttggtgaccttggaacaggcaatggttttttaaagttacgacatcaaatgcacaggtggtaaatatatacatatatatatttaaaatataataaatacatatgagatttcaataaaatttaccgattttgtgcttaaaaggacacagtcaacaaagtgaaaagacaactcatagaatggtagaaaatacttgcacatcatacatctgataaggaatctatatataagatatatgtatatataatatttgtacatatatcttgcatatcttatatacaagtctcatatctgtatcttatacctcaatactagaagacaaataatacaattaaaaatgagcaaaatatttgaaatacatctccccaaataagatatacaaatggccaaagagacatggaaatatgcttaattatggaaaaatgctccatcrttagacatgaggaaaatggaaaccaaaactgtaaggagagtgtacctcacatacctactaatatggctataataaaaaaatataataacaagcactgttgataatgtagagaaattgcaattctctaacactgctggtgggaagtgtaaaaccatgtggctgatttagaaaagagctt

SEQ ID NO: 410540 - DNA, 561 bp, Homo sapiens
aactaaatgaccctagagcaaaacttgtgcttgtgtttgattttcacttcaatacatagtagccgcttgatcctaggtaaattacttaggccttctctgaccctcagtttcttcatctgttaaatatggtggcaaatggcacctctgtttttaggatttcatgggaattaagtgggttcctgtttgtcaagcatttagaatagtgcctggcatagagaccatacgatgtaagtttgtttaaaataaactagagctttcctgtgaagcagaagaggctaagttataaggaggttttcttacatctacagaacrcatcaggccgtggaagatccttggtgcatctggtaatttctcagctccttttctttccagtctgaagttagcagaaaggctgttattcacattgcctgccaagaatgtaaacaagagggtgagtatctctccacagcaagtttaaaatctagattataaggttagaaagcagcaaatagcttctggaagatggccagtaacataaaatatcatctatatatttgaaacttcctaaatgttattggaggc

SEQ ID NO: 410541 - DNA, 506 bp, Homo sapiens
tattttgtttagaaacaacctgggtctctacccactagatgccaatagctagcacaatttcccctgctctgcctcagttgtgacattcaaaaagctctctagacattgccaggtgtccccagaggacaaaattgctctccattgataatcagtgttccagattctagggatagaaagacaagttaagatgcctgtagaagtccagagggctagggaaagggatgaaacaaagatccacaactggaaataaaaataggtaatgaaaaccaggaaaagagatgaaatcactatttgagaatgtgtaagttaagaaaaaaatatacaccaattaagaatggaamcctgatgaatactaccaatgtaagactgcttgggtctctttcaaatccattatccctctcttcaatggtaatcaagcttgaagctccatggccttatgaccaagtttagccactggcattagatgggaggtgatttgtgtagctgttgggtcatttctaatttag

SEQ ID NO: 410542 - DNA, 552 bp, Homo sapiens
  misc_feature (1)...(552): n = A,T,C or G
cagtgcagccttcagtctgtggccaaagcccaagatcccccagcaagtcactgatatataagtccaagaatccaaaggctgaagaacctggagtctgatgttcaagggcaggaagcatccagcatgggagaaagatgaaagatagaagactcagcaagccagcttattgcacctttttccacctgctttattctagccatgctggtagccaaytggatagtgtccacccaaattgagagttggatcttcctcttccagtccactgactcaaatgttaatctcttctggcaacatcctctcagacacacccagaaacaatactttaccagctatctaggcttccttcaaccaagttgacccctaatataaaccatcatactatatctatctatatctnatctatctatctatctatctatctatctatctatctatctatcatctatctatctgtctatcatctctatgtgtgtttttatattatgggatcgccaatgccttagttatatcttgtattttctctcacccagtgtgaaatcaatcacctttcta

SEQ ID NO: 410543 - DNA, 576 bp, Homo sapiens
ttgttgtagctattatttttaattggttcatcatttaatctttctacaaagaataagagtagtttacacaccacagttatggtattataatactctgtgtttttctgtgtgcttactattatcagtgggttttgcaccttcaggktattacttattgctcatcaacatccttctctttctgattaaaatactccctctaacatttcttgcagaaaaggtctagtgttgatgaaatccctcagcttttgttaactggttaaatatttctccttcatatttgaagaatattttaaacggatatactattctaggataaaagttttcctgttttttttttccttcaacactttaaatatgccatgccactctctgttggcatgtaatgtttccactgtaaagtttcctggattgtcttgatacctgtagatgttcttctgtgtccaagcattgaagagataggtatttattatagccttggaagtctgggcttatttttacctgttcttcttaggaaaggtttccagttattcaaaaggagttggatgttgtaatctaagccgtatctgctttaggagg

SEQ ID NO: 410544 - DNA, 576 bp, Homo sapiens
ttgttgtagctattatttttaattggttcatcatttaatctttctacaaagaataagagtagtttacacaccacagttatggtattataatactctgtgtttttctgtgtgcttactattatcagtgggttttgcaccttcagggkattacttattgctcatcaacatccttctctttctgattaaaatactccctctaacatttcttgcagaaaaggtctagtgttgatgaaatccctcagcttttgttaactggttaaatatttctccttcatatttgaagaatattttaaacggatatactattctaggataaaagttttcctgttttttttttccttcaacactttaaatatgccatgccactctctgttggcatgtaatgtttccactgtaaagtttcctggattgtcttgatacctgtagatgttcttctgtgtccaagcattgaagagataggtatttattatagccttggaagtctgggcttatttttacctgttcttcttaggaaaggtttccagttattcaaaaggagttggatgttgtaatctaagccgtatctgctttaggagg

SEQ ID NO: 410545 - DNA, 519 bp, Homo sapiens
ttaaatatatatagtttagtgtatctcaaatataactagataagactctaaaatcaaaataagcaaaatatgaaagttcttcatcatgtcaaagactcattgggatgctggggagccaggtctggaaaacaagaaggaaccaggaaagtttggcagctaaaaatacaagtgagatcatgtagttagagccatttgattatraagcttaaagcaaaccacaaccattgtgctcttattatcaccactgtggggccccagctcacagccattatgaattatctaataatctccgtgtcaccccctggctggggcatcccattggcatgcctcaatcatatctcagggctatagctccagacagctgggaaattgagaatatctgcttcctttgcttctgtagtgggagctgtgatcctgcctctcactatgaactacaccaagggacatttctcaacacataggaaacattttcattctgagtagccaagacaagataaaagaaaaaaaaaaaagacaaat

SEQ ID NO: 410546 - DNA, 242 bp, Homo sapiens
ataatgacttacaaaaatcttgcagtgaaraaaccagcgttaagtttgcataattcagtgcttaatttaaccatggaaggcatagttccaaaatatacatatacaacaaaattaagcaaatctaggggtagctaatgaaactcataaaaggactataccaagagatgagattttgagaaattctgctttatacatgagaagaaaactcacaaattaatcttaatgccaaatatacacacaaa

SEQ ID NO: 410547 - DNA, 555 bp, Homo sapiens
ctttgcacttcacccttaattgctgagctgaagctatagacatggacaataatggtgataaataagtgagttcccaaaatgagaaccagcactggaaagaccccaaggcttcccataacaaacttcctgctgtgttcaaaattccgtctcacttcccttttaaaccaccttgaagctaaaagccatgggtttctacccatgttaaaggcatcagccctcctggcagaaagtactgagagctgtcagtatacatacacaaatagaccttattttcttgagtaaatactatggcttatcaagtcactggctccctattcttgtgtataatattatttttcattcctgatttgacagcaatgaaatggcagcaaagaaaccttttatacatggaacaattttacctgtgatactcatcacttcctctttttgtctgcaggtttcccatggatgtgactctctcctagggaatgctataacttttamattaagaaaaggtaattgatcttagtgtagtttgattttattttctttttattgtatttagaaaaagctatg

SEQ ID NO: 410548 - DNA, 641 bp, Homo sapiens
agtccagaccagaaaatagtatattgtcagcatcctggaagatacyccccgtgttttcttccatggtgccttgacttcaaatatgtgaacaaatttggcctctttctgtactctacataaatggaatcaacatatctactgtcttatgtcttgtttctctcaatcaactttgtgtctgtaagatacatccaaattgttttgtataattatagattgttcatcctaattgccccatggtattgcattatatggttatacagaaatttatttatcctttctgctattgagggacatttggggaattttcactgttcggctttatgaatagtgctgctaggaatatctaatacatgttttgtagccaatgtcttgtacacactattcttggatattgtagatatgtagaagtggaatactgagccatttaaaatttcggtatgttttcctgaaatgcagataaggaattgaggatctatactatgtagctatataaaacaatgtggaaggtcctcaggtattggtgggaaaaatttcaaaaatatgattattaataaaaaaaggtacaaaacggagtacattatactttgtgtaaaagtgagataagaaaatatattattatttgcttttatattcacagagaa

SEQ ID NO: 410549 - DNA, 658 bp, Homo sapiens
  misc_feature (1)...(658): n = A,T,C or G
agacaaatgaggtgatgtgtaggcattgttacaaaaaatccagaaataactgtgtaggatatatgcaaacactgtgctattttatataagggacttgagcatctgtggattttcatattttggggggtttcctagaactaatcccccaaggatactgaggaatagctatatttataataaaaattattatgttaagcttcagtctctgactgtagctatggtcagaaggaaaaaaaaattagaagttagtcttcaaagagggactatgggttgatctgtgagtctagaaatgtactatggataaattcataaccagtactgatatcaatttctgcttacgtttagggcagaattttaaattgactttgaaaattcatcaaaatcttcagattatttccaagacttctccagtatttacygtatgtagaaataacaaattcctcctaactaatcagaattacaattttagtaaaaccatttatatgttcttgcctcccagaatatggaaaaaaactgcgtgatacctgtggcagagtttatgagtgctacaaattttacatctttacgttccactattttaatacaaaaatgatatcttagctggttataaaagtctgtgagaacagactttcttctttagctttttannnnnnnnnnn

SEQ ID NO: 410550 - DNA, 625 bp, Homo sapiens
aacaatttacgttcatgcctccgaatacataacatccaaatccagcaggaagaacaggctacctgatatataaaacaatactcataaagttactatagtacatataaaaatagcaaaatatttcccatgaagttatcataatgataaaaatggcaacagcatgcactatgtgcaaagcaatgtcgtaacaatttacatgtattaacccacttaatcctcaaaactaccctgtgaagtaggtaccattattatcccttgtggcaaatgaggaaactgaggtatagaatataatttccatcaataaataaattgtcttttaatggagacaaagatgtttacctatagaccatatcttatgcttaatatacagtcacattgcttctagaatgaaatatctttgtytcttgaagctacatttgtataattgcttccctcaaagcctactagagatgccctatttgaaattggaggtcaaaaatggaaggcaaagagcaatttcagtcatacatgacttaatattggggatacattctaagaaaaatgtggttaggtaatttcattactatttgaacatcctagaatgtagttatacaaacctaggtggtacaggctactacatactttg

SEQ ID NO: 410551 - DNA, 469 bp, Homo sapiens
tgtgtaacttgcttttctgtgacattacccttattacagtgatctggaactgaatgcaaaaatctttgagatatgccagcatgtgagtttttggtcaatctccatcttgttaaccttgtcataagcaaagccacatatgttcataaatactgaattccaatatgcatggtatgcggatggacttttaagaagtggataggccagagcaagctttgttgtaatcactctcatctcaaccacccaggcatcagctgtggaaatagcagacacagtaagacagcacaatagtggaaacatgtttatttttattatttarggttccaaagactggggtaggtaaaactattgaagattaacaaggcaaactcagcagagaagagagtgtccaggttgagttgagttggagagatggtccggtttaatttttgactccgttgtaattgctggatcagttctagacatgtatttt

SEQ ID NO: 410552 - DNA, 469 bp, Homo sapiens
tgtgtaacttgcttttctgtgacattacccttattacagtgatctggaactgaatgcaaaaatctttgagatatgccagcatgtgagtttttggtcaatctccatcttgttaaccttgtcataagcaaagccacatatgttcataaatactgaattccaatatgcatggtatgcggatggacttttaagaagtggataggccagagcaagctttgttgtaatcactctcatctcaaccacccaggcatcagctgtggaaatagcagacacagtaagacagcacaatagtggaaacatgtttatttttattatttagggttccaaagactggggtaggtaaaactattgaagattaacaaggcaaactcagcagagaagagagtgtccaggttragttgagttggagagatggtccggtttaatttttgactccgttgtaattgctggatcagttctagacatgtatttt

SEQ ID NO: 410553 - DNA, 445 bp, Homo sapiens
aaccttgctaaatattgtttcctttcctttgctattgctctaaacttctttcctgaactgtccaactcattaactgtattccaccaagaaataagtgttatgaatttgacagagacccaaagtatctcacttaaaaagtggttcctgattttttgtctttgtggcccaggaccctcatatccagcatagcattggctgaccattagttgttgatatattrtattatttagtatactaccaggttcccaaatgccagcagtacagcagcagatttttaccacaagtctcctttcctatatagtcggcaatctagtctctcttgtgactctgacagtaacaaaataggtaagaagttggtgcataaagatgctttgttgactgaaaacagaataagtttattcatgaatgacaagaacacctaggaaattcagccttccacttatat

SEQ ID NO: 410554 - DNA, 513 bp, Homo sapiens
catgcttgctgcaaataacaggatttcattcttctttgtggctgaaaaatattccattatgtatatgtaccacatttgctttatccattcattgatggacatttaggttgattccataycttggctattgtgaatacagttgcaataaacatgggagtgtagatatgtctttgatatactgatttcctttcttttgaatatatactcagcagtatgatactagctgtgcatctgctgtataaggtctttatcatgctgaggtatgtttcttctgtacccagtttgttgagagtttttatcatgaagggatgttgaaagaaaagctgttgttgaggcctcgctctgccattttctagtgatattactctgggttagtcatatcatcttttacgatctatttcacctgctgcttatagcaagctcaagtttttgcctgaggttcaatgacacagggcatctaaaaacactttgcaatctctgccatactatacaaatgctaactatggttatgtt

SEQ ID NO: 410555 - DNA, 567 bp, Homo sapiens
gtatagaaactttcaacaatactatcagccatattgacctagttgagatatacagaatcctctacccaagaacaacagcaaatactttactttcaagtattcatgaaacattcaacccaaatgaaaaatatgctaggccataaaacaaatctcattccataacaaaaggwttgaaatcatatcctctcttgccacagtggaatctgatcaatagctgaatgtgttttatttgggaaactagtatattccactatattctgccgagaaatttggggatatcaggaagaaggacatacagacactaataaatatgaaataaagtttattactcagatagtaaatggcaaaagtattctccaagaaaagggatcagattccttctgtagtaaaacaaccatgagaagaatagatgaccccagcttattttggattaagaggtgaaaccaggtagggatctacatggtttgaacttctccgccaatgccaagggagggagctcctgagcttttttgtaaatcagttttccagatgtgaggcaaaaggtaaagagggaggggtggagcttta

SEQ ID NO: 410556 - DNA, 368 bp, Homo sapiens
gttttcaatgaaatacctgaacattcagagtctaggatatttaaatatcaagcatgaaattattctatagatatagcctagaataagactgtccaatagacccttctataatgatggaacagccctacatctgtgctgtccaataggtaccccttagccacattggctataaagcattttaaaactgattttataactaattttaattaagttaatgtaaatttaaatagttacctatgactaagggctattgttttggacaktgaaggaatagaaaataaatctgagatctagaatacagaatgagatcaaaatataaaatatatgaaagaaacaagaaacagaaaggatgtattgaatactttcag

SEQ ID NO: 410557 - DNA, 368 bp, Homo sapiens
gttttcaatgaaatacctgaacattcagagtctaggatatttaaatatcaagcatgaaattattctatagatatagcctagaataagactgtccaatagacccttctataatgatggaacagccctacatctgtgctgtccaataggtaccccttagccacattggctataaagcattttaaaactgattttataactaattttaattaagttaatgtaaatttaaatagttacctatgactaagggctattgttttggacattgaaggaatagaaaataaatctgagatctagaatayagaatgagatcaaaatataaaatatatgaaagaaacaagaaacagaaaggatgtattgaatactttcag

SEQ ID NO: 410558 - DNA, 592 bp, Homo sapiens
cagctattgtatcttcttaattctctctgtgatagacgtctatcaattgtcttcttagtaaacaagaattttatgaggatatttacacatgtccttttatggtcctgttgaaatttcttgggcatattctgggaaccatgatttctactttactctttatcctcctaagttcagccagctcatctctggtgtagctatttctgcctaaacgcccagaagcagtacctgaggtttctacctctcatacttctctgtcaatayttgtcgttattcagctttcttatgttaccaatcttatgtgtacaaattttattaaaagataaacttatgtacattggaattttaaggggtttatttgagcattcaactagtcacgagcctggcagtaccaaacctcaaatgctttagccctccactgaggagggtagaatggaaaattttataaaacgcaaatgaaaatatatttgattgataaaagtggaaagtccctagtaagagattagtttggcagcttctgattggttaagcataaattccatcttactgtttgcattgagttgggcttaggttcgcttattatataggaacccaa

SEQ ID NO: 410559 - DNA, 589 bp, Homo sapiens
cattacatttaaatacttacagggtgtctgccactcattttatcttcataatcactttatcttacctacgtttttctttcactaatgtaaaaacttagaaaaatggcttcctcagggtagttcaatgttaaatgatggagtctagacaggaaacttcatgcccttcatctctggaaaactagctcctctctgtgcaatttcgccctggtcatttggtggtcttcttttatatctttaaaattgagggattagttgagtatattctatattcatttctagcaatgaaattatatgatctgaatacgaaatgaatttgcaaaattcaaggactctgtcttaatcagtttggtctgttataacaaagtaccgtagagtgggtggcttacaaaccacaaaaaattacttctkgcagttttggaggctggacgtctgagatcagggtgccagcatggttggattctggtgagagctcccttcccattgcagacttctacattcttgtattctcacatgatagaaagggagcgacagagctctctgggttacttttatcaaggcactaattctattcatgaggactttactccta

SEQ ID NO: 410560 - DNA, 589 bp, Homo sapiens
cattacatttaaatacttacagggtgtctgccactcattttatcttcataatcactttatcttacctacgtttttctttcactaatgtaaaaacttagaaaaatggcttcctcagggtagttcaatgttaaatgatggagtctagacaggaaacttcatgcccttcatctctggaaaactagctcctctctgtgcaatttcgccctggtcatttggtggtcttcttttatatctttaaaattgagggattagttgagtatattctatattcatttctagcaatgaaattatatgatctgaatacgaaatgaatttgcaaaattcaaggactctgtcttaatcagtttggtctgttataacaaagtaccgtagagtgggtggcttacaaaccacaaaaaattacttcttgcagttttggaggctggacgtctgagatcagggtgccagcatggttggattctggtgagagctcccttcccattgcagacttctacattcttgtattctcacatgrtagaaagggagcgacagagctctctgggttacttttatcaaggcactaattctattcatgaggactttactccta

SEQ ID NO: 410561 - DNA, 590 bp, Homo sapiens
tgacaggagcattatatgatgattgcttcaaarctgtgaattcaggcagccacaatgcaaattatatttgaggagctggagacaggttttctcaaatagatgtcccagctagaagtagggatttagatactttacatagaactttgcaatttatctgtagtttaaagtttaccagtatttacatctatttttgtttcttttgcaacatattttattatttttattttacatataagttacatgacatgtaagtataatcgacttattcagttataaatgttgatgcttgcatcctataggaaattctgtgcgggcctaagttcacggctcaggctgtcaatttttgctgttgggcatacagaaaacaggaatacataaaaatagaagcaacagaaaacaaaattagaaaatgaagtgattaaatttaccaaaatttaaaaaagaataaaaaatgtttagtaattcaagattgtgccttctgaggacgaatagttctattgaaagaagctattattaattgaaggttctgtaaatatactctttattcttttatttactctgttttaaatctagcttgttagaatttataa

SEQ ID NO: 410562 - DNA, 590 bp, Homo sapiens
tgacaggagcattatatgatgattgcttcaaaactgtgaattcaggcagccacaatgcaaattatatttgaggagctggagacaggttttctcaaatagatgtcccagctagaagtagggatttagatactttacawagaactttgcaatttatctgtagtttaaagtttaccagtatttacatctatttttgtttcttttgcaacatattttattatttttattttacatataagttacatgacatgtaagtataatcgacttattcagttataaatgttgatgcttgcatcctataggaaattctgtgcgggcctaagttcacggctcaggctgtcaatttttgctgttgggcatacagaaaacaggaatacataaaaatagaagcaacagaaaacaaaattagaaaatgaagtgattaaatttaccaaaatttaaaaaagaataaaaaatgtttagtaattcaagattgtgccttctgaggacgaatagttctattgaaagaagctattattaattgaaggttctgtaaatatactctttattcttttatttactctgttttaaatctagcttgttagaatttataa

SEQ ID NO: 410563 - DNA, 590 bp, Homo sapiens
tgacaggagcattatatgatgattgcttcaaaactgtgaattcaggcagccacaatgcaaattatatttgaggagctggagacaggttttctcaaatagatgtcccagctagaagtagggatttagatactttacatagaactttgcaatttatctgtagtttaaagtttaccagtatttacatctatttttgtttcttttgcaacatattttattatttttattttacatataagttacatgacatgtaagtataatcgacttattcagttataaatgttgatgcttgcatcctataggaaattctgtgcgggcctaagttcacggctcaggctgtcaatttttgctgttgggcatacagaaaacaggaatacataaaaatagaagcaacagaaaacaaaattagaaaatgaagtgattaaatttaccaaaatttaaaaaagaataaaaaatgtttagtaattcaagattgtgccttctgaggacgaatagttctattgaaagaagctattattaattgaagkttctgtaaatatactctttattcttttatttactctgttttaaatctagcttgttagaatttataa

SEQ ID NO: 410564 - DNA, 559 bp, Homo sapiens
caaaatattttttaaagacaaggaacaaaaaggaagaatcaattatggaactaaatactacttaaagaatagtgggaaaaagtctccacaatgagtcatttgtattttagaagaactcatgggcaacgtgaaatcaataaaataagacactcactaaaaggataagacaacagaaggaaggggaaaaacaagattgcaaagtttttttttttaaaaaaagagaaactggataaaaacactctaacaaaaataataaataaataaaaatagcagaaaacaacatatggggccaaatattgaattagaggacaaacgaatgcagagagtaaagacagacactactaatcgcttagaagagagttagtaggtagatcagacaaataatwtggatccagcaaaagaaaatcaattgttcttccctctggggaattcttgtgttctattctgtaaatggaatagggaaaacagttcatttttatatatcacaagaaaatttccatgaggagcaagggaaaaaatgggtccaccaattaaatgagcctacgatgtttgagaaaat

SEQ ID NO: 410565 - DNA, 559 bp, Homo sapiens
caaaatattttttaaagacaaggaacaaaaaggaagaatcaattatggaactaaatactacttaaagaatagtgggaaaaagtctccacaatgagtcatttgtattttagaagaactcatgggcaacgtgaaatcaataaaataagacactcactaaaaggataagacaacagaaggaaggggaaaaacaagattgcaaagtttttttttttaaaaaaagagaaactggataaaaacactctaacaaaaataataaataaataaaaatagcagaaaacaacatatggggccaaatattgaattagaggacaaacgaatgcagagagtaaagacagacactactaatcgcttagaagagagttagtaggtagatcagacaaataatatggatccagcaaaagaaaatcaattgttcttccctctggggaattcttgtgttctattctrtaaatggaatagggaaaacagttcatttttatatatcacaagaaaatttccatgaggagcaagggaaaaaatgggtccaccaattaaatgagcctacgatgtttgagaaaat

SEQ ID NO: 410566 - DNA, 614 bp, Homo sapiens
gttttttagagccgtacccacctaatgaatctaacatgtgatatatggggtctggtgcccaataaattaaatatattcatatgtatttttttcgtacaaggatggctactctgctttttttgtttgctaaagaccctgcagttttggtgaggtgcacacagcaaaggagaaactaagtaaatttctacctactttgaagttggcacagtactgctgacctaccaatttcactttcagtttcattctactggcgttggagttagtggaaatttccctagataccayttgaaacgggaagcctgtcttcaattctcagtaaacaatctcttcggcagtggctctttgaccttttgtctgcttatcttattaccagacaaatttgcgctgcccttttaaaaccatcttctaataacaaaactaagtactacaactagctcacaagggtaaaatcacaaatcagatttgtttagcagcagtgtccttgaaatgggtaaatttccactgtgaaagaaactctttgtccccatcaagatcctttttacattttgattaataccttacctaaatatccagaacaaaggcagaagtgaagacgtccgtgaatgcttgcgtaa

SEQ ID NO: 410567 - DNA, 534 bp, Homo sapiens
aattcacttatttctgtcttagtagataatttaatttgtttataacattttgccattgaaaacaatgttttttaaaagtttatttggatttcaatagctttcgaggtacaagtggtttatggttacagggatactttggatagtagtgaagtctgagctttcagtgtgcctacatcatgggaacagtgggcagtgtatccaatggaggagaaaacagtggtgcactgtaaatstttgcagccaacccccttgtttatatccttcatcatttcttacattataactgtagtcactggatcaaaagttatgtttattttatggctgttttcttgggaattaactgtttatgttcattgctacagtttgtacagaaaacagttaatattcttgctatacaaataatgcttgatatcaataattaaattaaaaataatgccagaagaaatcagtccataaattttccctgttaccttttgattgagcttatgattttaataatttttttgatcaaatctgtgaagaatttctgatatg

SEQ ID NO: 410568 - DNA, 534 bp, Homo sapiens
aattcacttatttctgtcttagtagataatttaatttgtttataacattttgccattgaaaacaatgttttttaaaagtttatttggatttcaatagctttcgaggtacaagtggtttatggttacagggatactttggatagtagtgaagtctgagctttcagtgtgcctacatcatgggaacagtgggcagtgtatccaatggaggagaaaacagtggtgcactgtaaatgtttgcagccaacccccttgtttatatccttcatcatttcttacattataactgtagtcactggatcaaaagttatgtttattttatggctgttttcttgggaattaactgtttatgttcattgctacagtttktacagaaaacagttaatattcttgctatacaaataatgcttgatatcaataattaaattaaaaataatgccagaagaaatcagtccataaattttccctgttaccttttgattgagcttatgattttaataatttttttgatcaaatctgtgaagaatttctgatatg

SEQ ID NO: 410569 - DNA, 593 bp, Homo sapiens
tctgaactccttgggtcaagtgatcctcccacctcagcctccagagcagctgggaatacacgtgcatgccaccgctcctggctaattttctaattttgtagagatggtgtctcaccgtgtggcccaggctggtctcaaactcctggactccagcaatcctcccacctctgtctcccaaagtgctagaattacaggtgtgagccacttagcttacagttttataaaatacttgtttatactttctaacatatcctttatatctaatttatcrgttttcttattcgtttatcttatcttactttacatgataagatatattttgtctgaactgctttcctgtaggcacccagggaaggtgaaagccttaaataacagtatggttgtttcagtgttgctcctaactttctgaggtagaaggtcttgaaatcttctgttaaggttttctgatcgtggattgagcactgagcatttactagtgagctgtcttgaacttattctttcttttatttcgatcccgcatgtgctttatatagcaacaattcttcaaaactggtaaaagtgcatcacaagtttgctagttttcagtgctgata

SEQ ID NO: 410570 - DNA, 519 bp, Homo sapiens
ctcttttcctggggttgtaatggcattcagaaatacagtttaaggaatgattattagagaataaaatcaatatctctacaccttaccaatcttcaaaagaaataaactaagaaataggaacagagatattagctttacactgcattgtttttcgataaacataaacaatagttatttaacaataaatgattgttactttacgaaaaaatgcatttgcttcagctgggttagtaactacagaaagacgcattcctttaactacactgttgtagttgattgtatgtctttgcaataaatgtattttaccttatgtttgtgttggggkgtgtgtgtgtgtgtgtatgtgtttgaaaattgcttatgctaaatgttctgttaattgaatatagcctatagaaataatacattactccttaatctgaagatagttttctgcacttcatcttcaagttgcttttctgtgctacctgtacagaataattagagttgtaaaagtaggagaatttacagttatgtgtg

SEQ ID NO: 410571 - DNA, 608 bp, Homo sapiens
agtttacattccatttcattcaattgcatcaacattaatgtgagcagctcgtcatagaatttctatgtaatgattcagttctgttagactgtttcctcatcttattggagacatgatagtcttgctcttggagctccagaatggtttctgaagagctggtatagaggctcacctagagctgtgggcagtcttcaaaggtgtacttgtcttttcttccctttttccttgtcaactaaatattgtttggtcctgcaaattttcacttcgtttagcgactatgaccgctaaatttgacattgtaaaggtaggattcttttttgattaatctgtgtatccccaaataatctgaccctgaactgtaaacataggaattcaagaaaggcttgatgaaatgaatagttgaagggaatatttttctttcctccttctactaactatactttttactcattcattcaaaaaatatgcactgaataactaatgcattccaatctctgaacactgttatatgctgggatgcagagccatacaaggcctccatgcttcctagaaattaagggatgttgcayacatcatcttttgttttgtactctgttaaatatttgaaa

SEQ ID NO: 410572 - DNA, 609 bp, Homo sapiens
atattaaagagatttttcacacatgcaaagcaatgtcactgttctcactattttttgttttggaaatacagttattttcattgaaagcatgttatttacagtaacatttaatagatttttcattaattttacttgaattaataaagtgctccrtttaaatttctgattacttattttttaaagtacttagattatgtttctgagtgtttactgatagatattacccacatgactgagagttctttgggatcctcgttcattttctttaagaatgtaaagattcctgagatttaaaacagaataatgttttggaacctcagtcctcactattcctatcccttacaacctcacctcctaatgcctttcttccccaattgtcaagacttggtgatccaagtattccaaatagatttccactgcaggacctttgcacttgctgttctgtctttatagagtctcctacttgcagatagtcctatatctgcccggctcatgactcctctcatgcaaagctctgcttaaatacctcctcatccaaaaggcttttactaactaccacttttaaaacagaacctcccactccatgactctctactccttacctagtat

SEQ ID NO: 410573 - DNA, 584 bp, Homo sapiens
cccattccctcttcccagtctgtggtagcctggaaaatccacagccatcaatttttgtgaaaaccagtagcctagtagccgctaagggtcagaacagggctgatgctctttcaaatccctattctcaaacaatttcaataattttacctgtctggcaggtacataaaaacctactcacaagtcttgtctttattttacctcactcagagttcaccaactggaaacagtctgttccccaagagcatttgctgaaaatgstcagtggcaattgtttaacattgccttacacagtgaaaaaagttgggacaaaaaacaaataaaccaaaaaaacaaaattgtaaaaaggaagatctggaaaatgagatgttcactggaggatttgaaaagttcttaaatattcttgaaaatccagaaggccacacgctatgtacggctgtgtaaacactcagaaaagacctgagaagaccctcagttcttgcctctgaacttgaagttctgcacaaggaggaagtgatgggaaagacataattataaattgcctggctgaatgttaacagcattctgtaacactcacagaaagccct

SEQ ID NO: 410574 - DNA, 521 bp, Homo sapiens
gtagcctggaaaatccacagccatcaatttttgtgaaaaccagtagcctagtagccgctaagggtcagaacagggctgatgctctttcaaatccctattctcaaacaatttcaataattttacctgtctggcaggtacataaaaacctactcacaagtcttgtctttattttacctcactcagagttcaccaactggaaacagtctgttccccaagagcatttgctgaaaatggtcagtggcaattgtttaacattgccttacacagtgaaaaaagttgggacaaaaaacaaataaaccaaaaaaacaaaattgtaaaaaggaagatctggaaaatgagatgttcaytggaggatttgaaaagttcttaaatattcttgaaaatccagaaggccacacgctatgtacggctgtgtaaacactcagaaaagacctgagaagaccctcagttcttgcctctgaacttgaagttctgcacaaggaggaagtgatgggaaagacataattataaattgcctggct

SEQ ID NO: 410575 - DNA, 607 bp, Homo sapiens
atagttggaaatttcaataccctaccttgaataatgggcagaacaactacagaggaaaacaacaaggaaatagaaaacttgagcaacaccataactagacccactagacgtaataggatctacataatacttcctccaataccagaatatacattatttgtaattgcacgtagaacagaatagatcatatgttagaccataaaatatgttattctcaataaattaaaaaggattaaaattatataatgtacattctctaaacataactgaatgaaattttaaattcataaaacatggaaatttgagacattcacaaataaatggaaattaagcaacactgctaaataatcaataagccaaagaataaattaaaagataatttagaaaatattttkaaattaataaatgcaagatatcaaacttacagaattcatctaaaattgcgcatagaagaaaatttgtatgtaaatacctgtactaaaaaaaaaaggtgaaagatctcaaatcaataacttaacctttcaccttcggaaactagaagcatgaagaatagcttaagcccaaagcaggcataaaaaggagataataaagattagagtgtagataa

SEQ ID NO: 410576 - DNA, 628 bp, Homo sapiens
attgcttggtatagcacctaagtgatgttaaccttctcgttggtttttttgcccacaaatgggattatgacatactaacttatattatataaamtctttggtggtagagagtttcataacagggcccagcaaaatgttcagattgggactctccgttacacacccaggtgaaattaaaagttgtcaccataccacatttacaatgcccactcttgagggcctgagtctaacagaggaatagagtagaatgttggaaatgtggcttttacagatggatctggccacaggtggaatggtgactcatttctggaagcagcccagtggcataataaggggtcttctttcttagccctgcctataagagagatgttgactatcaaacctgggtttagggcaatatgtaagactgtgagtccatacaagcacgtaggcctcagagaggtttccaactctcatgcaggttttatgcagccctcagatgttgtagagagtgtcttacattggcccagcacacatgtaagattgtgactctaacatacatgctgagctaaaagttaaaggtgtcaccctcaaagatgaggagattgtgtcatatcactgggcctcatacccaggtgttgagactttt

SEQ ID NO: 410577 - DNA, 552 bp, Homo sapiens
gggtgcattgttacatattgctaggtaataatcataatagtgtgactcttctgcctgggccctgtcaataggggatattatcacacatctcttggcctctaagctaggtgatgtgtttctccagcctgtgccctgcccctagaaggcattttgaaatatcgctgaaactagtgtctaggtaatgtaactcttctctcctgcctgcgtcctgcttactgaaggaattgtgacatacggctgaatgcaaaacctaggtggtatgtttcttctctctagtaaagagtttatatctgtgctgcattctgtttcattactttggtgttctacctttataacagtaccaaagtgctttgattactgaaggtttatttatgtttgtaaattgttaaatgtaatgtttccaatattttttttctttttaaagattgtgaggtttttcatgttccsttgaaaaagagcatgctcaaaagtgtgttgttatctgggcatagtggctcatgcctgtaatctcagcattttgggaggccaaggagggtgcatggcaaggtcagg

SEQ ID NO: 410578 - DNA, 528 bp, Homo sapiens
gagctgtgctatacgctctcctggctctgctttccagggaacagaagtagatatcacaatttgaatttcyccattataatctgaatcaatgactcctgtttatatttgtaccccttttaaatttaaactagaccttcctagaagtaatcctattgtcctcactggcaagggtccacagacttctgttgggaccttttgcaggggatccccaggcagaaggctcacagcttttgtacagcataaatctactgtggcactaccagctgtggcaggggacagacatggtacaggtgtgagggaatggcctgagccagaaatgccccagtttggaatggggtccaggatgggcccctcatggcatttcccaaaattgggttcccatctttatcaaacttagagtgacactgattagcctaatgttttcctttactaccttttggaaatatttcaggctcagcagttttcttttttcccctatctggcagcctgactagctgatttattctacattcttttttagtatgaaga

SEQ ID NO: 410579 - DNA, 528 bp, Homo sapiens
gagctgtgctatacgctctcctggctctgctttccagggaacagaagtagatatcacaatttgaatttccccattataatctgaatcaatgactcctgtttatatttgtaccccttttaaatttaaactagaccttcctagaagtaatcctattgtcctcactggcaagggtccacagacttctgttgggaccttttgcaggggatccccaggcagaaggctcacagcttttgtacagcataaatctactgtggcactaccrgctgtggcaggggacagacatggtacaggtgtgagggaatggcctgagccagaaatgccccagtttggaatggggtccaggatgggcccctcatggcatttcccaaaattgggttcccatctttatcaaacttagagtgacactgattagcctaatgttttcctttactaccttttggaaatatttcaggctcagcagttttcttttttcccctatctggcagcctgactagctgatttattctacattcttttttagtatgaaga

SEQ ID NO: 410580 - DNA, 542 bp, Homo sapiens
acattttttaaaagaaactttctctgccaggaagccaaataaatagaaaagattccaggtatgagaagaacttaccctaaggtgaaatattaaaccaaaaggcacaacacagagtaagaagtgtgtttggagaagtaaagaaaacattcctagcttggaaagatcaaggaaggactgctgagtgatacctttctaaaaactgtaacaggaaagatggaataaagggagttgggctgtaagtttttgttttcatttcttaagatttcatgaagaaaagttttgagcagatggttttcactttctttgtggggttggatccagtccatcagtggagggtgctgggggctggggtggaggtgtggtgaagggatatacttagctgtgctaaggatgagaaagttgaccataggracaaggatgcaagtcagaggccctcatacagattgaatcttgcctgtttttataccttctctcaagataagaggaatatttacattgttcaactgtatttttatcaaataaattacatttacattgtttaa

SEQ ID NO: 410581 - DNA, 564 bp, Homo sapiens
tacaaacaaaataatacaaatcgtaaatgtcggctcagcaaaatttgaggaaatgactacccgtgtctaacagccacccagatcagacacccacgcccttgaggagtctccttccatatggtatttggtgtgggcctctgtgatccatagatatgagccacgggtagtgacttccaagaataaaccatcaatggtactgtgccttgctctctcttggatcactatctccagggaaagctggtggctgtgtcttgaagactcacaagcagctcttttgagcaaggagctgaggcctcccaccascagccacgtgaatgtgcgatgttggaagcagatcctccagccctggtccagtcttcagatgactgcagccccagccaacatcttgactagaacttgatgaaagagagatcctgagccagcaacacccagctaagcaactcccagattcacggctctcaaaatcatgagataatgaacatttgctgttttcagccgtgaagtcatgggggaatttgttatttatcatcagatatctaatatagttgggccacacttgcccag

SEQ ID NO: 410582 - DNA, 619 bp, Homo sapiens
gctctcataattacccatgtgccatgggagggacctggtgggaggtaaataaatcatggtggcaggtcttatgttgttctcatgatagtgaataagtctcacaagatctgatggttttataaagaggcattcccctgcacatgctctctctcttgcctgccaccgtgtaagatgtgacattgctcctcctttgccttccaccatgattgtgaggcctccccagtcaagtggaactatgagtcaattaaacctctttcctttataaattagtctcagttatgtctttttttkgggggggtggggacggagtcttgctcttgtcaccaggctatagtgcagtggcacaatctcagctcactgcaatctccatctcccaggttcaagcaattctcctgcctcagcctcctgagtagctgggattacaggcacctgctaccatgtctggctaatttttgtacttttagtagagacagggttttgccatactgaccaggctggtctcgaactcctgacctcaggtgatccacctgcctcagcctcccaaagtactgggattacagtcatgagccactgcgcccggcctcaggtatgtctaataccttacttttgggagaggaag

SEQ ID NO: 410583 - DNA, 569 bp, Homo sapiens
gatgacattccaccattgtgatttgttcctgccccaccctaactgatacgctatattctcccctgcccttaagaaggtactttgtaatattctccccgcccttgagaatgtactttttatgcctatcccaaacctrtaagaactaatgataatcccaccaccctttgctgactcattttttggactcagcctgcctgcatccagatgaaataaacaaccttgttgctcacacaaagcctgtttggtggtctcttcacatggacgtgtgtgacaatctcattgagttttgagttgcatttctctgatgatcaatgatgttgagcacgttttcatatacctgtttgccttttgtagatcttctttgaaagatgtctatcagatcttttgcccattttttaattagattattatattttttcctactgtgttatttgggctccttacatattctggttattaatcccttgtcaaatgggtgtttgcaaatattttctcccattctgtggattgttgcttcattttggtgattgtttcttttgctgtacagaagctttttaacttgatgtgat

SEQ ID NO: 410584 - DNA, 567 bp, Homo sapiens
cagcagctcaacgtgactgtgctttacttgtcttattcttccccttcaygacctcaatctttgtctttccaattcctccccagatctactagcaagaggcagttaaccagatcaacatcctcattcttatggttgaaagaatgcaaatcgattctcattctgccattttcctttcttattttgtcgaatatctcaaagtttctctttcctgtcaagactagctaatttgcacaattgcgtctaaatttactgatttaattctttctataagctaacttctctgttcttgctacccatataagagattctttctctagtcaatactcaataatcaataacattcatagacatgtagtgggaatatatttgaataaacactgtggtattgatggataaagggtctaatgtagcagaaactaattacaaaaatgatagcaaacaaataaagcaaaatcgaatatccatgacaaatccaaaagcaatttccttggaaagatgttgacaagtctaatgaaatgaaagatatatgatgttgatctctgtaactgaattaacttggacatcttc

SEQ ID NO: 410585 - DNA, 567 bp, Homo sapiens
cagcagctcaacgtgactgtgctttacttgtcttattcttccccttcacgacctcaatctttgtctttccaattcctccccagatctactagcaagaggcagttaaccagatcaacatcctcattcttatggttgaaagaatgcaaatcgattctcattctgccattttcctttcttattttgtcgaatatctcaaagtttctctttcctgtcaagactagctaatttgcacaattgcgtctaaatttactgatttaattctttctataagctaacttctctgttcttgctacccatataagagattctttctctagtcaatactcaataatcaataacattcatagacatgtagtgggaatatatttgaataaacactgtggtattgatggataaagrgtctaatgtagcagaaactaattacaaaaatgatagcaaacaaataaagcaaaatcgaatatccatgacaaatccaaaagcaatttccttggaaagatgttgacaagtctaatgaaatgaaagatatatgatgttgatctctgtaactgaattaacttggacatcttc

SEQ ID NO: 410586 - DNA, 574 bp, Homo sapiens
tctctcacctctactacccgacgtcaatccatttggggagtagttctcagtatcttgtgcatcatggtgagaatgggcaagtgcaaggatggtggaccccactgcccactttcttccctccccactggcactcaagggagacgtcaccaagagggcagcctcctgaccggctctgggcaatggatgcctctttgggatcttgttacaaatacagggctctctagggagcagggtgtggggagggtcttcccaacatgggggctggggtgctatagggagcccggctcagagagggtctctacstgactctgatgatgtgggccatgtagcacagtgaggaaggttctggccataagctgggagccctggctcagattttaaggtctgctgttcactagttatatgactttaggcaaatcagcaaaagtctcttagcatcagtctcctcatctgtgaaataggaataaaaatattcaccctgctcagtcccaggagttgagcaaaggcatttgaaggtggtggcatccctctgggaaactttcctcttttgatcttctacgtaccatgcactctg

SEQ ID NO: 410587 - DNA, 574 bp, Homo sapiens
tctctcacctctactacccgacgtcaatccatttggggagtagttctcagtatcttgtgcatcatggtgagaatgggcaagtgcaaggatggtggaccccactgcccactttcttccctccccactggcactcaagggagacgtcaccaagagggcagcctcctgaccggctctgggcaatggatgcctctttgggatcttgttacaaatacagggctctctagggagcagggtgtggggagggtcttcccaacatgggggctggggtgctatagggagcccggctcagagagggtctctacctgactctgatgatgtgggccatgtagcacagtgaggaaggttctggccataagctgggagccctggctcagattttaaggtctgctgttcactagttatatgactttaggcaaatcagcaaaagtctcttagcatcagtctcctcatctgtgaaataggaataaaaatattcaccctgctcagtcccaggagttgagcaaaggcatttgaaggtggtggcatccctctgggaaamtttcctcttttgatcttctacgtaccatgcactctg

SEQ ID NO: 410588 - DNA, 418 bp, Homo sapiens
aaacaatttggcatgataaattggaactattttcttttctttctctttctttttatattttattttatttcaatagtttttggggagcagrtggcttttggttacaaggataaggtctttagcagtgacttctgagattttggtgcacccttcactggagcagtgtacactgtacccaatgtatggttttttatccctcatcccctgcatcctttcccctaagtccccaaaatccattgtatcattcttgtgcctttgtatcttcatagcgcagctcccacttataagtgaggatgtacaatatttggttctccattcctgagttatttcacttagaataatgatctccaactccatccaggttgctgtgaatgccattattttgttcctttttgtggctgaatagtattccatggtg

SEQ ID NO: 410589 - DNA, 609 bp, Homo sapiens
tattaataaataaatcccaaggaaaacatctaatctattttcttctccccgcaaaaaaacagttatgatttwaaaaaaaaaaaaaatcaccctgctgttctccatattgtatagtttctaggtgtgattaatgttttagacgtcaaattgtctcttagaagctgaataaagtcaatatagtttatcaaaaaattaaaagttggtaaaagaactgcttttaattaaaaaaaaaaaaaaaaagagtacaggccaagaaagatgttaggcgacttctaaatgcctcaataaacatgtaatttaattctgtttatacagctccagagtacctaaaagcaagaatttgaggaaaaacaatataatttgaaattacaactttattttataaaaaacagcttagtcctgctaccaaaacctaaaatagcacatagcacacacacacaaactatacaaacgtacttacgagagatttagaaatcctaaaagaaacttacacacaaactgaatgagaaatataattcattacatttgtgaaaagcagaaaaactaacacgaagacaaaaaaagcatctgaacttggttcagataagttcctaatttttaaaacagagc

SEQ ID NO: 410590 - DNA, 666 bp, Homo sapiens
aataaacatgaaataaaacagaaaattcagaaatatatccacatacatatggacctttactatatgataaagatggcatatcaattcagtgtggaaaagatggactttttaattggtggtattgggataactgaatagccagaaaaagataaaacttgtctgtctctcacactatacaccagcataaaaagcaaatgaatctacaaaattacaaaaaattagccaggtgtggtggtgggtgcctgtaatcccagctactggggaggcagaggcaggagaatcgcttgaatctgggagacagaggttgcagtgagctgagattgtgccattgcaatccatcctggatgaacaacatgagcaaaactcaatctcaaaaaaaaaraaaaagcaaatgaatcagttatctaaatttttttaaagaactataaaagtacttttaaaaaaacacagaattccttaataacctaagagtagaaaaaaagttccaactaggaatcaagaaataatttataccaagaaataataaatatgacaaatacgactatgtaaaaataaaaatcctctgcatggctaaaaataccacaagcaaaattaaaagaatatagcaacctggaaaaaaattagctgcaacttacactgcagagtgattattagtatcaactacag

SEQ ID NO: 410591 - DNA, 631 bp, Homo sapiens
gttgggtttcaggatactgggtttttattctggtactactttgtgttgtgtgtatttgggaaaacctgttagaaacatagaaagttctcttcttaaagaggtcctgtagcctcttaaaaacatcacaagcaagaaacaggtaatatgtattcattaatttctacaacagtgtcggaatattaggaaaacatttttagaaagaaaaatcttggctgggtgcagtggctcatgcctgtaaccctaggccaaagtggacagatcacttgagtccaggagtttgagatcagcctggacaatatggcgaaacccctatccctgcaaaacatacaaaaattagtcgagtgtggtggtgcgcgcctgtagtccccgctacttttggggggtggaggtgggacgatcacttgaccccagaggtcaaggctgcagtgagccttgtttgcgccactgcactccagcctgtgcgaaaaagtgagagaccctgtcttaaaaaaaaaaaaaattatctattaaacaaggaggttggacctgctacctacctccatttcagttcttttagtaaracattatcatgccataattcattatatagttttaaagatgcacttctctcttattctcataactttttatg

SEQ ID NO: 410592 - DNA, 583 bp, Homo sapiens
taaatgaaaagaaaaaggtacagcagagcacttacaacattgctacctttttwtatatataaaaaaaggaatgtgaatatgtacaaaagaaacattggaggatgaaacaaacatttaaaatagttacccatgggtaagggagagaacaagaaaaagaagaatggaagtgacactattctgaatgtacctgttttatagtttagagtttgaaaccaagtaaatgttttatataattaaaatacattattaaatcaaaaagggaaaaaaagcaatccctaaaaaactggaaacatatccacatttaggtggatttatgtttatcaaattggttgcataaactgtctacaatagagtatactgactatatacagctggggggtatattttaaggacaaaaagaatcactaagaaatcttaaactgcattcagtagtctttttagtaattaatatcagcattgttactttgaaattattacatgtatatggtagaacaaagcaagctatgttaatattttaggaaccagggcttttagtttacaagaaagataaggtcaaagatgtataaatcctgtactctgaaat

SEQ ID NO: 410593 - DNA, 594 bp, Homo sapiens
gctttctgtcctattttgtcttagcctagtgggcragctgagatcttccagaagtggattttgcaaagacatccaggctagctggtagtatgtccccatcactatctataatgtaattaaagttgttatgtttgtggcttgtcatctatccagtaggattagtattcatcttgaaaagcagaagctactgaaaagaattaagggttccaaaagcaactttgatgtggagtgttcacataaggaactctaatcagaatgttaaaaaaaaaaaaaaaagaagacaaagtacttgcccttaaagagcttgcagtctgtttggcagcatcaagcctacatgcatgagaaaagttgaaaatagcagataataatttaattcagtacttctcaaagttgttgtttaaaggaaaagtcagctcaccagagtctgtgggagcttttctgaaaaacaaaacaaaataaaactttaccagtgagatatttctttaatgtttcctgtctactcaaaaatccagcctatttctcaacatgttcaagtgtgttttacaataaaaactatttcacctgttcaccaatcttaaagtaaaattgacaccc

SEQ ID NO: 410594 - DNA, 649 bp, Homo sapiens
atgtttgtggcttgtcatctatccagtaggattagtattcatcttgaaaagcagaagctactgaaaagaattaagggttccaaaagcaactttgatgtggagtgttcacataaggaactctaatcagaatgttaaaaaaaaaaaaaaaagaagacaaagtayttgcccttaaagagcttgcagtctgtttggcagcatcaagcctacatgcatgagaaaagttgaaaatagcagataataatttaattcagtacttctcaaagttgttgtttaaaggaaaagtcagctcaccagagtctgtgggagcttttctgaaaaacaaaacaaaataaaactttaccagtgagatatttctttaatgtttcctgtctactcaaaaatccagcctatttctcaacatgttcaagtgtgttttacaataaaaactatttcacctgttcaccaatcttaaagtaaaattgacaccccacgaagatacaatgcatttttactgtggttttatgctttccaacactacaatgatggggatatgcatatctcattttgaaaagcataatgttaacttgtattttctcagattacctcttcgtgttagagcacaggtcttcttcatctcaaaagactttggtataggtagtattaagaaatg

SEQ ID NO: 410595 - DNA, 560 bp, Homo sapiens
gcgtgcctcagtgaaaaataaccaccattacaggacaaagaactaaaatgattacttagactgtgtgtgtgtgtgtgtgtgtgtgtgtgtctgtgtgtgtgtgtgtgtgtgatattccagtctgtaaagtctccattttgaaattgtaaatgaaaactgattagaatcagagttagaatttgttggaatgtatgtaaagattttaggaatcaagtaagaaggccattgaacgtggaggtggaagattgggggtaggtaaaacctatcagcatgtcaagctgtttttctcctgacagaatatkcagaatgtacttgccttcacattccataaccttgaactcttcttgacacagctattagagccaggcctttgaatagcctgtctcatagcattagaacccaatgtctgatttcctgacaatgatcagaccctcaaagtatatatatgatcgtggggtgggtttgtgtgcatacattcatgccttcctgtctatatattaaagaatgaaagacagacatgggccagatgtgcttgaaatacttaaactgctgttcacagt

SEQ ID NO: 410596 - DNA, 560 bp, Homo sapiens
gcgtgcctcagtgaaaaataaccaccattacaggacaaagaactaaaatgattacttagactgtgtgtgtgtgtgtgtgtgtgtgtgtgtctgtgtgtgtgtgtgtgtgtgatattccagtctgtaaagtctccattttgaaattgtaaatgaaaactgattagaatcagagttagaatttgttggaatgtatgtaaagattttaggaatcaagtaagaaggccattgaacgtggaggtggaagattgggggtaggtaaaacctatcagcatgtcaagctgtttttctcctgacagaatatgcagaatgtacttgccttcacattccataaccttgaactcttcttgacacagctattagagccrggcctttgaatagcctgtctcatagcattagaacccaatgtctgatttcctgacaatgatcagaccctcaaagtatatatatgatcgtggggtgggtttgtgtgcatacattcatgccttcctgtctatatattaaagaatgaaagacagacatgggccagatgtgcttgaaatacttaaactgctgttcacagt

SEQ ID NO: 410597 - DNA, 601 bp, Homo sapiens
agaaatgtgtatgttcagaacccatagatgtattaatgccaaagtttgaacatgaaatttggttctgagcagcctggtagccaagggaaaaagtgaactaaattgtgttatatttatctcattaccacctagaatgaaatacaaaacttggtattgaaaaggaaagttttttgaccctggcgttaaaattctataaggatctgtatatatgggactatggataacatcacacaatgaaaaatctctcttaaaaagtcttggaaacacataaaactgtttcctcatgttagtgttctcatcagaaagtttgagataattataaaaaaatcaatagatatagatctacaaatgggcatagatctggaaatggagatattctttatcaaagatggagaatctattagctaacatgggctaaaatttcaggggtgggtcaagagcctcaaataatatcctctgcactaaatctttctcttttcatccgagttgacttcattatcaggcaagagtggccactgacaactctaggttcacattcactatgtagtcartgattccagagaagatatcctctttcccaagagtctaggcaaagtcctga

SEQ ID NO: 410598 - DNA, 604 bp, Homo sapiens
attcaattgttggcaaaagtatctgagactttattacaatcatttctataattaacatttttatatgaaagtcaaattgcctcagagatttatatcatttattgtgtacttactctttatcagatactgttctaaatatcttaaatgcattatctccttcaatctttacattctgaatagtaggtgctattatgatccccatcttcaagttaaggaaacttagtcactctctcaagttgtacagctaaaacacatgataaagttgaaatattaacaaataatttgtctcccacacctgtaccttcaatttttgttactcaatttgtggcctatggaaaccagtccctctatcctcatacccccataactcaatcagggagataaattgaaatgaaaaaaaaawatataaaactgagctagtgtcaagtattttgaatctaaagaaagaggttggtgttgtggttattctaatttaaggcagcctcaggaaggccttaataaaataatacataggcttattttatttttgcttattgtctaaaaggaatacaaagtaatattcaaattagcaggagaaatttttgctcaatcaagagtagattat

SEQ ID NO: 410599 - DNA, 596 bp, Homo sapiens
aagtttatagtactaaattcctacattgagaaacttgaaaggttacaaattgacaacctaatatcatatctcaaggaactagagaaataagaacaagcccaaagctagcagaagaaaagaaactaaaagtatcagagcagacctaaatgaatttgaaatgaaaaacaatacgaaagatcaatgaaacaaaaagttgattcttaggaaagataaacaaatagaccattacctagattaaccaagaaagagagaggattcaaatacattacaaccaacaccacaaaaatacaaaaggtcagcagagacaactgtgaacccctctatgcacaygaactagaaaatctagcagaaatggataaattcctgggaacataaaaccctcctagattaaattaagaagaaatagaaaccctgaacagatcactaacaatcagtgaaattgaattaataataaaaaatgttgtcaacaaaaaagccgagagccagatggattcaccatggaattctaccagacattcaaagaatagttggtaccaccctactgaagttattccaaaagattgagaaagagggaatatcccccaactcattctatg

SEQ ID NO: 410600 - DNA, 551 bp, Homo sapiens
ctgcaccaagagtcctgccctccttgtatatactaatcctcaggacaatgagaagccacaccctttcagctttggtcatcaaggcactccccccagccaatggtagttatggagtaatttcacctcacaaattatcactccaacatgtccctgaaggttagggatgcttggggtgcaataggcttatatttggaaaaaagggacatttccttagtactcctaaaagtctttcccaaactgacctttcattcattttcatcttcccatgttcaattctggtggtaccatagtaaggagaggatgtttcctccaaaacattcctcatggcttgccccaacctgcctagttcactctgtctcccatccttcaccatttactagagttttagatgccttatctatawtatctttaaaataatgtggttgcatttaaacatcaattgacgtattaatcatctcaattttctccaacaaatttctcttacgtgccttgaaaaccattcacttcctggctactaccaggcaactttactatgctactgtcttgtcaca

SEQ ID NO: 410601 - DNA, 552 bp, Homo sapiens
gccactggtttcttaattagaatacataccatctgtaaataatttttcagggagattctcatttgtggaggcaggtgtagtttgtgggttattaycgcatgtagtgtacagaatgggccccaagatgttcacatactaatccccagaacctgagaaaacctgaggttatatgacaataggaaattaaggatgcaaatgaaattaaggttgctaatcagcatactctaagatagggagattatcctgaattatcctaatgggtccataacagtggaagagggaagcagaagaaaggagtcagagggagataggacaatggaagtgatgtaatgggagactcaactcatctttaatagcttgaagtactgacgaagggacaatttgacttcctcttttcctaactgaataccctttatttctttctcctgcctgattgccctggtcagaacttccaacactatgttgaatagaaggggtaagagagggcatccctgtcttctgccagttttcaaagggaatgcttccagtttttgcccattcagtatgacactg

SEQ ID NO: 410602 - DNA, 597 bp, Homo sapiens
caacgttccatcagccagaatcacatgaccaaaccacaaatcaatggggtagtaaaayatattgtgcctacagtgagtcagtaacaacaagggtggagatgaaaggaaccactgtgagcaaataaagcaatgagaaactccctaccatgaacaaaccccactgcagtaagggagaaatatgggtaaacaattagctgaaactcacttttaccattctatccatttctctggatctaccttcatctattctgcagaactccaagctggtcccttatttccccaaaattcctctcaaagagttatggacccctcgtgggtatctcagactaccatgtggcatctggtatttttctcctgtcctgccctgctagtaaaggcaatgctgagatgctgccaaagcaaaacgtggcattcacatgattgaagccaactaaagataacaggatcagctgcaccaagtctgtgccaagggtacagcactaatgtctataccatggatacctatgccccatgccaaagctatgttaagttgccaccagctgttaccaaccttttaaactctgaagagctcatttgattattaaaaaaaaaagaaac

SEQ ID NO: 410603 - DNA, 597 bp, Homo sapiens
caacgttccatcagccagaatcacatgaccaaaccacaaatcaatggggtagtaaaatatattgtgcctacagtgagtcagtaacaacaagggtggagatgaaaggaaccactgtgagcaaataaagcaaygagaaactccctaccatgaacaaaccccactgcagtaagggagaaatatgggtaaacaattagctgaaactcacttttaccattctatccatttctctggatctaccttcatctattctgcagaactccaagctggtcccttatttccccaaaattcctctcaaagagttatggacccctcgtgggtatctcagactaccatgtggcatctggtatttttctcctgtcctgccctgctagtaaaggcaatgctgagatgctgccaaagcaaaacgtggcattcacatgattgaagccaactaaagataacaggatcagctgcaccaagtctgtgccaagggtacagcactaatgtctataccatggatacctatgccccatgccaaagctatgttaagttgccaccagctgttaccaaccttttaaactctgaagagctcatttgattattaaaaaaaaaagaaac

SEQ ID NO: 410604 - DNA, 597 bp, Homo sapiens
caacgttccatcagccagaatcacatgaccaaaccacaaatcaatggggtagtaaaatatattgtgcctacagtgagtcagtaacaacaagggtggagatgaaaggaaccactgtgagcaaataaagcaatgagaaactccctaccatgaacaaaccccactgcagtaagggagaaatatgggtaaacaattagctgaaactcacttttaccattctatccatttctctggatctacctkcatctattctgcagaactccaagctggtcccttatttccccaaaattcctctcaaagagttatggacccctcgtgggtatctcagactaccatgtggcatctggtatttttctcctgtcctgccctgctagtaaaggcaatgctgagatgctgccaaagcaaaacgtggcattcacatgattgaagccaactaaagataacaggatcagctgcaccaagtctgtgccaagggtacagcactaatgtctataccatggatacctatgccccatgccaaagctatgttaagttgccaccagctgttaccaaccttttaaactctgaagagctcatttgattattaaaaaaaaaagaaac

SEQ ID NO: 410605 - DNA, 583 bp, Homo sapiens
ctgtttatcttgagactgtctattttgatggctatgcaaggcagagggcatgaayggcaaagcccagggtgctcaaaggcagaagtccaataactgaccccggaacaaaaccaggacctcaaagagttacatcttatgcaaaagagtaaacgatagaatagcccactccaaagaggcaaacagcaagtataccttcctgtctcaatcttgatgtgagccagaaaaaaaaaatctccccctgagaatctaacaagataaagtactctcagggggttagagtctcaatctgtattctctctcaaatgaaaaaaaaaatctaagttgaacatttattttaagtggtactgagttaatgccaaacctaagtgtttgataaaaacaaattaaagtcattgaggaatttactttgaacatagacatcagaattcccataaatatggtttcattatcatggatttacaaccagaaagcacagaaacacaagaaagctaggcactaggatcaaaagtctgcaagcacaagcacacatgcacaaacgcacacataaacactataaaactgcacttccaaagagttctgaatt

SEQ ID NO: 410606 - DNA, 490 bp, Homo sapiens
atgttgattatagtgaatgaatgaattccagaaccagtaaactatggatttataccaactataagcaaccttaccaggaaaaaataaatgtagagaactagagcataactaaatcacaccacaggaaaaatctagttaaaaggagggaggaaatcaatataaaaacaaggtttgatgttataaaataaatgtggttaatttattccagcttattaattagagttgttcatcccatactattcctcagaatgtaytgtccttttatagacaacaatgacaccctggcctgccaatgttggaacacgtcctgtgagttattttacaaggagggatgggtttgctctgagatagccacctggtgattagtgacccatattataaggaagaggatcagtgctaataagggctagagtgtccatctgagccctcagtaggcaaaactaattgagtgttccttgcgaaaaattgtctcaattaggtgaaattccaa

SEQ ID NO: 410607 - DNA, 561 bp, Homo sapiens
acacaactaaatcaaacagcattttaattttatttagatgatagtgtaactaaaaatacagtgaaaaagaaaaatggctctaacagataaatcaagcacacaatgtcaacattagattattaaatttctcattcctgaaacgtagttacatggagttcttttcacatgcaaaaacatatatacacacagactaaccaaatagcttgttttagctgtcatggatatataaagaaattgttacatagtaaaaggtaattcaagtatactcatcccacaaaacataaaaaaaaatcatagcaggtctaaatttacatttctcccaaggctagcatcattattactattatataccaaaaacttgatgtagtgactgagtatgttcacttatttaaaaagaacagacccaaggtcaaagcttatgctatcagagacataaacatgaaacatctgcccaatgctcttagctagaattccttttgctttcaattcactttggacaycattcccagattaaaggccagaaggaacactctcaactaactgtgcatgttaaattttaaa

SEQ ID NO: 410608 - DNA, 353 bp, Homo sapiens
gaaacctccactcttgtcttggctttctctctttcccttgcttactcactctatctccttctctctctccctttctccaaatgtcaaatgtaatctctgccttaaatttygtaaaatcatcaacacccttgtaaaacaacatacaaacataagttattattattaactatgtaatcattgttgcagacatacttttaagtcagtgtctccaatcttccttggctgtaaactacattcaactctgtattttcctagaaagaggtacttgaagaaaagataatgctcttagagggcgttatttagcaaatacagggtaaaggaatcatgtattttttgcatttggggagttttct

SEQ ID NO: 410609 - DNA, 563 bp, Homo sapiens
tgaggtggtgatagagataataatgtggccagtccagggatgctcatacctggaacatcattaaacccatattttaaaagtatttgctccttgtttatctagagaagaaatgaagacatttgagggaagaaaagaagaaaaaaagaatgctgaaaacagtagtctagtttggatatttactaatttaaataaatccttgcatttaacttccaccttctaaagaagtaggtctagtgatcatctgctgttactcagctatattctccatggcctccccatcctaacccagaagcagactataacattattccttttaactacaaataatactcattctaagagaaattttggtaaatttaattttctctctttccatttccagtgatactayagcattgtctaacctatcaatttctaagtaagagactatatccttaattgggctatgcttttatattcatatggcagtctttaaactcagcagtgtgaaagaattaaggtgggtagtagccttaaatactattagttttttggtttttttttttttaaacaccacctaagac

SEQ ID NO: 410610 - DNA, 541 bp, Homo sapiens
tgctgatgcagaagccaacacagcctgtgggttcctgctgcaatctagactggtgaataccttccctgaaaggtaagaacatggggggaatcagccacttatctccaaaatccacaatttccgcagttccaggtccaaaactcagtgtctcactaagattaaatggccattattgttcttaagatttgggaaattaaaaatatatcagatctctctgtatttcctatttcagcccaaatgaatccaattagatttcactgcaaactataaaatactctaggcctatttcctctttaaattgattataaatgttgatgcttgtaagtataagtgcaaattaatctagggaattccacgaaattttatttcttaattaagtaatttaaactaaattacttaactgaaatgactactctggctcctaagattgttcaaggtcagacaaatgtaatcaaatataatttagtkatttttcatttgccataacccttttcatcaaactcatttcactgctttggacttgatagaaagaagaatttgc

SEQ ID NO: 410611 - DNA, 624 bp, Homo sapiens
ttagtccagttcggatgcacagagttaagcccatccagcactggagatcaggtattggcaggatcagcccacgctggataatccccctaaggcaaggaggggaagggaatagtttaggtggcaaagctggatctgggttcaaaaggaaaaccacggagaccgtccaataaaatcaaagatgaaactgaaggatctatttgtggagaatggaaagctgatgccagaagacaggccaaatataagaaccaycaaatcagagctgagcatggaaataaagatgccagaacacaaaagtaaatttcagagccaaaacttggtgtaataaacaagtttattaggaatggactgaatgttagaccaggtctctggaataaaatcaaaagacacacaaaaacgcacaagtccttgtgtctcagtgtgttgggctgaagaggaacctcttgagatgctgatatgaagcttttctgctttgtttgttttaaagatatcttacctcctttgttgtgtgaactataggctttcttgcttccatatggaaacaccctaaaatctttaagtcacatgcatgaacaacagtgtagttaaaagaacattttaggctttgaagccagagggagacataag

SEQ ID NO: 410612 - DNA, 568 bp, Homo sapiens
ccttgtgtctcagtgtgttgggctgaagaggaacctcttgagatgctgatatgaagcttttctgctttgtttgttttaaagatatcttacctcctttgttgtgtgaactataggctttcttgcttccatatggaaacaccctaaaatctttaagtcacatgcatgaacaacagtgtagttaaaagaacattttaggctttgaagccagagggagacataagtacattctcagctctgccacttaccacctacttaagcaagctatataaggtttttcacattaaatgggaattataatgcatacctgccatagtggttgtgagtatttgatgggaaatgcacaaaatacacttagcatgctccctgacacatagtgggtggttaataagtggtagctgtgagaacatcartggtaatgatgaacatgaaattggcaaaggcttttttatctaagcatcatcataataataaatgtcatgaatgaagtaagcaagtttatgtttatgaaatcctggaatagttgacgcatggattaccttgtaaatgggtacatttaggtaaagcaaaa

SEQ ID NO: 410613 - DNA, 577 bp, Homo sapiens
tcttggacttggtttatgttactttttgagtgtgggcaaattaaaactcaaagtttttttattgtagtcacaggacagtagtaaaagaactgagatttccaagattgggttggtaaggtagatttagttggcctgtggacatctatatgtaaaactatttggaatagactgacaagtcattcactggaaaccacaagttcactggattttttttttcttcattgaattaactaaatcagctagctgaaattagcatctctagtcaaataaataatttactcagtgggaactgttatgatccgtgctttctcacaaaatatgtgggatttctcctcataccaaccaattctccaactctctgggaactaactggttatgcaatgattcaattcaattcagacactacctagagttagcacaggmcccccacaggttaagggctcagtcccacaagacttcccccagttgagatgccaatcacaagtttggaccaactgtacttctgactgaccagctataaattggaattctatgactgtctcctcagattcaataatttgctagaatggctcacaga

SEQ ID NO: 410614 - DNA, 531 bp, Homo sapiens
cttggtaagttcctgacagagcagctgcaacaaacttaatttaaacattttttttttcctggagctctctgaaaaaagaaatctgagatgcaaggtaaatgttggaagtctcttttgttccaggatctctgtaggaattctcattgtttggtcactaatagaatcccaccttcatgttaaaccaacctgcaggttttttctttgctgatgacattctttgtaacaggtgtgtgtttgtcatcaggctgtctcttakaatactctgaatcagccagtctctggctgatatatactgagtatatgctgatatatactctggtgcttgcttaattctgaacttgaaaatagaaggatgcacagttcctttcttgagatgtgttggaccttgacatgagggggactattttctacttgttagctcttctttccactttatacagctatgctttatttatctgcaaactgtctttattctttagggccttgattctctcctttaagaactgttctcttaggaagggaacatgtagt

SEQ ID NO: 410615 - DNA, 531 bp, Homo sapiens
aaaattgttatgagggtttaacaaagtaatatgtcaaaagtgactgtcaagagtaggtttttcctttgagttagtatctggacagtacctgcctccacttttccctctgctacttccctcatctggatgtgtgtaaccacatgtgcattgctaactgtgtcttgacacatggcaggtcatgcctcaattagatatgagtagcaaaggctaggcctgaggtttatttgctacattaaaggtatctagtgaagtgcccttagcaattaatttttttcattgatgtgctaacagattgaaaatattcaggtactttaagcctgttaggagatgggctgcaagttagggtcggtttgatgctagatatttctraacgttttgtgccctatgaagggtaagaactagttaaacagagttgtagaatactgaagctggaaggctttatttctaaacgttttgtgccctatgaagggtaagaactagttaaacagagttgtagaatactgaagctggaaggctttatttctaaacgtt

SEQ ID NO: 410616 - DNA, 558 bp, Homo sapiens
atattaccatttttttactttagggaggaaatcttgaccaatatatcttatctatgayattgcacagccagaacttgaaagcatatttggcatcaaggcctgaatttataaaactgagagggacaaatagaataatatatttgggcaaagctgcagtgtccagtgtcattgtggcatctggtgaaggagaaaatgtagcagaagatgaagtggtaatttagtccagattttagaaggctttgactatcagacaatatctgacaccatttattgaacaagagtccttgatactgtccattccaggaaaggagggaacctttactatgacacatggttaaatgttaataccaagggtgcccccaggtaggctaataactagatgcatcttcaaaataatttacattttgggctgggcatggtggctcacacctgtaatcccagcactttgggaggccgaggcaggcagaccacttgaggtcaggagttggagaccagctccgccaacatggtgaaactccacctctactaaaatacaaaaattagccaagcatgttggca

SEQ ID NO: 410617 - DNA, 573 bp, Homo sapiens
atgtgaggtcaatttgtgtgtgtgtgtgtgtgtgtgtgtgtgtgtgtgtgygtgtaggagaagggtgattcttgaggcatctaataagccccaggacttagagttttctccacattcccaatattgaattgaatttggaataacagatctaatacaatccaatacattttaatactagaaccttaccagagctctgtgtataggtctcagccaccttaaggcttaaaagtgacaaatattctacctattgtatctaaaatgatcttccaatacctgttcaagctgaacttgagtagtttaagatttagccacgcagctggtaccataagtaagtaccttccattgggctaaaaactttggagagatccacgacataatttgtggggcttagtgcaaaatggaaacgtgggctgcttcaagtcagaggccctgtgtgactgcactgctcctacacgcataatgaaggcctgcgctgtgatggcccataggctgtttgtagacctggcacccctttgcctgatttcaacccacctcattaccaatataactgataggaaacttcacatagatgtg

SEQ ID NO: 410618 - DNA, 596 bp, Homo sapiens
tagccctagctgtcttgatcagctagacggattggcaactttagcacagaaaaagagtgaaaattctttgtctctgtttcttgatgcctacatggagcatgttttggggaaggaaaaaaatgcattgtctactcgtatgatccactgaaagaaattttacttgttcttgtgaggcataggtgctctccaggtaataacaccaaatttcaagctaaaattgaggacggagtgcatagaagacagagaatcagtaaattcataatcaggataaaatggacaacaatgtagactacacacatgggtatatgggtggtgagtatgaaaaatagccttggaaacattcatatataatataggcctaggagcactcatatttmagtttaattatattgcatgggaatgatgattaatctttcaaaagactgttgtggaactctgtcattctatttcactccctttgtaactatcctggtacaaacctttaacatctctccctgagcctacagctacttagaagtgtgcacaactccactgtttctatcttcttgtccacactgtcaacaaaggttgttcataaaccacaaatgtcattatgg

SEQ ID NO: 410619 - DNA, 533 bp, Homo sapiens
taataataacagtaataatagaatattaaattgggctcataagaagtcgcaaacatactttaagcaattctaaatattagrcatataaatgcacattcatatggcaattatttgacaaaggacttgtctttgactctgggtccatgattataattctgtttctcatataaaccacatccataatgagttgtccaaattttctgttttacttctttacaatgaaacaaacaaacaaaatcttaaaaattttgcaaagcaatccaggtcgagaattcttttactttttgtgaattatttttacccttctttattccaatgcaattttttttctgactaatagttactgagtctttgcaaaacatttgatttatttttataggcacaatgaactcccttttttaaactttcatatttgcatactattttattttattcttttaaaataatgtattacctaattaaattacttaattacaataacaatttcaaatagaacaaaaggttttggaacaaataactaaataaatgggaaa

SEQ ID NO: 410620 - DNA, 496 bp, Homo sapiens
gttgtttatatccgtggttcagtgggtttttttccttttttttttttttttttcctgactagtgttccacagtatggttatgccacagtttgtttaaccattaacccattgaaaaacatctgggcagactccagattttggctaatacaaataaaattcctgtgaacattcgtgtacaggtttttgtgtgaacaaatgttctcatttgtctggaataaatacccaggaatgcaaacgatggtacatacagtaattgcatacttagttttataagaaactgcctcttttccagaatgctgtgccatttcacatctataccagcaatatatgaacaatctagtttctctgcatccttgtcagcatgtggtatcatcactatttattattttrgccattctggtaagtggataataatatttcattgtggttttaatttgcatttccctaatgactaataatgttgaaccttttttgtgtagttatttgccatttgtat

SEQ ID NO: 410621 - DNA, 594 bp, Homo sapiens
ctctagcaaatataaaatgattctacctaaatattgttgaactgtccacaaggcagttggttttatttgggttatgcagttttagctctaatttgtgatgagattaagagaaaccttaaggtcgcctagctggaagtccaatactctgcagacacatgcattgtttcttttgcaaagctctttggccctwcaagagctaatttaaataatcaattttattgatgtataatttacgtgtaattaaatgcacccatccattttaagtatatggttcaatggattttgacaaatgtatacaattgtgtaatcatcaccaccacaatcaagatacagaaaattttcattactcttcagaagctccttgtgtctcttgaagtcaatcccccatccacttcccctcctgacctaaggcaaccattgatatgctttctgttgctatggattagtttcaatgcagaactataggtctagaatatcatacaaattaaatcatgcactgtgtccttttatttctggcttctttcagtcattatctatgtttttaatatccatccatgttcttgcctttcttttcttaccacaattttttatgca

SEQ ID NO: 410622 - DNA, 569 bp, Homo sapiens
cccatcataattacatatgtctttttctaccttaatctcacacagataaatatatgcattcttcctggtgagagtggcagaggagttatatgcccttaccactcaaaagaaaacaattgtagatattttttgggcacagatctgaatgaaaataagtgggggagaccagtgtgcttgacaatatagttaactatgttggccaatatcagagctattttttgtggataagcaaccatgccaaaaaccagaatatactataacatactastcaataatttttaattggctactatcatttttcaaaaagtaagaaacaaggggaaagtaaatctactagttttcctgaagcaagagaagaggaaaatgagaaaattgagatttgaccaactgatttctgcccaaagtggtacaaatgactgtgtaaaaacatcagagaggctaaatatttgtggcagacgctcttttaatggctgctgataaagcatgaaaatcactttgagagcatctgatacatttcttacaaatacccactgctctctttgtaaatattgggggagagaagtatacaa

SEQ ID NO: 410623 - DNA, 569 bp, Homo sapiens
cccatcataattacatatgtctttttctaccttaatctcacacagataaatatatgcattcttcctggtgagagtggcagaggagttatatgcccttaccactcaaaagaaaacaattgtagatattttttgggcacagatctgaatgaaaataagtgggggagaccagtgtgcttgacaatatagttaactatgttggccaatatcagagctattttttgtggataagcaaccatgccaaaaaccagaatatactataacatactagtcaataatttttaattggctactatcatttttcaaaaagtaagaaacaaggrgaaagtaaatctactagttttcctgaagcaagagaagaggaaaatgagaaaattgagatttgaccaactgatttctgcccaaagtggtacaaatgactgtgtaaaaacatcagagaggctaaatatttgtggcagacgctcttttaatggctgctgataaagcatgaaaatcactttgagagcatctgatacatttcttacaaatacccactgctctctttgtaaatattgggggagagaagtatacaa

SEQ ID NO: 410624 - DNA, 559 bp, Homo sapiens
  misc_feature (1)...(559): n = A,T,C or G
tttcttcttcccccttaccttgcccctcctcaactcaccaaagtggaatggaatgaagagttttgtgcttacttattcctataagtgttgcatcaagttgaataccccaatgggctcatctcccttgttagaaacctgtgaagggttttccttacctgtagtccaaagcccatactgctcagcctgctgctcaagcccttccactgatccaggcttgctttgccagactttcctcccaggacagcacttcctccagtgtcgcagatccacaagaccacctcagccagccatcacaccatgcagactgcttactctccaccagtcatccttgttccttcattttgcctggaacatgtcttgaatattgaaggtgcttaataagcatgaggtgaattttaattttgttatcagtttgaaagcaaatgagttgaattrttattatttctcaatttactattttaaagccaattaaattaaatcacattttgtctatggttcattttttttcctccttaacaacatcaaaatanagactttttaaaaagtatgaaaggcatcc

SEQ ID NO: 410625 - DNA, 530 bp, Homo sapiens
  misc_feature (1)...(530): n = A,T,C or G
nnnnnncttcttagcacatcttgtaatagggaaagctgcagccccatccacccattgtccccagagagtatgaccagaggcacaggccaggccctctttaaagaccctctgagagcttccctgggtaactgtttggtgtctcagtggcctcacttcctttgctgctggctccaacccagaagatcaccagctcatctccaaatgtgctatttatgacgattcatccagatacagccttccagaacccaaggccccacaccggctccattcagctgagacaatgtgcccaaaagctactgcaggtttcactaaattatggagcaaatgtcagacttccctcrcattatcagacacacattttacatggcctctttattgggtttttatatcttgagggggtcttaataggatgaaagggaggcttgctaggtgcaaatgagtgccgttcgactatttaaaggcacatttaattaaactggattcattgcctgcatggggcaagttaaatgaaaactaaatagatggagtat

SEQ ID NO: 410626 - DNA, 475 bp, Homo sapiens
cagggagggggtggtattttaaaagcatgtaaaaatagtcaacataattttgtatcacaaaagaggagaaaaaagaaaaacttacgctgactttcaaagcatgaacccttttaaagtaatcttcttggctgctggtccacaggttaaaaaaaaaacaagttgaaacataattgatctgatttayccatccccaagttacaatgttctgccgtggcccctccattcctctttcttctgatagcaacatcttggtgttactgtggagtcagctctcccctacttttggtccatgtggcctaagctgtatttaccctaccctttagtttcatgagttggcacatgcccctggactgggcaacacgtcccaaattggttcacaagtcccactccaagaaatgatctccagccccagtacttttgtctcgagctactgagagagagatcctccctgtagctgctaagcggataggataca

SEQ ID NO: 410627 - DNA, 630 bp, Homo sapiens
tctgcacttgtatacaacattccattagaagttctagctagtgccataaggcaagaaaaagaagtaaatggtataataattaagtggaagatgggaggcaagcttaatttatggacaacagcattgtatacatagatacctttttgcatctacagaaaaaattgctagaaccaataaatgaatttagcattatagtagtgtatgagggttaatatacaaaagtcattgtattttttatgttttgtatatttatttataaaataattgtatttctaatattagcgagcaattggaaaaaaataaaaactagttgcttaaaaaacaaaaaaacttgaaatcattttaataaaagatgtgtaagatttctaaactaagtatttcaattcattgttgacagaaattaaaatgaaattttaatttcattttaattctaatgaaatggagagatacaccatrtttatgcactagaaaattcaatattgttaaaatgtcttatttttttcaaatcaatctatgaatttaatgcaattctaattaaaagccccaaaagtatttttttaataaattgactatatgattctaaaatttacattaaaaagcaaatgatctaccaatctttgtaaaggacaa

SEQ ID NO: 410628 - DNA, 551 bp, Homo sapiens
agtttacttactgtggagaaggacataaagaaagagatagaaagagtgcttatagcacacactttctggcccagggtgggataatgtatgaactgctgggaacacttcctcaaggcctagrtgtaccttaacagtggcacaatgttaatagctactcctggactgtggcttagctcttattgggcacaatatttcagtcatagggaaagttaatgaaggaagacttggtttcagagcatcaaaggagatggatgcaacaccactgcctagatagtttcagactcagatggaacatggagccaccaatccttcagcctaccagaccaggaagaaccattttttcagtagttcctgacagagcagaagcatccccatcttagacaaacactgccattttaagttccccttgattaaaaaccacctaaatccagcccagaaaacatcagcctaatggctattgtcagcatgaccataaaccacaagtgacacttctgaccagaaacattccaagcctgagataaacccattctgaccagaatcatgccaaccct

SEQ ID NO: 410629 - DNA, 510 bp, Homo sapiens
aatgaatattccaccgtatggctataccaccttttgtgtatccagtcatccactgatacctgggttgtgccatattttggccattatgaataatgctgctatgaacattcatgaagaagtttctgtgtgaacatatacattcatttctcttaggtatacacccaagagtggaactgccaggtcatgtcgtaactggatgttgaactgaggaactgccgagactgttttccaaagtggctgccccagtttacactcccaccagcagtgtaggagggttctccctatcctcagcaacacttgttattatctgagttttggattctagctgtcctagtggatgtggagtgcttatgtttccgtttttaaaaaaggagtgggagactcccataaagcctgmaaccttgatcttctgccaagtgttttcatgattcccattaacacctgacgtttttagagggggggaagcttgagctaaaatgtgggggtggggatgacagatgtgaaataaac

SEQ ID NO: 410630 - DNA, 510 bp, Homo sapiens
aatgaatattccaccgtatggctataccaccttttgtgtatccagtcatccactgatacctgggttgtgccatattttggccattatgaataatgctgctatgaacattcatgaagaagtttctgtgtgaacatatacattcatttctcttaggtatacacccaagagtggaactgccaggtcatgtcgtaactggatgttgaactgaggaactgccgagactgttttccaaagtggctgccccagtttacactcccaccagcagtgtaggagggttctccctatcctcagcaacacttgttattatctgagttttggattctagctgtcctagtggatgtggagtgcttatgtttccgtttttaaaaaaggagtgggagactcccataaagcctgcaaccttgatcttctgccaagtgttttcatgatwcccattaacacctgacgtttttagagggggggaagcttgagctaaaatgtgggggtggggatgacagatgtgaaataaac

SEQ ID NO: 410631 - DNA, 510 bp, Homo sapiens
aatgaatattccaccgtatggctataccaccttttgtgtatccagtcatccactgatacctgggttgtgccatattttggccattatgaataatgctgctatgaacattcatgaagaagtttctgtgtgaacatatacattcatttctcttaggtatacacccaagagtggaactgccaggtcatgtcgtaactggatgttgaactgaggaactgccgagactgttttccaaagtggctgccccagtttacactcccaccagcagtgtaggagggttctccctatcctcagcaacacttgttattatctgagttttggattctagctgtcctagtggatgtggagtgcttatgtttccgtttttaaaaaaggagtgggagactcccataaagcctgcaaccttgatcttctgccaagtgttttcatgattcccattaacacctgacgtttttagasggggggaagcttgagctaaaatgtgggggtggggatgacagatgtgaaataaac

SEQ ID NO: 410632 - DNA, 565 bp, Homo sapiens
tagagacacgaaggaatatgcccaagtttgccaagatagaaactggcaataggaggacaaaaatctcactccaaagcctagactatttaagattatgttatatgactattaaaccagtcatgattcttctttattccaagagtttgtgaggaagttatctgcgtcatcctaaacgtgggaacatctattattccttggtacatttttcctatgtgctgtgcctttccagtcccaacccaacayagatcacgtcttctggattttggatctggtttcaatctccttcataacctactaattatctacagagattggcagtagtcagtattttattaagaatgtttgggaaaatctcagttcatacatattgtaagctggaaagtacatttagaaagccatatctaatctgaactgaatttttgatgcatacaaccctccttttcaaaactcactcagccatcctgaaaattttccctcctataagggacatattattggcttctcagaccaccttgccttctatgttcaggaaagtcttttccctttcaacctgttttttatgtcc

SEQ ID NO: 410633 - DNA, 488 bp, Homo sapiens
acattttattgaaatgtaggtaagcatgatgtgggtcggtcatctctcgtgtgtcttacagctgcatcatctggagcatgtagcctcaaagaacattgaagcaggatgaggaacttaaggagaggccccatcagctcttaactactccagcccagaagtgatgcatattacttgcatttacagctcattagccagaattggtcacatgacctcaacattactgcaaggaaagctgggaaatttaagggaagaacatgagacatttgatctgtacaaattcctctgctacacacccccagatgttttgggtctcattgaaatgcattctttttwaaaaaaaaaaaactttttatttccatagattttgggggaacaggtggtatttggttacatgagtaagttatttagtggtgatttgtgagattttcgtgcacccatcaccagggcagtatacactgaatccaatttgtagtcttttatccctctca

SEQ ID NO: 410634 - DNA, 488 bp, Homo sapiens
acattttattgaaatgtaggtaagcatgatgtgggtcggtcatctctcgtgtgtcttacagctgcatcatctggagcatgtagcctcaaagaacattgaagcaggatgaggaacttaaggagaggccccatcagctcttaactactccagcccagaagtgatgcatattacttgcatttacagctcattagccagaattggtcacatgacctcaacattactgcaaggaaagctgggaaatttaagggaagaacatgagacatttgatctgtacaaattcctctgctacacacccccagatgttttgggtctcattgaaatgcattctttttawaaaaaaaaaaactttttatttccatagattttgggggaacaggtggtatttggttacatgagtaagttatttagtggtgatttgtgagattttcgtgcacccatcaccagggcagtatacactgaatccaatttgtagtcttttatccctctca

SEQ ID NO: 410635 - DNA, 590 bp, Homo sapiens
tatttgggtagggacaaatatataaactatatcaaccccagcccctcccaaatctcatgttcttctcgcattgcaaaatacaattatgccttaccaacagtcccccaaagtcttaacacattccagcattaacttaaaagtccaaagtctcatctgagacatggcaaattcctttcacctatgagcctgtaaaataaaaaagtagttagttatttccaagataccctgaggttataggcattgggtaaacgtttccattccaaaagggagaaattggccaaaagaaagggccacaggccccatgcacatttgaaamccagtagggcagtgattaaaccttaaatctctgaaataatctcctttgactccatgtcccacatctagggcacatcgatgcaagaactggtgttccagggccttgggaacctccacccctgtggagtttttccctgtgaaaaagccatgaaaaccctgtgcctttttcatactgaggctacaagttgccagtggatctacatttcagggtatagaggatggtggcccccttctcacagctcctctaggcagtggttccattagggactccatgt

SEQ ID NO: 410636 - DNA, 562 bp, Homo sapiens
gctagttgctgtttctgtttctgctcatgttgttcttgatagaattgtcaccgtttctgcttttagctaaactataggaaactgtcccctatgaagcaaggaagggattgtgcaagctattttcatccattgagaaatacttagaaaagagtgtgcaactatattggcaatttttcctcttatttatttgtgttgattgcatgcccattatagctgaattcatgaagaccattgtcctctgggttagatagttcytacctctccctccagacgcacttttcacccttccccgccctcctctgtgctctgaagactgacttctttgtacagcatcacctggcttccctttctctcgacttctgatgaggtttagtcaatggagacaccagcagaattgtggaggacaagagcacagagagatcagggaatttattttgcttactccctcactgctggtcatggttttgtgaagtctgttcatctggggaggcccacagtaccactggatagccattttctcatggccaccactcttatggggtgtgacaatctcgcccacttc

SEQ ID NO: 410637 - DNA, 577 bp, Homo sapiens
tcattactcacatcccttattatagtcccgggaataattgttagatcaaaggatatataaatgtcaacatttattttgaaaatatgtatgatcaaatatacgccagaaacactgggcaagtggttcagtgtaagagtacacaattatttgcacatttttagcacatttttccattttttaactcattgacaattttataatttaacattatatagaattttttcttaaaatactttgctatagcataaacatgcaaaaaaaagtgtatgaacaaaaatgtattgtccattaacttatcacaaagtgatattcacaaagtttacccaygtaacgtaatggtggcgaatattagtagcactgtaaaatctcccaaaggccactcccatttttatgaatttttataaacagcatataggtttttttctctttaactcacagtgaaaatcagtatctttaaattgaacagttcagtcagttcacaggttatatgtttgccaatataaacttatgctgctattttattatgtgctttctatctgtctagtctgttttgtttcgtttcttttttatccttgtt

SEQ ID NO: 410638 - DNA, 576 bp, Homo sapiens
tttttgtatatgataatgacttagtattaataaatctacaagtattttaatccctcctttgttatctctgagctggtgaaaatacagccaaattattttggccatgtcaggaaaagtttattataaaatatgagtgtaagttcattttagaaaagatataaacttctaaattatcagcaattcctgtgctttaaacatctagttcctagtcatggacaacgttgtctattttcaaagtgtagaacacataactctcagttttgcctgttaggaaagtactaacatggagaatgcaaatgaaacctacatataaccaagccatttattaaacagtatttaatamtctttcatcactaaactattgaaacagctaataagctgtaatgttgacttatttggggttttgcctcattcttaaaggttgaaatgttaaaagttactgaagtatctatggggttaaaagtagggtagactttataaagagaacaggttttataccaattgacaagagaatctaaatgtaaatgtctactcagaaaaaaacagcaaaagctgagtttatggatcaatagccta

SEQ ID NO: 410639 - DNA, 541 bp, Homo sapiens
gcctcaggctgcttctattcatgggggaagttgaaggggagctggtgtgtgcagagaccacatgacaagagagagaaactgaggaaggcagactctcccggaaagtaagagagtgagaactcactcaccaccacccagggaggacattcatctattcatgagagatatgccctgtattcgtccattttcacactgttgatgaagacattcccaagactgggtaatttataaagaaaaagaggtttaatggactcacagttccacgtggctggggaggcctcacaatcatggtggaaggcaaaagtcacatcttacatggtggcagacgagagagaatgcgagccaagtgaatggggttcccctttgtaaaaccatcagatctcgtgagacttattcactaccacaagaacagtatgggcgaaaccacgcccatgattcagttatctcccaccaggcccctcccacaacatgtgggaattatgggagctagtattcaagatcagatttgggtggggacasagccaaaccacatcatgctccc

SEQ ID NO: 410640 - DNA, 581 bp, Homo sapiens
cagcttcctgggtgaaggtgctaatctcaggacatgattctctctggggctgtgaaagtctcatgaattgattcaagagcttgcagagaattctacccactgaaatgtgagcagggaacgttcgcagggcccagagaaggaggaaacttctgccagggcccagagaatgcagccagcttgagaaggtgagggatttacttatcatctttcctgccactttccttccatctctctattccagtctgcagtatcagaacctggctggcaggctggggctgagtgagagcagaaagagagaagaaatccttttcactgcatatttccaacctgaagataatcacttgatatttcataatatttagaattttgattaatagtttartggtgtattagggttctccggagggacagaactaataggatatatgtacatatgcaagggagtgtattatggagaattggctctcaggatcacaggattacaaggcaaagtcccagcataggctgtctgcaatctggggacgagagaagccaatagtggctcagttggtgtcagaaagcctcaaaactagggaagctga

SEQ ID NO: 410641 - DNA, 572 bp, Homo sapiens
cctgttgttgagacctactgctcaggaacaaaaagattcctttcatattactgctcattgacaacgcacctggtcacccaagagctctgatggagatgtacaaggaaattaatgtagttttcatgcctgctaatacaacatccattccacagcccatggatcaaagagtaattctggttttaaagttttattatttaagaaatacattttgtaaggatataggtggcttagatggtgattcttttgatggatctgggtaaagtaaattgaaagcctccagaaagcatgcacctttcaagatgtcattaagaacatctatgattcacaggaggaccaaatatcaacactaacaagaatttggaagaagatgattccaactctcatgcatgactttgagggattcaatacttcagtaaaggaagtaactgcagatgtggtagagatagcaagagaactagaattaagagtggagcctgaagatatgactgaattgcttaaatttcatgttaaaactgtaacagatgagaaaaattgcatcttacrggtgaacaaagaaaatggtttctgagttg

SEQ ID NO: 410642 - DNA, 533 bp, Homo sapiens
aacaacctataattgttttaatggttggttagggacatcccttgccactcactcgttagacttgagggatgtggctacactctcgaaatgcaaagttgtgtggggcaaataggaacagcgtttgcagaaattcctccacctgtggggatttgcagcataacaaaagtacctgtggagagtaaaatgatgatgatcagaggctgggaagtgtatcagggaagaagggagatagtggggatggtcaatgggtacaaaaataaagttaaatggaatcaataagatccagtatgcagtagcaaaatagggtgactakagttaacaataatttattgtgtgtttaaaaataaccaaaaaaatggaattggaatgttcctaacacaaagaaatgataaacgcctgaggggatggataccccagttaccctggtctgatcattacatattgtatgcttgtatcaaaacatcgcatggacctcataaacatatacaactgttatgtacccataataattaattttaaaaatgcaatgcctg

SEQ ID NO: 410643 - DNA, 550 bp, Homo sapiens
acacctattcacagggcagtgggagagagaatgagtgccagcagaggaaatgccagatgcatataaaaccatcaaatctcatgagaactcactatcatgaaaacagcatgggggagccacccccatgattcaattacctcgcatcgggtccctcccacaacatgtgggaattatgaggactacaattcaagatgagatttgggtggggacatagccaaccatataagttatttgacctctctgtgcctcagttattcattactcctagagaacaaagcccgtaacagtatctcatgtgctgttgtgaaaattaaataactttggagtacttagtttctggaacacagtgagtgctgtataaatgtaygctattattagaatggaaaggatagttgaggtctaaaagaatcattaaatacaaccaaagtaagataattttctcactttgaatctgtagattctttcaaagaatcctagggcaagttgggagaaaggagtcctttggaaatcatttgatcaggtaggataacagctgtagctcccacactcc

SEQ ID NO: 410644 - DNA, 536 bp, Homo sapiens
atacatacaatttaacccatattttccacaccatgatatttaccctgtagaataaatcacagaatgcaagcaatgatttagttcaaatatgttcacttatacattgtttataataatgaaaggttggggatagtctgtgtctaacaatactgaattggttctatcataagctgtaaattagaaacctatgagttaaatatcagaagccaacaattttcatttggcccgcccactgagctaaattaaatttgaattagtttcctggctaacacggtgaaaccccatctctactaaaaatacaaaaaaattagccaggcatggtggcaggtgcctgtagtcccagctactcgggaggctgaggcaggagaatggcgtgaacyggggaggcggagcttgcagtgagctgagattgcaccatggcactccagcctgggtgacagagcgagactccatctcaaaaacaaacaaacaaacaaaaaatttgaattagatgacagtatttgtaaaaatcatttcccatatagaattccagagtt

SEQ ID NO: 410645 - DNA, 620 bp, Homo sapiens
gactgctactgggtgtagggttttttggggtcatgaaaatgttctaaaattgattggattccaataagtggcatccaggcattaaaaaaaaatgaaattgactggaaatagttgcacaaccttgtgactatactaaaaactactcaattacacactttaaaagagtaaactttacagtatgtgaattataactcaataaagctgtataaagtaaaatactagacccagactaatagtgcataaatttaccttttatcactcttttgcttaatgatctacacaatccactactgtctatcaaataaatcgcaaaccattctgccccatttaaaatccttctgaaataaggcaagatgagtaaataaactacttgctgtcccacagctcccaacagaaatatctgaattccaggcagggcaatttcctaactgacccatcccccaaatactttgaaactccttcatgacttccctttatcagtaaaatatttgctgggcattattaartatcatgcaggacgctatcacttgaatagagaatgcacaaaaaagaaataatccctgccactatggagctttcaatttagctcacatcctagatttgaagtccttcttcccata

SEQ ID NO: 410646 - DNA, 633 bp, Homo sapiens
gatcaggacttttaggagttagctggttaatagagtatggtggttatgaacatgttcttaagttgcatatcttgagtttgagctctggttacaccagtcactggctatgctcctttgggagaggaaacttaaactctctgcgctttggcttccttgtctataaaacaggaataaaaacagtatttatgtgtgagtttctgtgaggtttaaatgagattatatatgtaaacacacttagaagagtgcctgatggttagaaggtgcttatttatatatatataagctattaccaaaaatgttcaacaaattttgtgaaagtctttaagatcttgctacattyaaaagttatacaagaaaccctggaaaacacaaaaataaaaaagaatggacaggcttccagtttccattccagtgtgtaagaagcttagaagtctccactccattgtaacaacagtaaaaagccaaacaaactgaaatataatcaagaactctttttagatttgttgaaactgaggtcacagggcaaattgctgccctccaaaattagagagagagatgaatatagggagtcaaaacttaacaggagcaaacctgtaagtagaaccctccatggaaacaaatggtgaggaaggg

SEQ ID NO: 410647 - DNA, 620 bp, Homo sapiens
tcaatacaatcccaatcaaaatctcagtaacattttgtagataaggataaattgttctaaagtttctaaggagaggcaaaagacacagaataaccaacacaacattgaacaagaggaataaagtcagaagattgacattacccaacttcaagacttaccataaagctacaataattaagatattatttattgtaataattaagtatggcattggcaaaagartaggcaaataggttgatggactagaatagagagcccagaaatatacccacataaatatagtcaaccgatctttgataaaggagcaaaggttatacaatgtagcaaagatagtctttacaacaaatggtgcaggaacaaatggatatatccacatacaaaacaaaataatgaaatagacacagatcttacacccctcacaaaaatgttctctgaatggattatagacctaaaggtaaaacataaaactataacacttgtaggcattaacttaggagaaaatctaaatgaccttgggtatggtgttgatgtttcagatacaatgctaaaggaacaatccgtgaaagaaataattgagaagctggacatcattaaaattaataacttctactttaccaaaa

SEQ ID NO: 410648 - DNA, 555 bp, Homo sapiens
agaagcagtgccatgaatgcatagaacacatcaggaagcagaactggtttgaggcctttgaagtgagttctgggggccctgtgctgcccttgagcaattaaaaccatctggggagggagggcgggtgagcaggaacaccttggtgctcaggcatttttttgttaagaaggtatatctgttattccattggagatcgggaggcgagttgagtggcctcataatgaagaaaaggactgtctgtgttcctttgaatttactttggctatattttaagcctgagatcatcttggagtgtttatctaactgtgtctttcattaaccgttttgatttctttaaatgctgtggaggccctcaaggcagactctatcatatggaaatcagaagaaaggcaacccaggaagtagaggcatatgcttcaccatctgctctaaaccatgtagaagagttttatatccacaaacagggtttcagctgggagaartgaccacagtgtgtaacagatgacatgtgacacacgtgtcaggaacaaagattataaagtgtagtaatttgaa

SEQ ID NO: 410649 - DNA, 579 bp, Homo sapiens
tgtgtctcaacctttgcagatacagatttccacacctgctctstagataccctgattttattggtctggggtggaacctgggcattggtattgaagcttcaaagaggtttctaatatgtagccagtttgggaaccctaaactatgatgtcttttgtccctctattgataatgacatggcttccatctggcaggaacccccatgtggcatatgtttggagaaactttcattctgattcctgaagtatgttctaaatccatttttacttacaagctaaccagaaatttgagaacacagttttactctttacaaatcagccatgacctgaagcattgtgtctgtcttccagtcagtagtatcaactggtatggcactggttctctgaaatcatcagccaaaaccttaatctaaattgtagacttcagtccctgccatgcactgcaggtttacaagtggtctttgttctttttaattattgatagatcactggcaatttagacttgtaagaaaactcttttatttgtttaaaagcattagtttccttttcccagcagttttgtgctgtactgaaacaacgtgt

SEQ ID NO: 410650 - DNA, 579 bp, Homo sapiens
tgtgtctcaacctttgcagatacagatttccacacctgctctgtagataccctgattttattggtctggggtggaacctgggcattggtattgaagcttcaaagaggtttctaatatgtagccagtttgggaaccctaaactatgatgtcttttgtccctctattgataatgacatggcttccatctggcaggaacccccatgtggcatatgtttggagaaactttcattctgattcctgaagtatgttctaaatccatttttacttacaagctaaccagaaatttgagaacacagttttactctttacaaatcagccatgacctgaagcattgtgtctgtcttccagtcagtagtatcaactggtatggcactggttctctgaaatcatcagccaaaaccttaatctaaattgtagacttcagtccctgccatgcactgcaggtttacaagtggtctttgttctytttaattattgatagatcactggcaatttagacttgtaagaaaactcttttatttgtttaaaagcattagtttccttttcccagcagttttgtgctgtactgaaacaacgtgt

SEQ ID NO: 410651 - DNA, 615 bp, Homo sapiens
ggcctgaaactaccacagctgtatccagttttaacttgactttaacaaagagactgtcttgtcaaaaggtagtagtagcagagagggatggggcggtgttggacattttgctatatgacagcctaataggaaataaaagtggctgaattgagtaatgagttgtttctaaagcattgagtcccttctagtttaacaataatttgaaacatccctgttgacaacaaaygaggtgcatccagcctttttttttttctttttctcctgtttgtactgagcttctaacatatggaagacaggaaatataggagcttacatttagagagtaaaaaactatcaaaacaaaacaaaaaaaaaatttggcaacttattgctcttctgctgtccagcatggagatgtgggtatttatttttgttcctaatatttatttttttatacagcaaccagagtcccaaggtttagattctggcaccggctctgtcatcttagagctgcttgccagagggggacttcccacttttgactttgtttcagttcaattgcttctccaggccttccccacatactgtttttcagacatggggccaatctcatcatctctgtgtaggggagaagaa

SEQ ID NO: 410652 - DNA, 615 bp, Homo sapiens
ggcctgaaactaccacagctgtatccagttttaacttgactttaacaaagagactgtcttgtcaaaaggtagtagtagcagagagggatggggcggtgttggacattttgctatatgacagcctaataggaaataaaagtggctgaattgagtaatgagttgtttctaaagcattgagtcccttctagtttaacaataatttgaaacatccctgttgacaacaaatgaggtgcatccagcctttttttttttctttttctcctgtttgtactgagcttctaacatayggaagacaggaaatataggagcttacatttagagagtaaaaaactatcaaaacaaaacaaaaaaaaaatttggcaacttattgctcttctgctgtccagcatggagatgtgggtatttatttttgttcctaatatttatttttttatacagcaaccagagtcccaaggtttagattctggcaccggctctgtcatcttagagctgcttgccagagggggacttcccacttttgactttgtttcagttcaattgcttctccaggccttccccacatactgtttttcagacatggggccaatctcatcatctctgtgtaggggagaagaa

SEQ ID NO: 410653 - DNA, 604 bp, Homo sapiens
tattcttgccggtaaagtataagagttctgattattccatgatctcagcaaacacttggacttgcctctagttctttcacctgagcttattaaattaaaggaaggcttactgtcctttctcacgtctaaaagtcatggtttgtattctctttccatagctgtctcctgtcttttttttttttttttttttaatgccatcaaattgaaggactctggcatacacacacacagcgaaggcagagtggacatttcacatccaagtccgggtggttatgtaggttcatttttcttctgggtgtcctgtgctgaggttggctagcaaamtatccagctcaaaaaaaaaatcagaaagttattcccttagcaccttttcaattcaactctgccaacagtggctcagtaagaagcagcaagtaaataaaatcaacagatttcagcttatgccttgggctcgccagcaatccccagaccacagggagaaaatgaatctttttctcacaaaattcctctcactcccatcacttttccattgaaacaacaaggcagagaagttactttattgacttgctttcctgtgagtcttaccagaaaatgaagaataata

SEQ ID NO: 410654 - DNA, 604 bp, Homo sapiens
tattcttgccggtaaagtataagagttctgattattccatgatctcagcaaacacttggacttgcctctagttctttcacctgagcttattaaattaaaggaaggcttactgtcctttctcacgtctaaaagtcatggtttgtattctctttccatagctgtctcctgtcttttttttttttttttttttaatgccatcaaattgaaggactctggcatacacacacacagcgaaggcagagtggacatttcacatccaagtccgggtggttatgtaggttcatttttcttctgggtgtcctgtgctgaggttggctagcaaaatatccagctcaaaaaaaaaatcagaaagttattcccttagcaccttttyaattcaactctgccaacagtggctcagtaagaagcagcaagtaaataaaatcaacagatttcagcttatgccttgggctcgccagcaatccccagaccacagggagaaaatgaatctttttctcacaaaattcctctcactcccatcacttttccattgaaacaacaaggcagagaagttactttattgacttgctttcctgtgagtcttaccagaaaatgaagaataata

SEQ ID NO: 410655 - DNA, 625 bp, Homo sapiens
agcaagtaaataaaatcaacagatttcagcttatgccttgggctcgccagcaatccccagaccacagggagaaaatgaatctttttctcacaaaattcctctcactcccatcacttttccattgaaacaacaaggcagagaagttactttattgacttgctttcctgtgagtcttaccagaaaatgaagaataatagtaattggcaaatactacccacccagttccttagctagcacttctcacatctgctttatgatatccttgctggcctgattttattcatttcctagtgctcggcatagaaaccacaagaactagcaaaaaagaaaaacactgcatttatataaaccaataaaactagtgagcattttgtggacattaaaagaaacatgagggctatcccacattataaatttcaaaatgcaagtttttgccttgtggtattttaaaagttwtaagatgctattcaggaacactctcaataactgttttaaattgttgtcgtttaaacgttttttccttttccaatatcccacttgcctagtcttaactagtctccttcctcaccaatctgcccttctgtgctttttccaaaatgcaagtttaactgtggttgttttcctt

SEQ ID NO: 410656 - DNA, 540 bp, Homo sapiens
aaaaactatgtgtaaatcacccagcacaaagtatgtgctcagtgactgcagtcattctttgctgtcataccttccatatggaagtacttcctacccacctagctctttaaggagaaaaatctgtttgtgggaaaataattyttttaaggccaaaatcagcccacctttaatatatgcaggacccagggcaaaagtacaaacagagatctgtaggccagatacctaaatatttaaaaattataaacaaagttaacaaatgattaagtacaataagttctaccttcctacctagacaaatataccttgggaattgacatgaaaggccagattgaaactttggatgatctgcacttaaatatgatggtgcagggagaggcgatttccagttcctggtttgcagccacctcctctcttcccacagggctctagtccattggtggaagctcggtcaagcttcccagaagcagctgtcccccagccacctcttgggcacaagagtatgaacaccagagtcagcaatgttcgcccatgggagtacag

SEQ ID NO: 410657 - DNA, 540 bp, Homo sapiens
aaaaactatgtgtaaatcacccagcacaaagtatgtgctcagtgactgcagtcattctttgctgtcataccttccatatggaagtacttcctacccacctagctctttaaggagaaaaatctgtttgtgggaaaataatttttttaaggccaaaatcagcccacctttaatatatgcaggacccagggcaaaagtacaaacagagatctgtaggccagatacctaaatatttaaaarttataaacaaagttaacaaatgattaagtacaataagttctaccttcctacctagacaaatataccttgggaattgacatgaaaggccagattgaaactttggatgatctgcacttaaatatgatggtgcagggagaggcgatttccagttcctggtttgcagccacctcctctcttcccacagggctctagtccattggtggaagctcggtcaagcttcccagaagcagctgtcccccagccacctcttgggcacaagagtatgaacaccagagtcagcaatgttcgcccatgggagtacag

SEQ ID NO: 410658 - DNA, 464 bp, Homo sapiens
tagaacaaatggatataaaagttctgttcattgcaatcagcacagtagcaaagaccttcagaggtcttggtgtcacagaaattcttggatagtatttttaacttataatttttattacattggcaactacacccatttaatgaagaaaactagtttgtttttcatattaacaattcattaatgttttagttcattccagaaagccttaagaaaagctacgaggacaggtacttttgtctgttttattctgtcctgtgttcacagctcctagtggagcacctgacacttcgtaaatgttcattcatatttattgttgaatgaactgaggtattttctaatgggaaattgtgagtttggtcatcttttcaatttcatggtattttaygtgaaatagaattgtttatccacctttaagttaagggaagttttgacctagttttgctctttagaggcaatgagaccct

SEQ ID NO: 410659 - DNA, 479 bp, Homo sapiens
tgcaaaccaggaagacagccctcaccagaacctgaccactctagcatgatgaattcagactttccagcctccagaactgtgagaaaataaatctcttttgtttaagctacccagtctatagtattttgtatggcagccagagccaactaacataccaggtgattctaataatacacagcctcrgtcgacaaccattgttgtgaagggcattgagatggcataatcataactctgttttaggacatttacttactagggaagctaagaccttggccttaaaaagtcacaggtagttgagtgtaagactgctagagtattaaaagattcagaatgagacagcagccagggttagactaataagcaaagtggactgtgtcactgcttcacgagtttgttaagggctccattttagaaaattaaaggcataatttaaattatacaattaaaaggctgcacagatattattcagttttgaccac

SEQ ID NO: 410660 - DNA, 533 bp, Homo sapiens
tggctgtggccctcccagtatgaacacaatataccctaggccttgccggtgagcaggctccctacagccctgctctctctgcagccctctcactagccttggccatttgcaccccagagggtcgttcccttgtccctcccagtgtggacaccgtgtgctccaggctgtgtgcaacctttcaggcaagcaggctcccagcctcctgagtctctctgtgtccacctgccagtcacagcccacctgttcctmtttacccaaggatggttgaccagccttggaccagggtactcagtgaacttctcagctactcagaaggctgcaaccataccttctccaccgaggtctggacagcagccttgggaagggtcccctccctaacttatgggcttgtccatctgtgagcactctccctagcccagggcattctttggaattctctttgtatatgtatgtttagttctctgtaataatgaatacttctaggtattaacatttccttggtccttaatggacataagaagcctacccagcat

SEQ ID NO: 410661 - DNA, 533 bp, Homo sapiens
tggctgtggccctcccagtatgaacacaatataccctaggccttgccggtgagcaggctccctacagccctgctctctctgcagccctctcactagccttggccatttgcaccccagagggtcgttcccttgtccctcccagtgtggacaccgtgtgctccaggctgtgtgcaacctttcaggcaagcaggctcccagcctcctgagtctctctgtgtccacctgccagtcacagcccacctgttcctatttacccaaggatggttgaccagcyttggaccagggtactcagtgaacttctcagctactcagaaggctgcaaccataccttctccaccgaggtctggacagcagccttgggaagggtcccctccctaacttatgggcttgtccatctgtgagcactctccctagcccagggcattctttggaattctctttgtatatgtatgtttagttctctgtaataatgaatacttctaggtattaacatttccttggtccttaatggacataagaagcctacccagcat

SEQ ID NO: 410662 - DNA, 596 bp, Homo sapiens
cacctgcaccttctgactcactctagttgaaagccctgggggaaggaacaaactctgcagcctgactgctgtgtttaatcccagctctcctctactagctggcaagtcacttaacctctctgtgcttcagctttcttatctgtaaagtgggaatgagaattrtacttcccacatcatgtaaagccctggtattctggccttgtaaatgtcagctcctagtagcattctttactcctgggcatccttggctgtctaagcatccccaattactccttccctgtgcctgtcccaatggtgccataagaacgccaggacccctggcccccacaactgccccattgtcctatttggctccccctgagtagccatgaggtcactcccagtctccccactgtccaccactgtccacctttccccaatgtccacagccacccacactcccatatgcctcagcccactcctcttagtagatgtgacaggctttttgccttcatgaaaacaagagcgtgaaggacacaggccttctcggggcgaggccgagagctgcttcaccacattgttactcttgcaccccactgtttcaggtcaggttactt

SEQ ID NO: 410663 - DNA, 567 bp, Homo sapiens
tggggtgggagagcgattctagaagtaggcttataattattagcattctatgtaagcctgtaccatcatcctgttagcctgggcttgggatcatgtaatttgatggctagaagtgatacttcaagaacatctagttcatgtattttatctgtagattttactagagaatatttattgagaatggactgtatggtagacatcatgctaagcactgttttatgcattacctcgtttaatcctaacagctgccttatgaaataggtgctatgattattcttcccattttacaggtgaggtgaccgaggcttagtgaggttaggtatgccttaccaaggtcacccagccagaaagtggaggagccagcattggaacctaagcagtcagactccagrgcctgaagatggtggtgaagaaatgagctagtggtgcagccttgttcaccaaaatgcttgttcaccaaactgggtgctctcaccttgaacttgcactgtctctaggacctgcttcagattcactttgtgtctgaaggggagtcaaacatccccttccatattttatgctgaatct

SEQ ID NO: 410664 - DNA, 637 bp, Homo sapiens
cactgcgtctagccaggtcttttgggcaaatgttaatctttttcttaaatctttaattttcaaattgcaaaagaaagagctgttcattgcgaaaaactcaaatgtaaaagcttcctctcaccaatcccacaccacagccagtggcagccactgaaaactcatctcatgctgaggagggagggtgggccaccttgaactcagtgtcatcaggactgcacccaatgggggacagacaattgcccaccaccaaayaaaacaaaacaaaataaacccagggcattgtcactagaagaaagggagcctggatgttgcgcagccaggagccagaaaacatccaccatatgcagatattaaagctcagtaaaaacattaaagccagtctctacattttgacatgcagtgggaatacacactggtgatttccctaatttcccaatgaatgttcacaatcaaaattcacatgtacacctagtaatgtttgatgatactttaaattttcatacatgagtcaaagggagcaaaagaagtgcctgagggacctgcgagtatgcggggatgttgtgtgataagaataggaaatctagacactcagcaccaggaacagaaattgccccagactcctgcctcagtcacactt

SEQ ID NO: 410665 - DNA, 557 bp, Homo sapiens
acatgtatacatgtgccatgttggtgtgctgcacttattaactcgtcatttagcatcaggtatatctcctaatgctatccctcccccctacccccaccccacaacagtccccggtgtgtgatgttccccatcctgtgtccatgtgtatacatatgtaacaaacctgcacgttgtgcacatgtaccctaaaacttaaagtataataataataaaattaaaaaataaaaaaaaaccgcacacacacacaaaattggattgactataataaaggggaaaatatgtcaaatgtgaaaagagatgatactttatgaaggacacaagacagaagaaaagttgtccatgaagcttattaaaaaaaaaactgcaataaagtstctgtaataatcattatactgaaagaaaggagtaaatgctttaaaaaaaaaacagttacacaaggattaaaaaaactgttaaagtttgagtttgacaactttgtgcttcatcaacaatttttactaactgtgaatatattgttgtaaagaaaaaaaggtatcatcacaaattttgtttctgtc

SEQ ID NO: 410666 - DNA, 557 bp, Homo sapiens
acatgtatacatgtgccatgttggtgtgctgcacttattaactcgtcatttagcatcaggtatatctcctaatgctatccctcccccctacccccaccccacaacagtccccggtgtgtgatgttccccatcctgtgtccatgtgtatacatatgtaacaaacctgcacgttgtgcacatgtaccctaaaacttaaagtataataataataaaattaaaaaataaaaaaaaaccgcacacacacacaaaattggattgactataataaaggggaaaatatgtcaaatgtgaaaagagatgatactttatgaaggacacaagacagaagaaaagttgtccatgaagcttattaaaaaaaaaactgcaataaagtctctgtaataatcattatactgaaagaaaggagtaaatgctttaaaaaaaaaacagttacacaaggattaaaaaaactgttaaagtttgagtttgacaactttgtgcttcatcaacaatttttactaactgtgaatatattgttgtaaagaaaaaaagrtatcatcacaaattttgtttctgtc

SEQ ID NO: 410667 - DNA, 572 bp, Homo sapiens
ggtctgcctaacagggcacagagcgggatggaggagagtgataataggccttcccagtctcttaaactttatgcctttcagaaatattctgtatgtgtgcattttttatatcatatctattgatgtcattgaatgcagtcatttatctgcagtaacttctttatattagttttctcttgctgctataacaaattgccacaaacttaatgtcttaaaacaacgcacattttatttcacrattctgcagattagaagtctgacacaggtctccctgggctgaaatcaaggaccagtagggttgtggtacttctggaggctctaagggagaatctcttttcttgcctcttgcagtgtctagaggctgctcgcattccttggcttatggtcccttcctccagcttcaaagcctgcaaaggcagcctgagtccttctcacagcacataatctccatggtcatgtttccttctctgactcttgtcttctacctctgtcttctaaaaggactcttatgatgacatttgggccacctggataatccaggataatctccctattttaaggccagttgatta

SEQ ID NO: 410668 - DNA, 446 bp, Homo sapiens
ggccagttgattagcaactttaattccatctgcaacctgaattctcttttgccctctaacctaacatattctaggaattaagacactaacatctttagggagttattattctgtacaaaatggatacttgaacatttgcctagattattgagtctcgatatgttttctctcagggattctcacatgttattgcatacaagaattctctgacttcccccagagattctgacttgtaaattggcagaagccagcaggttgcagaattaccaagtgaaccattctctgtgaaaccactccagcctatgggccactaccctctgcctgaagctcctggctgaaaagtgaccaacacgccttttaccagaaagaaatgcctacagcagccaaaccsagacagaggtgatgtgtttcccatgttgagggttgaaatgaggggagtgaagaga

SEQ ID NO: 410669 - DNA, 576 bp, Homo sapiens
atagatgaagcttcgggagaagaggggcagagatgaaaaaacggtacccacagatgggtaccaccatgtggcagccaagatagattgttccaagaacctcttaccaggaagcccacatgcagagccagatatctgaggcttctggctataaattatggagtcacaccagtttgggtgaaggagataaagcaggtgtgacaagaagaagcagyggtcactgagacacatttggcagagatattagttcattgtctgtcatagggaagcagctgatattgtcaccaggggagaaatgacccctttaaaaaactgaaggtagagaaaataagagatccaggaaggatggcacacttgtcatatcctctgagtattttttggggggatgctgtttcttaaattagttttgttttcctgttattgctgtgagactgccctgttattgtatacaaatcagtgcagaataaattccagaacttgaaattggtgtgcagtgggaatacaacctgcaagagaaaggagtaggcattttgcatgggataaaaagtataaggaaactagcagaaatgtagcagttat

SEQ ID NO: 410670 - DNA, 603 bp, Homo sapiens
ttgaataatactcagcaacaaaaagaaataaagtactgattcatccatcagtatggataaattttaaaacattattctaaaagaaataaactggagacaataatacctgccatataattttatgcatatgaaattttagaaaaaagcaaatctggtatgtggtgacaaaagtcagatcagtagtttccagggattgggaatttccaaatttcaagcatagcagtcaaaaaaattaactgttatgcttgaaatgtgacattatttaatgcacytttgatataataaaattaatctaaaaataaggttaataaaaggatttgggttttagatctcatgataatctctaacacttcttttaattcttgtttttttctttctctttcttttttttttttattttgacccttgttacccagactagagtgcaatggtgcaatctcggcttactgcaacctctgcctcctagatttaagtgattctccttgcctcagtctcccaagtaggtgggattacaggtgcctgccaccaggcctggctaattttttgtatttttagtagagatagggtcttaccatgttggcctggctggtctcaaactcctaa

SEQ ID NO: 410671 - DNA, 546 bp, Homo sapiens
ctgtttgcaattggttaaataaaatcatcagtagttcatttgtaggaaatcataactgagcattttcaattaactgtgtggaatgaaccacatatgaagaatcagaaatcacattaattggcatatcaaaagcagtcaataactcaattacagctacaagctccgttttttgagctgaagtatagggcatctggaaaactttacttttcgagccagaataagaagcttcaccattacragacccatcagtgaaacaatgaaaatacttaccaggctgcaggttgtttactgcaggaattctaaagcaaaatgttcacagtcttgctcaggtcaagggatagtaaagaaacactcttttaaatctatgactattaaagtccaattttttggaattatagcaggagaaggcaattctggctgtaatgcttccatgagttgtataactgaattgatactcttaagtcagttaacattctccatttacctgattttttcttaattacaaaactggagaattccaaggggaaaatgttggagttgtgtgcc

SEQ ID NO: 410672 - DNA, 571 bp, Homo sapiens
gtatgtcaaggttatatatttctgataagtgagtgttctttagtatctttttttttttttctgagacagggtctcactctgttgcccagactggagtgtagtggtgcaatcttggctcactgcaacctctggctcccaggcccaatcagtcctcccatctcagcttcctcaktacctgggactacaggtgcacaccaccgtgcctggttaatttttgtattttttgtagcgacaaggtctcatcatgttgcccaagctagtctcaaactcatggacccaagcagtcagcttgcctcagcctcccaaagtgctgggataacagtctagagccactgtggccagccttctttactgtctttaggagttgttatcacagtttcctaggatagtcatctggtagctttggggaaaaaaaatgaattatggcacattcaattgagggcatgaaaataagagagaaacagtgtagatagatatgacgttatggctatgccagcatgctaagccagtgtaattcacaggggtacaggttaattctaaaactgctgtacatgtgtactggaattgacat

SEQ ID NO: 410673 - DNA, 571 bp, Homo sapiens
gtatgtcaaggttatatatttctgataagtgagtgttctttagtatctttttttttttttctgagacagggtctcactctgttgcccagactggagtgtagtggtgcaatcttggctcactgcaacctctggctcccaggcccaatcagtcctcccatctcagcttcctcagtacctgggactacaggtgcacaccaccgtgcctggytaatttttgtattttttgtagcgacaaggtctcatcatgttgcccaagctagtctcaaactcatggacccaagcagtcagcttgcctcagcctcccaaagtgctgggataacagtctagagccactgtggccagccttctttactgtctttaggagttgttatcacagtttcctaggatagtcatctggtagctttggggaaaaaaaatgaattatggcacattcaattgagggcatgaaaataagagagaaacagtgtagatagatatgacgttatggctatgccagcatgctaagccagtgtaattcacaggggtacaggttaattctaaaactgctgtacatgtgtactggaattgacat

SEQ ID NO: 410674 - DNA, 526 bp, Homo sapiens
ataactgtggtatatatgtaattatgggaattactcttaagagtttaagcagccaggatcaaattaagaatactttttagagcctgagcaactagattttgaattaagattaagggaagtatgtcaaggttatatatttctgataagtgagtgttctttagtatctttttttttttttctgagacagggtctcactctgttgcccagactggagtgtagtggtgcaatcttggctcactgcaacctctggctcccaggcccaatcagtcctcccatctcagcttcctcagtacctgggactacaggtgcacaccaccgtgcctggttaatttttgtattttttgtagmgacaaggtctcatcatgttgcccaagctagtctcaaactcatggacccaagcagtcagcttgcctcagcctcccaaagtgctgggataacagtctagagccactgtggccagccttctttactgtctttaggagttgttatcacagtttcctaggatagtcatctggtagctttgggg

SEQ ID NO: 410675 - DNA, 503 bp, Homo sapiens
ggctggaacagtttaatgaaataaaaacattgcattagattaccaaaatgtaaaatatttatgtgtctatactgatatgtaaataagtggtttaataaaaataatagtgacaagtctstcttacaaaataatttcaaataatttatgtaaatggtctccccatttttcaaacaagtgggtctgaactacctaacccctgagtgagctgtgtttaataactcctaaagagtacagcgtgggaagaagggaaaatgagtaactttacagtggagaaacttggcagacactaccacaggtgatcaagttttaacatcatgaagagtaggtcatattgataagatgtgcccttaatatgatgcgatgagaatggcacttatggagtctttggatatagagggtgtttcaattataaagacattctggggccatctgagaatcttgggcataattgatcaacagatcttccagtccttgcattgagatccttcttcagattaactaga

SEQ ID NO: 410676 - DNA, 586 bp, Homo sapiens
tcttttaaatctatgactattaaagtccaattttttggaattatagcaggagaaggcaattctggctgtaatgcttccatgagttgtataactgaattgatactcttaagtcagttaacattctccatttacctgattttttcttaattacaaaactggagaattccaaggggaaaatgttggagttgtgtgcccattttctaatttttcagtaactaatttctctacagtctccagtttctctttacttaacagtcattgttctgtccaaattggcttatctgttaaccattttaaaagtacaggttctggaggcttaacaatggccatcaaaaattatttcttaatctttggcgggaactttgtttttccacttgaggcagttctttcaaaccttgtaaatatttttctattcccataccaggaacataccccatttcatgcatcatatgttgactttgagggccatataattgttctggaatgagaacttgtgytctccatggttgtagtaaatctctcccccataaatttataggtacagaagttataattggttgaatagtcccaggttgtccatcggacc

SEQ ID NO: 410677 - DNA, 596 bp, Homo sapiens
tgtctccctgttttttacaggaaaattgcaacttgatctgtggtgatgaatatggtccagaaacaaggttgagcaggtctcaattgaacgaaaaggaaactcccttttaaytcatcaaagctctacttaagtacattgaaactcttaacgtttccggagctgttgttttgttttgttttgttttgttttgtttttttgcctgtctggaatttgatttatactgtgaagaagcatttggaaatgaatccacattttggtatgagtctttaaattctcacatatttgagagtgaaaatgaatgtttttgctagtgccttagccagtatgtgaaaacaaaattttgtgttgtcaatactttcgaagaaaaaaaatatgtacaacggagagctgtttgaaaccagttcctatttttagtccctgattgttctgtactgttatatatgggaagccatcagtaccagattctacttctgcattctcagattcctccagagcaacagcgcaaagtgttggatccagtaccagttggagtaaccaaggtaaatattaaacattacaatgatgggattggaagtgatgttgatattaaacaaatg

SEQ ID NO: 410678 - DNA, 523 bp, Homo sapiens
cataaacaaaccttgagcagcggaaagggtgagctggccgagtacgtcccggattctgctttcacctctgcagccaagctcgttttgacaggtaagtccaattcttgacatttagtaagggattttcttctgttccatttyttgtcgttctgttctctgtaagaacagacatgtgcagttatgtaaacctgccaatttaagctgatctaagtcttgccagtcatgttggaatcaggtgtaaatgtttcttaagaatcttcatcacaaatcattttagagaataagccagaattagaaacatagagacctagattttaatattatatgtgcctaatacattgtataacactaaatggttactgtttaggcttgaatttccctcattctataaaatagtaagttacttaacttctcttctttcctcagttgtaaaaagaatatggtaaataatgcctaaaccacagggttgcccaagaattaaatgagttaataatgtaaaatactttgaacatactctggcaca

SEQ ID NO: 410679 - DNA, 549 bp, Homo sapiens
gtaaaaactggaaggaaggtatctgagaaactgctttgtgatctgtgcattcatctctctgagtagaagtcttcttttcattcagcagtctggaaatactgttttggcagaatctgtgaaggaatatttgggagtgtattgaggccaaaggtgaaaaagtgaacataccaggataaaagctagacgatacctatctgataaacggctttgtgatgtgtgcattcaacttgcagagttaaacttgtctttttattcagcagtttggacaaactcctttttagaatctacgaggggttatttttgagggctttgaggactatcatgaaaaaggaaatatcttcaaataaaaactagaaagaagcattctgagaaactgctttgtgatgtgtgaattcatctcacatagttaaacctttctttggattcagyagtttggaaacactatttttgttcactctgggaatggacattagggagctccttgaggccaaagacaaaagagtgaatatcccaggataaaacatagaaggaagctatctgagtaactgc

SEQ ID NO: 410680 - DNA, 575 bp, Homo sapiens
gtgctgtcaactcacagagttaaatatttctttggaatcagctgtttggaaacactgttttggtagaatcagcaaagaggtacttgggagctcactgtggccccatgtgaaaaagaaaatatcccaggataaaagtagaaggaagctatcygagaaaccgttttgtcatgtgttcatttatctcacagagttaaaactttcttttaattctgtagtttggaaacattgtttcagtagagtctgtgatgggatgtttgggagctcattgaggtctatggggaaaaatgaaacatcttcagataaaaactagaaagaagctttctgagaatctgctttgtggtgtgtgcatttatctcacagagttaaacctttctttggaattattagtttggagacactgtttttgtcccagaatggacaattgggacctcattgaagccattggcaaaaaaataaatagaccaggataaaaagtagaaggaaggtattgaagaaactgctttgttatctgtgtattcatctcgctgagttaaatcattcttttcattcagcagtttggaaacactgttttggta

SEQ ID NO: 410681 - DNA, 604 bp, Homo sapiens
ataactacaacactatatcctgagcagctgaaaatccacgtatggttctcttggtccctgtttcatagaactaaatgaagggtatttttctccacatgcagtgattttttcccaacctctaatgcacactcccttaagctgttccatggcattatgctgtatgaccacttgtgcatctaaacaaacccagctgccaacccccaaaagttcgtctgcaattatattaatttgaggttgggcctgggcattgtgagcagcctgaatggaggcttcatctgcccaccaagttttaaattgtaaaaactaagcaggagttagactagctcgagtaagrgtgtcccagtggctgggaatcatctgactgaaaacagcaacatcctttaacagtcccattacaaaaggagaatctggtccatactgatttatagcttgtttaaattattttagtaatttaaaaggaaaaggataaaatgtagctgaaataattccctgttgttctgggggctgtattctaacaggggtctgccaagcctctaaatcaccctcttctagcttactgaatacctgcctgaatagaactaagagctgtcactcaatgtgctgc

SEQ ID NO: 410682 - DNA, 646 bp, Homo sapiens
agtttggtaacactgctttttccattctgcaaatagacatttgggatctcattgaggccaatggtgaaatarcaaataacccagaataaaaactagagggaagctatttgagaaaaagctttgtgatctgttcattcatctcacagagttgaacgtttcttttaattcagcagtttggaaacactgtgtggtggaatctgtgaagggatatttcgaagcacattgaggcctacattgaaaaagaaagaatcttcagataacaactagaaagaagctttctgagaaactgctttgtgatgtgagcattcatctcacaacaatcaaagtatccttgtattcagcagttttgaaacactgtttttgtagaatctgagaagggatatttgggacctcattgaggccaaagctgaaaaatcgaatatctgaggttaaatactagaaggaagctatctgagaaaccactctgtgatgtgtgcattcatttcacagcgtgaaacttttcttttcattcagcagtttcaaaacaatgtttttttagaatcagtgaagggatattttggagcactttgaggcctatggtgaacaaggaagtaccttcagataaaaactagaagatgcttactgagaaactgcttcgttatgtgtg

SEQ ID NO: 410683 - DNA, 646 bp, Homo sapiens
agtttggtaacactgctttttccattctgcaaatagacatttgggatctcattgaggccaatggtgaaataacaaataacccagaataaaaactagagggaagctatttgagaaaaagctttgtgatctgttcattcatctcacagagttgaacstttcttttaattcagcagtttggaaacactgtgtggtggaatctgtgaagggatatttcgaagcacattgaggcctacattgaaaaagaaagaatcttcagataacaactagaaagaagctttctgagaaactgctttgtgatgtgagcattcatctcacaacaatcaaagtatccttgtattcagcagttttgaaacactgtttttgtagaatctgagaagggatatttgggacctcattgaggccaaagctgaaaaatcgaatatctgaggttaaatactagaaggaagctatctgagaaaccactctgtgatgtgtgcattcatttcacagcgtgaaacttttcttttcattcagcagtttcaaaacaatgtttttttagaatcagtgaagggatattttggagcactttgaggcctatggtgaacaaggaagtaccttcagataaaaactagaagatgcttactgagaaactgcttcgttatgtgtg

SEQ ID NO: 410684 - DNA, 646 bp, Homo sapiens
agtttggtaacactgctttttccattctgcaaatagacatttgggatctcattgaggccaatggtgaaataacaaataacccagaataaaaactagagggaagctatttgagaaaaagctttgtgatctgttcattcatctcacagagttgaacgtttcttttaattcagcagtttggaaacactgtgtggtggaatctgtgaagggatatttcgaagcacattgaggcctacrttgaaaaagaaagaatcttcagataacaactagaaagaagctttctgagaaactgctttgtgatgtgagcattcatctcacaacaatcaaagtatccttgtattcagcagttttgaaacactgtttttgtagaatctgagaagggatatttgggacctcattgaggccaaagctgaaaaatcgaatatctgaggttaaatactagaaggaagctatctgagaaaccactctgtgatgtgtgcattcatttcacagcgtgaaacttttcttttcattcagcagtttcaaaacaatgtttttttagaatcagtgaagggatattttggagcactttgaggcctatggtgaacaaggaagtaccttcagataaaaactagaagatgcttactgagaaactgcttcgttatgtgtg

SEQ ID NO: 410685 - DNA, 577 bp, Homo sapiens
caggcaaataagcctgctctgtgacctcttctgttacttccctatactctccgtcctcctcatcattagtgtgaaaaatctctaaggtgaaacgaaccagagaccaaacttgtcccattgttaacatgatgtttccaagctccccttcttactcacaagggggattgctttaagagtacttggaagtcctccagctagttccacattctccaaaccttgctctggtgaccsttgatctggattagagcccccatgatagatgccatttgccaagaccagcttggtcagggagaccctaagctagaagtgctagaggaattaaagaaaaaacacagaaatatagaggagtgaagtggaaaatcagggatttcacagccttcagtgctgagagccatcaatggagatttacccacaaatttattaacagcgatccagtcattagcattgtttctttgcctattcaattaataaaattatcccttacatgaaacgaagggatgggctgaaataaaggggtggatctggccagtcatctgaagcaggaacaggcccttaaggcacaatgcactcatactat

SEQ ID NO: 410686 - DNA, 589 bp, Homo sapiens
aacaggcccttaaggcacaatgcactcatactattgtttgtgctttaagaacgcatttaagagattttctgccctgggcggatcaggtgttccttgtcctcattctgataaacacacgactttccagtgtggtcatcatggtcatcatgaacatgtcacagtgtgggagaaattttatttatggccagttttgggaccagcttatggccagatattggggggcttgctcccaacaaaacatcttcaatgaaaagtagatataagctctcagagaaactgagttgtgatgtgtgcactcatctcacagagttaaacctttctttggattcagcagtttgggaacactgtttttgtccattcwgcaaatgtacatatgggagctcattgaggtcaatggcaaaaaagcaaatatcccaggttaaaaactagaaggaagctagctgagaaactgctttgtgatgtgtgcattcacctcacagaggtaaacctttcttttcattcaacactttggaaacactgtctttgtaaaaactgcaaagggatatttgcgagcacattgaggcctatggtgaaaaaggaaatatcttca

SEQ ID NO: 410687 - DNA, 571 bp, Homo sapiens
ctccctaaatgaaggcaatccaaagttatggaaaaattcccaaaccaatacgtgagaatatggcacaattataacgtggggaaggggatatgcttgtgtttcaccaggagatctggtctgggtacccatcaggagactcaagcttcaggtgaatactgaccatgaaaaccayagagaaaagatatccgtgttagagactgccctcagatgtggtgagttctgggtcaactccttagaacctggcacaccaaatcacaatgagtctgattcaatcctccctgatggcaatggagacccatctaactaatctcacttctcctgattacctttttttctccttacaaacctaaaaatctcactatttctattagcctaaaaatgtgaaccccctgttcttctttctccttcagcactcaatctcacttacaataggttttatttaatgattctcctctttatactttctgtctcaacggtttcctctcacaatgatttacgtgctacacaaaattattcttattgggcttatgtgccttttcctccactgatttgacctctcacctggatggat

SEQ ID NO: 410688 - DNA, 468 bp, Homo sapiens
aagcaaatatcccagcataaaaactagaaggaagctctacgagaaaccgccttcctttgtgtgcattcatctcacagagttaaactgatcttttcattcagcagtttggaaacactgttttttagattctgcaaagggatatttgggagcactttgaggcctatagtgagaaaggaaatatattcagataaaactggaaagaagcattctgagaaacaactttgtgctgtatgcattcatctcacagaattaaaggtttccttggattcagcagtttggaaacactcttttgtccattctgcgaatggactttagggagctcattkaggccaatgaccaaaaaagtgaatatcccaggattaaaaactagaaggaagttatctgagaaactgctttgtgatgtgtgcattcatctcgcagagttaaacctttcttttcattcagcagtttggaaaccctgttttggta

SEQ ID NO: 410689 - DNA, 389 bp, Homo sapiens
aagaagctttctgagaaactattttgttrtacgtgctttcatctcaaacagttaaacctttcttttggttgagcagtttggaaacactgtttttgttcctctgcaaatggatatttgggagctcattgagaccaatggcaaaacagggaataacccaggataaaaactagaaagaagctatctgagaaaccgcattgtgatgtatgcattcatctcacagagttacagttttcttttcattcagcatgttgtaaatcctatttaggtagaatctgcaaagggatatttgggagtacattgagggctatggtgaaaaaggaaatatatccatataaaaactagaaagaagctttctgtgaaactgctttgttatgtgtggttttatctca

SEQ ID NO: 410690 - DNA, 585 bp, Homo sapiens
aaactatctgagaaactcctttgtgatgtatgcattcatcttgcagagttaaacttttcttyggattcagcagtttggaaacactgtttttgtagtatctgtgaagggatatttgataggtcattgaggctaaatgcaaaaaagcaaataacccagcatagaagctagaaggaaggtatctgagaaaccactttgtgatttgtgcattcttctcacagaggtaaactttcattccattcagcactttggaaacactgttttggtagaatctgtgaagggatatttggaaatgaattgaggcctatggtgaaaaagtaatatcttcagaaaaatactagaaagaagctttctgtgacactactttttgatatatgcattcatctcatagagttaaacctttctttgaattcagcagcttgaaaacactgtgtttgtaaaatccatgaagggatttttggagctcattgaggccatagtcgaaaaagtgtttatccccagataaaaactagaatgaagctatctgagaaacttctttttgatgtgtgcattcacttcgcagagttaaacattgattttcattcagca

SEQ ID NO: 410691 - DNA, 583 bp, Homo sapiens
gatatttgggagctcgttaaggccaaaggtgaaaaagtaaatattctagtataaaaagtagaaggaagctatctgagaaacccctttgtgatgtgtacatttatctcacagagttaaacctttcttttcattcagcagtttggaaacactgtttttgtagtatctgccaagggatatttgggaacgcattgagtcctatgrtgaaaaaggaaatatcttcatataaaaactagaaagaagctttctgcaaaattgctttgcgatgtgtgcattcatctcacagagttaaacttttcttgggattcatcagtttggaaacactgtttttgtagcacctgcaaaaggatatttgatagctcattgagaccagagctgaaaaagtgaatatcccaggataaatactagaaggaagctatctgagaaactgctatgttatgtgtgcattcacctcacaaatttaaactcttattttcattcagaagtttcgaaaaagtgttttggtagcaactgcgaagggatatttgggagtcctttgaggcctatggtgaaaaaggaaatatcttcagaaaaaactagaaagaag

SEQ ID NO: 410692 - DNA, 557 bp, Homo sapiens
aactgctttgtgatgtgtgcattcatctcacacagttaaacctttctttggtttcagcagttgtgaaacactatttttgtagaatctctgagggaatatttagaacttcattgaggtaaggtgaaaaagtgaatatctcaggttaaaaactggaaggaagctatccgagaaaccgctttgtgatatgtgctttcatctctcagagttaaacctttgttttcattccacagtgtaaacactgttttggtataawctgcaaagggctatttgggagcgcattgaggcctatggtgaaaatggaaatatcctcagataaaaagtagaaagaaggtttctatgaaactgctctgtgatatgcacattcatctcacagagttaaaagtgtctttcaagtcagcagtttggaaacactgttttgtccattttgcaaagggaccttttggagcttattgaggccaatggtgaaaaagcatgtataccaggataaaaactagaaggaagttatctgagaaaccactttgtgatatgtgcattcatctctcagagctaaaactttc

SEQ ID NO: 410693 - DNA, 595 bp, Homo sapiens
ttttggtagaatatctcaaggtatattttggagcgcattgaggtctatggtgaaaaaggaaatatattcagataaaaactagaaggaagctttccgagaacctattttctgatgtgtgcgttcatctcacaggggtcaatatttcttttgattcagcagtttggaaacactgtttttgtagtatctgcaaatgatttttgggaactcattgaggccaaagtgaaaaagtgagcatcccaggataaaaactagatggaagctatctgagtaaccactttgtgaggtgtgcatttatctcacagatgtaaaactttcyttttcattcagccttttggaaaccctgctttagaagaatttgcaaaggcgtatttgggagctcattgtggcctatggtgaaaaaggaaatatctccagataaaaaccctaaagagtctttctgagaaacttctttgtgatgtgtgcattcacctcatagagttaaacatttctttccattcagaacttcacaaaccctgcttttgtccattctgtgactgggcatttgggagctcactgaggccaatgggaaaaaagagaacatcccaagaaaaaaacc

SEQ ID NO: 410694 - DNA, 495 bp, Homo sapiens
cacaaaccctgcttttgtccattctgtgactgggcatttgggagctcactgaggccaatgggaaaaaagagaacatcccaagaaaaaaacctggaaggaagctatctgagaaactgctttgcaatgggtgcattcatttcagaaagttaaacttttcttttcattctgcagtttygaaacactgtttttgaagaatctgcaaagggctatttgggagctcattgaggccaaaggtgaaaaagtgaatatcccaggatgaaaactggaatgaaactatcagagaaaaccctatgtgatgtgtgcattcatctcacagatataaacatttcttttcattcagctgtttggaaacactgtttttggcgaatctgcaaagggatatttgggagcgtatttaggcctttggtgaaaaaggaaatatcttcagataaaaacttcagagaagctttctgagaaactgctttgtgatgtgtgcattcatctcacagggctaaa

SEQ ID NO: 410695 - DNA, 495 bp, Homo sapiens
cacaaaccctgcttttgtccattctgtgactgggcatttgggagctcactgaggccaatgggaaaaaagagaacatcccaagaaaaaaacctggaaggaagctatctgagaaactgctttgcaatgggtgcattcatttcagaaagttaaacttttcttttcattctgcagtttcgaaacactgtttttgaagaatctgcaaagggctatttgggagctcattgaggccaaaggtgaaaaagtgaatatcccaggatraaaactggaatgaaactatcagagaaaaccctatgtgatgtgtgcattcatctcacagatataaacatttcttttcattcagctgtttggaaacactgtttttggcgaatctgcaaagggatatttgggagcgtatttaggcctttggtgaaaaaggaaatatcttcagataaaaacttcagagaagctttctgagaaactgctttgtgatgtgtgcattcatctcacagggctaaa

SEQ ID NO: 410696 - DNA, 648 bp, Homo sapiens
caaaattttctttggattcagcagtttrgaaaggctatttttgtccattctgcaagtggacatttgggacttcactgaggccaatggcaaaaagcaaatatcccaggataaagactagaaagaagctatcagagaaactgctttgtgatgtgtgcattcactcacagagttaaacctttcttttcattcagcaatttggaaacactgttttgtagaatctgtgaagggatattggggagcgctttgaggcctatggtgaaaaaggaaacaacttcagataaaaactagaaagaaaatttctgagaaactgcttgtcatgtgtgcattcatctcacttatttaagccatactttggattcaggagtttggaaacactgttgttgtccattctgcaaatggacatttgggatctcattgaggccaatgacaaaaaattgaatatcccaggataaaaaccagaaagaagctatctgagaaaccactttgtgatgtgtggattcatctcgcagagttaaacctttcttttccttcagcagtttggaatcactgttttcataggatctgcaaagggatatttgggagctcattgaggccaatgacaacaaagcaaatgtcctaagatataaactagaaggaagctatctgaga

SEQ ID NO: 410697 - DNA, 546 bp, Homo sapiens
tcagcagtttgttaacactgttttgtagaatctgtgaagggatatttgggagcacattttgcccaagggcaaaaaactgaatatcccatgataaaaactagaaggaagttatctgagaaaccactttgtgacatgtggattcatctctcagagttaaaactttcttttcattcagtagtttggaaatactgttttgggagaatatgtggaaggatattttggagtgcattcaggcctgtggtggaaaactaagtatcktcagagaaaaactagaaagaagcaatctgagaaactgctttgtgaggtgggcattcatctcacagagttaaacttttctttggattcaagagtttggaaacacagtttttctaaaattttcaaagggatacttgatagctcattgaggccaatcaagaaaaagagaagagtcaaagaaaaaaacaagaagaaagctatctgagaatccactttgtgatgtgtgcattcacctcacagagtttaacctatgttttcattcagaactttggaaaccttgttttttagaat

SEQ ID NO: 410698 - DNA, 546 bp, Homo sapiens
tcagcagtttgttaacactgttttgtagaatctgtgaagggatatttgggagcacattttgcccaagggcaaaaaactgaatatcccatgataaaaactagaaggaagttatctgagaaaccactttgtgacatgtggattcatctctcagagttaaaactttcttttcattcagtagtttggaaatactgttttgggagaatatgtggaaggatattttggagtgcattcaggcctgtggtggaaaactaagtatcttcagagaaaaactagaaagaagcaatctgagaaactgctttgtgaggtrggcattcatctcacagagttaaacttttctttggattcaagagtttggaaacacagtttttctaaaattttcaaagggatacttgatagctcattgaggccaatcaagaaaaagagaagagtcaaagaaaaaaacaagaagaaagctatctgagaatccactttgtgatgtgtgcattcacctcacagagtttaacctatgttttcattcagaactttggaaaccttgttttttagaat

SEQ ID NO: 410699 - DNA, 546 bp, Homo sapiens
tcagcagtttgttaacactgttttgtagaatctgtgaagggatatttgggagcacattttgcccaagggcaaaaaactgaatatcccatgataaaaactagaaggaagttatctgagaaaccactttgtgacatgtggattcatctctcagagttaaaactttcttttcattcagtagtttggaaatactgttttgggagaatatgtggaaggatattttggagtgcattcaggcctgtggtggaaaactaagtatcttcagagaaaaactagaaagaagcaatctgagaaactgctttgtgaggtgggcattcatctyacagagttaaacttttctttggattcaagagtttggaaacacagtttttctaaaattttcaaagggatacttgatagctcattgaggccaatcaagaaaaagagaagagtcaaagaaaaaaacaagaagaaagctatctgagaatccactttgtgatgtgtgcattcacctcacagagtttaacctatgttttcattcagaactttggaaaccttgttttttagaat

SEQ ID NO: 410700 - DNA, 608 bp, Homo sapiens
agtcaaaattttctttggattcagcagtttggaaaggctatttttgtccattctgcaagtggacatttgggacttcactgaggccaatggcaaaaagcaaatatcccaggataaagactagaaagaagctatcagagaaactgctttgtgatgtgtgcattcactcacagagttaaacctttcttttcattcagcaatttggaaacactgttttgtagaatctgtgaagggatattggggagcgctttgaggcctatggtgaaaaaggaaacaacttcagataaaaactagaaagaaaatttctgagaaactgcttgtcatgtgtgcattcatctcacttatttaagccatactttggattcaggagtttggaaacactgttgttgtccattctgcaaatggacatttgggatctcattgaggccaatgacaaaaaattgaatatcccaggataaaaaccaraaagaagctatctgagaaaccactttgtgatgtgtggattcatctcgcagagttaaacctttcttttccttcagcagtttggaatcactgttttcataggatctgcaaagggatatttgggagctcattgaggccaatgacaacaa

SEQ ID NO: 410701 - DNA, 608 bp, Homo sapiens
agtcaaaattttctttggattcagcagtttggaaaggctatttttgtccattctgcaagtggacatttgggacttcactgaggccaatggcaaaaagcaaatatcccaggataaagactagaaagaagctatcagagaaactgctttgtgatgtgtgcattcactcacagagttaaacctttcttttcattcagcaatttggaaacactgttttgtagaatctgtgaagggatattggggagcgctttgaggcctatggtgaaaaaggaaacaacttcagataaaaactagaaagaaaatttctgagaaactgcttgtcatgtgtgcattcatctcacttatttaagccatactttggattcaggagtttggaaacactgttgttgtccattctgcaaatggacatttgggatctcattgaggccaatgacaaaaaattgaatatcccaggataaaaaccagaaagaagctatctgagaaaccactttgtgatgtgtggattcatctcgcagagttaaacctttcttttcmttcagcagtttggaatcactgttttcataggatctgcaaagggatatttgggagctcattgaggccaatgacaacaa

SEQ ID NO: 410702 - DNA, 595 bp, Homo sapiens
ccacattaaaaagcagtttctctgaaagcttctttcctgtttttatctcaagatgtctagattttcacaataggtctcaatgtgctccgaaatatcccttcacagattcttcaaaatcagtttttctaaacggctgaatgaaagaaaggtttaactctgtgagttgaaagcataaatcacaaagtagtttctcagagagcttctttctagtttttatctgaacttgtttccattttcaccataggccttaacgtgaaaccaattatccattagcagattctacaaaaacattctttccaacttgctgaaggaaaagaaaattttaactctgagataaatgcacacatcacaaagttgtttctcaaatagcttccttctagtatttyatatgggtatattcaatttttgccattggcctcaatgagctcccaaggtccattccaagaatggacaaaaacagtgtttccaatctgctgaatccaaagaacagtttaagtctgtgagatgaatgcacacatcacaaagcagtttctcagaaagctttttttctagttttaatctgaagatgttaaatttttcaacgtaggccttaatg

SEQ ID NO: 410703 - DNA, 569 bp, Homo sapiens
acctcaaagcactcccaaatatccttcacagattttagcaacacaggggctccaaactgctgaatgaaaataaacgtataaatatgctagataaatgcacaatcacaaaggggtttctctgatagattccttctagtttttatcctgtggtattcactttttcaccattgacctcaatgagctcccaaatgtactttcacagaatggacaaaaacattgtttccaagctgctaagcccaaagaaatgattaactgtgttagatgaatacacacatcacaaagcagtttctcagaatacttctttctagtttttagctgaatttatttcyattttcaccaaaggcctcaatgcactcccaaatatccctttgcagattctaccaaaatagggtttccaaatggctgattgaaaggaaagctttaattctgcaagatgaatgcacacatcacaaagaggtttcttagatagcttccttgtagttttcatcctggtatattctctttttcacattttgcctcaagagctcaaaatatccctttgcagattctacaaaaacagtgtttccaaa

SEQ ID NO: 410704 - DNA, 596 bp, Homo sapiens
atgctcaaatatccctttgaagattttaccaaaaactgtgtttccaaactgctgaatgaaaagaaatgtttaactctctgggatgaaagcacatatcacaaagtggtttctcagatatcttccttctagttttcatcctgtgatrtttgcttttttgcctttggactcaaggagttcccaaatgtatctttgaagatcctaaaaaaacagtgtttccaaattgctgaatccaaagaaatgtttaactctctgagaagaatgcacacataacaaagcgatttctaagaaagcttctttctagtttttatctgaagatatttcattttcatcttaggcctcaaggtgatcccaaatatcccttctcagattctaccaaaacagtgtttctaaactggtgaatgaaaagaaagtttttactcagagagaaggatgcccacatcaaaaaatcatttctcagatagcttctttctaatttttatcctgggatatttgctttttggactttggcctcaatgagctcccaaatatgccttcacagattctacaacatcactgtttccaaacagctgaatgaaaagaaagtttcaactgtgtga

SEQ ID NO: 410705 - DNA, 596 bp, Homo sapiens
atgctcaaatatccctttgaagattttaccaaaaactgtgtttccaaactgctgaatgaaaagaaatgtttaactctctgggatgaaagcacatatcacaaagtggtttctcagatatcttccttctagttttcatcctgtgatgtttgcttttttgcctttggactcaaggagttcccaaatgtatctttgaagatcctaaaaaaacagtgtttccaaattgctgaatccaaagaaatgtttaactctctgagaagaatgcacacataacaaagcgatttctaagaaagsttctttctagtttttatctgaagatatttcattttcatcttaggcctcaaggtgatcccaaatatcccttctcagattctaccaaaacagtgtttctaaactggtgaatgaaaagaaagtttttactcagagagaaggatgcccacatcaaaaaatcatttctcagatagcttctttctaatttttatcctgggatatttgctttttggactttggcctcaatgagctcccaaatatgccttcacagattctacaacatcactgtttccaaacagctgaatgaaaagaaagtttcaactgtgtga

SEQ ID NO: 410706 - DNA, 524 bp, Homo sapiens
gaatgaacagaaacagtgtttccaaactgcttaatccaaagaaaggtttaacactttgagatgaatgtacacattgcaaagcagtttctcagaaagcttctttctaatttttatctgaagatatctccttttcaccacaggcctcaatgcactcccaaatatgccttcacacactctacaaaaacagtgtttccaaactcttcattgaaaagaaaattttaactatgagasacgtatgcacacataacaaagccatttctcatatatcttccttttagtttttttcatgggatattcactttttcgattctggcctcaaggagttccaaatatcccttcgcagattctaccaaaatagtgttttcaaacttctgtatgaagagaaacttttaactctgtgagatgaatacagaaatcacatagctcttttttatatagcttcctcctgttttttcatcctgatatatttgctttttctcctattgcctcaatgagctgtcaaataacacttcacagatataaca

SEQ ID NO: 410707 - DNA, 572 bp, Homo sapiens
ttaaaaacatgtaaggaggcttagcacaactctctatgggaatagtcaggttgggggtaagcaaagcagaatttctggtctacgttgatactgagagaagggggcggcagtgggaacaacagacagaatattttccccttcccatactcacagtcctgacacggcaatagccaatttccaaagttctgggtgttctgatcttagaatgggaagtatcatacaagtccttgggagagtaaygcctttatcctcccattttaatggaaagaattagctgaacctcttatgcaaagtagaatgatgattctccttctcccaataagaaataaaataagtagcctccaggcattctctttcatcagaggaactattgttttttaaatagccctttggtgcccagtatattactaaaacatatgagtcattttttaatattactgcatgtgagttaacacaatcttcccaaattaaagttttaggtgggccctcaaaatgtttatggcatggttttcctgcaggtttatattgaaattatggattatctcctattactcccactttcatttgtttta

SEQ ID NO: 410708 - DNA, 620 bp, Homo sapiens
tgtgtattcatctcacggatttaagcctttcttttcattcaccagtttggaaacactgatttgtccattctgtgaatgtacatttgggagcycattgaggccaatggtgaaaaagcgaatatcccaggagaaaaactagaagaaagctatctgggaaaccactttgtgatgtgtgcattcaccccacagagttactcttctcttttcattcagcagtctggaaacactgttttggcagactctgagaagcgatatttgggagtacattgaggcgtatggtgaaaaaggaaatatctcgagataaaaactagaaagaagctttctgagaaattgttttgtgatgtgtgcattcacctcacagagttaaacctttctttggattcaataatttggaaacactgtgtttgtccattctgcaaatggacactttttgagctcattggatccaatggtaaaaaagcaaatatcccaggaaaaaaaactagaagaaagctatctgagaaactgctgtgtgatgtgtgcattcctctggcagagttaaactttttgcttcattctagagtctggaaacattgtttttgtagaatctttaaagggctatctcggagcccatttaggct

SEQ ID NO: 410709 - DNA, 591 bp, Homo sapiens
ggatatttgggggcacattgaggcctgtggtgaaaaaggaaatatcttcagctaaaaactagaaaaaagctttttgagaaactggtttgggatgtgtgcatttatcttagataaaactagaaataagatttctgataatctgcattgcaatgtgtgcatccatctcacatatttaaatgtttctttgtattcagtaattttgaaatacttttcatagcmtctgcgaaggtatattggatatctcagagaggccataggggaaaaagcgaataccccacgataaaaactagaatgaaactaaatgagaaacctccttgtgatgtgtgcattcatgtcacagagttaagcttttctttccattcagcagtttgaaaacactgtttcagtagaatctctgaagaatatttgggagcacattgtggcctatggtgaaaaaagaaatgtcttcagataaaaactagaaagaagcattctgaggaactgctttgtggtgtgtgcattcatctcacagaggtaaactgttttttggattcagcagtttggaaacactgtttttgtagactctatgaaggaatattatagatctcattg

SEQ ID NO: 410710 - DNA, 591 bp, Homo sapiens
ggatatttgggggcacattgaggcctgtggtgaaaaaggaaatatcttcagctaaaaactagaaaaaagctttttgagaaactggtttgggatgtgtgcatttatcttagataaaactagaaataagatttctgataatctgcattgcaatgtgtgcatccatctcacatatttaaatgtttctttgtattcagtaattttgaaatacttttcatagcatctgygaaggtatattggatatctcagagaggccataggggaaaaagcgaataccccacgataaaaactagaatgaaactaaatgagaaacctccttgtgatgtgtgcattcatgtcacagagttaagcttttctttccattcagcagtttgaaaacactgtttcagtagaatctctgaagaatatttgggagcacattgtggcctatggtgaaaaaagaaatgtcttcagataaaaactagaaagaagcattctgaggaactgctttgtggtgtgtgcattcatctcacagaggtaaactgttttttggattcagcagtttggaaacactgtttttgtagactctatgaaggaatattatagatctcattg

SEQ ID NO: 410711 - DNA, 621 bp, Homo sapiens
tgttttcaggcctatggtgaaaaaagaaatatcttcagataaaaactagaaagaagtttctgagaaactagcttgtgaggtactcattmatctcacaaatataaacctttctttggattcagcagtttggaaattctgtttttgtccattctgtgaatggacatttgggagcacattgaggccaatggcaaaaaagtgagtatcccagtacaaaaactagaaggaagccacctggaaaccgctttgtgatgtgtgcattcatctcgcagagtgtaacttttcttgccattgagcagtttggaaactcttgggggaagtcagggaccccaaaaggaggggctgactgaagccatggaaaaagaatgtaaactgtgaaaattccatggacatttattagttccccaaatgaatacttttataatttcttacacctgtctttattgcaatctctgaacagaaattgagtagatttcatggacatttatcactccccgatcaatactcttgtgatttcctatacctggctttactttaatctcttaatcctgtcatttttttaagctgaggttttatgtcgcctcaggaccctgtgatgaatgcattaactgcataaattgttta

SEQ ID NO: 410712 - DNA, 621 bp, Homo sapiens
tgttttcaggcctatggtgaaaaaagaaatatcttcagataaaaactagaaagaagtttctgagaaactagcttgtgaggtactcattcatctcacaaatataaacctttctttggattcagcagtttggaaattctgtttttgtccattctgtgaatggacatttgggagcacattgaggccaatggcaaaaaagtgagtatcccagtacaaaaactagaaggaagccacctggaaaccgctttgtgatgtgtgcattcatctcgcagagtgtaacytttcttgccattgagcagtttggaaactcttgggggaagtcagggaccccaaaaggaggggctgactgaagccatggaaaaagaatgtaaactgtgaaaattccatggacatttattagttccccaaatgaatacttttataatttcttacacctgtctttattgcaatctctgaacagaaattgagtagatttcatggacatttatcactccccgatcaatactcttgtgatttcctatacctggctttactttaatctcttaatcctgtcatttttttaagctgaggttttatgtcgcctcaggaccctgtgatgaatgcattaactgcataaattgttta

SEQ ID NO: 410713 - DNA, 508 bp, Homo sapiens
aacttcattagcaattttaatttttccctggtcctgtgacctcaccttgtctctgtttgccttgtaatattttattaccttgtgaagcatgcgatctctgtgacccacaccatatttgtacactccatcccctttgaaaatcactaataaaaacttgctgattttgtggcttgggggcatcagggaaccwgccaacatgggatgtttcccctggatacccagctttaaaatttctctcttgtactctccctttatttcacagaccagccaacagttaggtaaatagaaaagaacctatgtgaaatatgttgatttatcaggggtgggttcccctgatatctggcactccaatgtggttttttctttttcccaagtgcatttgggaacccaattccctttggtagatgtggaaaaacgtcatcagtttggtcaacagaaatgcttgtttgactccctgatgtctggtgagttgtctgtgtatggtctgggttagctatgggtcatgcag

SEQ ID NO: 410714 - DNA, 596 bp, Homo sapiens
tactttgtgatgtgtgcattcatctgcatagtttacctttctcttcattcagcagtttggaaacactgttttcatagaatctgtaaagtgatatttaggaatgcactgaagcttatggtgaagaaggaaacatattcaggtaaaaactagaaagaagctatctgagaaattgctttgtgttgtgtgcattcatctcacagaattaaacagttctttggattcagagtttagaaactttgtttttgtccattctgctaatgaacayttgataactcactgaggccaatggcaaaaaggtgaatatcccaggataaaaaccagaaggaagctgcatgagaaactgatttgtgatatgtgcattcatctcgaagagttaaacctttatttttgttcagcagtttgcaaacattggttttgtagaatctgcaaagggatatttgggagcccactgaggtacatggtgaaaaagaaaacatcttcagatagaatctaaaaagaatctttctgagaaactgctttgtgatgggtgcatttgtctcaggagtaagacatttcttttgattgagcagtgttaaaacaccaattttatccattct

SEQ ID NO: 410715 - DNA, 591 bp, Homo sapiens
aaccacgttgtgatatgtgctttcatctctcagacttaagcctttctttgaattcagcagtttgaaaatgctgtttttgtctattctgctaatggacactagggagctcagtttggaaacactgtttttttttttccattctgcaaatggacatttgggatctcattgaggccaatgaaaaaaggtgaatgtcccacaataaaaactagaaggtagccatctgagagaccactttgtgataggtggtttcatctcacagagttaaacttttctttccattcagcagtttgaaaacattgyttttgtagaatctgcgaagggatatttgagagtgcattgaggcctatagtgaaaaaggaaacattttcatataaaaactagaaataagttttctgagaaactgctttgtgatgtgtgcattgatttcacagagttaaacctttctttggattcagcaggttggaaacactgttgtggtccattctgaaaatcaacatttgggagctcattcacaccaatggcaaaaaagcaaatatcacattttaaaaactagaaggaagttccctgagaaaacattttgtgatgtgtgca

SEQ ID NO: 410716 - DNA, 591 bp, Homo sapiens
aaccacgttgtgatatgtgctttcatctctcagacttaagcctttctttgaattcagcagtttgaaaatgctgtttttgtctattctgctaatggacactagggagctcagtttggaaacactgtttttttttttccattctgcaaatggacatttgggatctcattgaggccaatgaaaaaaggtgaatgtcccacaataaaaactagaaggtagccatctgagagaccactttgtgataggtggtttcatctcacagagttaaacttttctttccattcagcagtttgaaaacattgtttttgtagaatctgcgaagggatatttgagagtgcattgaggcctatagtgaaaaaggaaacattttcatataaaaactagaaataagttttctgagaaactgctttgtgaygtgtgcattgatttcacagagttaaacctttctttggattcagcaggttggaaacactgttgtggtccattctgaaaatcaacatttgggagctcattcacaccaatggcaaaaaagcaaatatcacattttaaaaactagaaggaagttccctgagaaaacattttgtgatgtgtgca

SEQ ID NO: 410717 - DNA, 466 bp, Homo sapiens
aaactagaaggaagctatctgagaaacagctttgtgacgtgtacattcatctcacagatttaaacttttcttttaattcaacagtttggaaacactgttttggtagaatatgcgaagaaatatttgggagtacattgaggcctctggtgaaaaagtaaatatcttcagataaaaaatacaaagaatctttcagagaaatggctttgtgatgtgtgcattcrtctcacagagttaaacctttctctggattcagctgtttgggaacactgttattgtcaattttgtgaatagatatttgtgagatcattgagaccaattgcaaataaagccaatattcctggatgaaaactacaaggaagctatatgagaaactctgctttaatgtgtacagtcatctcacagagttaaacgtttctttcattcagcagttagagcacaattttggtataatctgcatagggatgtt

SEQ ID NO: 410718 - DNA, 594 bp, Homo sapiens
taaacgtttctttcattcagcagttagagcacaattttggtataatctgcatagggatgttttggagtgcattggggcatatgtcaaaaaggaaatatcttcagataaaaactagaaataagttttctgagaaattgctttgagatgtgtgcattcatctcagaaatttaaaactttctgtggattcagtagtttggaaactgtttttctccattgtgtgaatggacatttggcagttcattgtggccaatggcaaaaaagggaatatacaaggattaaaacttcaaggaagtatctgagaaaatgcttcaytatgtgtgcattcatcacccagagataaacctttcttttcattcagcagtttggaacactgattttgaaaaaactgcaagagatattttggagtacattgaggcatataatgaaaaaggaaatatcttcagtagaaactagaaagaagctttctgagtaacagttttgtgatatgtgcattcatctcacagagtaaaacttttctttggagtccacattttggaaacactgtttttatccattctgtaaatgaacatttgggagaacattgaggccaatgat

SEQ ID NO: 410719 - DNA, 544 bp, Homo sapiens
agctgctttgggatgtgtgtatgcatctgacagagttcgaactttctttggattcagcagctggraaacattttatttttgtccattctgcacatggatatttgggagtccattgaggccaaaggtgaaaaatcgaatatacctggataaaaactagaaagcagctatctgagaaaccgctttgtgatgtattcattcatgtcacatagtttaacattacttttattcagcaatttggaaacactgtttaggtataatctgcaaatggatattttggagtgcattgaggccaatgatgaaaaggaaatatgtttagataaaaactagaaagaaactttctgtgaaactactttgtgatgtgtgtattcatctcacatagtacaacctttcttttgactcagcagtttggaaacactgttttagtccattcactgaatggacatttgggagctcatttagcccaaaggagaaagagaaaatttcccaggattaacactagatgaatcccatctgggaaactcctctgtaatgtgggcattcatct

SEQ ID NO: 410720 - DNA, 544 bp, Homo sapiens
agctgctttgggatgtgtgtatgcatctgacagagttcgaactttctttggattcagcagctgggaaacattttatttttgtccattctgcacatggatatttgggagtycattgaggccaaaggtgaaaaatcgaatatacctggataaaaactagaaagcagctatctgagaaaccgctttgtgatgtattcattcatgtcacatagtttaacattacttttattcagcaatttggaaacactgtttaggtataatctgcaaatggatattttggagtgcattgaggccaatgatgaaaaggaaatatgtttagataaaaactagaaagaaactttctgtgaaactactttgtgatgtgtgtattcatctcacatagtacaacctttcttttgactcagcagtttggaaacactgttttagtccattcactgaatggacatttgggagctcatttagcccaaaggagaaagagaaaatttcccaggattaacactagatgaatcccatctgggaaactcctctgtaatgtgggcattcatct

SEQ ID NO: 410721 - DNA, 544 bp, Homo sapiens
agctgctttgggatgtgtgtatgcatctgacagagttcgaactttctttggattcagcagctgggaaacattttatttttgtccattctgcacatggatatttgggagtccattgaggccaaaggtgaaaaatygaatatacctggataaaaactagaaagcagctatctgagaaaccgctttgtgatgtattcattcatgtcacatagtttaacattacttttattcagcaatttggaaacactgtttaggtataatctgcaaatggatattttggagtgcattgaggccaatgatgaaaaggaaatatgtttagataaaaactagaaagaaactttctgtgaaactactttgtgatgtgtgtattcatctcacatagtacaacctttcttttgactcagcagtttggaaacactgttttagtccattcactgaatggacatttgggagctcatttagcccaaaggagaaagagaaaatttcccaggattaacactagatgaatcccatctgggaaactcctctgtaatgtgggcattcatct

SEQ ID NO: 410722 - DNA, 559 bp, Homo sapiens
ccatctcacagagctaaaattcttttttgtttcagaagtttggaaatactgtttttcagaatgtgtgaagggataattgggagagctttgaggtctatggtgaaaagggaaatatcttcagataaaaacgagatgtaatcattctaagaaattgctttatgrtgtctgcattcatctcaaagagttaaacattcgtttggattcagcacttaggaggcaatgtttttgtccattctgcgaatggacatatggctgcttattgaggccaatggcaaaataccgaatatcccagtataaaaactagaaggaagctctctgagaaatggctttgtgatgtgtgcattcatctcacacaattagacctttcttttcattgagcagtttggaaacactgtgtttttagaatgcgtgaagggatattttggagagtactgtggcctacagtgaaaaaggaaatgttttcatataaaaactagagagaagatttctgagaacctcctttttgatgtgtgcctttgacacagagttaaacctttctttggatacagcagtttagaaa

SEQ ID NO: 410723 - DNA, 559 bp, Homo sapiens
ccatctcacagagctaaaattcttttttgtttcagaagtttggaaatactgtttttcagaatgtgtgaagggataattgggagagctttgaggtctatggtgaaaagggaaatatcttcagataaaaacgagatgtaatcattctaagaaattgctttatggtgtctgcattcatctcaaagagttaaacattcgtttggattcagcacttargaggcaatgtttttgtccattctgcgaatggacatatggctgcttattgaggccaatggcaaaataccgaatatcccagtataaaaactagaaggaagctctctgagaaatggctttgtgatgtgtgcattcatctcacacaattagacctttcttttcattgagcagtttggaaacactgtgtttttagaatgcgtgaagggatattttggagagtactgtggcctacagtgaaaaaggaaatgttttcatataaaaactagagagaagatttctgagaacctcctttttgatgtgtgcctttgacacagagttaaacctttctttggatacagcagtttagaaa

SEQ ID NO: 410724 - DNA, 395 bp, Homo sapiens
cccaagtatcctttcacagatcctacaaaaacagtggttgcaaactgctgaatgaaaagtaaactttaactctgagagataaatgcatacataacaaagtggtttctcagatagcttccttttggttttctcctgggatactcgtttwtttgtctgtggcctcattgaactccaattatcccttcacagattgtacaaaaatagtgtttccaatctgctcaatgcaaggaaatgtttaacttggcaaggtgaatgcatacatcacaaagcagtttctcacatagcttctgtctggtttttattctgggatatttgctttttggcttttggcctcaatgagctccaaaacatccctttcaagattctaaaaaaacggtgtttcaaactattgaatc

SEQ ID NO: 410725 - DNA, 567 bp, Homo sapiens
aatttcttccaaagctcctgaaggaaaagaacggtttaattttgtgagatgaattgacacatcacaaaccagtttctcaggtagcttgattcaagtttttatccagagatattcactttttcaccattcacctcaatgagattccaaatgtccwtttgcagaatggacaaaaacagtgcttcccaacagctgaatcaaaagaaagttttaaatctctgagatgaatgcacagatcacaaagcagtttatcagaaaacttctttctagtttttatctgaagatatttcttttttcaccataggcttcaatgctctcctaaatatccctttgcagattctacaaaaacagtgtttccaaactactgaatgaaaaggaagttttatctctgcaagatgacggtttctcagatagcttccttctagtttttatactgggatgtttgcatttttgtcattggtttcagtgggatcacaaatgcccattctcagaatggacaaaagtagtgtttccaaactgcttaataaaatgaaagttttaaatctgtaagatgaatacacacatcacaaa

SEQ ID NO: 410726 - DNA, 523 bp, Homo sapiens
aagtgcacacatcagaaagtggtttctcagatagctttcttctattttttataatgggatatttgctttttggtgtgtggcctagatgagctatcaaatatccttttgcttattctacaaaaatgttttcyatgattctgaatccaaagaaagattgaactctttgagatgaatgcacacatcacaaagcaatttttcataatgcttctttatattttttatctgaagatatttcctttttcaccataagtgtcaatagtctcccaaatattacctcacagactctaccaaaacagtgtttccaaactactgaatgaaaagaaaggtttaagccagcgaggtaaatgcacacatcacaaagtggtttctcaaagagcttccttctagtttttatcctgggatgataccttctttgccattggcatcaacgagcttccaaatatcccttcacagcatctacaaaaacagtgtttgcaaattgctgaatccaaagaaagtttagctctgtgagtttaatgcacac

SEQ ID NO: 410727 - DNA, 607 bp, Homo sapiens
ctcagtttgcttccttctagattttatcatgagtatttgttttacagcctttggcctcaatgagctcccaaatatccattggcagaatggaccaaacattgtttccaaactgctgaatccaaagaaaggataaactctgtgagatgaatgcactcatcacaatgcagtttctgatggagcttctttctagtttttacctgaagatatatcctttttcaatgtaggcctcaacatactcccaaatatcccttcacagattctacaaaaacagtgcttccaatctgctgaataagaagaaaattttagatctgagagatgattgtgcacatcacaaagttgtttctcagatagcttccttctattttttattgtaggatattcactttttcaccattgtcctaaatgagctcccaaatgtccattcgcagaatggacaaagacagtgtttccaaactgatgaatccaaaaataggcttacttctgtgcggtgaatgcaytcatgaaaaagtagtttctcaggaagcttccttctagtttttatcctgggatattcgattttttgactttggcctcaatgagctcccattcatccattcacacaatgtac

SEQ ID NO: 410728 - DNA, 590 bp, Homo sapiens
tgggagctcattaaggcctatggtgaaaaaggaaacatcttaagacaaaaactggaaagaagctttctaggaaactgctttgagatatgtgcattgatctcagattgtaaaacctcactcttgattcagcagttagtaaacactgtttttgtccattctgcaaatggacatttgtgagatctttgatgccaatggcaaaaaagcatatatccaaggataaaaaattgaaggcagctgtctgagaaaccactttgtgatttttgcatttgtctcactgagttaaacctttctttttattcagcggtttggaaacactgtttttgtccattctgcaaatggatattagggagctctttgaggccaatgctgaaaaagctaatatcccaggataaaaactagaaggaagcaatctcagaaactgctttttgatgtcggcagtcatttctcagatttmaacctctcttttcattcagcatattggaaacactgtttctgtagaatctgcagagggatatttgggagcacattgagcctagggtgaaaaaggaaatatcttcagggaaaaactagaaagaagatttctgagaacc

SEQ ID NO: 410729 - DNA, 557 bp, Homo sapiens
gtttaaatctgtgaggagaatgcacccatctcaaagcagtttctcagaaagcttcttccttatttttatctgaaaatgtttcctttttcaccataggcttcaatgcgctcgcaaatatctttttgcagattcttcaaaaacaatgtctccaaactgctgaataaaaagaaagatttcaatctgcgagatgaatgcacacatcacatagtggtttatcagattgcttccttctagaattttatcctgggatattagctttttttcctttggcctcaatgagctccaaaatgtccactcgcagaatrgacaaaagcagtgtttccaaactgctgaacctaaaggaaggtgtaactctgtgagttgaatgcatatatcacaaaccagtttctcagaacacttctttctagttgtctgaaggtatttccttttttaccattggcctcaatgcgctccaaattatccctttgtagatactacaaaaatagtgtttaccaactgctgaatgaaaagaaaggtttagttctatgagatgaatgcacacatcacaaagtggtttc

SEQ ID NO: 410730 - DNA, 557 bp, Homo sapiens
gtttaaatctgtgaggagaatgcacccatctcaaagcagtttctcagaaagcttcttccttatttttatctgaaaatgtttcctttttcaccataggcttcaatgcgctcgcaaatatctttttgcagattcttcaaaaacaatgtctccaaactgctgaataaaaagaaagatttcaatctgcgagatgaatgcacacatcacatagtggtttatcagattgcttccttctagaattttatcctgggatattagctttttttcctttggcctcaatgagctccaaaatgtccactcgcagaatggacaaaagcagtgtttccaaactgctgaacctaaaggaaggtgtaactctgtgagttgaatgcatatatcacaaaccagtttctcagaacacttctttctagttgtctgaaggtatttccttttttaccattggcctcaatgcgctccaaattatccctttgtagatactacaaaaakagtgtttaccaactgctgaatgaaaagaaaggtttagttctatgagatgaatgcacacatcacaaagtggtttc

SEQ ID NO: 410731 - DNA, 571 bp, Homo sapiens
ccacttgcagaatggaccaaaactgtttttccttagtactgtatcaaaagaaatgtttaactttttgagatgaatgcccacatcacaaagtcacttctcagaaagcttccttcttgttcttatctgaagattattcctttttcaccataggtctcaatgcgctaccaaatatcccttcatagtttccacaaaaacactgtttccaaactgctgaatgaaaagaaaagtttaactctgtgagaggaatgcacacatcacaaactggtttctcagaagcgttctcctattttttatggtggggcattcacttttttgccattgtcctcaatgagctcctwaaatgcccttatgcagaaaggacaaagacagtgttgccatactgctgaatccaaagaaaattttaactctgtgagatgaatacttacatcaaaaaacagtttctcacagagcttctttctagtttttatctatctgaagatgattcctttttcaccatatcctcaatgtgctcctaaatatcctttcacagatttgacaaaaatagtgtttccaaactgccaaatgaaaaaaa

SEQ ID NO: 410732 - DNA, 426 bp, Homo sapiens
ttttcaccataggcctcaatgcactccgaaatatcccttcacagattctacaaaaacagtgtttgcaaacttccaaaggaaaagaaatatttaactctctgagatgaatgcacatatctcagaggggtttccctgataccttccttctagtttttatccagggatattctgacaaaacagagtttccaaatattccagagtttgctgaatgaaaagaaaggtttaactctgtgagatgaaygcccacatcacaaagcagtttcccagagatcttccttctagtttttatcctgggatattcactttttcacaattggcctcagtgagctcccaaatgaccattcgcagaatagacaaaagcagtgtttccaaactgcagaatccaaggaaagttttaattgtgagaagaaggcacacatcacaaag

SEQ ID NO: 410733 - DNA, 498 bp, Homo sapiens
tatcctgggatgttcactttttggccacttgcctcaatgagctcctaaatgtccattcccaaaatagacaaaaacagtttgtgcaaactgctgaatccacagaaaggtttacttcagtgaagtgaatgcacacgtcacaaagtagtttctcagaaagcttctttctagtttttttctgaagatatttcctctttcaccatacccctcaatgtgctcacagatttcccatctcagattctaggaaaacagtgtttccaaattgctgaatgaaaagaaaattttatctctccaaggtgaatgctcacatcacaaagcagtttctcaaataccttccttgtagttttcatcctgggatattcacttttttrccattgaccacaaaagttcccaaaagtccagtcacagactgaacaaaaactgtgtttgcaaactactgaattcacagaaatgttgaactctgtgagaataatgcatgcatcacaaagcagtttctcaaaa

SEQ ID NO: 410734 - DNA, 540 bp, Homo sapiens
tgaaactatctgagaaactgctytgtgattgttcattcatcttgcagctttaaaccgttcttttcattcagcagtttggaaacagtttttgtggaatctgcaaaggggtatttgggagtgcattgaggtatatggtggaaaaggaagtattttcagataaaaactagaaagaaactttctgagaaaccaccttttgatatgtgcattaatctctcagagttaaacctatcttttgattcagcagtttggaaacagtttttgaccattctgcaagtggacatttgtgagctcattgaggccaaaggcaaaaaatcaaatatcccaggataaaaattggaaggaatctatctgagaaatgccttattgatgtgtgcattcatctcacagagttaaacttttcttgtcattcaacattttggaaacattttttttgtggaatctgcgaagtgatatttgggagttcattgaggcctgtggtgaaaaatgaaacattcccaagatgagcccagtcaagaagaccctaaaccagtggtactagat

SEQ ID NO: 410735 - DNA, 540 bp, Homo sapiens
tgaaactatctgagaaactgctttgtgattgttcattcatcttgcagctttaaaccgttcttttcattcagcagtttggaaacagtttttgtggaatctgcaaaggggtatttgggagtgcattgaggtatatggtggaaaaggaagtattttcagataaaaactagaaagaawctttctgagaaaccaccttttgatatgtgcattaatctctcagagttaaacctatcttttgattcagcagtttggaaacagtttttgaccattctgcaagtggacatttgtgagctcattgaggccaaaggcaaaaaatcaaatatcccaggataaaaattggaaggaatctatctgagaaatgccttattgatgtgtgcattcatctcacagagttaaacttttcttgtcattcaacattttggaaacattttttttgtggaatctgcgaagtgatatttgggagttcattgaggcctgtggtgaaaaatgaaacattcccaagatgagcccagtcaagaagaccctaaaccagtggtactagat

SEQ ID NO: 410736 - DNA, 540 bp, Homo sapiens
tgaaactatctgagaaactgctttgtgattgttcattcatcttgcagctttaaaccgttcttttcattcagcagtttggaaacagtttttgtggaatctgcaaaggggtatttgggagtgcattgaggtatatggtggaaaaggaagtattttcagataaaaactagaaagaaactttctgagaaaccaccttttgatatgtgcattaatctctsagagttaaacctatcttttgattcagcagtttggaaacagtttttgaccattctgcaagtggacatttgtgagctcattgaggccaaaggcaaaaaatcaaatatcccaggataaaaattggaaggaatctatctgagaaatgccttattgatgtgtgcattcatctcacagagttaaacttttcttgtcattcaacattttggaaacattttttttgtggaatctgcgaagtgatatttgggagttcattgaggcctgtggtgaaaaatgaaacattcccaagatgagcccagtcaagaagaccctaaaccagtggtactagat

SEQ ID NO: 410737 - DNA, 492 bp, Homo sapiens
ctatgtaagaaactgctttgttatgagtgyattcatttaactgagttacacctatgttttgattcagcgttttggaaactctgtatttgtagaaactacaaaaagacatttgggagctcattgaggccaatggtgaaaaaaacaatatccccagatataaactagaaagaagtgatgtgagaactgatttgttatgtttgcattgagctatcacagataaatctgtgtttttattcagcacattggaaaatctgtttttgtagaatctgctaaaagacatttgaagcacattgaggtttatggtgaaaaagcaaatatctctagttaaaaactagaaagatgcaatctgagaaactgctttgtgatgtgcagagtcatctcttagagataaacctttctttggattaggaagcttggaaatgccatttttatggaatgtgcaaaacgacatttggtaacacgttgaggccaatgatgaaaaagcgactatct

SEQ ID NO: 410738 - DNA, 580 bp, Homo sapiens
ttgatgtgtgcattcatctcacagagttaaacttttcttgtcattcaacattttggaaacattttttttgtggaatctgcgaagtgatatttgggagttcattgaggcctgtggtgaaaaatgaaacattcccaagatgagcycagtcaagaagaccctaaaccagtggtactagatgaattaaactcacacacagagaaatatagaggtgtgaattgggaattcaggggtctcacagccttcagagctgtgagccccaaacaaatgtttatccacaaatttattaagagcaatctgttattcgaattgtttctacagttatttgattaattaaaagtataccttattggaaatgaagggatgggccaatttaaagttgtggatctggctggtcatcagcagaggagcatgcccttaaagcacagattgctcatgctattgtttttggtttaagaacgactttaagtggtttttcaccctgggtgggccaggtgttctttgccctcatttcagtaaaccagtaaccttccagcatgggcattatgaccatcattaacttgtcacggtaatgtagagattt

SEQ ID NO: 410739 - DNA, 580 bp, Homo sapiens
ttgatgtgtgcattcatctcacagagttaaacttttcttgtcattcaacattttggaaacattttttttgtggaatctgcgaagtgatatttgggagttcattgaggcctgtggtgaaaaatgaaacattcccaagatgagcccagtcaagaagaccctaaaccagtggtactagatgaattaaactcacacacagwgaaatatagaggtgtgaattgggaattcaggggtctcacagccttcagagctgtgagccccaaacaaatgtttatccacaaatttattaagagcaatctgttattcgaattgtttctacagttatttgattaattaaaagtataccttattggaaatgaagggatgggccaatttaaagttgtggatctggctggtcatcagcagaggagcatgcccttaaagcacagattgctcatgctattgtttttggtttaagaacgactttaagtggtttttcaccctgggtgggccaggtgttctttgccctcatttcagtaaaccagtaaccttccagcatgggcattatgaccatcattaacttgtcacggtaatgtagagattt

SEQ ID NO: 410740 - DNA, 562 bp, Homo sapiens
agattgctcatgctattgtttttggtttaagaacgactttaagtggtttttcaccctgggtgggccaggtgttctttgccctcatttcagtaaaccagtaaccttccagcatgggcattatgaccatcattaacttgtcacrgtaatgtagagattttgcttatggccagttttggggccagtttatggctggattttggggggtttgtttctaacatgtccaccttctttgatttgcaaatcaataaaagcaaagctgctttgtcatggtgagctacttcttgcaggagtcaggatctgcatacgcagactataaaaagacaaacaacatagattaaaagcacaatcatcattgaaatcacagcccttccaagtctttttatacattgtaataggttactcactgccaatttgtctgcagctccttgaagcactccagttcctgtcattaagttcaggtttgcctgggatgccttatatattttttcttttaattctgcaatatccaaaaacaggtttgtaagtgtccttatagatgcttttttattctttcccaaatttt

SEQ ID NO: 410741 - DNA, 562 bp, Homo sapiens
agattgctcatgctattgtttttggtttaagaacgactttaagtggtttttcaccctgggtgggccaggtgttctttgccctcatttcagtaaaccagtaaccttccagcatgggcattatgaccatcattaacttgtcacggtaatgtagagattttgcttatggccagttttggggccagtttatggctggattttggggggtttgtttctaacatgtccaccttctttgatttgcaaatcaataaaagcaaagctgctttgtcatggygagctacttcttgcaggagtcaggatctgcatacgcagactataaaaagacaaacaacatagattaaaagcacaatcatcattgaaatcacagcccttccaagtctttttatacattgtaataggttactcactgccaatttgtctgcagctccttgaagcactccagttcctgtcattaagttcaggtttgcctgggatgccttatatattttttcttttaattctgcaatatccaaaaacaggtttgtaagtgtccttatagatgcttttttattctttcccaaatttt

SEQ ID NO: 410742 - DNA, 476 bp, Homo sapiens
aatctgcaaaaagacttttgggagtgccttaaggcctatggtgaaaaagcaaatatcttcagataaaaatttgaaagaagctttctgagaaactgcttcatgctgtgtgcattcatctcacagagttwtcctttcttttgcttcagctgtttggaaacactgtttttgcagaatctgcaaaaggacatgcgggagttcattgaggccagtagtgaaaaagcaaatattttgagaaaaactagaaagaagctatcagagaaactgctttgtgatgtgtgcattcgtctcacagtgttaaacctttcttttctttcaggatttggaaacttttttttttttttgaatctgctaaaggatatttgggagcgcattgtggcctatggtgaaaaagtgaatatttccagagaaaaactagaagaagcagtctgagaaactgatttgtgttgtttgcattcatctcatggaggtaacatttg

SEQ ID NO: 410743 - DNA, 476 bp, Homo sapiens
aatctgcaaaaagacttttgggagtgccttaaggcctatggtgaaaaagcaaatatcttcagataaaaatttgaaagaagctttctgagaaactgcttcatgctgtgtgcattcatctcacagagttttcctttcttttgcttcagctgtttggaaacactgtttttgcagaatctgcaaaaggacatgcgggagttcattgaggccagtagtgaaaaagcaaatattttgagaaaaactagaaagaagctatcagagaaactgctttgtgatgtgtgcattcgtctcacagtgttaaacctttcttttctttcaggatttggaaacttttttttttttttgaatctgctaaaggatatttgggagcgcattgtggcctatggtgaaaaagtgaatatttccagagaaaaactagaagaagcagtctgagaaactgatttgtgwtgtttgcattcatctcatggaggtaacatttg

SEQ ID NO: 410744 - DNA, 559 bp, Homo sapiens
ttgtgacatgtgtatttatctcacagtgttacaccattcttttgattcaccagtttggaaacactgttttcatggaatctgtgaaaggacatttggsagcgctttgaggcttatggtgaaaaagcaaatatcttcagataaaaacttgaaagaagctatctgagaatctgctttgtgacttgtgcattcttctcacagagttaaacctctcttttgattcagcagtttggaaacactgttttctagagtctgcaaaagaacatttgggagctcattgagaccaatagtgaaaaaggaaatttccccagaaaaaaaaactggaaagaacctatgtgagaaacagctttgttatgtgtgcattcagttctcatagttaaacgtatgttttgacgaagcagtttggtaacactgttattgtggaacgtgagaaagtacatttgggagctcattcaggccaatggtgaaaaagcaaatatctctagttaaaaaacagaaagaagttatctgagaaactgtcttgtgatgtgtgtattcatctcatagagttaaacatttcttt

SEQ ID NO: 410745 - DNA, 518 bp, Homo sapiens
cttttgaatcagcagtttggaaacactgttttcatagaatctgcgaaaggacatttgggagcgctttgaggacaatggtgagaaagcagttatctcaaracaaaaactagaaagaaattatttgagaagcagttatgttatgtgtgcattcagctcatacaattaaaactatgtttaattcagcagtttggtaacaccatttggaaacactgttttatagtgtctgccaaagaacatttgggagctcattgaggacaatgttgcaaaagcagttatccccagataaaaactagaaagaagcttatttgaggagcagctttgttatgtgtgcattcagctcacacaattaaactatgtttttgattcagcagtttggaaacactgttttcgtagaatctgtgaaaggacatttgggagcactttgaggattatggtgaaaaagcaaaagtcttcagataagctatctgagaaacagctttgttatgtgtgcatccagctcacacagttaaaactatgtt

SEQ ID NO: 410746 - DNA, 518 bp, Homo sapiens
cttttgaatcagcagtttggaaacactgttttcatagaatctgcgaaaggacatttgggagcgctttgaggacaatggtgagaaagcagttatctcaaaayaaaaactagaaagaaattatttgagaagcagttatgttatgtgtgcattcagctcatacaattaaaactatgtttaattcagcagtttggtaacaccatttggaaacactgttttatagtgtctgccaaagaacatttgggagctcattgaggacaatgttgcaaaagcagttatccccagataaaaactagaaagaagcttatttgaggagcagctttgttatgtgtgcattcagctcacacaattaaactatgtttttgattcagcagtttggaaacactgttttcgtagaatctgtgaaaggacatttgggagcactttgaggattatggtgaaaaagcaaaagtcttcagataagctatctgagaaacagctttgttatgtgtgcatccagctcacacagttaaaactatgtt

SEQ ID NO: 410747 - DNA, 612 bp, Homo sapiens
cctatgtttccattcagcagtttggaaacactgtttttgtccattctgtgaatgaacatttcagagctcattgaggccaatggtgaaaaagcaaatatccccagataaaaactaaaaagaagctctttgagaaactgctttgtgatgtgtgcatacatmgtacatagttacaccattcttttgattcagcagtttggagacactgtttttgtagaatctgagaaaggacatttgggaggtcattcaggcctatggtgaaaaagaaaatatctgttcttaaaaaccacaaagattttacctgataaactgctttgtgacatgtgtattcacctcatattgttaaaactttctttggattcagcagtttggaaacacaatttttgtagaatatgtgaagggatattttggagggcattgatgcctatggtgaaaaagttaatatctccagacaaaaacaagaaataagctatgagaaactgatctgtgatgtgtgctttcatctcacagagttaaagctttcttttgatccagcattttgaaacagtgttttcatagaatctgtgaaaggacatttgggagctaatagagttcaatggtgaaaatgcagatatc

SEQ ID NO: 410748 - DNA, 445 bp, Homo sapiens
aaacactgtttttgtagattccctaaagggacatttgggagtgcattgaggcctatggtgaacaagcaaatatctccaggcaaaaacaagaaagaagctatgtgagaaactgctttttgatgtatgcattcacctcacagggttgcactattttcttgattcagtaatttggaaacactgttcttatagaatctacaaaaggacattcgtttgcactttgaggyttacagtgaaaaagaaaatgtcttcacaaaaaaactcaaaagaagctatctgagaaactgcattgtgatttgtgtattcatctcacagatttaaagctttcttttgattcaatagtgtgtaaacaaacactgtttttgtagaatctgtgaaagaacatctgggagctcattgaggccaatggtgaaaaagcaaatatccccagataaaaactagaaagaag

SEQ ID NO: 410749 - DNA, 439 bp, Homo sapiens
cagctactgctttgtgatattcatctcataaacttatacctttctttggattcagcagtttggaaacaytgttttcatagaatctgcgaaagtacatttgggagtgctttgaggcttatgatgaaaaacctgatatcttcagataaaaacttgaaagactctatctgagaaactgttttttagaggggtgctttcatcccacagagttaaacctttcttatgattcagcagttaggaaacatgttgttgtagaatctacaaatgaagatttgggttctctcaggccaatggtgaaaaagcaaataacccagataaaaactagaaagaagccttttgagaagcagcttgcttatgtttgcattcagctcacacagttaaacctacgttttcattctgcagtttggaaacactgttattgtagaatctgagaagtgacatt

SEQ ID NO: 410750 - DNA, 505 bp, Homo sapiens
ggatacagcagttgggaaaaactgttttmatagaatctgcgaaaggacatttgggagcgcttcaaggcttatgttgaaaaagcaaatgtcttcacataaaaacatgaaagaagctatctgaacaactgcattgtgacgtgtgaattcatctcacagagttaaaattttcttttcattcagcagtttggaatcactgtttttgtagaatctgcaagagaacatgtgggagttcattgaggccaatggtaaaaaagcaaatatccccagataaaaactagaaagaagccatttgagaaacaggtctttttatgtgtgcattcagctcacacagataaacctatattttgattcagcagtttggaaacactgtttttgaggaatctgcaaaaggacatgtaggagcgctttgaggcttatgatgaaaaagcaaatatctttagataaaaacttgaaagaagctatctgagaaacaactttgttatctttgcattcagctcacacagtt

SEQ ID NO: 410751 - DNA, 505 bp, Homo sapiens
ggatacagcagttgggaaaaactgttttaatagaatctgcgaaaggacatttgggagcgcttcaaggcttatgttgaaaaagcaaatgtcttcacataaaaacatgaaagaagctatctgarcaactgcattgtgacgtgtgaattcatctcacagagttaaaattttcttttcattcagcagtttggaatcactgtttttgtagaatctgcaagagaacatgtgggagttcattgaggccaatggtaaaaaagcaaatatccccagataaaaactagaaagaagccatttgagaaacaggtctttttatgtgtgcattcagctcacacagataaacctatattttgattcagcagtttggaaacactgtttttgaggaatctgcaaaaggacatgtaggagcgctttgaggcttatgatgaaaaagcaaatatctttagataaaaacttgaaagaagctatctgagaaacaactttgttatctttgcattcagctcacacagtt

SEQ ID NO: 410752 - DNA, 603 bp, Homo sapiens
attgaggcatctgctcaaaaagaaaatatcttctgataaaaattagaaagaagctatctgtgaaactgctttgtggtgtgtgcattcatctcacagaaattaaatctttcttttgtttcagcagtttggaaacactctttttgtacattctgcaaatggacatttgggggctcattgaggccaatggtgaaaaattgtatatctcaagataaaaactagaaggaagctatctgagaaactgctttagatgtatgcattcatctcactcagttaaacctttttttggattcagtaatttggaaatacygttttgtagattctgcgaatggacacttgggagcacattgagggctacaatcaaaaggaaaatatcttcatatagaaactagaatgaagctttctgtgaaacccctttatgatatgtgcattcatctcacagagttaaacctttcttttgattcagcagtttgtaaacaatgtttttgtacattctgcaaatggacatttgggatctcattgaggccaattgtgaaaaagtggatatcccaagataaaaactagaagtagctatctgagaaaccactttttgatgtgtgcattcat

SEQ ID NO: 410753 - DNA, 450 bp, Homo sapiens
aaagctcccaaaattctacacagtgtgttcaasaaagtagctttcaatctcttttatctttgtgggcaagataaatattagccaggttatagtggacttgtacatgttactagcctcataccctaattaactcttgtattaggagaatagaaattaaagtcatgttttatgttaaatattctatcatcagcctctagtttcctagtcatgtcctaacctgagatatcaaataggtacttaagtaaatatgaaactcagaaaaagtttgctcaagcaaggaactgaaatctaccctgtcatcaggaacttttagacaaaatcaaatccaagtcaacttagaagcatacagtatatagatcttcgtgtatctcttttagctatacattaggcatgtcctcatagtatccaccaagcatagattgcttttgtacttagaagacatggaacacc

SEQ ID NO: 410754 - DNA, 450 bp, Homo sapiens
aaagctcccaaaattctacacagtgtgttcaagaaagtagctttcaatctcttttatctttgtgggcaagataaatattagccaggttatagtggacttgtacatgttactagcctcataccctaattaactcttgtattaggagaatagaaattaaagtcatgttttatgttaaatattctatcatcagcctctagtttcctagtcatgtcctaacctgagatatcaaataggtacttaagtaaatatgaaactcagaaaaagtttgctcaagcaaggaactgaaatctaccctgtcatcaggaacttttagacaaaatcaaatccaagtcaacttagaagcatacagtatatagatcttygtgtatctcttttagctatacattaggcatgtcctcatagtatccaccaagcatagattgcttttgtacttagaagacatggaacacc

SEQ ID NO: 410755 - DNA, 549 bp, Homo sapiens
ttatttttctaccagtagctgaatatttctacttccactatgaactccagaactaggaaaataaacacggtatggatataagattcactgggccactgtgagaagaatgctagcccaaaattcatcacttagctctcataaatcccaccctgactgggggacgacagtggaattcagttttctcagggattaagcttgctttggacccagtagctaatcattcctgagagatctgratgtttgtcttccctggggctcagtttccatggtaaataggcctgagtcttcttgggaaacaggaggaataagagttatatatatctaagttaccacagggttcctccccagggttcctgatctctccttcattcaaggggtgctgggtcattgaactgactcagaaatggaaaaagggtgagaggacatgactcttcattgggatagcttaagtcaggactctttccatacacgtaacaaatttttttcttctagttttacagttgagtagaatcttagtggtctgtctatgtattttggccctgagtacct

SEQ ID NO: 410756 - DNA, 549 bp, Homo sapiens
ttatttttctaccagtagctgaatatttctacttccactatgaactccagaactaggaaaataaacacggtatggatataagattcactgggccactgtgagaagaatgctagcccaaaattcatcacttagctctcataaatcccaccctgactgggggacgacagtggaattcagttttctcagggattaagcttgctttggacccagtagctaatcattcctgagagatctgaatgtttgtcttccctggggctcagtttccatggtaaataggcctgagtcttcttgggaaacaggaggaataagagttatatatatctaagttaccacagggttcctccccaggkttcctgatctctccttcattcaaggggtgctgggtcattgaactgactcagaaatggaaaaagggtgagaggacatgactcttcattgggatagcttaagtcaggactctttccatacacgtaacaaatttttttcttctagttttacagttgagtagaatcttagtggtctgtctatgtattttggccctgagtacct

SEQ ID NO: 410757 - DNA, 560 bp, Homo sapiens
gagactcattcactatcacaagaatagcatgggggaaagaccagcccctatgattcagttacttccccctgagccccttccataaaacgtgggaaatctgggagatacaattcaagttgagattcaggtggggacacagccaaaccatatcactcatgcagtgactatgatgtaagaacagattatggatgacctaaaactgatataactgacaaaaattcagatgggaagagagaacaaaagtaacataaactacaaacatgttgtggtataaatgtgtttcttcatctttaatagtttaggctacaaagctgtcaaatcaaacgggagaaggaagtatacttagcaatactaagttaaattctaagcaaataagactatcaattaatattaggtgggggaaaagggagagtagagaaaaggagaaggaagtagaaatattccaatttcaccattgctcatagtgggtaattaatagactctctctaaagamatagaggattaaggtagttacataaaattacaaagctaaaagctaaaataaagaatagaaatctatc

SEQ ID NO: 410758 - DNA, 604 bp, Homo sapiens
ataattttttaactttatagtttcctgtctttcactattataaaggatctggctatatatggtcttttatgtataygtggtgcattgatggggtaataatactacagtattctagctaacatttgcacgttatttactatgggcactatctgacaggtagtgagagctttacctatactcatcatttaatcctcaccacaacctgattagtattattatctctgttttacagatggagaaattgagcatggaacactaagaaatttgcccaagcttaccaggttagtgatgatgccgggatctgaactcatactatagccataggctagattacaaaaagtgaaatttcatgctcacttcagcagcacatatactaaaattggaatgatacagggaagattagtatggtccttaaaaaaagtgaaattttttaggacaaatagaactggttttaggacaaaggtacaaacacttaaaattatatatattgttaaatatttctctaaaaagattgttccaatctctgggccaactagcagtatatgaggaccaactggtaagcagaaagaggcatcccagtgatattttaatttttattgtaaaa

SEQ ID NO: 410759 - DNA, 568 bp, Homo sapiens
cacctaactcatgccattccagcttccttcaggaccctgcttctgagtgacggaccagctcacacaatgtcttgtttcagtccatgatcccactgacctactcttgcctgctggagggtaatgagaagctttggttctgccatctctcccactctgccaggtgctggctgtggagcaaaggctcacctttgtggagaggataaaacctgcccaacctacctcaccatggtttttcacattgcaaagggtaataacatgggcagtgcggacttaggctaccccctccagtttgctttccgtaaatgcaaattgtccttactgcaagtcaggaatgattgctgactcacagtagggctgctatgcctgtgtgtaaacttggggatggctgagggaacatagactcactcttccacattcccaagttggtctagtgtgctgcccagtagcaaaccatggcagactcaccacctattctgagttccagggctgctgtagggcagggtgggcttcctcccagacttgccttaccctgggctgatctttgcycctggtatgcattaatggactc

SEQ ID NO: 410760 - DNA, 592 bp, Homo sapiens
ttctaatatgtcacccgtattcttccctcttagccttgctcaatccattccctttgcttggtacactttgtcaccctgtggcatttgatctcggcttaggtgtctttcttgggagaagccttccctgaccacccttgccccatgcactgccgccctcccctaataaatccctggctccccatgagcagggcccgggttgtctttgttctctgggcctcgtgtggcccctatcacgtgataggggcccagagattatctgaatgaatgccctgattagtgagcgcatgttttgcagaagaggaggctgaccctgatgaggtcaatgtgctcaggacagagattactgccttcccaactgaggggattgtgcrgagtggaatccaacaaacctgtcatttcatctctctgaaattatgacaataccaccacctatcctacaggctgctgaacagcatgatgatggactgtccagaccttggtgtcaccctaacttgaagcctgagctctacgtgcagacttgaagcttgctgcaaaggccattaagctggtgggcttaaagcctgagaactcccctctctgtcaccagcacagg

SEQ ID NO: 410761 - DNA, 617 bp, Homo sapiens
atgtttcttggaggataatatgttaaataaaaaagtatatacaagtttattctgtataaaatacctaaaggagactttcacttcattatttatatttcataaagaaacaaaggtcttatggaatcctgagagttactgcattagttaccatgggtttagaaaagcaaagccactttgggctgaacattttggtcccctggctggatctgttttcttgaatgcacaccccacccctgaggggctcatttgtgccttaaactacaaatctactacttcttaaaagcctttggtcatttccagagagctaaagtcacaaatgttacatatgtaaattttaagaatttactgtttattatatggaatattatttgtgagatgctmtttaatgtttactataagaaaaataaatcaatggtaaaatttgtttctcagttattgggagaagtctggttagtcatttgtaaccaagatactctcaatactctttagaggctaatgtcattgtacattcctagaagaacattatttttatcaatgtatccctaaaatagtaattggcacatgatatacattcattacatatttgttgaatgaataggcaataaagtatcactgac

SEQ ID NO: 410762 - DNA, 511 bp, Homo sapiens
taaaatgaagcacaatcagaagcggtatgcctgtatttacatacttcaaaaacaccattttctgcacttgatcatagttttgtaaagacagacctttcatgatgataccaacttcatatgtcagtttgagaataatagcatgaaattgggtggaacattttggaaactgtattagagtgaggaatwtagaaagtgtggctctagttttaattatgttactaactctgtagggctttataatagttaaccttttcttggcctcagagtcttcttttacaaaatgaggtgattgtaatatgtaatcttggaagtctctgccagcttcaatatattttaatatttggcagaatatttccactgataaaaaaatttattaaatgctactaaactatgaaactctcagcagttgttcactcctcattttaataaatcctagtatcttatcctcaataccaaaaattgtgacatttagacattaagataataagcttaggtaatataaatattgaat

SEQ ID NO: 410763 - DNA, 544 bp, Homo sapiens
tcctatctgaggtatggcagtgagcagtaaacttttggctttactagcattttctttcggggtctgtaagtcccggtccaccaaaactgcttcctcgtgctccttccagcagtcataatctgtcaccatggcaatactcgcataacaaattccagcctctttagtgagaaccacctctggaactgtggtcatgttgataacatccaccccccaggtgcagaacatgaagctttctgctcaagagataaaacgaggtccctcagttgtgaccattgtcccctttgaatgtcaccagagtcctagcttcttagcagtctctataagaacgtctctcgtttgggggcttggcccccattggaatatgrcacactcctctagcacaacaatgacttccatcatagagggactgaggtctcatactggtcctgtcaatgaactgatcaataatgacaatatcgccaggttgaatctcctccctcaaggagccacaagctgtggtccctatgacatgtgtacagccctcttccttcaaagcccagatggt

SEQ ID NO: 410764 - DNA, 585 bp, Homo sapiens
ccagtatttgattggagttggataacaagatacgggcatagcagagggcactgaggctacagagtaagccaggctttagtgtatgaaggaccttgagtgccatrgtaagagttttggccacacaacatctgatcatgttggcatagccgggagagaattaaatttgagtgcttttttctttttcttttccttttttttgagacagaattttgctcttgttggccaggctggtggagtgcaatgtcgtgaccttggctcaccgcaacctctgcctcccaggtgcaagtgattctcctgcttcagcctcccgagtagctgggattacaggcatgcaacaccacgcccagttaattttttgtatttttagtaaagacagggtttttccatgttggtcaggctagtctcgaactcccgacctcaggtgatcctcctgcctcggcctcccaaagtgctgggattacaggtgtgagccaccgcgcccagctgagatttgagcattttttctaaccccaactgtagatggtgtctgtaaatttgagaggcaaaccataaaaacataacaaacaaaagaaaaacatatggcaa

SEQ ID NO: 410765 - DNA, 565 bp, Homo sapiens
ccaagcccacctttacatagattcatgcatatacacgcatcttttactgaatcaagagtctgggtttctcgttcctcccatttccaaaacccactcctcatcatccatcttccttgttaatcttgtcttctctgatgataaatctttttgctccctaagataatttttagcacaaactttttgtctttgaccccctttacttctcctttcacaatattaaagaagctcatacagttttatagttttgactaacatgcatttattaagagtgtaatatcagccagctcttgtgctttatgcaggtgacttctgaatktataattttagtgtttaaagttctcttcatttctagtcccacaatttcaactccctgccagacttctgctagaatttccatcagcactgataataataataaataacattataaaataacccgtatggtgcctaaacccaaaacctctcctacctttttcacctcgcgttcttgttactactcctacaacttttcaggctataaatgcatctttaatcgagtgactgccaaataccgacaatgtttctt

SEQ ID NO: 410766 - DNA, 565 bp, Homo sapiens
ccaagcccacctttacatagattcatgcatatacacgcatcttttactgaatcaagagtctgggtttctcgttcctcccatttccaaaacccactcctcatcatccatcttccttgttaatcttgtcttctctgatgataaatctttttgctccctaagataatttttagcacaaactttttgtctttgaccccctttacttctcctttcacaatattaaagaagctcatacagttttatagttttgactaacatgcatttattaagagtgtaatatcagccagctcttgtgctttatgcaggtgacttctgaatgtataattttagtgtttaaagttctcttcatttctagtcccacaatttcaactccctgccagacttctgctagaatttccatcagcactgataataataataaataacattataaaataacccrtatggtgcctaaacccaaaacctctcctacctttttcacctcgcgttcttgttactactcctacaacttttcaggctataaatgcatctttaatcgagtgactgccaaataccgacaatgtttctt

SEQ ID NO: 410767 - DNA, 617 bp, Homo sapiens
attgtgattttgacttgcatttccctggtgattagtgatgtggagcattttttcacacacctgttggccaattgtatatcttcttttgagaaatgtcatttcagatcttttgcccattttttaatctttcttttcttgctatagagttttttcagctttttatatatcttatagatcctagatattaaccccttttggatatggawatatagtttacaagtattttcttgcattctgtaggttgtatcttcacctgttgattgctttctttgctgtgcagaagttttttactttgttataatcccatttattttgtttttattgcctgtctgataaaaaaaaaaaaaaaacccaaggctcctagtttcattcttaaactgtgagattttggattgatctttgtatttctctgagtgtgatttggaaatatttgccttcattttggtcatttttttttctctttagcttaaccagctcgaaaaagcagtggaagcagctcacacatttttcgtggctaaccctgagcacatggaaatgcagcagaacattgagaattacagggcgacagctggtgttgaagcattgcagttggtagacagagaagccaagccacacat

SEQ ID NO: 410768 - DNA, 617 bp, Homo sapiens
ggtttacttatatcttggtaacagaggcagatatgatgaccaaatacgtgtaggacatttcatataattaaggaaatgacagaataggccaaacaatatttttttgaatcctgtattgactaagactttgactagagagagtcttcagttagaaagtaattctataggagcagtactgaaaaaaaaatctctatgtcgttactgattaacataacactgactgttgtaaaagagaaactcctaaatctcagtggcttaaaacaataaaagtttatttctcatataaagttcaagaggtgttgggtgatggggaggagtactcttcctctgacgtcttcaacaaatggcttcaaaatcctcctgggtattgacactcatcaaccagttgatagacaaggaaagggagggagggtaatggattccatggaaggtttttatgggccaagcctgggaatggcatgtatcacctgcatccatattctgatgtataactcagtcttgtggtcacattaatgcaaaaggactgracaatattgtctcactttttgcccaggatgacagggaaacaagtttagtgaacaaccagatggaatctgaaatgctgtcattgccttggg

SEQ ID NO: 410769 - DNA, 599 bp, Homo sapiens
  misc_feature (1)...(599): n = A,T,C or G
atttttagtgagaagttgtatctatattaatcttagcgatttcacacgtttttctggttactgcatgtcttcactttattcatgttattgagaacagagaccctttttcttccctccgctaaatcatagtgacaatagccttacctgacatttagacgaggtttacctcatactcgtggaataaatagaggcatcgcaattcactttccaagtacaatcaatcactcctccatatgtgatagttttggtcctagcttgtaccantgtattttctggctcatatatggtattggagttacctacactattatttttggaagttgttagtgtatagtgtatgataagtgcatgcttntgcagaattaatgaagtgtccctggtgaggattctcatgctccagtcctgagtggaacagcatatatcaatgtcgagaattcttactggggaccacaagcgaggcagatgtcagaactgttttctgtgtgcactgcattctagygagaggtgtggcagctgcaaaggattgagagcccagagaatgtgccttggctaaaagtttctgtattactccaccactctgatttctctgtactgtaaaa

SEQ ID NO: 410770 - DNA, 609 bp, Homo sapiens
taatccacttgaatcattctcacaccatcgccctaccccaccccctcacaatycccaccgtggtgcatggaaaaattgtcttccacgaaatcctggcaccaaaaaggctggagaccgctgagttaaatcacacctaccaaaaaagccaaaacttgaacattccttctcagtgactctgtcatagggtgacaatttaattttattgtagacaaagtttctaggaggaaatagtaaagcttcaaattctaatcttacaaatccaaagctctaaatgtacccataaatgttctcatgggttttgagtctgtgtccaaagttgaccttcatgtgttgtgagccaacctgcttgcctgcatttcctcttctcctctccttcctatccttttcctctctctcatccttctcttcctccttctttttgtgatgttaccaaaactttcatgttgaatttttactgtgaatttcttgagactaaatcacagaaattatggaactgaaatcttcacatgttgatttaagacatggaatttggaaaatattcaggctcctaaggcaattcatgtagtaaattttatacttgagtgaatgagtcagcattttgacaacaca

SEQ ID NO: 410771 - DNA, 609 bp, Homo sapiens
taatccacttgaatcattctcacaccatcgccctaccccaccccctcacaattcccaccgtggtgcatggaaaaattgtcttccacgaaatcctggcaccaaaaaggctggagaccgctgagttaaatcacacctaccaaaaaagccaaaacttgaacattccttctcagtgactctgtcatagggtgacaatttaattttattgtagacaaagtttctaggaggaaatagtaaagcttcaaattctaatcttacaaatccaaagctctaaatgtacccataaatgttctcatgggttttgagtctgtgtccaaagttgaccttcatgtgttgtgagccaacctgcttgcctgcatttcctcttctcctctccttcctatccttttcctctytctcatccttctcttcctccttctttttgtgatgttaccaaaactttcatgttgaatttttactgtgaatttcttgagactaaatcacagaaattatggaactgaaatcttcacatgttgatttaagacatggaatttggaaaatattcaggctcctaaggcaattcatgtagtaaattttatacttgagtgaatgagtcagcattttgacaacaca

SEQ ID NO: 410772 - DNA, 609 bp, Homo sapiens
taatccacttgaatcattctcacaccatcgccctaccccaccccctcacaattcccaccgtggtgcatggaaaaattgtcttccacgaaatcctggcaccaaaaaggctggagaccgctgagttaaatcacacctaccaaaaaagccaaaacttgaacattccttctcagtgactctgtcatagggtgacaatttaattttattgtagacaaagtttctaggaggaaatagtaaagcttcaaattctaatcttacaaatccaaagctctaaatgtacccataaatgttctcatgggttttgagtctgtgtccaaagttgaccttcatgtgttgtgagccaacctgcttgcctgcatttcctcttctcctctccttcctatccttttcctctctctcatccttctcttcctccttctttttgtgatgttaccaaaactttmatgttgaatttttactgtgaatttcttgagactaaatcacagaaattatggaactgaaatcttcacatgttgatttaagacatggaatttggaaaatattcaggctcctaaggcaattcatgtagtaaattttatacttgagtgaatgagtcagcattttgacaacaca

SEQ ID NO: 410773 - DNA, 596 bp, Homo sapiens
tgatatgctaacttacttttccaaccttagcttacttctacccttcaacaggcaaaatcaaagataatcaaactctttcctctaaaattctcccctagccttcttaatccttcatcacagtcattttatatcagttgtgttcatatgctatccatccttcaaaattaagctgcaatactatctctttgctctcaaacccttccttatttgcttcaaccctaatctttccccctgtatccatggatccttataattacctgtcttttggcatctcctaattctgtgtcctatatcataaactaatgtacatgacaaatcccctcccatcacaatccttgatgcaagcatcatttatttaatgctctagtctcaaagttccttgcacagaatatccccatttaacaaattcaaattgaataaagaaataatttttcactcttaagaactagctctaataactaaaactgtggcccatacattacccactgctttatcactaaatgtagaatatccacacttgtaagtcgtggacttamtaggtgtccagtgaatatttactgattaataataagcctggcactattattatgtataag

SEQ ID NO: 410774 - DNA, 572 bp, Homo sapiens
tgcaaaggagtaaaacattccacacagaggaaatggggtggggctctccaagaaaaaggaataatgtgtataaagacttggtagtgttcaagtgcctggtgaagaattctactaggtttacagtttgttttctaaggtaataggtggtaaattttttttttttttgagtcagagtcttgctctgtcacccaggctggagtgcagtggcacaatctgggctcactgcaagctccgcctcccagcttcacaccattctcctgcctcagcctcccgagtagctgggactacaggtgcccgccaccatgcccagctaattttttgtatttttagtagagacggggtttcaccatgttagccaggatgatctcgatctcctgacctcgtgatccacccgcctcagcctcccaaagtgctgggattacaggcgtgagccaccgygcgcggccaataggtggtaaatattttttgagtctaaaatatgctcagtgagaactgtgaaaaatatgtccataaaatgtttatttacctttctgtacagattaatattttgttttcagtaagcattttactca

SEQ ID NO: 410775 - DNA, 631 bp, Homo sapiens
ttgttagctgcaaacatgttgaagaggttttggcatagtgtaaaggaagtgaatggtgagaaattattcgggaaattcttgctctatatgcaatatacataatcagctcatttgagtcctaacttsatgtgtagattcaggtcctttctcggctttttaatagctgcttgaccttggctaagtcactgagggaatatgccaccatttaaatcatcttcttactgagaatccaagttgctataagaaatatcttttgatttgatgacttttttaaaaaacataatgagaatggagtacattaggtacttagactcttaacctagaagaatgttattaaaatgaaaacatccacgtacccttttaaaaatccagccaagcttgtggttattgttcgttcacttttaaacaaacattactctgtcagacacaactacagcccccatgggagccaccagggagggttctgttgtctcatgtagccgagagtggctctcaggtccagttggcaaaagggagagaaaaaaggtttgatgttaatctgaaatgtctctgagaggccatacatgatttgagaatggattaaatatcaatgggtgactaggggattcttatactcagttaattttagaaa

SEQ ID NO: 410776 - DNA, 649 bp, Homo sapiens
ggatgaaattagatattgatctatttatccctgcttagttgtgctttgctttgttattcatatagaagtatattaaatatctgtactwctgagtggagaaggtttataaagcaatactttataataatttttaatttgtatttaaggctagacatatacttgattgatggtttatataattattcttaaaactctgaattatacactatacatagaatatgactattgtaattaaagagggggctcatcctaattgattgtattacatatgatcccaattacttctatcttggaagagaacatctagtgtaatcttgtcaagaaacaacaattattttatttaatagagtttagtctcacggtatttttggagagcctgctatgtctacagaaactgagatctttgtgttattcaatccaaaaggaatctctggttactagaatcacaaaccagaatgaaaagtaaaataaaagaaatatttttacagaagtgatgcttatgcttaaaagagtatttctcctattatatttttatctcttgaaaatattaagataagtattaattattcagcctataatccatttataataaacaactcaggttaaaatcccagctctaccactaaataactgtaggactttgccaacc

SEQ ID NO: 410777 - DNA, 555 bp, Homo sapiens
tacaaaaaagcagttgaattatttgtatctccttattaaatagttgcctgaaagactgcaagttttaatccattttttgttactattgagattactacatgcacttaaaaataataaaactacatttttaaggtttttttccaaaactaaatttttcatttattaagattttgtcttttacttctttgtaatagaattagtgacttttttcaaaatgaacaaaataaatcatattttaaaaatttaaataaaatgagttatcaatatgaagctaaatttcaaaccaagataaatatttacaacattgtaatggtaattattctagatctaagatatttgaagctaatccaggacatcaagtaaaaaggtcacttaggaggctacctgaagttacagaatatgtcagaaagattccctgggcccaactgatccaggagaagcrttacctgaccattgaactatcaattgcagcccacaaaaggacatggatgctatttattatacatcattttcttaaaatatctttaacaacaacaataagttatgcattattag

SEQ ID NO: 410778 - DNA, 555 bp, Homo sapiens
tacaaaaaagcagttgaattatttgtatctccttattaaatagttgcctgaaagactgcaagttttaatccattttttgttactattgagattactacatgcacttaaaaataataaaactacatttttaaggtttttttccaaaactaaatttttcatttattaagattttgtcttttacttctttgtaatagaattagtgacttttttcaaaatgaacaaaataaatcatattttaaaaatttaaataaaatgagttatcaatatgaagctaaatttcaaaccaagataaatatttacaacattgtaatggtaattattctagatctaagatatttgaagctaatccaggacatcaagtaaaaaggtcacttaggaggctacctgaagttacagaatatgtcagaaagattccctgggcccaactgatccaggagaagcgttacctgaccattgaamtatcaattgcagcccacaaaaggacatggatgctatttattatacatcattttcttaaaatatctttaacaacaacaataagttatgcattattag

SEQ ID NO: 410779 - DNA, 579 bp, Homo sapiens
tgtttatagcagctttatttattattgctaagacttggaaccaacaaacgctcttcagtaggtgaatgaacaaatgaattgtggtacttccagacaatggaatattattcagcattaaaaataaaggagctatcaaactatgaaaagatgatgtatcttaaatgcatattaccaagtgagagaactcagtctgaaaggctacatacgatatgcttccaactatataacattctggaaaatgcaaaactatggatacagtaaaaagatcagtgattaccaggagttaggggagaraagacgaataggtggagcacagaggatttttaagttaattaaactatttggtataatactataattggggatacatattatacatttgttcaaatccataaaatgcgcaacaccaggagtgagctgtaatgtaaactatggtttttgagggatagtgatgtgtcagtgtaggttgttaaaatttaacaaatatatcaccctggctggggacattgataatgggggaagctatgcatgtgtggtggtagaaagtacatgggaaatctctgtaccttcctctcgatt

SEQ ID NO: 410780 - DNA, 550 bp, Homo sapiens
gagctttgcacaattctcttctgttgactcttcctggaccactctaggcccttgttatcttcctttctgaactgagcccgtattgctcttatgataatttaagtgttgccttgtctttttgagatacagaaattttgttgagattgtttttagattttattttgttgggtttcttcttttttaattaaaaaaaaaaaaaaacctattgcactctggtgcggaaaagcaacattccaaggaccaaatcagacttctgcttctgtctataacagggtgatcagctccagatttgccctcccttcataaaaaaactaggtaagtagacatgacatttgataacggaaagctcaagattgtgtctcctcagagaatggaatcaaatgaggtgaggcctccagtagccctggttttctgctcagaggtactttcatgattgtggatcagagaagggtcctcaagcaaagtgcagtmttgttgagatgacaagtcaggaacctgcagaggagaaatccatgcaaagaaagagatccagaaacttacttaggagtct

SEQ ID NO: 410781 - DNA, 636 bp, Homo sapiens
tcctcttaacagggtcttttacaaagcaaaagtttttaattttgatgaggcctggtttgttaaatttccttttatggaaagtgtttttcttttacagatagtgttatttttggtatcaagtcttggaactgttggcctagcctaggcccctaagtttatttcctatatttttccagaaaattttataactttacattttacaattgttattgatatattatgaggtaatttctataaaagtgtgagattttgatctagcttcagtttttgaccctagatgtccaattgctccagcaccatttcttgaaaaaygctgtccttccttcattgaattgcctttgcacccctgtgaaaaaccacttgggcattcaatgtttgtgtaggtctatttctaggttctctgttctgccccactgatctatccttcggcaataccatacagtcttgattatggaacctatatacaggttaatcatccctaatccaaaactctggaatccaaaatgctccaaagtctgaaattttctgagcatcaaacatgatgctacaaatggaaaaccccacacttgacctcatgaacacaaactgtgtttcatgcacaaaattatttaaaatattctgtaaaattaccttcag

SEQ ID NO: 410782 - DNA, 636 bp, Homo sapiens
tcctcttaacagggtcttttacaaagcaaaagtttttaattttgatgaggcctggtttgttaaatttccttttatggaaagtgtttttcttttacagatagtgttatttttggtatcaagtcttggaactgttggcctagcctaggcccctaagtttatttcctatatttttccagaaaattttataactttacattttacaattgttattgatatattatgaggtaatttctataaaagtgtgagattttgatctagcttcagtttttgaccctagatgtccaattgctccagcaccatttcttgaaaaatgctgtccttccttcattgaattgcctttgcacccctgtgaaaaaccacttgggcattcaatgtttgtgtaggtctatttctaggttctctgttctgccccactgatctatccttyggcaataccatacagtcttgattatggaacctatatacaggttaatcatccctaatccaaaactctggaatccaaaatgctccaaagtctgaaattttctgagcatcaaacatgatgctacaaatggaaaaccccacacttgacctcatgaacacaaactgtgtttcatgcacaaaattatttaaaatattctgtaaaattaccttcag

SEQ ID NO: 410783 - DNA, 549 bp, Homo sapiens
ctgcctttaagagctataacacacaccgcaaaggtctgcagcttcgctcctgaagccagtgagaccacgaacccaccggaaggaacaaacaactccagacacgccgcctttaagagctataacactcaccgcaaaggtctgcagcttcactcctgaagtcagcgagaccacaaacccaccagaaggaataaactccagacacatctgaacatctgaaggaacaaactccagacacaccatctttaagaactataacrctcaccacgagggtccgcagcttcattcttgagtcagcaagaccaagaacccaccaattctggacacacaatcactatggagaacagtttggcagttcctcagaaaagtaaaaattgaactgccatatgatccagcaatctcattgatggatatatatccataagacatacccaaaagaaaggaaatcagtatatcaaagagatatatgcactcctatgtttgttgcagcactgtttaaaatagctgatttagaagcaatccaagtgttcatcaacagatgaacagatttaa

SEQ ID NO: 410784 - DNA, 549 bp, Homo sapiens
ctgcctttaagagctataacacacaccgcaaaggtctgcagcttcgctcctgaagccagtgagaccacgaacccaccggaaggaacaaacaactccagacacgccgcctttaagagctataacactcaccgcaaaggtctgcagcttcactcctgaagtcagcgagaccacaaacccaccagaaggaataaactccagacacatctgaacatctgaaggaacaaactccagacacaccatctttaagaactataacgctcaccacragggtccgcagcttcattcttgagtcagcaagaccaagaacccaccaattctggacacacaatcactatggagaacagtttggcagttcctcagaaaagtaaaaattgaactgccatatgatccagcaatctcattgatggatatatatccataagacatacccaaaagaaaggaaatcagtatatcaaagagatatatgcactcctatgtttgttgcagcactgtttaaaatagctgatttagaagcaatccaagtgttcatcaacagatgaacagatttaa

SEQ ID NO: 410785 - DNA, 552 bp, Homo sapiens
ttgcctgttctctcttattttggggatctaacaatgaaaataactgaactcatggacatagagagaaggatggttaccagaggatgagaaggttagctgggggctgtgagggaagtgggttggttaagaagtacaaaaattagaaagaatgaataagaactactatttgatagcacaacagggtgcctatagtcaacaataactggagcatactatttaaaataaagagtgtaattggattgtttgtaactcaaaggataaatgctttgaggggatggatttcccattctccatgatgtgattattttacatacatgcctgtatcaaaacatctcaagtattccagaaatatatgcacctactatgtacccacaaaatttttttaaaacaaacaaataggaaaacaggatgtcaaactatctctgttgcagattatatgatcctatatctagaaaatcccatagtckctgcccaaagactcatggaactgataaacaacttcagtaaagtttcaggacacaaaatcagtgtacaaaaatcagtagcatttct

SEQ ID NO: 410786 - DNA, 541 bp, Homo sapiens
tcatggaactgataaacaacttcagtaaagtttcaggacacaaaatcagtgtacaaaaatcagtagcatttctatgcaccaataatggctagctgacagccaaaagaagaatacaaccccattcacaatggccacaaaatgcataaaatacctaggaatacagctaaccrgggagaggaaatatctcttcaatgagaattacaaaacactgctgaatgaaatcagagatgacataaacaaatggaaaagcattctatgatgattgattggaagaatcagtgatgtatgttaaaatgtcatactgcccggagcaattcacagagtcaatgctattcttagcaaactaccaatgtcatttttcacagaatcagaaaatacaactattctaaaattcatatggaattaaaaaaagcctgaatagccaaatcaatcctaagcaaaggaacaaagctaaaggcatcatattgcccaacttcaaactatactacaaggctacagtaaccaaaacagcatggcactggtacaaaaatagatacataga

SEQ ID NO: 410787 - DNA, 625 bp, Homo sapiens
gacatgatataatgccagacagctattaacagatttagtttcttgtttaaatttcatatagaaaatcatagtaagatattggagataaggtgaaactgagaccactaaacaaaagtcttattcattaagactaacaatagaaagaataaaaattttaatgactagattgatatatcatctaaagaaagaaaagagtgaaaaaatgttaataaacagtaataaatacacatacaaygtttgtattagcatttttgttttgaattagcaggaaacaattagcaccatcgtctggattattgcaacagccttctgtctcatcttcctgctttagtagccactagtctttgaatctgttgtaagccttttaaatctaagagatcacatcacttctccacttaaaaatttctggccggggtaaaaggcaaggtcttccacaccccttaggatccagcttctggcccttctgtgacccaatctttactactttactccttccccctctgtatcagccacattggccatagccagtcctcaaacactgcaccacattcctgcctggggcctgtgcacttgctattcctttatctaaaaagacttttgccaaatgagtagaaattttaaaaca

SEQ ID NO: 410788 - DNA, 625 bp, Homo sapiens
gacatgatataatgccagacagctattaacagatttagtttcttgtttaaatttcatatagaaaatcatagtaagatattggagataaggtgaaactgagaccactaaacaaaagtcttattcattaagactaacaatagaaagaataaaaattttaatgactagattgatatatcatctaaagaaagaaaagagtgaaaaaatgttaataaacagtaataaatacacatacaatgtttgtattagcatttttgttttgaattagcaggaaacaattagcaccatcrtctggattattgcaacagccttctgtctcatcttcctgctttagtagccactagtctttgaatctgttgtaagccttttaaatctaagagatcacatcacttctccacttaaaaatttctggccggggtaaaaggcaaggtcttccacaccccttaggatccagcttctggcccttctgtgacccaatctttactactttactccttccccctctgtatcagccacattggccatagccagtcctcaaacactgcaccacattcctgcctggggcctgtgcacttgctattcctttatctaaaaagacttttgccaaatgagtagaaattttaaaaca

SEQ ID NO: 410789 - DNA, 514 bp, Homo sapiens
gctagcacagcagtctgaaatcaacttgggattctggagcttggctcagggaggggcgtacgccattgctgaggcttaagtaggtgggtctatgctcacagaataaacaaagtggcagggaagcttgaactgggtggagcccactgcagctcagcaaggcctactgccctctaaattccacctctggggacagggcatatctgaacaaaaggcagcagacagcttctgcagacttaaacgtccctgcctgacagttctgaagagagcagtggttctcccagcatggcgtttgagctccgataacggacagactgcctcatcaagtggggggtccttgaccctcatgtagcctgactgggagacacctcccagtaggggctgacagacacctcatacagacaggtgctcctctgggatgaagcttccagaggagggatcaggcagcaatatttgctgttgwgcagcctccgctggtgatacccaggaaaacagggtctggagtaggcctccagca

SEQ ID NO: 410790 - DNA, 584 bp, Homo sapiens
atgttccagtcgtctcaggtacagtcatcaaactgcactaaatccatgtatctttgctaaaaggcagcgttgcccagcacagactgagatgaaacatgcttattcttcacttcgtaggacaccatctataaaggcatgtccttgagcaagttattcaaattcactgagtttggtttcctcagaaaacactgctgactccaaggagcaggaataaatacctcagcagagccagcttggaaaagccatgtcaaaaatcagagaagaaatgggtacaataaataccaaccaggagtgccaataaacaggtaatctttttataatttgtccactcagaagggatatcttttgtgatctgcacaaaaacactacatgtgctaatgagggccctcatggcaggcatargaaaacaagcaagcaccaatataaatatagctttcagatacaccagcgcctacctcatttttcctccattttgtcagtccaaagagccaaggacgtctgtatgtagtaaaattctacacatatttagtgccagacttgggctttaattacagtgaggcttctgatctttattatcaacagtc

SEQ ID NO: 410791 - DNA, 584 bp, Homo sapiens
atgttccagtcgtctcaggtacagtcatcaaactgcactaaatccatgtatctttgctaaaaggcagcgttgcccagcacagactgagatgaaacatgcttattcttcacttcgtaggacaccatctataaaggcatgtccttgagcaagttattcaaattcactgagtttggtttcctcagaaaacactgctgactccaaggagcaggaataaatacctcagcagagccagcttggaaaagccatgtcaaaaatcagagaagaaatgggtacaataaataccaaccaggagtgccaataaacaggtaatctttttataatttgtccactcagaagggatatcttttgtgatctgcacaaaaacactacatgtgctaatgagggccctcatggcaggcataagaaaacaagcaagcaccaatataaatatagctttcagatacaccagcgcctacctcatttttcctccattttgtcagtccaaagagscaaggacgtctgtatgtagtaaaattctacacatatttagtgccagacttgggctttaattacagtgaggcttctgatctttattatcaacagtc

SEQ ID NO: 410792 - DNA, 584 bp, Homo sapiens
atgttccagtcgtctcaggtacagtcatcaaactgcactaaatccatgtatctttgctaaaaggcagcgttgcccagcacagactgagatgaaacatgcttattcttcacttcgtaggacaccatctataaaggcatgtccttgagcaagttattcaaattcactgagtttggtttcctcagaaaacactgctgactccaaggagcaggaataaatacctcagcagagccagcttggaaaagccatgtcaaaaatcagagaagaaatgggtacaataaataccaaccaggagtgccaataaacaggtaatctttttataatttgtccactcagaagggatatcttttgtgatctgcacaaaaacactacatgtgctaatgagggccctcatggcaggcataagaaaacaagcaagcaccaatataaatatagctttcagatacaccagcgcctacctcatttttcctccattttgtcagtccaaagagccaaggacrtctgtatgtagtaaaattctacacatatttagtgccagacttgggctttaattacagtgaggcttctgatctttattatcaacagtc

SEQ ID NO: 410793 - DNA, 542 bp, Homo sapiens
tctgcacaaaaacactacatgtgctaatgagggccctcatggcaggcataagaaaacaagcaagcaccaatataaatatagctttcagatacaccagcgcctacctcatttttcctccattttgtcagtccaaagagccaaggacgtctgtatgtagtaaaattctacacatatttagtgccagacttgggctttaattacagtgaggcttctgatctttattatcaacagtcactgccttctgctgtgctagaatgttgatttttagaagtccatcacagtgttctcttaggtgtaaaaatgtaacatccatcttgcaatttgttttctgaaaaccaggagatgaatgtgaytaaaggtccaacaactttcaacaaatgagttgaagtatctgattcttcatagtgaatttgcctttttaggtcagagcaacatttttaatagatgtttacattctgtagatgaaaacttgagatacttcctgtaattgacagaatacattgccctgtccagtcgacatcccagttgatgtttagaggcag

SEQ ID NO: 410794 - DNA, 592 bp, Homo sapiens
atcttttactttctatgcctgaagtaaaaatatacttttcataagaatcaacgtacgttctcttttgccataggagttacaattgggaaggcaaactttcactgacctacactttaagctctccaccaaactgtttcctttagaggcatatttacatttcagcatctgacctttgtccctggtatctggaagctttgtctatgtcacatacatagtccatttatcaagacatgattttttgggctacatgtactttagctctctcttcttyctctctcaaaattaagtttttggtcacctgatcatctgcttaataattaatagctgttagttcatcttattgtctcccacaggtcatcagggaaataaaggcagagagatgtttctgatgtcacaatgcttcaccaaggtttgtagttgggcctctgttcctttcttctgcgatctaggaaacaggaacttccactccttctttccctatttgtcttggtagagggacaaatcagggtaaagtatcctttctctgtcccaaattctactttaccactccttatctagatcataacacactgaacctcaagggagatttaag

SEQ ID NO: 410795 - DNA, 619 bp, Homo sapiens
gattttttgggctacatgtactttagctctctcttcttcctctctcaaaattaagtttttggtcacctgatcatctgcttaataattaatagctgttagttcatcttattgtctcccacaggtcatcagggaaataaaggcagagagatgtttctgatgtcacaatgcttcaccaaggtttgtagttgggcctctgttcctttcttctgcgatctaggaaacaggaacttccactccttctttccctatttgtcttggtagagggacaaatcagggtaaagtatcctttctctgtcccarattctactttaccactccttatctagatcataacacactgaacctcaagggagatttaagctgttcttaactaaaatatttcagcaagaatcataagcctgtagagttggatggaggagggtcatggctctggtttagccaataaagtcctttgagccccacagtggccaagtctgattcctcatgcctcgtgtccttcctcattttataacttatttgtttcctccctctccaaaattttacctcctgaagtccttcccagtctttttttcttgtgatgcaccaccctttcccacaggatagtgagcatccatcctca

SEQ ID NO: 410796 - DNA, 592 bp, Homo sapiens
atcttttactttctatgcctgaagtaaaaatatacttttcataagaatcaacgtacgttctcttttgccataggagttacaattgggaaggcaaactttcactgacctacactttaagctctccaccaaactgtttcctttagaggcatatttacatttcagcatctgacctttgtccctggtatctggaagctttgtctatgtcacatacatagtccatttatcaagacatgattttttgggctacatgtactttagctctctcttcttcctctctcaaaattaagtttttggtcacctgatcatctgcttaataattaatagctgttagttcatcttattgtctcccacaggtcatcagggaaataaaggcagagagatgtttctgatgtcacaatgcttcaccaaggtttgtagttgggcctctgttcctttcttctgcgatctaggaaacaggaacttccactccttctttccctatttgtcttggtagagggacaaatcagggtaaagtatcctttctctgtcccaaattctactttacyactccttatctagatcataacacactgaacctcaagggagatttaag

SEQ ID NO: 410797 - DNA, 671 bp, Homo sapiens
ttctaaagtggggtttccctacctttatgaaattatgccacagtagaaaatggtaattctgagatgacccaactccagctccattttctgccccaaaggctggaggtgtaataatgttggcataccttgatcccacatttggcatactagcttgctgtggtgccccagtagataagccctagtagataagccctaccctggaaattctaacataccttggagagaatttctaaataatgccatcatctsagtgtaccacgtcagtcacagaagttactactaaagagtaaatcaacatatttgttgtacttcaaccaacattactcacctgacaaaatgacttgaaaatgaaagggaagagagtgtaaatatcaaacactattgtaagcatttctttattaatcatttttaatccatgaatatgtcctttcctaaacaggaaatcctgtctgtttacaataataaatagttgaaaactgtgcattatgaaatagttatctgtattgtttaaatatccaatattttccttatgattgttgtcaccttgctaattctaatgttgctgtgctctcctaccttttctcttagctcttcctacattgttaccaatgtaacaggtcctacagccctgttcttcaatccatctcagaatgtacccaagtatgacttgc

SEQ ID NO: 410798 - DNA, 671 bp, Homo sapiens
ttctaaagtggggtttccctacctttatgaaattatgccacagtagaaaatggtaattctgagatgacccaactccagctccattttctgccccaaaggctggaggtgtaataatgttggcataccttgatcccacatttggcatactagcttgctgtggtgccccagtagataagccctagtagataagccctaccctggaaattctaacataccttggagagaatttctaaataatgccatcatctcagtgtaccacgtcagtcacagaagttactactaaagagtaaatcaacatatttgttgtacttcaaccaacattactcacctgacaaaatgacttgaaaatgaaagggaagagagtrtaaatatcaaacactattgtaagcatttctttattaatcatttttaatccatgaatatgtcctttcctaaacaggaaatcctgtctgtttacaataataaatagttgaaaactgtgcattatgaaatagttatctgtattgtttaaatatccaatattttccttatgattgttgtcaccttgctaattctaatgttgctgtgctctcctaccttttctcttagctcttcctacattgttaccaatgtaacaggtcctacagccctgttcttcaatccatctcagaatgtacccaagtatgacttgc

SEQ ID NO: 410799 - DNA, 573 bp, Homo sapiens
ttattacttatctttgtaatgtattatatattaatatttatttcttctagtgccaataatatattcaggggccagaaaaacataactacatctatatttttgtggaaatttttgatatcttcagaagtccactaaagttttatgcaaacacttcktatgtaatacaaaggtcatttctacttaccttcacccatttccttctaatttttattgtcctcaatattagatttatagattcaatatcaattagctttgaaaaaagctataagccataagaatgatcattaatccatacattgaggtttctatattcctcaaatctactaataaacactcaaacatatcaagccatttttctgttactggaagaaaaaaaaccctaatctataatatatttgataaaccactttttaaaaaataataaggaataaataaatctatctttctaattccctaagtataacactttgaaactccaaaaatgttgtttaagatacatatgaaaaggaactctatttccttccaaattcaaaccttgcaaataagtttattataaagattaacctgcttcac

SEQ ID NO: 410800 - DNA, 479 bp, Homo sapiens
aggctaacaatgttaacttgaaaaaaaaaagagaaagagcaagagagaaagagagaataataaagagaaatggggtgagaaaagagagagaaaaaatagagacatttaacagataaccaaatttcatgaacagcttcatggtaattctgaaaatgataaatgtctaattctttttaaaaatataayttactggaactaactctagaagaactagaaaacctgactagtattataaacattaaatgaattgaattggtaatcaaactctttgcacaatgattacctcaaagccagatgtattaatcagtgagtgttaacaaacattcaaaaaggaaacaattctaattccagagaaatactggtaagaaataaaaaaagaagttattatatatatttatatatattatttatatatacttacaatacataatctataaatacatatatatgattttatgaagttaacacaaccttgatac

SEQ ID NO: 410801 - DNA, 543 bp, Homo sapiens
cttctgtcttgttttttgactattatatttctgagattgatgcatgttgtgtttagctatagttcatttcactgttgtacagtattccattgtgtgactatacattcctttatgccttctattaataatagattgtttgttttgggtactttgctactgtaaacaaagatgctgcaaacagtttgcacrtgtctcctagtacacatgtgcaaatctttctctagtgtagtggttcacacattttagctgtatcaggatcacctgaagagcttatttaaacatgattgttgagccttaatcttagtgtttctaatttcgtatggctgtgatgagtcctaagattttatatgtctagcaagttcctaagtgatgctgatgctgcaggtccaggaaccaactttgagaacaactgccctagagtgtatagctatgagtagaattgctgggtcatgaaaaaacagcaatttcaaatttattatataatgccctgttattttccatatattccattatgccaatatagacttccaccagcaatgtgta

SEQ ID NO: 410802 - DNA, 579 bp, Homo sapiens
ccctcctctgcatctccccctttcttctgacatgacctcacccattcaagataatgcatgttgatactgggtatacattcctttttgtttttactttttttccatgttcatataaacatatgcatgtgcatatatatctctgtatatatatacatacatacacacagagacacaaatatcctcacacagatatagatacacatacatttatgtccccatttttgcacaagagtttttgcttcttgctttgtcctgggatttgactttatttctcagattttgccactactaacagtgctaaagtactttaaatattatatttgttcacatgttttgctacatttatttctttgggatagatttccagaattargacttctgggtcaaagggttttgcatatttttttactgtaatgtatattgccaaattactttcccacaaaaaaaactgaaaattttcacatttggcctttttcatcattattgtgaacaatgggtaaagtcttaaaatattttccagtctgataagtattcaagaatatttctttattaatttaacttgcatttctgtaactagta

SEQ ID NO: 410803 - DNA, 579 bp, Homo sapiens
ccctcctctgcatctccccctttcttctgacatgacctcacccattcaagataatgcatgttgatactgggtatacattcctttttgtttttactttttttccatgttcatataaacatatgcatgtgcatatatatctctgtatatatatacatacatacacacagagacacaaatatcctcacacagatatagatacacatacatttatgtccccatttttgcacaagagtttttgcttcttgctttgtcctgggatttgactttatttctcagattttgccactactaacagtgctaaagtactttaaatattatatttgttcacatgttttgctacatttatttctttgggatagatttccagaattaggacttctgggtcaaagggttttgcatawttttttactgtaatgtatattgccaaattactttcccacaaaaaaaactgaaaattttcacatttggcctttttcatcattattgtgaacaatgggtaaagtcttaaaatattttccagtctgataagtattcaagaatatttctttattaatttaacttgcatttctgtaactagta

SEQ ID NO: 410804 - DNA, 634 bp, Homo sapiens
caactaggctttattcctgggatgcaaggttagttaaacatatgcaaacyaataaacttgattcatcacataaacagaactaaaacaaaaattacatgatcatctcaatagagtcagaaacaagtttagataaaattcaacatcccttcatattaaaaaccctcaacaaaccaggcattgaagaaatatacctcaaaataattagagccacttatgacaaacccatggccaacatcatactgactgggcaaaagctgaaagaattccccttgagaaccagaaaaagacaagcatgcccactcctaccactcctattcaatataatgctggaagacctagccagagcagtcaggcaacagaaagaaataaaaggtatccaaacaggaagaaaggagaggcaaagcaaaatggcagaatagaagactgcattgatcgtcccccttgctactcccacaagaacaccaacttaacaagcccacacagaaaaacaacttcataataaccaaaaatcaggagagcactcatagtacctgtttttaactatatcactgaaaaaggtactaaagagttagaaaaaacaggcttgaatttccaatgtcaaccctcccacaacttaggcagcagctgcctggtg

SEQ ID NO: 410805 - DNA, 634 bp, Homo sapiens
caactaggctttattcctgggatgcaaggttagttaaacatatgcaaactaataaacttgattcatcacataaacagaactaaaacaaaaattacatgatcatctcaatagagtcagaaacaagtttagataaaattcaacatcccttcatattaaaaaccctcaacaaaccaggcattgaagaaatatacctcaaaataattagagccacttatgacaaacccatggccaacatcatactgactgggcaaaagctgaaagaattccccttgagaaccagaaaaagacaagcakgcccactcctaccactcctattcaatataatgctggaagacctagccagagcagtcaggcaacagaaagaaataaaaggtatccaaacaggaagaaaggagaggcaaagcaaaatggcagaatagaagactgcattgatcgtcccccttgctactcccacaagaacaccaacttaacaagcccacacagaaaaacaacttcataataaccaaaaatcaggagagcactcatagtacctgtttttaactatatcactgaaaaaggtactaaagagttagaaaaaacaggcttgaatttccaatgtcaaccctcccacaacttaggcagcagctgcctggtg

SEQ ID NO: 410806 - DNA, 567 bp, Homo sapiens
ggtatcctgttaggttatgatggctataattgcctaatcacagttatcaatgagcatggaagcactaagatgtgacctatgacctaatgcatctctaggttctagacatatccttctctgcccacatcatgtaatatgtagcaacgatatttcctcatggtactcatggcatgtgtttattactgtgtaattataccaattataatagtaaagaaactttttctttacctgcttgtctactggcatgacaacccttaaagaagtgggcagtggttagcttagatttagagaaaccttagcagcataatcccctttgacaacaaggcccctagtccagcrcaaattcaccaagtgggccatggggagtaataatggagaaggcactccaacgttcaccttttggttcctagatgcatgttttactgatcagggaaagagcatattaattcccattggctctaagcaacattttattagcctggaaacatttaggtgctgtaactggtgagatcaatggagctcttgaacatgtgccattgttatactttatttgctataaagtggatc

SEQ ID NO: 410807 - DNA, 615 bp, Homo sapiens
caatagatgaatggataaagaaaatgctaatcttatacatctataggtatatatacagctttataataatggaatattattcagcctttaaaaagaagaaaatcctgccatctgtgacaatatagatgaatctggaggatattatcataaatgaaataacccagatacacaaagacaaatattgcatcatctcacttatatgtggaatctaaaaaatttcaaacttacaaaaacagagagtataaggatgattaccaagggtcagggtagtgggagaaatgaggagatgttgttgaaaagatacaaacgtccaattkcaagaagaataagttctggagacctaaagtacagcatggtgactatagtaaataataatgtattggatacttgaaatttactaagccagtagacgttaagtattctcactacacacacacaaatggtaattatgtgagatgatagatatgttaattagcttgattgtcataatcatttcacaatatatgtataaatcaaaacatctcactgtacatcttaaatatatacttttttacttgtcaattataccttaataaagcagagggaaattaatataaacaaggttctatggttagg

SEQ ID NO: 410808 - DNA, 632 bp, Homo sapiens
agtttgaacatcaggatttaagcatttcttttgaagcagtcagcactaatatattccttcattcctgatacacaatgatacatgagttaaaatttaattacacccaccacaaaaaataaacaagttcagatataattattctttatctgcaaccccattcagagcatttggtctcagtctgcatttaatatttacagtactcttcaaatagggatatagtcatcaagtgcccattctatgttcaagattttgatgctaagtcaggcaaggtatgaatccctaggkcaggcaatgtaagtggttaaaaaaaaaaatgaaaacagaacttgaattccttcaagctgatttaccccacagaaatatttagaatggaaggaaaaaataccttacatggtgtctggttttgttttatttttatttatttatttattttttgcacttgagactttttgttttgacttgcctttttttaatttattttttgtgtttatacagtttagaaatgaagttcagcctgctgagaactggtgtcccattttcacgtttttggtttattcctccgagttgcttatatcttttaccaaaatctaaataagtaataagtatcatccattcccatgtttggaagaaag

SEQ ID NO: 410809 - DNA, 566 bp, Homo sapiens
agaaacacattttacctataaagacacacatatactgaaaataaagggatgggaaaagatattccatgtaagtggagaccaaaaaggagcaggagcagctatatgtatatagataaaatagattttgaaaaaaaaggtcactatatgatgataaagtagtcaagagggtattcggcaatagaatataacaattgtaaacatatgtgcacacaacactggaacactcatatatgtaaagcatatattattagagatagacagactatgtcccaatawaatgatagttgcagacttcaacacccccacttccagtgttggacagatcatccagatggaaatccaacaaagaaacattggacctgatctgcattatagaccaaatggatctaatagatatttacagaacatttcacccaatggctacaaaatacacattcttctcctcagcacattggtcattctcaaggatggagcatatgttaggtaacaaaacaaatcttaaaatattcaaaaaacagttgaaatattatcaagcattttctctgaccacagtggaataaaactaa

SEQ ID NO: 410810 - DNA, 593 bp, Homo sapiens
aagccagagtgtgcagaaggtcccctggcttaataaacaactgccttaaaatacctcattaagaagttgttgttgttgttgttgttaattttgtgcattcattagtataatcatayacttttaatttctggaataacctcaggaaaaatacatattgtttccttcagtgataatctagtctggtggatgattctcatgtttataacatttccctactctgtaaatattgtcactaagcatttggatgtgcttaattatgtgagtgagaacatttaaagtgatagtcatttggcataatttatgcaataaagagaatgttgtgaaaaactgctcttgactggtcattttccttaactccacaattaaagcagtcctcttacctttcagatatttctcttttcttcagaaacacagcattgagagtgacttcttgactaagtaaatttttcatatattctttttccaatgatgtagaacccagatatttgtctgaatatacttagatgtgaatgaaatgcattaagtgattgtggccccatagaaatacagcttattaattttttctgttgataaagattcatttcagtggctac

SEQ ID NO: 410811 - DNA, 593 bp, Homo sapiens
aagccagagtgtgcagaaggtcccctggcttaataaacaactgccttaaaatacctcattaagaagttgttgttgttgttgttgttaattttgtgcattcattagtataatcatatacttttaatttctggaataacctcaggaaaaatacatattgtttccttcagtgataatctagtctggtggatgattctcatgtttataacatttccctactctgtaaatattgtcactaagcatttggatgtgcttaattatgtgagtgagaacatttaaagtgatagtcatttggcataatttatgcaataaagagaatgttgtgaaaaactgctcttgactggtcattttccttaactccacaattaaagcagtcctcttacctttcagatatttctcttytcttcagaaacacagcattgagagtgacttcttgactaagtaaatttttcatatattctttttccaatgatgtagaacccagatatttgtctgaatatacttagatgtgaatgaaatgcattaagtgattgtggccccatagaaatacagcttattaattttttctgttgataaagattcatttcagtggctac

SEQ ID NO: 410812 - DNA, 593 bp, Homo sapiens
aagccagagtgtgcagaaggtcccctggcttaataaacaactgccttaaaatacctcattaagaagttgttgttgttgttgttgttaattttgtgcattcattagtataatcatatacttttaatttctggaataacctcaggaaaaatacatattgtttccttcagtgataatctagtctggtggatgattctcatgtttataacatttccctactctgtaaatattgtcactaagcatttggatgtgcttaattatgtgagtgagaacatttaaagtgatagtcatttggcataatttatgcaataaagagaatgttgtgaaaaactgctcttgactggtcattttccttaactccacaattaaagcagtcctcttacctttcagatatttctcttttcttcagaaacacagcattgagagtgacttcttgrctaagtaaatttttcatatattctttttccaatgatgtagaacccagatatttgtctgaatatacttagatgtgaatgaaatgcattaagtgattgtggccccatagaaatacagcttattaattttttctgttgataaagattcatttcagtggctac

SEQ ID NO: 410813 - DNA, 517 bp, Homo sapiens
aaatcaacctatatttatttaacattagccaatgtgctagatgataaattttgctaacccagagaatttaacaggattgacctaaattagagattcttaagtgtttttatcacagcaccctttacaactcttaaaattgttaaggagccaaaaggggtcttttaaaatggagaattattatctatcaatgtttatcttattagatattttaatttctgaaaaaactttaaaatatttaataatttatttttaagacaatacatgaatttcatattaacattcataagcmatttctatgaaaaataaatatattttcaaaacaaaaaattagtgaatggcgtgattttctatttttgcaaatctcttcaacatatgacacaacagaagagtgctaaattcctaaatctgttgcagtatcacatgtcatgttgagaggtgaagccagttggacttccagggtcaaatggggacctggagaacttttctgtctaggtaaaggtttgtaaacgcaccaatc

SEQ ID NO: 410814 - DNA, 573 bp, Homo sapiens
tttaagaaatagttatctaactaaaataactttttgtcatgctttcaagcaaaatgccattgaaaactggaaaatttcaagtggtcaatgcaggagaatttggtaatagaaggtaattcaattgggaccaaaggatctacttccaagctcacccacatggtttttggcagccgttcggtcctcactgactgttcacagcatcactcatcacttcgcagtgcatcyaccacaggtgtggactttgcatggtcttcaggcaagtcctgaaggctattaatctctagcaagaggaatttctctgactgctaaaaccttctctgagaaattatagtgtccactataagctcatccactaatgacatctcaggtcacagggccctagtcctacttacgtgcctcttgactttatatagggagttggtgggactatgaattcacctttctttgtaattctaccatggtaacaatcaaagatcttcagcaaagtctgctcttcagctacaagggatgccatgccccaagtaaactgtctgacttgagcttgccattttctttcctcaaacattgatggca

SEQ ID NO: 410815 - DNA, 552 bp, Homo sapiens
cctgccacaccccaattctaggatacaaaaaccaaatggtcagtggaaactagtgcaagatcttagactcatcaagcaggcagtaattcctttatatccaattgtacccaacccctataccctgctgtctcaaataccagaggaagcagaatggttcactgttctggacctcaaggatgccttcttttgtattcccctgcattctgactcccagtttctctttgcctttgaggatcccacaygtcccaacttacacggacggtcttgccccaagggtttagggatagccttcatctgtttggtcaggtactggcccaagatctaggccacttctccagtccaggcactctggtccttcagtatgtggatgatttacttttggctatcagttcaaaagcctcatgccagcaggctactctagatctcttgaacttactagctaatcaagggtacaaggtgtctaggtcaaagacccagctttgcctagagcaggtcaaatatctaggcctaatcttagccagagatgccctcagcaaggaatgaatacagcct

SEQ ID NO: 410816 - DNA, 552 bp, Homo sapiens
cctgccacaccccaattctaggatacaaaaaccaaatggtcagtggaaactagtgcaagatcttagactcatcaagcaggcagtaattcctttatatccaattgtacccaacccctataccctgctgtctcaaataccagaggaagcagaatggttcactgttctggacctcaaggatgccttcttttgtattcccctgcattctgactcccagtttctctttgcctttgaggatcccacatgtcccaacttacacggacggtcttgccccaagggtttagggatagccttcatctgtttggtcaggtactggcccaagatctaggccacttctccagtccaggcactctggtccttcagtatgtggatgatttacttttggctatcagttcaraagcctcatgccagcaggctactctagatctcttgaacttactagctaatcaagggtacaaggtgtctaggtcaaagacccagctttgcctagagcaggtcaaatatctaggcctaatcttagccagagatgccctcagcaaggaatgaatacagcct

SEQ ID NO: 410817 - DNA, 450 bp, Homo sapiens
cttctctgagaaattatagtgtccactataagctcatccactaatgacatctcaggtcacagggccctagtcctacttacgtgcctcttgactttatatagggagttggtgggactatgaattcacctttctttgtaattctaccatggtaacaatcaaagatcttcagcaaagtctgctcttcagctacaagggatgccatgccccaagtaaactgtctgacttgagcttgccattttctttcctcaaacattgatggcacctaacaatagtcaatcaattccacagtccttagtcacagcgccccacatcactcaaatactgaatatactgcataagccaatttatctccyttctcctgtactccatctcagtcactacaggtgagcagtttaataatagtcaccactataattagtagttttgatgttttaaccacaggattcatca

SEQ ID NO: 410818 - DNA, 576 bp, Homo sapiens
atcatctgaaggtgcaaaaatcactactaatagtaagtacgcacagaaaaacacagagtattataccaccagagaaaatcrtcttcactaaaaagaagacacgaaggaaggaaagaaagaaagaggggaaaaccacaaaacaaccagaaaacaaataacaaaatagcaagagtaagtccttacttctcaataataacattgaatgtaaatggacgacaccctccaatcaaaagacatatagtggctgaacggataacaaaacaagacccaataatctgttttctagaagaaatacacttaacttataaaaatacacataaactgaaaataagggaatggaaaaagatgttctgtgccaatggaaaccaaaaaagagcaagagcagctattcttatatcagacaaatagcttccaagacaaaaatcatgagacaaagaaggtcattatataataagaaaacggccaaactagcaacaggatataatgatataaatatatatgcacccaacacagaaacacccagagaaataacgcaaatattattagagctgaggacagagacctcaataaaataat

SEQ ID NO: 410819 - DNA, 577 bp, Homo sapiens
atcaacaaatagacttagagaaaagtatattaccttttgcactgtgggtgggcctcattcaatcagttaaaggtctcaagagaatagactgaggtctcacaaagaggaaggaattctccttcaagactgtcgtaagaatcaagagcatgacatcaactcctgccaaaatttccaggctgccattctgctgtgcagatttcagacttaccacagtctctgtctttatgcatgcttgtctctctctctctctctctttctgtgtgtgtgtgtgtgtgtgtgtgtgtgtgtgtgtgtgtgyacattctattgattctgtttctctggcgaagcgtagtacagataagttgagattttctttttttctcagcgtaattgagtaaattatattgatattattttgagaacagataaaatcttgtaaacatgtcttcacatatcaaacatttttccaagcaaataaaacatgggcagaaatgaatgtatccagggactttgcattttatcaggcacaccagtgagaacagtggagctctgttgccttcatttataaatgttctgctgattattacccacttga

SEQ ID NO: 410820 - DNA, 537 bp, Homo sapiens
ccaaatgaaattggaaaaaaaagagagcagtttactctttattatgcccaagagaacatgtgatattagtctggggataatctcatgtgtcttaattaaacaaatattatatgaatatgcattggaggctttgactcaattctgatcgtacatgcttagcccaattttagttatatcctcacgatattctagatgttgcaaccactatcagtttcccaactaaacaacagattccatatggacacatyagttttgtagagttcacatcaccagtttttattttacaaacttaatctcttttaattaattttaagtatcaacatcatgtgctgaaggctactcatacaccaatttgaagactagcttataaaaagtctgaaatatttatatattaaattatcagaagttttcataaggttaataagttagatttgcttttatggagtgttgttcagcaaattgtgtataccaattgccaatatctcttactttatgtttcatctgtgcactctcatgtattaggtctcaaatattgtc

SEQ ID NO: 410821 - DNA, 574 bp, Homo sapiens
tctggggacattaaaaatttgaatatagaaaaaaaacatgtaaaagtttttatacctgaagaagctgtggaagcaatggagctgagaacattctaaattaggagattasgttatatccaaaggaagtgttctatggaggccaagaacaaatctgaaaattaagtgaatgatgataaaagctaaggataggagagtaactccctgatactttgtttttacaaactggcttttcaggacttatataccatttattgttgaaatatggcaattttaaaaaacaatttttctatttaaaaatttactgagtggaaagttgttcaaatttgtctttcagagaatggttagtgagttggcttaggaatcagactatatggctttaaatgctatatttgctgtatgcctatgggcaaattatatgaagccctgctgtttggatctccagtttttaattaatgtactatagttcatctgctgctaattttaatgcatgtgaaatactaaatagtctctttttaagggttggaattaaaatgtgaagagaatgatatgaaacatcaaagaagataacatgtgc

SEQ ID NO: 410822 - DNA, 555 bp, Homo sapiens
  misc_feature (1)...(555): n = A,T,C or G
aactagattcgggtttttaaaatccaagcacagaggtgttttcactacattgcatgtttttgtttttccatcaacactaaagcaagtaattttggtttcagaatctaaatgaaagcattgggggttganccccttgggaacctacgtattcgaccaagtcgcttgttttccaaagcatcactggatatttttcacaagcctarttagagttattttattgtggcctaatggcaaagcacagattcctaacagatttctttcttcatgatctaggaacaagttttctgaggcctagttaggttcaaaatgtagttccttctctccagagaaaacaagagcactgaatctaaaaatccagctttctggtttgggaaaaggtgatttctcctatcaggcagtagaataagctgagtagcagagtaaatgtcctagttcctcctttggaaggttgggtgctgccccagtggaaatgtgctataatatgtcattttctgccacaaattgctcctggaggcagaaaggctttgaattcaaagaaaaccacagtcgtggctg

SEQ ID NO: 410823 - DNA, 581 bp, Homo sapiens
cctcctttggaaggttgggtgctgccccartggaaatgtgctataatatgtcattttctgccacaaattgctcctggaggcagaaaggctttgaattcaaagaaaaccacagtcgtggctgatttcccttgcccaggttgtctgactgatcagtgttgtttatccaaaaccataaattatctgttatgttcttcatgtctccttccattaccctagaaagttgttcaggaatagaaatgaggtggctttataattaaagcaagattaagaataatatttaaaactgataagaacagttcagccaaatgaaaggctgctgagcacttttgacactttctattatcattcacatggtggcttttgcttgtgttaattaagaaaaataaacactgctccatgttgaagcataatgtcaaagcaaatacacagtaggaagcataatccatttgccttgctacaagttcatgctactgagccaagccttttgaagaaatcatttagctcagctcagggcaactgtatcaatttctgattctaacccccaatgctaacatttgttaagcttctacttgggccaaaaa

SEQ ID NO: 410824 - DNA, 567 bp, Homo sapiens
aaacaggtgaacaggaaatgagaggacagtgtgcttggtcctaggggtcaaggaccagcaaggaggtcagtatgggtcagagggctataaacaatgagagagaggaaggagagcagtcacatcaaaagggaccatgtagtattgctaaggccatatctgttgctctgaataatttgggacatattggagggaatcagcagargagggatgtgatctgggtaagtttgaaaaagattattctgggtcctcttaaagaataaatggacagtgacaaataagcaaggaaactagataagtaactatggcaataatccaaacaggagatgaaggtgggtaggatcagggtgataaaaagcgaagaggttggattttgaatgtatttttaaagatagaaacaatattgtttatgaatttgctataggggttgagagaaacaaactgagaatgactctcgaaggtttggaagcctgaataaatagaagtatggatttgccatctaggaaccagtgaaaacgtgaggagtgtagatgaggagtgaaattatgagtttagttattaacataagtt

SEQ ID NO: 410825 - DNA, 567 bp, Homo sapiens
aaacaggtgaacaggaaatgagaggacagtgtgcttggtcctaggggtcaaggaccagcaaggaggtcagtatgggtcagagggctataaacaatgagagagaggaaggagagcagtcacatcaaaagggaccatgtagtattgctaaggccatatctgttgctctgaataatttgggacatattggagggaatcagcagaggagggatgtgatctgggtaagtttgaaaaagattattctgggtcctcttaaagaataaatggacagtgacaaataagcaaggaaactagataagtaactatkgcaataatccaaacaggagatgaaggtgggtaggatcagggtgataaaaagcgaagaggttggattttgaatgtatttttaaagatagaaacaatattgtttatgaatttgctataggggttgagagaaacaaactgagaatgactctcgaaggtttggaagcctgaataaatagaagtatggatttgccatctaggaaccagtgaaaacgtgaggagtgtagatgaggagtgaaattatgagtttagttattaacataagtt

SEQ ID NO: 410826 - DNA, 632 bp, Homo sapiens
aacataccaactaattccaagtggttcacagtaacagatctctgctcagccttctttagcattccaattcataaagtaagttaatacttgtttgtcttttcttggaaaaatcagcagtacaccttgactgtaataccacgaaggcttactgaagtccctttatatttttctcaggcattgcatcagggcttaawgacactagagtttcctcaaaattttactgtcattcagtacatagatgacttattgttactctctcccactaaggagtgtgctaaaattgattcaatttaccttttatagcaacttgcatataaaaatcacaaggcttcaatggaaaaacttcagtttttaagataaaaagtccactatttggaacatggtttgactgctgacaggattttccagtcacctgagaggaaaaaaactattcaaagttttcctcaagcagcaaccaaaaatcagttaagagactttcttagacttgcaggatattgcagatcctgggttccaaattttttcttaatagtttcaccattttatgagctcactaaaaatgccataccagagcctttaccttggggagacagtcatgagcaggcttttagcctaatgaagttgaccttacaaca

SEQ ID NO: 410827 - DNA, 502 bp, Homo sapiens
aattcataaagtaagttaatacttgtttgtcttttcttggaaaaatcagcagtacaccttgactgtaataccacgaaggcttactgaagtccctttatatttttctcaggcattgcatcagggcttaaagacactasagtttcctcaaaattttactgtcattcagtacatagatgacttattgttactctctcccactaaggagtgtgctaaaattgattcaatttaccttttatagcaacttgcatataaaaatcacaaggcttcaatggaaaaacttcagtttttaagataaaaagtccactatttggaacatggtttgactgctgacaggattttccagtcacctgagaggaaaaaaactattcaaagttttcctcaagcagcaaccaaaaatcagttaagagactttcttagacttgcaggatattgcagatcctgggttccaaattttttcttaatagtttcaccattttatgagctcactaaaaatgccatacca

SEQ ID NO: 410828 - DNA, 575 bp, Homo sapiens
catctcacaactcaaatgagccccttcagactcctggaactgtacaactgttggaggcttgagggtaaagctgaccagggaaatctctcgaccctgaagcagatgacatcctagttgtggatagctttcccaagatcacagatcaagacttctttaccatcaygaaagtatcatgtgtttttctgttttcctaattttttgtactatttctttccttttccccacaggaaaatccatgggaccataatcagtggatggtgttagcttgagcttatggtctagcacaaaaccagagtaattgttgggtttttggactaattccaaaaaatcaggaaatgattccactgatgccaatgcctctccatgttctcaatgacagtcaccttgaagctccaagagaagaatggaaagctgttcctgatattctaaacatcactgctacttgcttttctacactcactgaaaacaactctctaactttttcaacttataactcagtcattagcaaacataaaaaaccaatccaagtgatgcctgaaaaaggcatagtatgcttccaggcatcacgcactcaa

SEQ ID NO: 410829 - DNA, 544 bp, Homo sapiens
atattgcatgctgttttttaccttatttctttcaattaatatattttgaagacagtttcatactgggccgtggtttgtgaggtcagtatcaaatcaccattatggcttgacttgctctggccttggtcctccttattgttttctgcagaatcatctaatgttgttatttgtaggttatttctaagacttttcactctggggatcaaggatgagttcgccctaatatggcccctrctgcatccgtggtaccatgtgtttgtagagtcatctgtgtgtactttatatcccaggggagggttttttccttagtccttcagtggtaaatttcatatttcttgtcccaattgtttaatatgtctaagggtccttgggcaaagaagccattactagatgctatggactgatttgtgttcctccaaaaaccatgtgttgaagccttaatctccaatatgactctatctaaagatagggtctttaggaagcaattacatttcaatgagctaataaaagtggggtcttcagtcaataggactgtggcctcata

SEQ ID NO: 410830 - DNA, 587 bp, Homo sapiens
actgctgtgatatatccaagccataaactattaaaattggggcatgacatagacaatcctgatccctagtacatttttaatatggttacctttacctggaagttttaaaaattatctatcgtgtacccacataattgtttctgatgatattaaaatgatgatttcataatgaagttgatatttgcagtcaaaattatactaacctgagtgtgaaatatgtctctctctatatatttatatgtaarttttaaagggaagaggaaaaaatcgtgcatcacctgagttatttagtggctattttaagaggacaaactttctgttccaaacttaactgagtattacaaatacatttttaacctgttccctgaataggtttcatacacattgtgtcagccgagtcatttttactgcttttccctcttctccatcttaacctagacacatgattgactggagactatatttgactgacagatataacaatttaaatacaaacacttattaaccctgcaagagcatcttaataaaagaacatggagatagacatacaaggtagatatgctgattttgaagccaattgcattgta

SEQ ID NO: 410831 - DNA, 587 bp, Homo sapiens
actgctgtgatatatccaagccataaactattaaaattggggcatgacatagacaatcctgatccctagtacatttttaatatggttacctttacctggaagttttaaaaattatctatcgtgtacccacataattgtttctgatgatattaaaatgatgatttcataatgaagttgatatttgcagtcaaaattatactaacctgagtgtgaaatatgtctctctctatatatttatatgtaaattttaaagggaagaggaaaaaatcgtgcatcacctgagttatttagtggctattttaagaggacaaactttctgttccaaacttaactgagtattacaaatacatttttaacctgttccctgaataggtttcatacacattgtgtcagccgagtcatttttactgcttttccctcttctccrtcttaacctagacacatgattgactggagactatatttgactgacagatataacaatttaaatacaaacacttattaaccctgcaagagcatcttaataaaagaacatggagatagacatacaaggtagatatgctgattttgaagccaattgcattgta

SEQ ID NO: 410832 - DNA, 483 bp, Homo sapiens
tgctgattttgaagccaattgcattgtaccttaatgtgacagaagcaatgaatcaaatgaaagtctgtgtgaaataattccaaagattttttttyccacacatttaaatcagcacctccatgtaggcaagcagtgctaaaggattatgcaaaggcttaatactctcttttgcaccatatagtatttcaacttagactccaattctcttgttatttttttccattcttgcaaacctgagatgtcttcaggaattcattcattttaatctgttctatgaccatggttggaccttgaccctgctagaacgacttataaatctgagtcattatttctgggtaagacaatgggcaaaaaaggtatatgataataactgctaaccatgaagatggtactatattagatcctttacattattagctcatttaatcttcacaaaaaacaaatggcataggtaatatattgcctttatttacagatgaggaa

SEQ ID NO: 410833 - DNA, 572 bp, Homo sapiens
agtgctaaaggattatgcaaaggcttaatactctcttttgcaccatatagtatttcaacttagactccaattctcttgttatttttttccattcttgcaaacctgagatgtcttcaggaattcattcattttaatctgttctatgaccatggttggaccttgaccctgctagaacgacttataaatctgagtcattatttctggrtaagacaatgggcaaaaaaggtatatgataataactgctaaccatgaagatggtactatattagatcctttacattattagctcatttaatcttcacaaaaaacaaatggcataggtaatatattgcctttatttacagatgaggaaactgaaagtccaagattttttaaaatttgttttttttttttagattcaaggggtacatttgcatgttgttacatggatatattgtgtgctgatagagagggcttctagtatatccattacccaaatagtaaacactatacctgacaggcaattttcaatccttgtcccctttccatctacccctcttttggagttcccagtgtttattatttccatcttt

SEQ ID NO: 410834 - DNA, 580 bp, Homo sapiens
ctttaaaaattacccagtctcaggtatttcttcatagcagcacaagaagagactaatacaacatataggcaatatcacgcattaattttctttctatatctggcttatttcaattaacctaatgtcctccatgttgtcacaagtgacggggttttttaaggctgaataatacatagatagatatcatcttaattcatctgtcaatagaagcttaggttttttcatatattggctattgtgaataatgctgtagtaaacatggaaatgcagatatctctttgacatagtgattttatttcttttgatatattcccacaagtgggattaatgaatcacatggttttatttttaatttttaaagcaacttctatactgatccatagtgttgtaccaatttacatttccaamaacaggatacaaacttccttttcttcacattcttattaacacttattaacttttgactttttgataagttatcctagcagatatgaagtgatatctcattttttttatttccacttccctaatagtgatggtgaatgtatcttttcatataacttttggccatttttatggc

SEQ ID NO: 410835 - DNA, 606 bp, Homo sapiens
tctgaaacttactttcaatggcagacagtgggggcatgataagaatttgctgacattctgccattctcagaagatagccctcatattgggagctgargaaattgggattcctacattcttggctgtgccattctggcgtggaatttctgtcttgctgagttgggaaggggaagtaaaagaatagattttggttcaaataccacaaactctcataattcttacagagttttgtagattttcttgattttttttttgtttttgctgtatacccttaggatcatttcaaaaagcattaatttagttttgatagttttcatcaatttcactggcaagtggctcagcagagatcctcactgtgtcatgccagaagtggaactcctctctattattccttccaactacaatctacctgatctcaaaagaaaataacttaaaaaactgaatagtgtcttagattatctccaagacaggatatttttgtgcaagtgatttttggggagaggcttttaggaaaaggggagtgaggaaaggagaaggggcagggaaacgcactaagcaaggttgtggtctcagctagaacccagcttcaggctgatcccctaagaa

SEQ ID NO: 410836 - DNA, 580 bp, Homo sapiens
ctttaaaaattacccagtctcaggtatttcttcatagcagcacaagaagagactaatacaacatataggcaatatcacgcattaattttctttctatatctggcttatttcaattaacctaatgtcctccatgttgtcacaagtgacggggttttttaaggctgaataatacatagatagatatcatcttaattcatctgtcaatagaagcttaggttttttcatatattggctattgtgaataatgctgtagtaaacatggaaatgcagatatctctttgacatagtgattttatttcttttgatatattcccacaagtgggattaatgaatcacatggttttatttttaatttttaaagcaacttctatactgatccatagtgttgtaccaatttacatttccaaaaacaggatacaaacttccttttcttcacattcttattaacacttattawcttttgactttttgataagttatcctagcagatatgaagtgatatctcattttttttatttccacttccctaatagtgatggtgaatgtatcttttcatataacttttggccatttttatggc

SEQ ID NO: 410837 - DNA, 661 bp, Homo sapiens
ttcaggttgtatctgggggatgactgcctctttggcaaggtggtgtgtagataccaagggcaattacctgcaggaaaggccagctgtgaccaattagcaaccaacattgacaacaggtggggagtgggtgcacttgccaaataaagaagatgtgagtgacacaccaacagtacctattactcctaaccattcatttattctgtcattcatgtakcaaggtgaacactctttcaggggctggagataccaagataaatgagaatcaatctgtgtcttctgtatgtcaagaaagtgattgaaataacaaattgttattgtaaatgggccatgccaggtaaatgaaataatcactttgtccatggcatataaaacaatacagctgacccagcagttctgaggtgctcccttcccatttgaggaaacatattcacaacattgaaataatttgttcaacatctcacatattgttttctcattcattttaacaaagagctattaagcaccttgctaggcactattgttataaggagaaataagccaagacctaaacttaaggagctaactgcacagtggggaattgagaagtagatcagtgaatgcagaacagtctgggaagtgctacattaaaggtcaactgaggaacaatggattcacaggggag

SEQ ID NO: 410838 - DNA, 661 bp, Homo sapiens
ttcaggttgtatctgggggatgactgcctctttggcaaggtggtgtgtagataccaagggcaattacctgcaggaaaggccagctgtgaccaattagcaaccaacattgacaacaggtggggagtgggtgcacttgccaaataaagaagatgtgagtgacacaccaacagtacctattactcctaaccattcatttattctgtcattcatgtatcaaggtgaacactctttcaggggctggagataccaagataaatgagaatcaatctgtgtcttctgtatgtcaagaaagtgattgaaataacaaattgttattgtaaatgggccatgccaggtaaatgraataatcactttgtccatggcatataaaacaatacagctgacccagcagttctgaggtgctcccttcccatttgaggaaacatattcacaacattgaaataatttgttcaacatctcacatattgttttctcattcattttaacaaagagctattaagcaccttgctaggcactattgttataaggagaaataagccaagacctaaacttaaggagctaactgcacagtggggaattgagaagtagatcagtgaatgcagaacagtctgggaagtgctacattaaaggtcaactgaggaacaatggattcacaggggag

SEQ ID NO: 410839 - DNA, 619 bp, Homo sapiens
ataggaaaaaatatactcttctccatgggtactgttttggataagacgagaatgtgtttttattatcacattttattttcaatttgtaaaaactatggagaagaaagttcaggtgcattcaccttgaactatatctaataatgtattctaaatacagttaaaataaataatatgctgcaatttcttttcttsccaaatggcataagtagattaaacatgggctggggctgccataacaaaaaatacaaaccatgtgtcttaaaacaacagaactatattgtttcgtactttttcaggatagatctttagaatcaaagtgtctgtagagttggttccttctgagggctctgagagagaactgctcttgatgtctggcaattcttggtattccttggcttgtagattcatcactctggtctcacctctttcttaagatgatattctccctgtgtcttcacatgactattttcttataaggactccagtcatactgcactccagtatgacctatcatcttaattaatgcgtccataatgcccctactccaaaataaggtcataggtactggaggttaggatttcaatataccttttctagggaacataattcaacccataat

SEQ ID NO: 410840 - DNA, 619 bp, Homo sapiens
ataggaaaaaatatactcttctccatgggtactgttttggataagacgagaatgtgtttttattatcacattttattttcaatttgtaaaaactatggagaagaaagttcaggtgcattcaccttgaactatatctaataatgtattctaaatacagttaaaataaataatatgctgcaatttcttttcttcccaaatggcataagtagattaaacatgggctggggctgccataacaaaaaatacaaaccatgtgtcttaaaacaacagaactatattgtttcrtactttttcaggatagatctttagaatcaaagtgtctgtagagttggttccttctgagggctctgagagagaactgctcttgatgtctggcaattcttggtattccttggcttgtagattcatcactctggtctcacctctttcttaagatgatattctccctgtgtcttcacatgactattttcttataaggactccagtcatactgcactccagtatgacctatcatcttaattaatgcgtccataatgcccctactccaaaataaggtcataggtactggaggttaggatttcaatataccttttctagggaacataattcaacccataat

SEQ ID NO: 410841 - DNA, 619 bp, Homo sapiens
ataggaaaaaatatactcttctccatgggtactgttttggataagacgagaatgtgtttttattatcacattttattttcaatttgtaaaaactatggagaagaaagttcaggtgcattcaccttgaactatatctaataatgtattctaaatacagttaaaataaataatatgctgcaatttcttttcttcccaaatggcataagtagattaaacatgggctggggctgccataacaaaaaatacaaaccatgtgtcttaaaacaacagaactatattgtttcgtactttttcaggatagatctttagaatcaaagtgtctgtagagttggttccttctgagggctctgagagagaactgctcttgatgtctggcaattcttggtattccttggcttgtagattcatcactctggtctcacctctttcttaagatgatattctccctgtgtcttcacatgactattttcttataaggactccagtcatactgcactccagtatgacctatcatcttaattaatgcrtccataatgcccctactccaaaataaggtcataggtactggaggttaggatttcaatataccttttctagggaacataattcaacccataat

SEQ ID NO: 410842 - DNA, 588 bp, Homo sapiens
gccacaccttccactctttgcttggaaatatgtttaatattcctgtttgtgactcagctacttctacatgttccrttgttttacaacatcccacttccttgtaccagaatctattagtttcctaggactgctgtaatgaagtaccacaaactgtcacttaaaacaacggaaatgtattgtctcacagttctggaagctagaagtctgaaatcaaagtgttgtcagggttggttcctcctggaggatctgagggaggatttttccatgcttctctcctagcttaggtttacattgcttatctgccaatccttggtatttgtattagtcagttctcatgcttctactgggtaatttataaagaaaaaaagggtttaatagactcacagttcatgtggctgaggaggcctcacaatcacggcagaagtcacaggaggggaaaggcatagtgttataccgcggcaggcaagagggagctagtgtaggggaactcttctttaagaaaccatcagatctcgtgagacttattcactatcacaagaagcatatgggaaagacccacccccatgattcaattacttcccaccaggt

SEQ ID NO: 410843 - DNA, 588 bp, Homo sapiens
gccacaccttccactctttgcttggaaatatgtttaatattcctgtttgtgactcagctacttctacatgttccattgttttacaacatcccacttccttgtaccagaatctattagtttcctaggactgctgtaatgaagtaccacaaactgtcacttaaaacaayggaaatgtattgtctcacagttctggaagctagaagtctgaaatcaaagtgttgtcagggttggttcctcctggaggatctgagggaggatttttccatgcttctctcctagcttaggtttacattgcttatctgccaatccttggtatttgtattagtcagttctcatgcttctactgggtaatttataaagaaaaaaagggtttaatagactcacagttcatgtggctgaggaggcctcacaatcacggcagaagtcacaggaggggaaaggcatagtgttataccgcggcaggcaagagggagctagtgtaggggaactcttctttaagaaaccatcagatctcgtgagacttattcactatcacaagaagcatatgggaaagacccacccccatgattcaattacttcccaccaggt

SEQ ID NO: 410844 - DNA, 588 bp, Homo sapiens
gccacaccttccactctttgcttggaaatatgtttaatattcctgtttgtgactcagctacttctacatgttccattgttttacaacatcccacttccttgtaccagaatctattagtttcctaggactgctgtaatgaagtaccacaaactgtcacttaaaacaacggaaatgtattgtctcacagttctggaagctagaagtctgaaatcaaagtgttgtcagggttggttcctcctggaggatctgagggaggatttttccatgcttctctcctagcttaggtttacwttgcttatctgccaatccttggtatttgtattagtcagttctcatgcttctactgggtaatttataaagaaaaaaagggtttaatagactcacagttcatgtggctgaggaggcctcacaatcacggcagaagtcacaggaggggaaaggcatagtgttataccgcggcaggcaagagggagctagtgtaggggaactcttctttaagaaaccatcagatctcgtgagacttattcactatcacaagaagcatatgggaaagacccacccccatgattcaattacttcccaccaggt

SEQ ID NO: 410845 - DNA, 535 bp, Homo sapiens
tctgtatactatatgcactgtctgatatggtatccactccctgaatgttgttgttacacactttaaatctggttagtttgactaaggctagcaattttaaactttaatttaaattcaaacagccacatctgaatagagtctcccatattggacagtgtgggtctagaatgttcttgcgatgtgaccagtgttatatagcttttaagtggaagaaatcaccttgctgttcgagacttttggctcagtgcatggatccctattgattttcaaatactggaaaaaatcagccaattaagcacagaacatataattaaggtaggatagaagtgtctgctgtcttggcaatgacaaagcaaaatgggagatacctgaagctggtggcggagcggggagktgggggggtggtggtgcactattttcttttcttataatatgggtattacagttacattgcacaaattgatgagaaaagctttggcacattatttaaatttatctaatttatttaattttatttaattttatagaaccataa

SEQ ID NO: 410846 - DNA, 594 bp, Homo sapiens
gctatcatttattgtacattttctaaatgctagtgtttactctgagtgtaatgttcattttcttacttaatacttgcaataatcctttgacattaattaatttttcagttcataaataaatcaaccgaagactactgagtactaagggactgtaacttgcccaacatcacaaatatagcaaatgttagagccagaattgaaatcyacatcttcccgattccaaagcatatggccttaaacgactatactgtattacttttcaatagctttggagctgttacattgatttcctcgtttatttgttagcaagttgagactcagtaaggagtaatgtcttggccatgattccaccagattttataaagtacatgaaacatattccaggcagtagagtcagcaggatgtaagcatttacatttattgggtaacttccatgtagaaataagttatatttctcccatgtcctgagacataccttgagttaaagacaggctttccaggtgttgtgggcactgtgccagaaatgatgctggaagtgtaacttgcatgataaacaactctgatgatctagcttcttacattaattagcaaatc

SEQ ID NO: 410847 - DNA, 634 bp, Homo sapiens
ttcactctgtgtgccagcagatttagtatcaggtggacaccaccaagctttacaactcgtgccctctgcagtggtggcccaagctgcacctgagcccacctgagtcacatctggagcagccaaagagtgctacgccagaatgcagccagctgagayttgaggcagcctgggcagtgatccctgcagtcccacaggcaccctggaactctgtagtgacctgggtctctcccttgaaaccattctgcactcagtgttctgactctgggcctgtgatggcaaggtagcctggaagatctccaaaatgccctcagggtcattctcccatagtcttgatgaatagcatctggcttccttcaatccgtactaatcttcttatcaacgggaccgttggctacctccttagttttctctcctaaatatgcttttttattctttacatagtcaagctgagaatttcccagatctttcatgttctgcttcttctttgattattaattcagtctttcactcatttctttcttcttatattttactaaaagtagtttaaaataagccatctagtatcctaaacaaatgattagagatttcttcagctaaatatcctagttcattgctcttaaattctgccttccac

SEQ ID NO: 410848 - DNA, 634 bp, Homo sapiens
ttcactctgtgtgccagcagatttagtatcaggtggacaccaccaagctttacaactcgtgccctctgcagtggtggcccaagctgcacctgagcccacctgagtcacatctggagcagccaaagagtgctacgccagaatgcagccagctgagacttgaggcagcctgggcagtgatccctgcagtcccacaggcaccctggaactctgtagtgacctgggtctctcccttgaaaccattctgcactcagtgttctgactctgggcctgtgatggcaaggtagcctggaagatctccaaaatgccytcagggtcattctcccatagtcttgatgaatagcatctggcttccttcaatccgtactaatcttcttatcaacgggaccgttggctacctccttagttttctctcctaaatatgcttttttattctttacatagtcaagctgagaatttcccagatctttcatgttctgcttcttctttgattattaattcagtctttcactcatttctttcttcttatattttactaaaagtagtttaaaataagccatctagtatcctaaacaaatgattagagatttcttcagctaaatatcctagttcattgctcttaaattctgccttccac

SEQ ID NO: 410849 - DNA, 575 bp, Homo sapiens
gagaccatcatatcagcagaccatcaaaaacacatttctttatagttggaaggaaactttgacatcgttatgtccagcactagatgctatgaaaaaagtaaagcccgtctcccaagaccaatctagaaaggttcgaaaattctagatttggtgcacaattttaagcaacatatgaaactcccaatgtccatccatgaaactccagtgcggtccatggaacttagataatgaattttttttctatgaataatgtttaataagaatgggaggagaaataaaaatttctttgaccaacaaatttctcaaaatattttgtcaggggaaaaaatatactgtaaaatttactgtgttctcagcaactatttttgcttggctaatattttcagagatccaggcagatgaataatttacttccagaaaaaatctatcatttccacatacaatgcatttgttagtgtatccagggctttgkgctatctttttggcatactgcatttactctagctgagaagtaattcaaatatagcatattttgaatactaggtacttcactaatcccttcatgctgaaacgat

SEQ ID NO: 410850 - DNA, 621 bp, Homo sapiens
ctctgagtagggcaggggatgttatggctaagataggcgaatgtttcattgtacagatgcagtaagtaagcctcagatggcacaaaggatttgtatgaggtcacaaggataaattttcatagaggcgtttcatacttttttcagtatattcagcagtatcaagaacatttaataagaaatttgatatattaattcattatatttatatcaacacctctcttaaaagctaatttttagatagaacagattcaaaaacctattatcttaagacttaatggaaaggaaatttttcttactcattaattggctagactcctgtgcaatttgccaagaaacgatactcagaaggtctagtttgcaaaagagaatcatttaaagtaatgagtgggtgtcagtgagaacttgtgggtgtaaaggtgaaagtgagccaccagccaatgacagactcctcagtactgtgtgacctaacttcatcagacaaatgtcamtatgcattgcttaaaaaggacacatctgaccctcaaattttacctttaaaggattagaaaatagtaaggtaagaaagtggtttcaatatgaatatcacaaagtgtaagctttaaataaatatattatgcaaaa

SEQ ID NO: 410851 - DNA, 583 bp, Homo sapiens
ttcctctacctactttttctgtattctctttttccatattatttatcaggaaagacatgtgcttacttgtagaaaattcccctcttgattattgcttagaagttgatgtgcatttatagaccagatcaccaagcctggcagaattgcaaatacttagggtttctrtttctgagaatacagaagacaatatatcgtgaacatcctaccaataaaacacttagaaaaaattgtatgaagaaatgataaacatgattttaaacgcacagcagggctctaaagaatgtaagggaaatatcaaggaatgaaaagtgaagaatctgaaatcagacatgagtagacactgaggtttctgctgctttagaggtggctgaaatatttgagagttagagttttacaagccatatatgtttagaaggaaaaatgttggaccaatactaacatccccatgtaaacctgtgatgctgataatgcttcatcttcagttatgagatggaccaggcttttacaaaatggcacctcagagataaagaaaaaataacttgtttattttgccataaattctacataagaaaaagaaaaaaaa

SEQ ID NO: 410852 - DNA, 576 bp, Homo sapiens
gagctggtcttatttatctccttatttatatatttatttattagtgagtttgagcttcttttaacaattttgttctttttctggaaattcactcttcatgttgtcaggctatttttcttttgatttctttgtcttggtcataatactttgcaggagctctttgatactagtgatgttcactttttgcttggtcatatgtattgcaaatattttctctcaggctgtcgtttcattgtgmacttttttctctccttgaacctaagagctaatgtttcatttgagtatttttattccaacttggaagctgaagatctttatagacctataaacaagactacgttgaaatatcttagacttgcaatagaaaaaaaatagtttcagtattcaatcactgaatttaaaatgaagacatttgaagccagatctcagaatgtatatatatgtattctttcttgattgccagtgtgaaccatatgtgtgtgcatgcgtgtgtgtgtgtgtacatagatatatgccataataattaaatcaccccattgtttccaaagtctttgtataggtttggtatctctcact

SEQ ID NO: 410853 - DNA, 431 bp, Homo sapiens
ctagctgggtaaccttgaacaatttacccacctttgttgtgcctcagtttcctcatgtgcgaaataagaataacagtaataaccctattctatcatattgctgtgaggaataaagtagttaayatgtaaagtgtttagaacattgctaggcaccttacaggtaccatatgtgttaactgtcatttttaataccccggaaggtaaaagacccttaatattaatgtaagggagcatctcaaaatgtctcatgaagataacacaaaagttcagaccataaagagttagggtgaactaggagtctggagtctgtgcctgatgaatgtgtagtccctgagaaggacaatacattacacattttctatcactgactccttcctactgccctttgcctcacaaccaggcaggtgtttcccctgaagcacaaggaaatg

SEQ ID NO: 410854 - DNA, 421 bp, Homo sapiens
tcatattgaattgtaactcccacaattcccacgtgttgtgggaggaacctggtgggaggtgacttaatatgaggcaggtctttcctgtgcggttctcatgatggtaaatgagtctcatgagagctaatggttttaaatacaggagtttccctgcacaacctctcttttctttgcctgttgccatccatgtaagacgtgacttgctcctccatgtcttcctccccagccatatggaactgttaartccagtaaacctctttcttttgtaaattgcccagtctcagttatgtctttatcagcagcatgaagatggactaatacatgacctaattaaagaagaccaatgattaacagtggaaagaatatccaacaccgtagatatctcagttggttcagtttacacaattctgactgaaatatt

SEQ ID NO: 410855 - DNA, 519 bp, Homo sapiens
ctctcttttctttgcctgttgccatccatgtaagacgtgacttgctcctccatgtcttcctccccagccatatggaactgttaaatccagtaaamctctttcttttgtaaattgcccagtctcagttatgtctttatcagcagcatgaagatggactaatacatgacctaattaaagaagaccaatgattaacagtggaaagaatatccaacaccgtagatatctcagttggttcagtttacacaattctgactgaaatattgaagttgagcaaagttttctttccatgggtaccaaaaccattgcacacaatgctgctgcagacaagagcagagctttcactggaaactttaaacaagtggaatcaagatgctgaagcatttctttgaagaattgtaacaggggataagcatggcttttccagtatgatcctgaagacaaagcaaaatcaaagcaatggctaccaagagatgcaagtggtccagtcaaagaaaaagcagactggtcaagagcaaaggt

SEQ ID NO: 410856 - DNA, 574 bp, Homo sapiens
attctgcactttggcaatcttttttttttttttgagacagcgtcttgctctgttgcccaggctggggtgcaatggygcaatctcagctcactgcaacctctgcctcctgggttcaagagattctgttgcctcagcctcctgagtagctgggattacaggcgcacaccaccacacccggctaatttttgtatttttcagtggagatggggtttcaccatgttggtccatggtggtcttaaactcctgacctcgtaatctgcctgccttggcatcccaaagtgccgggattacaggcatgaaccaccgcacctggcctcagcaatcttatttattatagttagggatgtttacaaggcgactacataaaatggtgcagaatctcagattaacccaacccattttctcccaaactgatgactagaaagctctaagacaaactccatgatgctggatcataccatttccactgtagccactaaacgttagtgacaaataagttcagtgctatgatttaggtgtgttgtgcttatgtacttgataattgaacaacctttatttcctctattccacacaa

SEQ ID NO: 410857 - DNA, 574 bp, Homo sapiens
attctgcactttggcaatcttttttttttttttgagacagcgtcttgctctgttgcccaggctggggtgcaatggtgcaatctcagctcactgcaacctctgcctcctgggttcaagagattctgytgcctcagcctcctgagtagctgggattacaggcgcacaccaccacacccggctaatttttgtatttttcagtggagatggggtttcaccatgttggtccatggtggtcttaaactcctgacctcgtaatctgcctgccttggcatcccaaagtgccgggattacaggcatgaaccaccgcacctggcctcagcaatcttatttattatagttagggatgtttacaaggcgactacataaaatggtgcagaatctcagattaacccaacccattttctcccaaactgatgactagaaagctctaagacaaactccatgatgctggatcataccatttccactgtagccactaaacgttagtgacaaataagttcagtgctatgatttaggtgtgttgtgcttatgtacttgataattgaacaacctttatttcctctattccacacaa

SEQ ID NO: 410858 - DNA, 640 bp, Homo sapiens
tgatttctgattattgatttaatatatatgtatatatattacatctattatatcctgaaaatactgagaattcccaaaacatgtttcctttaaggtaagtgtttaataaccagtggtgtattcatcattacctttctgtatcactcaacattatttatatgtttattagtatataatgtggtatataggcatttacaatgcttaataaccctcagacttttacttttatgtgtatagagtgttgatggatttctaataaagtttgtcatcctctcaacagagagaatgtgtccgttactgacatatattcaggtttgtctgttatgctaataatcctcttttgctcattttggaaagggattgaattggaaattgtcaatagctgtgaaaagaacaatagtgtttgttcccatcaccgtgaacatgaaattggtgctccccgttgttcctgtaaccatggacaccagcttgattctgatgagaaaacatgcataggtaatgtttggtaaatrccatttcattcaaaagttgctctggattcatttagccctttaatctgtagtacttacagctgtactgtgagccacatctctcaaactgtaaagacaaataaattgaagagtgtctctggctactgaat

SEQ ID NO: 410859 - DNA, 640 bp, Homo sapiens
tgatttctgattattgatttaatatatatgtatatatattacatctattatatcctgaaaatactgagaattcccaaaacatgtttcctttaaggtaagtgtttaataaccagtggtgtattcatcattacctttctgtatcactcaacattatttatatgtttattagtatataatgtggtatataggcatttacaatgcttaataaccctcagacttttacttttatgtgtatagagtgttgatggatttctaataaagtttgtcatcctctcaacagagagaatgtgtccgttactgacatatattcaggtttgtctgttatgctaataatcctcttttgctcattttggaaagggattgaattggaaattgtcaatagctgtgaaaagaacaatagtgtttgttcccatcaccgtgaacatgaaattggtgctccccgttgttcctgtaaccatggacaccagcttgattctgatgagaaaacatgcataggtaatgtttggtaaataccatttcattcaaaagttgctctggattcatttagccctttaatctgtagtacttacrgctgtactgtgagccacatctctcaaactgtaaagacaaataaattgaagagtgtctctggctactgaat

SEQ ID NO: 410860 - DNA, 558 bp, Homo sapiens
gaggatgatggtttccagcttcatcaatacccctgcaaaggacataaactccttttttagaagaatttcrtttctaaatttcctcaactccactcaggttttgctatacacaaacctgaatacactttagattttcatgccactcatagttgttttacttcaaatatcttaaattgtaaaatctgtctttctaatgctagctcattatttgtttatctattttaattcctctctactctatttactatagaggctagcagtttatgagtgtttccctgtgccccgtacagtttcaggcttttcacattttattcaatacatcatttaggtaagatccgtttactggatggtagcagggaacaaaaggataaatttggaagtgataacttagctatgtttggaattctttaacaaataataataataataacaacagataatatttatatcgtgcttgataggttccaggtgctatttgcaagtacttaacatgcattcatccatttaatctgatcaacaactcaattaggtaggtataattttaatctacatttcaca

SEQ ID NO: 410861 - DNA, 558 bp, Homo sapiens
gaggatgatggtttccagcttcatcaatacccctgcaaaggacataaactccttttttagaagaatttcgtttctaaatttcctcaactccactcaggttttgctatacacaaacctgaatacactttagattttcatgccactcatagttgttttacttcaaatatcttaaattgtaaaatctgtctttctaatgctagctcattatttgtttatctattttaattcctctctactctatttactatagaggctagcagtttatgagtgtttccctgtgccccgtacagtttcaggcttttcacattttattcaatacatcatttaggtaagatccgtttactggatggtagcagggaacaaaaggataaatttggaagtgataacttagctatgtttggaattctttaacaaataataataataataacaacagataatatttatatcgtgcttgataggttccaggtgctatttgcaagtacttaacatgcattcatycatttaatctgatcaacaactcaattaggtaggtataattttaatctacatttcaca

SEQ ID NO: 410862 - DNA, 613 bp, Homo sapiens
aagactgtcaaaaagaataaactatgtctgctatttttccttttatgtcctttctctaaatatttttgctttatgtatccctcaaaactatttcctcagatggacatacaatataatatcttaaaagaatgcatattattagcaaatgtattttgtacttaagagctccctgagattgtttccaaacaatcaaaatcgtttcatttttttttttagattgtgkgaccatttaactgagaaccagagtaagataaattattcttcctttgccttttaatatactactctcagatacttgttgattgaaaataaagtgctcctagggtgctttatgttggagattgcactgtagaagtattaggtttggaagaaatattgaagagtttcatgaagactctgctaggttttccatggggccttattttcctgggttctactatagtggcaatcactctatatatcaaaattgcttatttcttccttaaaattctgcagtgcctgatagaatgaatttcttaaggggttaaagatcccattgacttaaatattttctggcatagatttacaccctatacatgtcatagggatgaatgaatgaatgaatgagtagttt

SEQ ID NO: 410863 - DNA, 613 bp, Homo sapiens
aagactgtcaaaaagaataaactatgtctgctatttttccttttatgtcctttctctaaatatttttgctttatgtatccctcaaaactatttcctcagatggacatacaatataatatcttaaaagaatgcatattattagcaaatgtattttgtacttaagagctccctgagattgtttccaaacaatcaaaatcgtttcatttttttttttagattgtgggaccatttaactgagaaccagagtaagataaattattcttcctttgccttttaatatactactctcagatacttgttgattgaaaataaagtgctcctagggtgctttatgttggagattgcactgtagaagtattaggtttggaagaaatattgaagagtttcatgaagactctgctaggttttccatgkggccttattttcctgggttctactatagtggcaatcactctatatatcaaaattgcttatttcttccttaaaattctgcagtgcctgatagaatgaatttcttaaggggttaaagatcccattgacttaaatattttctggcatagatttacaccctatacatgtcatagggatgaatgaatgaatgaatgagtagttt

SEQ ID NO: 410864 - DNA, 599 bp, Homo sapiens
tgccttcataaaaaagaggcccgagggagcttgtttaccccttccaccatatggggatacagcaagaaggtacaatctacaaaaaagatgtacccttagcagacactgaatcagccagtaccttgatcttggacttctcagcctctagaactgtgaaaaaatatttataagctgcccagtctatagtattttgttatagcagccaaacagacaaagatagtagattttaaaagcatacattcactgactgtttcaacaatccccccttttctttatatttttgatattttttgagttttagagcaatattcacaactatgttttgactatataataacatactcccattctcatttatccctaggttgaagatttatatctccctttttccaaaagcactgaaggcagcaagctacaggaagcttatgcatttttacaggatacaaagtgcagaaagacattaaacayaaaacagtattgcctacatctaaaagaggcagaaggaataagtgcttgcaaatagcagatatgagcagaaaacttaaatccaaatttagtatcccaatatagcttctagctactgacaagaaaagaatagc

SEQ ID NO: 410865 - DNA, 569 bp, Homo sapiens
cttcaaccaaaggagagggctttgagagaatcactctgagagcttaatatgagcctcctggaaactggaagattcatgagctggtatctgacctgcttctgaagataagagactacataatgacacttcaacaacctgcaaagtaaaacagcacatttcctacargttggatagcggccccacagaagttatccttgaagaggacgttcctagaaaggggtggaggacaagagccggatgaggccagagtgaagaagtccatcatttctttcttccccacttttgagcttgtgataggcctggctagccaagggaacaagctttatatttgattagaaattgaagttttgatatttttaattgaattatacaacaaaaattgagtgactagaaaagttttgtgagttttctggaactttatccacaaccagagaagcaagtatcaacagagatgctgaacagagcagagatacaatgacgtgctgcacaatgtgactgagttcatattcatttatcccacaaaaatacttagatccttctcattactttcaaatcaaaaacaaagccta

SEQ ID NO: 410866 - DNA, 601 bp, Homo sapiens
tattagtgttcaataaatattgcatggcagaactgataaaggaaggcagaattttcacaaagatctatgaacccaacaaagccccaagtcagaaaacctgaggcttaatccttgctaatgacactacagattattttgcaaaccattytccattgactctgggcctctgttttctcacctataaaataaaggggttggatttttaagcctccatccacatccttctcaggagctcctgctttagcaagacacacaatgtaattctcttatgtattactcatgtttaatacctgtaaaatgccacacattacctgggctgtgactgttgccaattactgtaacattgttttctatcagctcccagctcaaagccagtttggcaggcacaagtgaaagatcgcatagagtttacacagcagtggccacagtaagaaagaccttcagcacactcatttatatctgcaggaagacagacacaacagctatgtcttaggagctataatgatgactttttgacaaactacaataatggaccaatgcacctgctcccacttgacccccacccccaacatccactgtaacagtaagtaccacataggtt

SEQ ID NO: 410867 - DNA, 627 bp, Homo sapiens
tattagtgttcaataaatattgcatggcagaactgataaaggaaggcagaattttcacaaagatctatgaacccaacaaagccccaagtcagaaaacctgaggcttaatccttgctaatgacactacagattattttgcaaaccattttccattgactctgggcctctgttttctcacctataaaataaaggggttggatttttaagcctccatccacatccttctcaggagctcctgctttagcaagacacacaatgtaattctcttatgtattactcatgtttaatacctgtaaaatgccacacattacctgggctktgactgttgccaattactgtaacattgttttctatcagctcccagctcaaagccagtttggcaggcacaagtgaaagatcgcatagagtttacacagcagtggccacagtaagaaagaccttcagcacactcatttatatctgcaggaagacagacacaacagctatgtcttaggagctataatgatgactttttgacaaactacaataatggaccaatgcacctgctcccacttgacccccacccccaacatccactgtaacagtaagtaccacataggttccatattctttatataaaggagtatt

SEQ ID NO: 410868 - DNA, 601 bp, Homo sapiens
tattagtgttcaataaatattgcatggcagaactgataaaggaaggcagaattttcacaaagatctatgaacccaacaaagccccaagtcagaaaacctgaggcttaatccttgctaatgacactacagattattttgcaaaccattttccattgactctgggcctctgttttctcacctataaaataaaggggttggatttttaagcctccatccacatccttctcaggagctcctgctttagcaagacacacaatgtaattctcttatgtattactcatgtttaatacctgtaaaatgccacacattacctgggctgtgactgttgccaattactgtaacattgttttctatcagctcccagctcaaagccagtttggcaggcacaagtgaaagatcscatagagtttacacagcagtggccacagtaagaaagaccttcagcacactcatttatatctgcaggaagacagacacaacagctatgtcttaggagctataatgatgactttttgacaaactacaataatggaccaatgcacctgctcccacttgacccccacccccaacatccactgtaacagtaagtaccacataggtt

SEQ ID NO: 410869 - DNA, 557 bp, Homo sapiens
ttcaacccaactattatgatacataaatgctttcattagtttcttgtgaatgtttctagacattctttatggaaatataagtaatacagaacaatatacattgttctactccttgctttttttgatagagagggattgagttgaatctgcagattaatttggggagtattgccatttaaacaataggatgtctgatctatgaacatgagatatcgttccatttgtttagatttttacttcagaaatgtttcctagttttcagtatatcacttttgcacttattaaatttgttcttatgcawttttttctttttgatgctgtggtaaatggaattgtttcttaatttcacttctgcatgctctatgctagtatattaaaatataatttttgtgttcatcttgtatcatgcaaatttgttgaatttttattagttctaatagtttttaaaagtatatttttaagaattttctatacacaaaatcatgtcatctgcaaacagatattttatgtttctttcaataatgatgcctgctatttgttagtttatttatttattt

SEQ ID NO: 410870 - DNA, 443 bp, Homo sapiens
gtagccgttagggcgcagtatcggcagcttgacacccaccaagcaaaagtttcagcctggaaaaaaaatgggggggaagggtggatgaaaaggagggagagaaggtggaaatggtttttttttttttttttctattttctttcytttttttttttttttttttgggccaacagccgtttttctagttccaagttttaaatacatggaaggaagtccgggagaaccatatgaaggagcaggaggagaggaagaaactttttttccttcttttccaggagtagctggaaattaagatcgggttccttttctgccagcttggaagggcaaccccatgactgattgcgattctgaggatgtctatgcaaagttggattcttgttacagtgtatccaatctgaagtattgcacatctgaactgggactgttaacactgatgccaatac

SEQ ID NO: 410871 - DNA, 563 bp, Homo sapiens
ctgatcaccttgccagatgggaagagccacaggagagcatatgcctgagggtggctaataatgtgtatttttctttgccctacatatttgtgtgatgcctgatggtaatggatagctgtaaagactcattatgtcctgtgtagctgcaggggtatgcatcttccttctgtgttmctgattgggaggctgagcccacagagaaccatccagggcacacaggcaaaccctgctgtaagaaactcagtatatgaacatccggaccaacaaaaaagtggatggtattaaagcaattttaaaaaatcattcttcatttgaagaagggatccactggcatttctttaaataggaaaccatggctgtttttaggttgaggagttaaaacctacctaataatgaatgtgatgggccaagaagggggaaggcagaaaagcctaaagatgtggtattagtttccactcatggtaaatgagaagtgaagataaaacacccctgaaaaagtgcatctctctagaaatagatctggatttgcaggcattccatttatgggcacctgtttcagaagt

SEQ ID NO: 410872 - DNA, 569 bp, Homo sapiens
ttcaattacctcctactgggtccttcccaccacatgtggggattatgggtactacaagatgagatgagatttgggtggggacacagccaaaccatgtcacatggtgatgcctctgctatctgaacctgtccaaggtccctaagtgaaaggatgaggatcycattgtttgcctcccacaacaggctaggcccagatgaggatgatagaattacagtgaaggaggaggagcccagttctcccatttgccacccacagtacagcttctgtagcatccaggtttgtgtgtctgtcaagtctgtttggacctatgggttaaagagcagcacttagataacaactggtttgttctctctgtctgtcttcttaccccctctctctcaatcaatcatctatctccctacccatcacctatctttttccatctatttatctatacatgggcacatgcatgtaaacatagataagtatgtattttggaaagttttacttgcaaaggaatcctacattgggttccccctaaagcatatggcatgtcttgtgcatatctgcacgttccctggagcaaaata

SEQ ID NO: 410873 - DNA, 569 bp, Homo sapiens
ttcaattacctcctactgggtccttcccaccacatgtggggattatgggtactacaagatgagatgagatttgggtggggacacagccaaaccatgtcacatggtgatgcctctgctatctgaacctgtccaaggtccctaagtgaaaggatgaggatcccattgtttgcctcccacaacaggctaggcccagatgaggawgatagaattacagtgaaggaggaggagcccagttctcccatttgccacccacagtacagcttctgtagcatccaggtttgtgtgtctgtcaagtctgtttggacctatgggttaaagagcagcacttagataacaactggtttgttctctctgtctgtcttcttaccccctctctctcaatcaatcatctatctccctacccatcacctatctttttccatctatttatctatacatgggcacatgcatgtaaacatagataagtatgtattttggaaagttttacttgcaaaggaatcctacattgggttccccctaaagcatatggcatgtcttgtgcatatctgcacgttccctggagcaaaata

SEQ ID NO: 410874 - DNA, 569 bp, Homo sapiens
ttcaattacctcctactgggtccttcccaccacatgtggggattatgggtactacaagatgagatgagatttgggtggggacacagccaaaccatgtcacatggtgatgcctctgctatctgaacctgtccaaggtccctaagtgaaaggatgaggatcccattgtttgcctcccacaacaggctaggcccagatgaggatgatagaattacagtgaaggaggaggagcccagttctcccatttgccacccacagtacagcttctgtarcatccaggtttgtgtgtctgtcaagtctgtttggacctatgggttaaagagcagcacttagataacaactggtttgttctctctgtctgtcttcttaccccctctctctcaatcaatcatctatctccctacccatcacctatctttttccatctatttatctatacatgggcacatgcatgtaaacatagataagtatgtattttggaaagttttacttgcaaaggaatcctacattgggttccccctaaagcatatggcatgtcttgtgcatatctgcacgttccctggagcaaaata

SEQ ID NO: 410875 - DNA, 573 bp, Homo sapiens
tctggtcctggagccaaacttagtgggacgctgggtgcagggcaaatccctttgtgtgccctgactcttcacaccaaaaccccattatccaggaaccaccgtgggggaaaggggaagctgtaggtcctagagctaaaagaattaagaatgaaatgttccatagggacggtgtatataacagaaactattattttctgagatgcagttgtgccagctactgtacttactggtaattagtggttacaaccccctattgcatttgaataaatgcaggcycatcgagaggcaggtgattttcctaagatcctagagcttcccagatggattcctcctgcacactacactgtgctgtagggacgggcaccccataagagccatccggattgcacaggtgacagtgctggggagtcttcatgagaaccactgggcagctaagcactagctaagaattctttcttcctttctcttttatttaacaaatgtttattggagcctaggaagacctccactccctaaaaatactccatggaatctgaagcacagtccctgattcaggaagtttgcacagtagtg

SEQ ID NO: 410876 - DNA, 494 bp, Homo sapiens
tttttttttttttttttttttgaggcagggtctcactctgttgcccaggaagaagtgcagtggtgcaaacattgctccctgcagacttgacctcctaggctcaagtgatgctcctacctcagcctcccaagtagctgggaccatgggtgtgtgccaccacacctggctagaattttttgtagagacaaggtctcaccgtgttacccaggctggtcttgaactcctgggctcaggtatcctcccaaagtgctaggtttacagrcatgaaccagtgtacctggccaattcctggagctttttactgctacagactgccatgtgattcaaattaggctttcagaatgacctcctactccacagaactccattttcactgtcagccacagtcctagaaattccacccttagaaagtctttcctgtaagttaaaccttgttatgagtagttaaaatacagatgtcctagagaagggccataccatcttatcagtcatgt

SEQ ID NO: 410877 - DNA, 645 bp, Homo sapiens
aatctgtaagggtctgcagcaacctcagtttttgcctcctcctccaaagaattcgactgaggggcataaagcaagagagaccaaggcaaacttcagagtaggagtggaagtttgtttaaaaggctttagaacaggaaagaaaggaaaggaaagtatgctcggaagagacccaagcaggcactgaggtcaagtgtggtgtttaactttgatcctaggactttataggccagcccctttcccgtgattcttcccttagagtgggctgcccgcatgtgcagtgccctccttatgcttgggaggtgagtacatggtgtgtgtttaggaagttgtacatagcccatctgaggctttctttgcttctttggtggtgtgtccctatgtattagtctgttttcatgctgctgacaaagacatacccaagactgggaagaraaagtggtttaattggacttacagttccacatggctggggaggcctcagaatcatggtgggaggcaaaaggcacttcttacatggcagcagcaagagaaaatgaggaagaagcaaaagtggaaacccctgataaacccatcagatctggtgagacttattcactatcgcaagaatagcacaggagagactggcccccatgattcaattacctc

SEQ ID NO: 410878 - DNA, 281 bp, Homo sapiens
gccatagctaacagcctcggcagataasagcctttcctattatcaagttttcttgagaaagccttttttccgcccccgtcaggaagtcagtccttattcctaactaaaagttgtaaaatttagctgtccttagtaaaggtggaacacatggtcctcagcttctgttttatttattttttttttgtatttctgatggctgttgttatgtcactcctacctgagttagaggccacagtgctgtttgctttcctcctatattttattctctagcccttaaagga

SEQ ID NO: 410879 - DNA, 281 bp, Homo sapiens
gccatagctaacagcctcggcagataagagcctttcctattatcaagttttcttgagaaagccttttttccscccccgtcaggaagtcagtccttattcctaactaaaagttgtaaaatttagctgtccttagtaaaggtggaacacatggtcctcagcttctgttttatttattttttttttgtatttctgatggctgttgttatgtcactcctacctgagttagaggccacagtgctgtttgctttcctcctatattttattctctagcccttaaagga

SEQ ID NO: 410880 - DNA, 585 bp, Homo sapiens
ttgatgctggggtaggaatgccacaggactggccaggagaatagtttcacagctgctgttgtagttggcaagagaaagaggctgtgaaatgaaatattacacaggattgccttagacactcaatggaaaacttttttccctccttccaccagaggaaatgaatgcatgctgatggtaatgagaaaatgasgctctgaaagtgcctgcttttccttcattttcatctttcccttcttttctctgaatcctccctgcccttgtgtcaagcttcattcctggttctcccaggtcggaggaacttgaagcagtgtttgtcaaccagtcttgactgagaggtgtctgagaagactgggctctacccttgcaggagtcagattgggttccagaatgatctttgctcttgtttctgctttgaatgaatggtttgcacatgtctcaatctctggcatcacatcccagcagtatcttctctcctgtttatcctgaggcaggattttgtattggccgcctgatagtttggccccccacaatgaattaaatttcaggagcaggaaaatgggaacccctgtcttctgtgtgtaagag

SEQ ID NO: 410881 - DNA, 625 bp, Homo sapiens
cagtctggtgatttacacggagtaacagtctgctgagccagcatgctaggaaatggtgctggaagtttgtagsttgttttaagacagtcactgagatggtaacagaccctatttaatatatttgggggctgggcatggtggctcctgcctgtacaagacttacccaaagcaagtaatgagaacatatgaagcaccaattagtcaaggatccctaactccatgaaatccttgactttccagacttcccaacaggatcaggactagggtgagatgagtgacgcactcggctcaggtacaaaatttaacaggtgccaataaactcagtagtataaatattttagtgcaatatttaaaattatttaaaatgtggatattgtgtccattctggattctcacatttttatttttaaaaaattgtattaaatctttatcttgattacgtttattggtaccctttacattttgcctctgaaaagtatctcactcatctcactttggtgctggctctgcttcccaaatgcattttcagaagatcaagccatatttgccactgccttccatcacatgccctggaaagggggaaagaggcttcatgagaatagcagagtggaaggaagaagcaaaa

SEQ ID NO: 410882 - DNA, 627 bp, Homo sapiens
atataattattattattttttagttcttgaggttttgatagataaattatgctctgtacctttggggaaaatacttaaactccctaaacttcaatttcatcctcttaaaatggggataagtatatcacctgtctcaaacgactattttaaaaactaaaaaacaaaatgaaacaacaatgtgaaagccctaaaataagtatataaagtgtttattacaatatcttgaaaatattaaggcaatctataagggttatctatttttattatttttgattaataaactacacaatagtagtcaatgtggctagcaggaactgtgaatatctggtctgccttttggaagggcatgtttaagggtaagccccataaaatgttatacagcatttcaaaaccatactgctgtagctcagttctctagctttctaagtcaagtacacactaagaattagggcagtctttctgtagtgcatagaacaccccatcagwatcacctggtgtcatcatagacatgtagaaactaccttagacccattaatttgggatcttggagtcaagatcccaaattaaagttggacattgggattttaaaaagctctcctggtgattcttaggtgaattaaaatttga

SEQ ID NO: 410883 - DNA, 540 bp, Homo sapiens
aagtctatcaactgatgaatggataaacaaactgtggtatacccacacaatggaatgctaactggcaataaaaataaacaaactactgatgcatgcaatgatgtgcattaatctcaaatgtattataataagtgaaagaaatgagactcaaatggttacatgccatatgattccatttayataatattgatatggtttggctgtgtccccacccaaaatctcatcttgaattgtaatcccccaaatctccataatccccacgtttcaagggtcagaccaggtggaggtaattggatcatgggggtggttccctccttgctgtcctcatgatagtgaatgagtctcatgagatctgatggttttataagcgtctggcatttcccctgctgacacttactctgtcctgccactctgtgaataaggtgcctgcttctcctttgccttatgccatgattgtaagcttcctgaggcctccccagcaatgcagaactgtgagtcaattaaacctttcctttgtaaattacccagtctcaagtattt

SEQ ID NO: 410884 - DNA, 522 bp, Homo sapiens
gatacagctactttgaaaaactaaagacacacttatgactcagcaattctgttcctaggtgtttatttacccaagagaaatgaaaacgtttgtccatacaaaaacttgtacatggatgttcatagcagcattattcataacagacaaaaagtggagacaactgaagtctatcaactgatgaatggataaacaaactgtggtatacccacacaatggaatgctaactggcaataaaaataaacaaactactgatgcatgcaatgatgtgcattaatctcaaatgtattataataagtgaaagaaatgagactcaaatggttacatgccatatgattccatttatataatattgatatggtttggctgtgtccccacccaaaatctcatcttgaattgtaatcccccaaatctccataatccccacgtttcaagggtcagaccaggtggaggtamttggatcatgggggtggttccctccttgctgtcctcatgatagtgaatgagtctcatgagatctgatgg

SEQ ID NO: 410885 - DNA, 540 bp, Homo sapiens
aagtctatcaactgatgaatggataaacaaactgtggtatacccacacaatggaatgctaactggcaataaaaataaacaaactactgatgcatgcaatgatgtgcattaatctcaaatgtattataataagtgaaagaaatgagactcaaatggttacatgccatatgattccatttatataatattgatatggtttggctgtgtccccacccaaaatctcatcttgaattgtaatcccccaaatctccataatccccacgtttcaagggtcagaccaggtggaggtaattggatcatgggggtggttccctccttgctgtcctcatgatagtgaatgagtctcatgagatctgayggttttataagcgtctggcatttcccctgctgacacttactctgtcctgccactctgtgaataaggtgcctgcttctcctttgccttatgccatgattgtaagcttcctgaggcctccccagcaatgcagaactgtgagtcaattaaacctttcctttgtaaattacccagtctcaagtattt

SEQ ID NO: 410886 - DNA, 571 bp, Homo sapiens
cctgcttctcctttgccttatgccatgattgtaagcttcctgaggcctccccagcaatgcagaactgtgagtcaattaaacctttcctttgtaaattacccagtctcaagtatttcttcatagcagcgtgagaatggactaataaagacattctggaaaaggtaaaattattggaacagaaaacagatcagtggtttgccaggtgctggtggaaggggaaaagattgactataaaagggcatttttttgaatgattaaagtgttctatatcttgattgtggtgatggttacacaactatatgtgtttgcaagaataaaaaagctgacttttactctatgtaaattatacttcaataaacctgactaaaaaaatagtacacacaaatttggacatagactgatctgacacaccatgcttttctgaayttgaattccagtgtgtgaaggctctagtactaaaattctgacaatatgcattcctagatgaatgtttcaagcaagcactttgcaggatagtttcaatttattaaggtggaagatggaccaatggtactagatataatatttagtt

SEQ ID NO: 410887 - DNA, 571 bp, Homo sapiens
cctgcttctcctttgccttatgccatgattgtaagcttcctgaggcctccccagcaatgcagaactgtgagtcaattaaacctttcctttgtaaattacccagtctcaagtatttcttcatagcagcgtgagaatggactaataaagacattctggaaaaggtaaaattattggaacagaaaacagatcagtggtttgccaggtgctggtggaaggggaaaagattgactataaaagggcatttttttgaatgattaaagtgttctatatcttgattgtggtgatggttacacaactatatgtgtttgcaagaataaaaaagctgacttttactctatgtaaattatacttcaataaacctgactaaaaaaatagtacacacaaatttggacatagactgatctgacacaccatgcttttctgaatttgaattscagtgtgtgaaggctctagtactaaaattctgacaatatgcattcctagatgaatgtttcaagcaagcactttgcaggatagtttcaatttattaaggtggaagatggaccaatggtactagatataatatttagtt

SEQ ID NO: 410888 - DNA, 591 bp, Homo sapiens
ccaaagagctttagtgtttaggaataagaacgtctgacagtgggaaaagaggggagataggagctaatacatactttttttttttttttttttgagatagagtctcactctgtcatccaggctggagtgcagagtgcagtggcgcaatcttggctcactgcaacatccacctcctgggctcaagcgattctcctgcctcagcctccagagtagctgggaccacaggtgcccactacaatgcctggctaattaaatatgcaaatttttgaactagggctcagtttgtttgckcattctttaatctgaaacagccattattattatcatttttgcctttgctagttgtattagaattctccagagaaacagaactagtagggtgtgtgtgtgtgtgtttgtgtaataaatacagcataaagatatatgagaatattttttagggaattagctcacaaaattatagaggctgagaagtccagtgattggccatctgcaagctggagggccagggaagctggcagtagggctcagtccaagtctgaaggtctcagaaccagagaagccaatggtgtaactctcactgcatggcca

SEQ ID NO: 410889 - DNA, 544 bp, Homo sapiens
aatcccttgtggggagaggaaagtcaagcttcaatgctttgctggcccactcttactctcctcctcactgtagtgwggctactacctgcatacccaacccttgaagctagactgttttgcttgggtgtctgtttcctctggctgtatctggttcctactcttggtcgtaaattcctccagggcaggacttatgtcaaaagactttgcagtatattagttcacctttacccttactacctctgcaatgattggaatgtccccttcaaaaattcaagttgaaacttgtcattgtaatagtatgaagaggtgggacctttaggaaatgattaggtcatgaatgagttaattccattatcacaggagggttagttatttcgggagtcaattgggttcacatgcctcccccacccctaccccagtatgatgccctccatcatattttgacacaacaataatgccctctgtcttggacttcccagccttcagaactacaagccaaacaaatctctttctttataaatctaccagtctatggtatttggtt

SEQ ID NO: 410890 - DNA, 575 bp, Homo sapiens
aaaacctgacaagctctagcccctccgcagggtaagtggtacctccaggtaaaatgattagttkgttccagcccctctgcagggtaagtggcacctggggtaaaatgactgcctggagctggcagctgctttccctgctctcgcgggccctgcagggaagcggggaagggaagggggcacagcgctgggcacagaggggctctcagaccctggactcaactgtttcagggtcatctgaaacagtcaactgtttcctctagcccattccctgcctccaggcgaggatttgcctgaacgtggaaagaggaaggatcctcccagtgctgtcaaccccagattccacctccctgtgggggactgtcagcgcaggccctgacaacgcagagaaagacacaggacccacctgggccagtgacagcaggagctccgggtgccacaggtgagggtggggatgcctggagcaccacggggggcctggtttagtctagagccaggttttccatacaccttagagtgcacctcagggagatgcaaattttaccccctaacacagcatacacgcagaaacacattta

SEQ ID NO: 410891 - DNA, 568 bp, Homo sapiens
aaaaaaaaaaaaaaaaaggactaaagtgttgaagtagcatttctcaccaactcattttttgattgcagcaaacaaagttcagggaatttgcaatgtatctagggttaatggggtagaaaatgaaaaatacccataaaaatggtcaagctgatgagagttgtagagtgaaatgatttgaaattggatttataaagatctatacatcagttttcttttctggttagaaaactaaaaccaaaacaaaacaaaaaaaaaaaaacaaacaaaatttaaaaaagattaaagtcccaagcagttttaaagccataaaattttagaaatggtgtgtaaccaaagttaaccaatcagccttcttcctcttcctattttaaatgaggaaactgaggctgagaatgaggaaataaatcatagagtttttaaagaaaagactgaaatcatatagktcaatctgctctttgtgattcagagagattgaaagatttcaaaggaacacaaaggtatttactacccaagccaggactatccactggccactttctttctgctatcaactattttttaaaccaaa

SEQ ID NO: 410892 - DNA, 609 bp, Homo sapiens
ttcttgctaattgtatagtccgcttcattttgacatagtgactgattcataagggtaggacagtcaatcaaatatatttgtagaattaaatgtggaagaaaaaatatttgtgcatttggttaaaatatcaaggactggatttaccctctttccagaaacaagtaaaaactgtatacagcatttgaagcaatggcactcgacattggcatgaggcagtggatggaagtgattgctagaagatggataatgaaagaggtgactggtaagagtgccccagtgcactgcctgctacaaattgcaagctgggtttagggaggggcaatataggcagagcaagacttctcccagcattgagaaggagctgggagtttgggaaagcccaaargtcacaagagtttacattcatttttattgctaagctacttcaatttgggtttcagtcatttttaatgaaaggagccctagtacaccttatattcctgtctgtttcccttgttcctgagttccttttttaaactggtaatatctcagacattgctgaagtcacatgccaacatctgacaagtgccctttacgatgtagcctcaagtatgtaagcggcaagaacca

SEQ ID NO: 410893 - DNA, 644 bp, Homo sapiens
gttttggttgtttctgctgaacttcttatattatgttccttcttgtcaatcagttatcagattaaatatcatctccagcctcacaaactaaaytagccagtctgtcttaatgtgtgatttttaattcttttaatatgtcaccataagccattttccttttttggtatatttgtttattgtctatttcactgcaataaaatgttctcttcctgagatgaaaggccatagctgacttgtttattgcttcatttctagtgcgtagatccatagctaacatatactatgttttctcaagtttaatatgctcagaaaaaaagcataaaatgcacagtcttattcctatgtgtatatgcaatttacatttattctaacatgaaaattagttgagcataaagtagcagcatttaacatgatcagtacaaaacaaaataaaacaagaagctttaaataaaagaaccattggcaaataaaaattgtctcaaattgaaacagaccttttttcaagaataataatagttggcatagagtctctttattctgagattggaagtagtgcactgttattcaaaattagagaatttattcctcctcattttctctagttctgtgttacagtgactctcgttggattacctagatgagct

SEQ ID NO: 410894 - DNA, 644 bp, Homo sapiens
gttttggttgtttctgctgaacttcttatattatgttccttcttgtcaatcagttatcagattaaatatcatctccagcctcacaaactaaactagccagtctgtcttaatgtgtgatttttaattcttttaatatgtcaccataagccattttccttttttggtatatttgtttattgtctatttcactgcaataaaatgttctcttcctgagatgaaaggccatagctgacttgtttattgcttcatttctagtgcgtagatccatagctaacatatactatgttttctcaagtttaatrtgctcagaaaaaaagcataaaatgcacagtcttattcctatgtgtatatgcaatttacatttattctaacatgaaaattagttgagcataaagtagcagcatttaacatgatcagtacaaaacaaaataaaacaagaagctttaaataaaagaaccattggcaaataaaaattgtctcaaattgaaacagaccttttttcaagaataataatagttggcatagagtctctttattctgagattggaagtagtgcactgttattcaaaattagagaatttattcctcctcattttctctagttctgtgttacagtgactctcgttggattacctagatgagct

SEQ ID NO: 410895 - DNA, 644 bp, Homo sapiens
gttttggttgtttctgctgaacttcttatattatgttccttcttgtcaatcagttatcagattaaatatcatctccagcctcacaaactaaactagccagtctgtcttaatgtgtgatttttaattcttttaatatgtcaccataagccattttccttttttggtatatttgtttattgtctatttcactgcaataaaatgttctcttcctgagatgaaaggccatagctgacttgtttattgcttcatttctagtgcgtagatccatagctaacatatactatgttttctcaagtttaatatgctcagaaaaaaagcataaaatgcacagtyttattcctatgtgtatatgcaatttacatttattctaacatgaaaattagttgagcataaagtagcagcatttaacatgatcagtacaaaacaaaataaaacaagaagctttaaataaaagaaccattggcaaataaaaattgtctcaaattgaaacagaccttttttcaagaataataatagttggcatagagtctctttattctgagattggaagtagtgcactgttattcaaaattagagaatttattcctcctcattttctctagttctgtgttacagtgactctcgttggattacctagatgagct

SEQ ID NO: 410896 - DNA, 644 bp, Homo sapiens
gttttggttgtttctgctgaacttcttatattatgttccttcttgtcaatcagttatcagattaaatatcatctccagcctcacaaactaaactagccagtctgtcttaatgtgtgatttttaattcttttaatatgtcaccataagccattttccttttttggtatatttgtttattgtctatttcactgcaataaaatgttctcttcctgagatgaaaggccatagctgacttgtttattgcttcatttctagtgcgtagatccatagctaacatatactatgttttctcaagtttaatatgctcagaaaaaaagcataaaatgcacagtcttattcctatgtgtatatgcaatttacatttattctaacatgaaaattagttgagcataaagtagcagcatttaacatgatcagtacaaaacaaaataaaacaagaagctttaaataaaagaaccattggcaaataaaaattgtctcaaattgaaacagaccttttttcaaraataataatagttggcatagagtctctttattctgagattggaagtagtgcactgttattcaaaattagagaatttattcctcctcattttctctagttctgtgttacagtgactctcgttggattacctagatgagct

SEQ ID NO: 410897 - DNA, 565 bp, Homo sapiens
acatttcattaccaacccatccaccctttgaaaagcaatggaacacccatgctccactgcccataaattttgataatggtatattctgtgtaacattaggaaagcatccatatataccactgaccatatagtatgaatgtggtatacctatgagactgaaatgatgaggacctactttcatttgactctatttgaagaaggcaaaatacggttggtatcaatgtttacccacggaaatatttgaagacatttggataatccgtgattgacattagggtttgtgtcattatcttgttattattatcaataataacaaaaaaataaaaaaaaaacacaattagccatttagtaaatgccackaagggacagagctaggatttaaatcaaggaaaatctgaatcaattgtttcttgaccactatattttgcaggtgtccactttaaaagagctactttaaaaaaatagaattttccaggagagtactttaaatatttaccatttatgtccatatgcaaaaattactgacttaaattttattacttaaaaaaataatattttattcaca

SEQ ID NO: 410898 - DNA, 517 bp, Homo sapiens
gtatgtctgtggggtggagtgcatatgtaatgacttacatatattagacactacctatctgttaaagagctatactatacatgcataaaagtttgagatcttaaatatttattatttcttatttaagtttacatttcaaaaacataaggggagccaggcacactaatgtgtgtctctacttaagaggttgattcaggaggattgcttgagcccaggagttcaaggttgtagtgcactatgatcgtgcttgtaaatagttactgtacttcagcctgggcaacatagcaaaactttgtctatgaaaaaaataaaacaaaagaacaaagagtaataactatggaaatatcaacaaggataagttctgagaaactcttcattaggtactttcatctttatgcgaacatcatagaccgtactttcctagttggtatagcttactaactacctaaactacatggtataacctactgttcctaggctacaaacytctacagccttttattaaaactatactgaa

SEQ ID NO: 410899 - DNA, 443 bp, Homo sapiens
tctgttgaatgttaaatcaatgggttttaacattgaagcttagagaattcacatttcagtttccagagattaaacatatatgattaaatttagaaagtacattttattcctttatttgacagagcagaaactatgaaaactgggaaattcttacatctaaacaagcaaacaacttgaaagaccaaatcagcattttgggacaaggaagttagtacaaagagaggtttacrttttgatacttgagcttttgaaaagctgaaataggctctaatttttcttatcaatttcagagctctaggcatttcaaacctgttcaaagtgtcagttgacatgtccagtaatggtaggtgcactttgttacaagaccacaaaaggcaatagttgtctacttatgagaaaaatattgccaagagaaacttgtcatctctatagcattaatataa

SEQ ID NO: 410900 - DNA, 567 bp, Homo sapiens
agcattttgggacaaggaagttagtacaaagagaggtttacattttgatacttgagcttttgaaaagctgaaataggctctaatttttcttatcaatttcagagctctaggcatttcaaacctgttcaaagtgtcagttgacatgtccagtaatggtaggtgcactttgttacaagaccacaaaaggcaatagttgtctacttatgagaaaaatattgccaagagaaacttgtcatctctatagcattaatataaaacaatttgtagttattgaatacaatggatctccatcttaggccaaggtttttttgtgtgcgaagtgatcaccactttctctcctaattagggtatgatggactttagagtagcccatagaaatcatcctggaaatagaaaaatgaatgaattttcagaaagaaaagagggaagagaaaatgagtgggagggagagagaaagagagacaaagacagaaagatcacatactagaatawtctctatgtgaataaagagcctaagattttcacacttcattgaccttcctcaactagaagaaagtctgctgctgc

SEQ ID NO: 410901 - DNA, 579 bp, Homo sapiens
gttcccagtataataactcattcctttgccagctggtctagtgtcatgagaggttctaaagtatccaagtggtagccttaggtttactgtaattcttatatccccttgtagaagcattccctcccctggaactaatgtctctagtgcaacagtgactaaatttatatagacaggmagtgcacatttccaaaatagacattgagaatgatggtatgaggaaaccatttctacttctactttttggttctcaaacctatatattacaactaatggggatacaacaccaaataatggacattgactggaagtattaatcctcatcttgaataataacacacttaaaactatatagtatcatgtttaagctggttccttacaatggtttaagaggctattccagcacactcttatgctgctagcttttagcttatgtgataatagtactactagtatattcaatggtaatgtgtcctttatttcatctccttcattgtcaactgggtcctttggtttgaggcaattttatatggaatttgttgaggctaaatcactttatgtttctgagatagtggtccagca

SEQ ID NO: 410902 - DNA, 579 bp, Homo sapiens
gttcccagtataataactcattcctttgccagctggtctagtgtcatgagaggttctaaagtatccaagtggtagccttaggtttactgtaattcttatatccccttgtagaagcattccctcccctggaactaatgtctctagtgcaacagtgactaaatttatatagacaggcagtgcacatttccaaaatagacattgagaatgatggtatgaggaaaccatttctacttctactttttggttctcaaacctatatattacaactaatggggatacaacaccaaataatggacattgactggaagtattaatcctcatcttgaataataacacacttaaaactatatagtatcatgtttaagctggttccttacaatggtttaagaggctattccagcacactcttatgctgctagcttttagcttatgtgataatagtactactagyatattcaatggtaatgtgtcctttatttcatctccttcattgtcaactgggtcctttggtttgaggcaattttatatggaatttgttgaggctaaatcactttatgtttctgagatagtggtccagca

SEQ ID NO: 410903 - DNA, 580 bp, Homo sapiens
gaatgatattacccttcctacctgcttgttttagttccttaccaattcttttccaatcttttagatctaaagttycttgttctggaaaccatgggcaaaattgttctattatttgaaatagcttgattagattttttgtagatactttaactccccctctttttaaaagaattttaataaagctgagataagaggcatatttacttttaactttacttttagtttgccccattatcaccctagcttcttccgagtgcacaagcttaccgtaaggctgactgtagaagtactcgggatctctcgtcgacttgtcctcaatgaccacgctcgagcgtaccttcaccctagagaaaagccccacgttgggcgccagatgtaggggtgggttgcccctacacacctgtgggtgtttctcgtaaggtggaacgagagatttggaaaagaaaaagacacagagacaaagtatagagaaagaaagaaggggacccggggaaccagcgttcagcatatggaggatcccgccagcctctgagttcccttagtatttattgatcatctgtgggtgtttctcgaagagggg

SEQ ID NO: 410904 - DNA, 189 bp, Homo sapiens
ttgccaatttttgatcaatactagattgtgaattccacaatcttgtagaatttttttgccaatsattaacaaagtttactgactgaacagaagagtgcaatgcaactcctgctacagcagccgtagctgtgactgcaattaatcccataatcactgcaattaaagtaaaaatgaatcttttggatctat

SEQ ID NO: 410905 - DNA, 577 bp, Homo sapiens
tgggcaattcttttttaagtgaccaatttgaccacaattataacattttcctccaaatgttctaacttgtcctcctaaaacaactcctgttattgcttgagccataagcatagctttatgcatagctcctccgattccatcacaggcttttacatattctgagattacatctgatcctgcaggaacctttccttttaatggcttaatggctgattgacactcaggattggcgttttcatatgccatcaactccactatgaccttacgggctttttcatcggcaattgacttttgagcaacatcttggagccttgccacaaaatcaggrtagggctctttcgaaccttgtcttactgtattaaatgaggggcaggtacttcctgggtcttggattttttcccaggctctaaggcagatagctctaacttgctcaatggcctcattttgcattaatgcttgttgactaatagtactccaattttgacctattcctaatagttgatctgcatctatgttaactggaggattggcagccctatttcttcggacctgttcttgtaccccatcaatccaccaa

SEQ ID NO: 410906 - DNA, 577 bp, Homo sapiens
tgggcaattcttttttaagtgaccaatttgaccacaattataacattttcctccaaatgttctaacttgtcctcctaaaacaactcctgttattgcttgagccataagcatagctttatgcatagctcctccgattccatcacaggcttttacatattctgagattacatctgatcctgcaggaacctttccttttaatggcttaatggctgattgacactcaggattggcgttttcatatgccatcaactccactatgaccttacgggctttttcatcggcaattgacttttgagcaacatcttggagccttgccacaaaatcagggtagggctctttygaaccttgtcttactgtattaaatgaggggcaggtacttcctgggtcttggattttttcccaggctctaaggcagatagctctaacttgctcaatggcctcattttgcattaatgcttgttgactaatagtactccaattttgacctattcctaatagttgatctgcatctatgttaactggaggattggcagccctatttcttcggacctgttcttgtaccccatcaatccaccaa

SEQ ID NO: 410907 - DNA, 479 bp, Homo sapiens
ttatacagacccaaattgaacttcaaaagatggaaactacaatatctgagataaaaaattcagtggatatgattaatggtagattaaacattgcataagataaagttggtgagcttgaagtcacagcaataaaaactaaccaaaataaaacacacagaaaaaaatggggcaggagagagaacaaagcatcactggatgctttgttctttgggacaacttaaaacagccaaatcaaatgtacagattagagtctcaggggtagggcagtgactgaaaaaatattttaaaaaatatctgctggmacatttccaaatttgataaaaactataagaccacagccatgaagctcaatcagaaatacgtaacatgctcaagaaacatcaagaaaaccacaccaaagaccatggtaattaaattagttaaaactagtgaaaatgagaaaatttaaaaagtaaccataaaaaagagacacattacat

SEQ ID NO: 410908 - DNA, 596 bp, Homo sapiens
gccttggtagcttccacatggtgttgagcctgtgggtgcacagaagtcaagaattgaagtttgggaacctcttcttgatttcaaaggatatgtggaaaagcttggatgtccaggcagatgtctgctgcaggggccctcatggagaacctctgctagggaagtgtggaagggaaagtggggttggagccctggcacagagtccccactgggacactgcctagtggagctgtgagaagagggccactgtcctccagaccccagaatggtagatccaccaacagcttgcaccatgtgcttggaaaagctgcactcaatgccagcccatgaaagcagtcatgagggggcctggatcctgcaaagccacaggggcagagctgctcaaggccatgggagtctccttcttgcatcagcatgacttggktgtgagacatgaagtcaaaggagatcattttggaactttaagattcaatgactgccctactggatttcgaattcactatacatgtttgttttttttttttagtaatttctctagggtttacaataaatatgtttaatttctcacagtctactttcaacttgtattttactacctt

SEQ ID NO: 410909 - DNA, 605 bp, Homo sapiens
tctttgggtaaaagccaagtgaaaatatgtctcaagtttcttacatgaaagaagcatataaaggcaggaaatttaaagacgacctagtgatttttaataacacagggaaatatttggttgatttttggtatctttttccctttcaaaaaatagatttaaaatactaataatgccggttcagtcttcctttgaaaaggaaaatgagggcacagtgttcacttaacaatrgatgcatgaaaatgacagcatcctggggagcaagagcaatgacgtaaatcttttaaaatgaggatattagacactttttcttgacaggctaaaggcaatgtgtacagggaataattataatacctcaggagggtgaaaagctgaagtggtttgttggaatagatattaccaggacatatttttttttctgatgcttcccaaataaaggattcagtgtgtgtcagctgttgattgtttaaaaaagctatacacattttaatttaacagaatatttattttattctctgatttaatagttggctgttttttgaaggaattatatgtgcctatactcttctggaaagttttatcttctttcttctatttctagcttcata

SEQ ID NO: 410910 - DNA, 605 bp, Homo sapiens
tctttgggtaaaagccaagtgaaaatatgtctcaagtttcttacatgaaagaagcatataaaggcaggaaatttaaagacgacctagtgatttttaataacacagggaaatatttggttgatttttggtatctttttccctttcaaaaaatagatttaaaatactaataatgccggttcagtcttcctttgaaaaggaaaatgagggcacagtgttcacttaacaatggatgcatgaaaatgacagcatcctggggagcaagagcaatgacgtaaatcttttaaaatgaggatattaracactttttcttgacaggctaaaggcaatgtgtacagggaataattataatacctcaggagggtgaaaagctgaagtggtttgttggaatagatattaccaggacatatttttttttctgatgcttcccaaataaaggattcagtgtgtgtcagctgttgattgtttaaaaaagctatacacattttaatttaacagaatatttattttattctctgatttaatagttggctgttttttgaaggaattatatgtgcctatactcttctggaaagttttatcttctttcttctatttctagcttcata

SEQ ID NO: 410911 - DNA, 605 bp, Homo sapiens
tctttgggtaaaagccaagtgaaaatatgtctcaagtttcttacatgaaagaagcatataaaggcaggaaatttaaagacgacctagtgatttttaataacacagggaaatatttggttgatttttggtatctttttccctttcaaaaaatagatttaaaatactaataatgccggttcagtcttcctttgaaaaggaaaatgagggcacagtgttcacttaacaatggatgcatgaaaatgacagcatcctggggagcaagagcaatgacgtaaatcttttaaaatgaggatattagacactttttcttgacaggctaaaggcaatgtgtacagggaataattataatacctcaggagggtgaaaagctgaagtggtttgttggaatagatattaccrggacatatttttttttctgatgcttcccaaataaaggattcagtgtgtgtcagctgttgattgtttaaaaaagctatacacattttaatttaacagaatatttattttattctctgatttaatagttggctgttttttgaaggaattatatgtgcctatactcttctggaaagttttatcttctttcttctatttctagcttcata

SEQ ID NO: 410912 - DNA, 480 bp, Homo sapiens
ttttgtaagatccatttgccatccraaaactctagaggtatttctgttttctcttcaagttcattattaaagcatacccacaaaggaaactatgatttgccaatataaacaagaatagacaccaaatgtctcaagtagacttggaaacctgactgtgaaatacagagtaaaatttcatccttggttcatgctaaagatatgtccatacccattcctgccagattcctccactggcttctgtaacataattgctgttttttcatcatgcaccttttcaggttccaagactcacatacagagaacttcaatctggctctttcaacccaagaagtcacagtcttcttccacaaaaatagtagctctgccgtcaatcatggctgaagaaagggagctatacacatgtgggagctctgtcagtgaggagatgccaactgataatggatggcactccctaccacatgaaccttctctcattcttat

SEQ ID NO: 410913 - DNA, 646 bp, Homo sapiens
ttcaaactaccattgaccttcacctggatgacaacaggagcctcttaactctcaacccacagccgctccttgccccctccattccacattctatacagcatttggacaatgcttttcagaatgcaagtttgatygcattgcttatttcccccttataaaacttatcaaaacctttgaatggttctcggagtgaaaaccaaactccagccccctcttgtgtcactctctccttactctacaccccctacagttgcccttctttccattcctcaaccctccatgctccctcctgtgacagggtctttgcacttacggccccactctgtgtacatgtctccctatctcccaccctcacttcctatccctatcctcacccccttacagagttaacccttactcacccttcagctctcaactcaagcattctttcctaagaagagttttggttcctttgttaactattgtcattgtacaatattgcatgacttctgagtccttatctcagtttcagttatacattcttgtgatataaatcagcactgcatcacaggaatagggcctaacacataggagtcacttgatgattatttgttgaataaataaatgactttattacaacatgccctcaaacatcttgttttgtcat

SEQ ID NO: 410914 - DNA, 647 bp, Homo sapiens
agaggaattcagctgggggtgataagagaggggatcggctgtgggacagccaaactccaggggaagatcatcttcctactccatcccccttccagctccccatccatcctgctgagagccacctccaccactcaataaaacccctacattcatccttcaagtccatgtatgacctaattttttctggatgccagacaaggacttgggtaccaagagggtccactgagctgtctaacacttaagctgtctgtggacagcaaggctaaaatagcacactgtaaccggtccccacctrggcttcaggagtcacagacatgcacccctagacacaaccatggggccagagcccaaaaagaacttgccctggctcctgcacctgcccatctgcatgctcctcctcccataaggggtttgagcacatggcggccacacacaagccacacccctgtcgcatgtgctgcaaggggggtcagggaactctcccatttcaatgatgactttgttaaatggtccataagggctatccccccacacctctaccacaccatgccccatctgttttcttccagggaagtccacatactttctatcacccagctctctctaatcatgtcactctttcaataattattactatgtgcagggca

SEQ ID NO: 410915 - DNA, 619 bp, Homo sapiens
gagggaaaaggggtcatgcgacagcctttacaactattccaaatacattgttggaagcagtgcttaaaaacaagcataaagataggcttgcaaaataaagttattgtctaaacttctttaaagcagttaaaatttgtggtgaaatttgagtttcattctttgtatgtcacctyattttccttctgacttcatcgaactgctctaacagagggctccagtttgtatctgaatcaaaccctccacactgttggtgtagaccagttggattagatcaactgaagtcccatctagataaagttgccctgagagacatgaaagggctacacagagaagtcaggtaaatcctgaatggagtcttctgtgtggaataaattaactacaaaaggccccaagtggcttctcctatcttccaagaattaataacgtttcattgttatttgaataaacttatgagattttttttttaatgacagaataaatgttgcatatacactacataattccttccatcctgacaggaaatggccttcagttttctctggggaactgtgcaaacatctggataatcttgaaatcttttaatatgaaaaaagtggtaattacccccaaacttattact

SEQ ID NO: 410916 - DNA, 578 bp, Homo sapiens
aatcaagaaaagtttgagaaactatcacagccaagaagaagagtctaagagtcatgaggactaaatgtaatgtggtctcctggatgggattctggcacaagaaaaggacctcagggaagttgggaaacctagatgaagcatgaactttagccaataataatatccgttttggttcattaatgataacaaatgtgccatactagtgcaaattcctgataacaggggaattaggtgcaggtatatggagactctttacaacttctctataaatataaactcctctttaagaaacaaagcattcaggcattgctatgagctattggagcagagaaagatcagggaagcttcaatatggaaggttctgaatataaggattttgagtaattaacccaggttaaatttcttcaaaggatcatggatttctaccattgttcttgcagacacacgtgcacactctcagttatctttctctctctctctctctctcwcacacacacacacactacacacaaaactgaacattcatgtctgtccacacaaaagtgtgaggagaggccatccagggacaaaaactacca

SEQ ID NO: 410917 - DNA, 598 bp, Homo sapiens
aaactgtgcagcattcaaaaaagaaaagaataacaatagataagcttaagtagtgataattgaataataataacagtaaagtcatagaaaggaaatataactctgaaaaatctaatgaagaaaaagggagaaaatgcaaaaaaaattgtaaataaaagtgaaatatcaagaaatgacaaagatatttttaaaaaatattaagtatataacattttcctattaatttgacaatcttaatgaggtaggtactttttttgaaraaagaacttccaaaagtacatatgaagaatggaaaatcaaaaaatattaataaccataaaagaaatttaaaaacaaataaaaccattatcaccaaaaattactgagactagtagatttcacaggagcattctttcaaactttcagaaaaaaaaattatatgctgtacttttaagtcaccttagagaaccagaaaatacaaattaattttgtgaagctagcataaaacatgtgccaaacacaaaacaaaaagaaaactatatgtttcttttcaaattgttaaatggaacatgtgactgtcctgtgagaggttaatagttattctatacagatagcattc

SEQ ID NO: 410918 - DNA, 598 bp, Homo sapiens
aaactgtgcagcattcaaaaaagaaaagaataacaatagataagcttaagtagtgataattgaataataataacagtaaagtcatagaaaggaaatataactctgaaaaatctaatgaagaaaaagggagaaaatgcaaaaaaaattgtaaataaaagtgaaatatcaagaaatgacaaagatatttttaaaaaatattaagtatataacattttcctattaatttgacaatcttaatgaggtaggtactttttttgaagaaagaacttccaaaagtacatatgaagaatggaaaatcaaaaaatattaataaccataaaagaaatttaaaaacaaataaaaccattatcaccaaaaattactgagactagtagatttcayaggagcattctttcaaactttcagaaaaaaaaattatatgctgtacttttaagtcaccttagagaaccagaaaatacaaattaattttgtgaagctagcataaaacatgtgccaaacacaaaacaaaaagaaaactatatgtttcttttcaaattgttaaatggaacatgtgactgtcctgtgagaggttaatagttattctatacagatagcattc

SEQ ID NO: 410919 - DNA, 592 bp, Homo sapiens
tgagatttgggtggggacacagagccaaatcatatcaggctctagtaacacaaaagagaggaatatattcctttatgaaattggcaaagcaaagagagctttgttagaagctgacgagtttgctggatggtggactatctcagatcttgctgggggcaatgtcacttagcacaatctgggggacaatatggtgacacgtgtatttaatatatagcaaattctttaaaattttgctatctaacgatgccttagattctaagaagaatgatgagtccaggagaaagggagcacgcacaagargagaggagagggctggataatagtgtctttaatttataaatttgctcccgttctttggaataatccatcaagccatcctctgccctcccttccctgactctcactcccatagccaggagacttcagtgttaggaaaatgaaattaagtttccaagtaaaaaatcattactgatccccaagtaagtgatgtgtaaatagttttctctgatcatgggttaaaatgttactgaggttctcaagtcctatcaggaagacaatctttggctcagtcagctgggctgaagtagccagg

SEQ ID NO: 410920 - DNA, 521 bp, Homo sapiens
gagcattcattatgtgccctcaactgtgtggggtgctgagtacattgaggagaaaaacaatatagtccatgscctccgaaagcctaatccagggactactaccatttatattttaaataggaataaagttttacatttttttcagattgagataaatatgattagtttaattcttttccccaaatttaaagtgttattatgattagagacttaatgaagtttctgatgtaagttctttaccccttgtaaatattcatataagtggtattcattatttacatagtgtcttctaaaattatagtctgagattatgatgatgctggtgataaataaaagtatattaggaatataattaactgaaaatgttaagttacttaagtcagggagataagtacataggtagtatgatacaacttgtgttgtatataaaaagaataattttttcccgggtgattatatataccataaattatttttggaaaccactgttaaataaattataaatataaaacattaattgt

SEQ ID NO: 410921 - DNA, 597 bp, Homo sapiens
ctcaactccctctgcccaaaatattccctcaaatgtcacaagatgatcaacacatttattttgttttgtatttcatattcactgctaccctggtctccctgagggcagaattcacattgagtaattactaaattcctaataccaatcagcctgaacactaaataactaaatacttgggctcactataccattttggtcatgctacaggtgttttgattttacttttcatgaggggtacatctgagatagaatttcagatatatttttttccactttcaatattcaaatttctgccctcttccagcacttctgcccagtagcatgcagtatagtaaaaattctatctctctggtatatatttgtgtacctacaatgtttcaaccttgtaccaaatgtttggctaagcctattcatttacccttggttccttggttcctttctcacagtcaggtccacatgaataatcaaaggtaggtctagcwtcaatgaactcaaaatgttatgttataaaatttgctggccaagttgctgacttgaaatagttcaggtcattttaaaacatatggataaaggtaagaaataaatcttctggatatt

SEQ ID NO: 410922 - DNA, 608 bp, Homo sapiens
tgggaatagaaacatcagatcagtatgtgagagggttttggagcattttccagacttttccagtatctcagaaattataccaaagaggtctgcctctgcctcaacttgtaaagttgatgtaggtatcagttcatgataaaacaaataatacaactcaataagccaccataatattttatttatacccttcatttccagacactgttaggtgtttttacacattatcttcagttctaaaacctgatggaaagttaggaattgttagtcccattttggatgagaggcccagagagacgaaatcacttatgcagacacrgatgtgaggctgtaacctcaatccacctgacttcaaatctaagctctttccactcctccatacttcttccccaagggtgatcattgctttggagaattgataaaggccatgataaaatgaattcagaacaaaagagaaaaaaacctgttagaaagattgataaactctgcggaaatttggagcttatttttctttttttcttttctgtattttaaagccagctatcatggggaaatgcaaacaggtaacttccaaaacatgtttattaagtttatttaacatctactgtttc

SEQ ID NO: 410923 - DNA, 608 bp, Homo sapiens
tgggaatagaaacatcagatcagtatgtgagagggttttggagcattttccagacttttccagtatctcagaaattataccaaagaggtctgcctctgcctcaacttgtaaagttgatgtaggtatcagttcatgataaaacaaataatacaactcaataagccaccataatattttatttatacccttcatttccagacactgttaggtgtttttacacattatcttcagttctaaaacctgatggaaagttaggaattgttagtcccattttggatgagaggcccagagagacgaaatcacttatgcagacacggatrtgaggctgtaacctcaatccacctgacttcaaatctaagctctttccactcctccatacttcttccccaagggtgatcattgctttggagaattgataaaggccatgataaaatgaattcagaacaaaagagaaaaaaacctgttagaaagattgataaactctgcggaaatttggagcttatttttctttttttcttttctgtattttaaagccagctatcatggggaaatgcaaacaggtaacttccaaaacatgtttattaagtttatttaacatctactgtttc

SEQ ID NO: 410924 - DNA, 608 bp, Homo sapiens
tgggaatagaaacatcagatcagtatgtgagagggttttggagcattttccagacttttccagtatctcagaaattataccaaagaggtctgcctctgcctcaacttgtaaagttgatgtaggtatcagttcatgataaaacaaataatacaactcaataagccaccataatattttatttatacccttcatttccagacactgttaggtgtttttacacattatcttcagttctaaaacctgatggaaagttaggaattgttagtcccattttggatgagaggcccagagagacgaaatcacttatgcagacacggatgtgaggctgtaacctcaatccacctgacttcaaatctaagctctttccactcctccatacttcttccccaagggtgatcattgctttggagaattgataaaggccatgataaaatgaattcagaacaaaagagaaaaaaacctgttagaaagattgataaactctgcggaaatttggagcttatttttctttttttsttttctgtattttaaagccagctatcatggggaaatgcaaacaggtaacttccaaaacatgtttattaagtttatttaacatctactgtttc

SEQ ID NO: 410925 - DNA, 500 bp, Homo sapiens
ggaggttacttaacttatcttggctttagttactctatccgtgataatgaggaaattggattagatggccttaaggattttttcctactggaatattccatgtttccctactttactaatggttgaggagtaaattaaagtcttctaggagactatttttcaattgggaaaaactagacacttcaggcaatagagtccactaacaaatactggcaaatttataaaatttcagtgaattgacagtttggctctctattgtatctgttacactaacacatattcctgcttcacctaactttttgtataatttttctcctactgaaattgtgaataatatatacattcaggaaaaaagctttctcttcatgattgtctattttcttatttgaaatagyaattactgctgcctctggaagcttctatgaagtggaacatactttgtcattgtcatcatagagaaagggtcaaattaaagatttagttgctgagcatgggttatt

SEQ ID NO: 410926 - DNA, 495 bp, Homo sapiens
tcaacaccatcataccacatttcaacctgcaaagaaaccctactcctgtgagaaatagaagagacaagtgtgatgccatatttgactcaccagtactgtcttgcaggcccctgagcagcgtgctctggcaacgaattactgctcctttatgttggagctttctcaccgaacaaccgacatggtgttcactctgaatccttggccccagacacctacaatttgagagaatcttccacaggttgtttagctcagaggtcctcaaactcagtgtggagagaagccatattgaaatatctagagaaatttgaaggcaatgcagactcctatgatggggagagattcatgcttttctctcrctaattaaaatgctgcccagccacattaaacaccatctatctattaaagaaagccttaggagctttatcatgtaaagatatgttaggttagacaacatggcaagctctcagcattcacagatttaacattcttggtttt

SEQ ID NO: 410927 - DNA, 606 bp, Homo sapiens
attccttcaaatctgcccttctcctggtgtttccatttctcttgatccccattttcctacttacccaggctagaactttgtgaacagagatgtggttttcctcttccttcactaaacagtcttcaattttgccttcatttctatcaccatcactcttcattaaggcttcattaactctgacttaaaccattcactggtaatgtaacatgcatcttaatttatttaattcccctccaactcatcccagtcactatctactactggactagtatttccaataacaagctgtagagagaagtgaatgcagatgagtgaacagtcactttctaagagatgacaagggaagttaaaataaaggaaattgcttctcttgataaaataccacctcccagttgaaaatatatataatgccttctaaagcttaatttataaagttcaaaattcttaccttaggtaaaatactcaatacctctttattctggctccaattccccacaattctcctttgatgcaccagtgtaacgaacatttcattaattctcaagcataccctgtacttccatgccttcatggcagtayatatgccatttgctctcttctgaaagc

SEQ ID NO: 410928 - DNA, 585 bp, Homo sapiens
agctatatgcttgtatccattaacccattgctgatttttatatacagattgacactaagaccctcactgggcctatgcatcagacatagatgctatggaaagtagccttcaaaagtttggagttacacactggggaagtgtttgctatggcatctatccatcatcattcattttcaacatcttgtgacatattgcagattatgtagatatttggatagtcttatctagttttggattaaactaactcttacaacatacttaacatttttcttacaaagaamctgcaaattaaaattacagtaataatgtaagcatccacaaataataattaaacagatatgatattccccatcctcccaatataacctttaaatcagccattataggtgcaaaaacaatgactattgaatcagactgacataaaaaccacaatgctatcactaaaaaattattaatagcatattcgacagaccaggaaaagttttgtatggttcaataaaactaaaatcatttaaacactacagcctatttcatctttacattatatgttaatctctatgcacacaattataatgtatgcaacat

SEQ ID NO: 410929 - DNA, 598 bp, Homo sapiens
tgaagtatgacacctccaccatgatgttaagaattggctggttgcatggttagggagcaggaggggaatttgtaatagatcagaaactcacagaggrtgaagacttgttacaacttcactgaagcccagctagaagcctaaaactagcctctctcacgtagttatgaggtccttgtgtgccttcaaaccaatccaatgctagagccctttctatgaaggatactaaggtcagagagaatcacatagtgagggaagctgtaaagccccatgctacttacaaaagaaatgtgttaaaatgaagtcaaagccagatttaatgtccaaacactttgccaaaatgttttgtaatttctcataaaggtagacacccacccacccatgccacactaatcccattcttgagcatctatccaagagatagaaaacatacgtccacacaaaaacttggataagaatgtttatagcagctttattcatattagcaaaaaaactggaaacataccaaatgtccatcaacagaataaacaaattgtggaatgcatacatataatgagataatttctaaccaaaatttaaaaaaaactcttaatttgataca

SEQ ID NO: 410930 - DNA, 598 bp, Homo sapiens
tgaagtatgacacctccaccatgatgttaagaattggctggttgcatggttagggagcaggaggggaatttgtaatagatcagaaactcacagagggtgaagacttgttacaacttcactgaagcccagctagaagcctaaaactagcctctctcacgtagttatgaggtccttgtgtgccttcaaaccaatccaatgctagagccctttctatgaaggatactaaggtcagagagaatcacatagtgagggaagctgtaaagccccatgctacttacaaaagaaatgtgttaaaatgaagtcaaagccagatttaatgtccaaacactttgccaaaatgttttgtaatttctcataaaggtagacacccacccacccatgccacactaatcccattcttgagcatctatccaagagatagaaaacatacgtccacacaaaracttggataagaatgtttatagcagctttattcatattagcaaaaaaactggaaacataccaaatgtccatcaacagaataaacaaattgtggaatgcatacatataatgagataatttctaaccaaaatttaaaaaaaactcttaatttgataca

SEQ ID NO: 410931 - DNA, 598 bp, Homo sapiens
tgaagtatgacacctccaccatgatgttaagaattggctggttgcatggttagggagcaggaggggaatttgtaatagatcagaaactcacagagggtgaagacttgttacaacttcactgaagcccagctagaagcctaaaactagcctctctcacgtagttatgaggtccttgtgtgccttcaaaccaatccaatgctagagccctttctatgaaggatactaaggtcagagagaatcacatagtgagggaagctgtaaagccccatgctacttacaaaagaaatgtgttaaaatgaagtcaaagccagatttaatgtccaaacactttgccaaaatgttttgtaatttctcataaaggtagacacccacccacccatgccacactaatcccattcttgagcatctatccaagagatagaaaacatacgtccacacaaaaacttggayaagaatgtttatagcagctttattcatattagcaaaaaaactggaaacataccaaatgtccatcaacagaataaacaaattgtggaatgcatacatataatgagataatttctaaccaaaatttaaaaaaaactcttaatttgataca

SEQ ID NO: 410932 - DNA, 596 bp, Homo sapiens
gttttaaaaagaggagttcccctgcacaaaccctctctctttttgcctgctgccatccatgtaagatgtgacttgctcctccttgccttccaccatgattgtgaggtttccccagttatgtgaaactgtaagtccaattaaacctctttcttttgtaaattgtccagtctcaggtatgtctttatcagcagcttgaaaacagactaatacagttagcawttctgaaatgaatttctctgtatcctaatcttaatcaaatgagtaaatatattaagcataatgagatccaagtttctcactgttgtagaagaaagttacaaatatggaaaagggaggattagaatgtacaatgtgctttcagattaaaattggaggtatcagtatgaactcatagtttttaatagatggatgataaatggagactctctatatatatagtttcccagatctgtctacttgagaggacctaaaagcaataacagcagtagcaatgagaacatatggcctctcccaggtagttcagaggtccttgtatgacttcaggccagtgcagtgcttcaaccaaagcaagtcaaatatgtgtacttagaagtcaa

SEQ ID NO: 410933 - DNA, 643 bp, Homo sapiens
caacataaaaatctagaagccagtttagaaagcagaatgagattctccttggttcaggaagccaaagattgtttgtacaaaaaggtcttgccctgttggaggtaaagtactgactcattcttgaatcattaacctattggtgaactaaacctaattaaaatgacagtaaacttcacacatagctcaactatagtttatacagatggctgacagaaaaaaaggtatcctgggcaaaaatattacttacttcagtctctactgtattttgacaaacaatgtcctgtacacattcaaaaattacaaaacacatgaagaaaaatagcatattttgaaagaaaataaaaacagactgagagatggcccaaaagttaatattatataaatttgataaatatgttaaaagatctagtggaaaaggtacataatatacaaygggtaatttggccacagaaatagaaactatttaaaagagccaaatgaaattgctagaaataaaatatatgatgtctaagatgaagaattcattcaatcagcttttcaagagactggaaacgacagtgaaaagaatcaataaacttgacaacaggtcaacggatcatccacattttagcacaataaagtgaaaagtagaatagcaatatca

SEQ ID NO: 410934 - DNA, 573 bp, Homo sapiens
atattatagtatatatcaatgctaaatgttcttgttttgataattggactatggttatgtaggagatgtctgtgttcttaggagatatacagtaaactaacaataaatggtcacgatgcatcaaacttactctcaaatgattctctacaaatatatataagatatatgaatatrtatgcagatatacatgcagagagggagtaagcaaatggggcaagatgtaaataattggtgaatctggaaaaaagtattattggaattccttatgcaattcatgcagctttttcataagtttgaaattatatcaccatacaaagttatccccaaagagcatccttgaaaataaatgatgctgccagagaacactatgctgcttgataaatgcttatagggcagatagggaaatgctgtggtcaggcaagcaatctaggatttcactggtgatcaaagatatgtgtcagttctgtacagattctgaaatgacattagctcagaatctagggactttaaaacaggaagaaaccgtggcactgccctagcccacggtcctccttttacagataaggaaatgag

SEQ ID NO: 410935 - DNA, 560 bp, Homo sapiens
attactcacaatttcgttatttcctgattaagcactcttgaactaaataagggtgtggtgtgtttatgaggaggagtagaggaataggaaaagttagcacttcctttctcaagagtatgggcactcagtaatatgtggcatgtaactttcctgtggcatgaattaataaggagaaatattggattccaacttcatgatgagttattgctagcctgattaccctccatgccacagggcaagccctaaagcctcacgaccatatcacaatgagattcaacaaattcctccttccctggaaacatattttatagcaatcatcccactggaggcctgataatctcttcttcctataggaagttcagtttggccataactrtaatcattattgtgaccattaatcctagtagcagcagtgttttgttagtgaattgtttataatagatgttaatatttattttctaaagaatgatgcatcaatagcaatatctttttggttccccagaaacaaggggcctgggagtaaaggagactttctctgttaaaaatcattttacaccacg

SEQ ID NO: 410936 - DNA, 385 bp, Homo sapiens
aaaaagcagagtcaagcaggtgctgaaatagcagacacaaggctggtgaaaagctacgtccttcttcctgataaacccttccctccaaagttgacttttctgggcagggcccagaaaaccatgcagcaagacatttctctctttgaaaatatttcattaaccaattaaacaggcataaagagaagcaaaatgtgtgacaattttcaaaccaatctgatccttttggacttgaaaatagttattttctttcagtgtttaaagttattaaaaattataaamccttgtgaagtttttgatataaatcagtggttttagtattgaaaacaactttcttatttggagctttgaaaagtggctcaatatgttttctataataactttacca

SEQ ID NO: 410937 - DNA, 607 bp, Homo sapiens
cccttctgaaatccatgaggcaaatctatctgaacagcccaaacaccaaagaatctatttagacaaaataaaaatgtatcccattttggcaaggaaaagcaactggcatgaatattgaatgtgttgaaaactctcacatcagtattaaaattcaaccagatagttctttaaagatgactagcttctgaaatggaagctaaattgttggaatgtatgtccaattctagatgggttctcttctttcagggacaggagagcaaggttttctgcccatagttaattctgaagatgwgcaaacattttctaaaagacattttcgctaaaagactgaccagaccactctaaacaaacagaaagggaatgaatacatctcaatcaagatctggtactgaccagtttacctaaaacattgcgctttctttggatgccttcctgcacaacagaatcaggcttaaaaagtgctttgtacaaaatagcaacccttgcccaaaagctggatctgtaacaaagaaataaaacgtcttccgtccagggagcaaaccagtcagcttagttcatgccacgaatatctttcttatgcaaagaaaagtatgaactcattggtaat

SEQ ID NO: 410938 - DNA, 555 bp, Homo sapiens
cttaatacatgcttgggatgattgaggcattttcttccaccatattccatgatcttctagccctgggggtgcagagagattacctggccaagaagactaggggtaaagtacttttcttacctggtaagtggtttgggagttaggaaaacatgatgtctggccaacccctttcctaaaggagtttatgtatcccaatgccccacccaccacccgcctccaccacacacccagcgtttgttgcttgtaatgggtcaatacatcaatgaattgatgaattgyaaaggaaaaaaaatacatgcttggaaaatgaatttaactaaacaagattgaatgtagcccagctctttactcacagagcttgaaggctcaactcgccacaaccccctggggagagaggaaagacatggcattagttccagcgctgttagtgctagctattgcaacatcagaagtatcaaaattcaactgtctggtgccaatggcaaaaccaatgcttaccaaatacattataataataaatataactttataggtctcacagatttatttatgtct

SEQ ID NO: 410939 - DNA, 558 bp, Homo sapiens
caagatgaagtttgggtagggatacagccaaaccatgtcagagagcatggattcaaatcttggtttcagctcaaggagtagagtgactcacgtcaagctacttaatccccctctcagtccatttccttctttataaagtacaacagtaccgatttctgtgaggattaaatggagtagtatgtaaactgacaaacagactgcctggcacacatcagcatttaataaattgtaactattagctattttttgtgtatccctagagaggtagcttcctctgggtgacacagttggtttctattgccatctttaccatgtactattgtcaacatgcatgggtggctttatctgtatgaacctcagtttttccatctgtcaaatgagcatattttatgcccacctgtagggtttcgtttggagtataaatgatttaatatgtatatgaagtacctagtacagtgtttgaaatgtaggagttaactcaatagtagctactrttattacaattttaattcataattcatctcatatagaagcatagtctaacaaataaaatcaacc

SEQ ID NO: 410940 - DNA, 586 bp, Homo sapiens
aataaaaaaaaagtatcctctactctaacgcttaccagaaaataacctaaagtccttattcgcaccttacaaaacccactgttgtactatttcccaatgggatttgcgaccagataagtacatttacaatggtcagaaagtaatgtcaatgtctaggattttggtcaacctctctattttggtcaagttgagaggttgaacaaaaggggagaaattgttaaattgagtttagcctaaagttgcctccttataagttcagcctaaaggtttctctgtacacagtaaattgtaacctaactggatgtataaatggtctataacctattataacaatcgctgagttttggctaattacaggaggccaactgttcaaataatacactcaaccaatcaagctgtttttatatctcacttctgttttccrtacatcactgtcctttttctgtccataaatcttcttccaccatgcaacagtgttggagtctctctgaacatattctggttcggggtggctacctgattgacaaatcttttttttgcaaaattaaactcttatatttaatttgtctaaagttttcttttaaca

SEQ ID NO: 410941 - DNA, 568 bp, Homo sapiens
tttgtaagttcatctgaggagaaaagatttttcaggtgtagctaccacaatcaaaggtatatagctacatacgcatgtatatattacagcttatctgtaagaagaaaatgcattttaaacacaactcttctcagtagcattttatgacctttggatatgtttgtaatcatttcgaatcaaaatattgatttaattttgacctctggtttaagatactgctttaactactgttgacaaccaagtagagtgacttaagctgaacagtaactaactggaaaattagataagcacctggcatctaatggcaggcaggcactcaagaaatgaattaactacataatggaaaartatggtttaatgtgtccaaatgaaagctagtagatgtaaacatggaaaaattgtgtttacaattttataatctcagttgataagactataagaaagctgattatttaaatcactatatacaatacacccttaatttgttcattccagaaacatactgagatgtcagctacttaaaaatggtcacaaaaagctactgtttatatttttcctcctgctattc

SEQ ID NO: 410942 - DNA, 568 bp, Homo sapiens
tttgtaagttcatctgaggagaaaagatttttcaggtgtagctaccacaatcaaaggtatatagctacatacgcatgtatatattacagcttatctgtaagaagaaaatgcattttaaacacaactcttctcagtagcattttatgacctttggatatgtttgtaatcatttcgaatcaaaatattgatttaattttgacctctggtttaagatactgctttaactactgttgacaaccaagtagagtgacttaagctgaacagtaactaactggaaaattagataagcacctggcatctaatggcaggcaggcactcaagaaatgaattaactacataatggaaaagtatggtttaaygtgtccaaatgaaagctagtagatgtaaacatggaaaaattgtgtttacaattttataatctcagttgataagactataagaaagctgattatttaaatcactatatacaatacacccttaatttgttcattccagaaacatactgagatgtcagctacttaaaaatggtcacaaaaagctactgtttatatttttcctcctgctattc

SEQ ID NO: 410943 - DNA, 609 bp, Homo sapiens
atctaataagtactcaatattaccctaattaaatctgtgtctcctcctagttagtcacaaaatgatgtcatattcaaaagtaatgttaaaagtaattaatcctgtaaagtactttaaaactttacttaacatctctggaagaggcactatagaggcaaatttatttcatgataatatttgtctcctgaatcatcatggtaactccaaatatcttcaatttctctctctgtttgtatctatctatctatctatctatctatctatctatgtatctaatatttatctgtttcttccatgttaagattagctcttcagttaatggataaatttattcttttcaggattatttaaaacatctcaatattccaaacattamaaacactatctaaaaggctttcagataaatacaaaaacatccttattaattttgtagcaggtgaacatttaaatacttataaatgtccattttaaaataaaatgaatggatgattgattgaaccatattctacatgtgagttgatgtattatagtggacaagcatgtatttcaagccagtctgtcatgacctcagactccttctgtggcacttattaatggctaaaaattgat

SEQ ID NO: 410944 - DNA, 636 bp, Homo sapiens
gtgtcactgcttctgagccttctttttgggcagagtgaggcaatatatttatgcatattaacctacacataaacacatttatgattgcttttgtgtctaaacatctgaatatatattaggctacacataaattcatacccatacctctgactctaatcctgccatgtgcttttaattcttctctctgtttatttatattgaaggtatatgcatgtgtttgcactaaagtaagcaaatattagaaaggartcatgtacagaattcatggatatttatgtactgaatacatagttttattttaacctactccatttgctaattcctattttactataataaaaccagagattatagaaaacaggtgattaaccatattaaacatctattcagtggaagaaccaaaatagcacttgaattaagacagatacataaaatgccgtaacagcaatgtttttactttttttttttttcagtttggggaaaataaacatctgacatcacctttatttcaagagtgtgtgtacgtggtgacaatgaagatataagaattggaaaagaaatttgagaagttgagagtaatataaaagattgttacttaaaacaataaatacaaataaaagctgcattgaatattta

SEQ ID NO: 410945 - DNA, 546 bp, Homo sapiens
actgcaacattagttaagtgttaagaggcatggtctagataacagaaaagcttctcccttagaaccacctcctccacgattttgagttatataattggcttccttggaatagttttggtgtctcctttttaaattattactataaatagcaactgttgtaattaaatgatcattttgacatgcttttaggggtatgatactcttacaaatttaagtttacttttcactttacacatagtaactcataaaatgcttaaaattatttgtgagataggttctctgactataccttattaacatacaaaaaaactgaagcagagggcagttamcttatttgaatatttaataattggtagaattgaaatgtaaagtcagacatgctggttctgacatatttgatttacttaactatattagtttgcctcttatctcccttgtctcagtctagtcttatagattttataatgtaagtgaaagcaaatctgtaaaataagaatagaaaaccacgatgctgactgataacaacaaagacaacactcataagtt

SEQ ID NO: 410946 - DNA, 546 bp, Homo sapiens
actgcaacattagttaagtgttaagaggcatggtctagataacagaaaagcttctcccttagaaccacctcctccacgattttgagttatataattggcttccttggaatagttttggtgtctcctttttaaattattactataaatagcaactgttgtaattaaatgatcattttgacatgcttttaggggtatgatactcttacaaatttaagtttacttttcactttacacatagtaactcataaaatgcttaaaattatttgtgagataggttctctgactataccttattaacatacaaaaaaactgaagcagagggcagttaacttatttgaatatttaataattggtagaattgaaatgtaamgtcagacatgctggttctgacatatttgatttacttaactatattagtttgcctcttatctcccttgtctcagtctagtcttatagattttataatgtaagtgaaagcaaatctgtaaaataagaatagaaaaccacgatgctgactgataacaacaaagacaacactcataagtt

SEQ ID NO: 410947 - DNA, 592 bp, Homo sapiens
gctattgtaaatgagattactttcttgatttttttcagattattttcttttarcatatagaaatgatactgatttttgtatgttgactttgtgttctgcaactttactgaattgtttatcagttataatagttttcaggtggagtagttaggttttcccgaatataagttcatatcatctgcaaacaggatcatttgacttcttcctttccattcagcatggcctaaatatctttctcttatccaaatgctctagtgaggactttcagtaccgtgttgaataacagtggtgaaaggggacattattgtcttgttccagatcttagaggaaaggctttcactttttccctattcaatatgataccagctgtgggtctgtcataaatggttttcattgtgttgagatatgttcactctatacctagttcttttagggttcttattatgaaagaagtcgaattttatcaattactgttttagcatcaattaaaatgatcatatggattttgtcctgtattctgtggatgtgatgtatgatactgatggatttgcatacactggaccatccttgcatccctgagataaatcctact

SEQ ID NO: 410948 - DNA, 592 bp, Homo sapiens
gctattgtaaatgagattactttcttgatttttttcagattattttcttttagcatatagaaatgayactgatttttgtatgttgactttgtgttctgcaactttactgaattgtttatcagttataatagttttcaggtggagtagttaggttttcccgaatataagttcatatcatctgcaaacaggatcatttgacttcttcctttccattcagcatggcctaaatatctttctcttatccaaatgctctagtgaggactttcagtaccgtgttgaataacagtggtgaaaggggacattattgtcttgttccagatcttagaggaaaggctttcactttttccctattcaatatgataccagctgtgggtctgtcataaatggttttcattgtgttgagatatgttcactctatacctagttcttttagggttcttattatgaaagaagtcgaattttatcaattactgttttagcatcaattaaaatgatcatatggattttgtcctgtattctgtggatgtgatgtatgatactgatggatttgcatacactggaccatccttgcatccctgagataaatcctact

SEQ ID NO: 410949 - DNA, 592 bp, Homo sapiens
gctattgtaaatgagattactttcttgatttttttcagattattttcttttagcatatagaaatgatactgatttttgtatgttgactttgtgttctgcaactttactgaattgtttatcagttataatagttttcaggtggagtagttaggttttcccgaatataagttcatatcatctgcaaacaggatcatttgacttcttcctttccattcagcatggcctaaatatctttctcttatccaaatgctctagtgaggactttcagtaccgtgttgaataacagtggtgaaaggggacattattgtcttgttccagatcttagaggaaakgctttcactttttccctattcaatatgataccagctgtgggtctgtcataaatggttttcattgtgttgagatatgttcactctatacctagttcttttagggttcttattatgaaagaagtcgaattttatcaattactgttttagcatcaattaaaatgatcatatggattttgtcctgtattctgtggatgtgatgtatgatactgatggatttgcatacactggaccatccttgcatccctgagataaatcctact

SEQ ID NO: 410950 - DNA, 582 bp, Homo sapiens
atgaggattatggtaatggatagggaaagaagtggtcagatcctggatgcattttgaaggaataggcaacagaatttcctgatgaactggatgtggcatgtgagagaaagaaaatcaaagatgcctccaaaacttttagtctgagcaaatgaaagaataagttcttcatcaaatgttatgttaatgactgtgcatgcaataggcttgggagttgggcagatcaagaggttagctttgcactagttgagtttaatatctgtgagggatctgagtagagatttcaagtagacaactggatttgcacatctgaagttcaagaaacttctgtgacaggagtataaattttgaattatccaggttatagatgatatttaaagctaaataacatttgcaataagtccaaaatgtattctaagawtgaagagaaagtgaaaatattatattaaataaacatatttacatttagtaagaaaacagagtaaatgcattttagcgagtaaatggtatgttgactggtgcatttagtatttatgttaattatctttgctgagattctcataattgccagtttagagaatattt

SEQ ID NO: 410951 - DNA, 471 bp, Homo sapiens
ttgtagtcacagctactcaggaagctgaggtgggagtattgcttgggcctgagagctgtgatcttgccattgcagcactacagcctcgataacaaagcaagaccctgtctcaaaaagaagaaaaacataagataattccttatgactaagtggtatttatctcaaggatgtaaggatggttcaacataagtaaatcaataaacatgatacattatatcaacagaatgaaggacaagaatcatatgatcatttctattgatgctgaaaagcacttgataaaattcaatatcctttcacaataagaacgtttaaaaaactggttatagaaggagcttataccaacacaatamaagcatttatggcagactcagagctaatagcatactgaatgggaaaaacctgaaagcctttcctataagatctgtaacaagacaaggattaccacttttaccactgttactcaatgtagta

SEQ ID NO: 410952 - DNA, 616 bp, Homo sapiens
tcaacataagtaaatcaataaacatgatacattatatcaacagaatgaaggacaagaatcatatgatcatttctattgatgctgaaaagcacttgataaaattcaatatcctttcacaataagaacgtttaaaaaactggttatagaaggagcttataccaacacaataaaagcatttatggcagactcagagctaatagcatactgaatgggaaaaacctgaaagcctttcctataagatctgtaacaagacaaggattaccacttttaccactgttactcaatgtagtactgggagttctagctagagcaataagacaagagaaagacatacatggcatccaagttggaaaggaagaactcaaattatccttgcttgcaggtgatatgatctatatttggaaaggcctaaagagtccactgaaaaaactactgaactgataaattcagtaaagttgctgatacaaagccaacacacaaaaaatcagtagcatttctctatgcaaaycagaaacaaaaaagaaaccaagaaagtaatccaatttactatagctacaaataaaataaaatatctagaaataaacttaaagaagtgaaaaatctctacaaagtataa

SEQ ID NO: 410953 - DNA, 583 bp, Homo sapiens
gacatctctgttcacaaactccaaaaaacacaggagctatatttctcctgtgccaccagaattcctgtctcaatcatttcgtgtactatgttcagcagttactcctcagtgagtggttcttttgtgaagcatttctgaaagcagaaggcctgtaccttcaagctttcatatttcattctttcaattatttkcctgtaaaacaaaagcctttgaaatcgtcttttactcttgattgttaaccagagatatgccaattgatttcactatccaattagtttattttcttttagggtaaatacttgcaagaaattgcacagctgctgttttatgaactcttttatttttcattttctcctatttgtctattgaggtttttaataatataatttgatcgaaatttgttggaactatcatccaggagttgtaccttttgttagccttgaggctctctcattttgagaagcattaaagagattaaaagtatttattcttagggccacagctgtcttttctctgtttgaccaacaatttacaaagttgtatacatgggttcttgactaaaattatattcaggttaaagtga

SEQ ID NO: 410954 - DNA, 563 bp, Homo sapiens
tttattgatttttaaaaattgtatttgtaggcctgtatttcatttattctgctataatattattattttcttctgtattcttctatagtcattactttctttctcctactttgtactgatttttttttcaattccttgaggtatacagttaggttgtttatttgaggtcttttttatttctcaatataggcatttattgctaaaatcttccctcttggaactgcttttgctccatcccataagttttactatgctttctttctatttctgtttgtttcaagatatatttaatttgttttctaatttttctttggcatattggatttctttgactccatatttaccttaacagtgagttttatattttcttgtatattcatgttcaggataatgctgtgtaaatttcatatatttgtgaattttccagttttcgtcgtggtatttatttctacttttataacagtatgatcaaaaaagaaacttaaygtttctttttaaaagacttcaatcttttaaaatttatgctgacttgttttgtggcctaacatgtgatctatccttga

SEQ ID NO: 410955 - DNA, 578 bp, Homo sapiens
ccaaacctacctttgcggtatttgttaaacattaaagtaaaagaaaagcaaggaatatacataatcggcatcatagcaatgataaccaccctasgtgtagcttaaagactataaaatcatgtctgtaagtatatgtgaaacctaacattggaagtagatctagaagaggggttcaggctggtgtggggtgataaagtggtccaagtactggagggagtgctttggcctggcctttacctcttccccaccgtccccacgcagagatgacactgcccatgacccatgactgtaactcctctgcagttaggacaatgatgaccaaagagaagagtgacttttctatttcttgtccctttccactttgactcaaacacataatgttggaatgctgtaggtgtggagttatctctgctctgatttttctccatgcctatcttgacattgtctcataaacttatttgcaaagactggaacactttttaaaatccatgcaaaatggcctacctaaatatcagctgttattaaatgctctgtaagcataggacaatttgtccagctgttggaactcttgaggatgg

SEQ ID NO: 410956 - DNA, 578 bp, Homo sapiens
ccaaacctacctttgcggtatttgttaaacattaaagtaaaagaaaagcaaggaatatacataatcggcatcatagcaatgataaccaccctaggtgtagcttaaagamtataaaatcatgtctgtaagtatatgtgaaacctaacattggaagtagatctagaagaggggttcaggctggtgtggggtgataaagtggtccaagtactggagggagtgctttggcctggcctttacctcttccccaccgtccccacgcagagatgacactgcccatgacccatgactgtaactcctctgcagttaggacaatgatgaccaaagagaagagtgacttttctatttcttgtccctttccactttgactcaaacacataatgttggaatgctgtaggtgtggagttatctctgctctgatttttctccatgcctatcttgacattgtctcataaacttatttgcaaagactggaacactttttaaaatccatgcaaaatggcctacctaaatatcagctgttattaaatgctctgtaagcataggacaatttgtccagctgttggaactcttgaggatgg

SEQ ID NO: 410957 - DNA, 659 bp, Homo sapiens
ggccaggtgcagtggctcatactcataatcccagcactttgggaggycaaggcaggaagactgctttgaggtttgagaccaccctgggcaacacagtgggactccgtctccaaaaatacacacacacacacacacacacacacacacacacacacacacacacaattagccacgtgtgatggtgcatgcctatagtcccaacaacttgggagactgaggtggcaggatcacttggagaccagaagttcaaggctgcagcaagctgtgatcgcaccactgcactccagcctaggcaacagagcaagaaactgtcttaaaaaataaaaaataaaataaaaaaaaaatatatactacaggcttccaagaggaagcagatactggataattataaaaaaaaaaagccataataatataaaatgaatacctgtggtgggggggaggggatatcgaggggtaagccaacgtttaaggaagagtaaaggaaatgctaaataccatactttaaaaatatttttgatgcccacatcctaacacccacaacagatacagctcttgttcaaacaccacatattaagaaacctgtcagttgctaaatgagtccattgtgcagctggctgtgcacttaagaacagattactatgatcccacaccaaactcta

SEQ ID NO: 410958 - DNA, 534 bp, Homo sapiens
agactattctgaagaggcaagggattccgaggttgaatgggataacagaaaaggaaaatggaagatgatccatgacaagcagaagtgacccatttctcaaactggtaaaaaaaaaaaaaggtgaagcggggggtagagggggatttaggcagtagttcatgaaacaattggtattcttgtggctcttgatggctgagggctatttcaattaacagagatgatagaaaagggcaatccaggcatagcaaaaagactaacaaaaatatctaggctttgagcatagaaaaatatctagactaagtgagctcataccctgtgcatataaaagttattttcwtgagagagaaataaaacaggttcgtaattaataaaaaataaacattatacttattgtttttattcatgtcaataatcacacaaagtctattattgctatgccatatataaagagttctcatatctgctattatcagaatgttcctgtaacaactctattacataattttttttttttgctgatgtagtaacctattt

SEQ ID NO: 410959 - DNA, 534 bp, Homo sapiens
agactattctgaagaggcaagggattccgaggttgaatgggataacagaaaaggaaaatggaagatgatccatgacaagcagaagtgacccatttctcaaactggtaaaaaaaaaaaaaggtgaagcggggggtagagggggatttaggcagtagttcatgaaacaattggtattcttgtggctcttgatggctgagggctatttcaattaacagagatgatagaaaagggcaatccaggcatagcaaaaagactaacaaaaatatctaggctttgagcatagaaaaatatctagactaagtgagctcataccctgtgcatataaaagttattttcatgagagagaaataaaacaggttcgtaattaataaaaaataaacattatacttattgtttttattcatgtcaataatcacacaaagtctattattgctwtgccatatataaagagttctcatatctgctattatcagaatgttcctgtaacaactctattacataattttttttttttgctgatgtagtaacctattt

SEQ ID NO: 410960 - DNA, 543 bp, Homo sapiens
cacactgaagacctttgaaacattataccttattgtaattttaggttgttatttaattaggaataggaaggtacttttttgatacaggctctgaatgatgaccaactgtttatgcatctagttagatttttcactggtattttgggaacattcattcagaaccactttgaattaagctggcagttgcaatttctagtactaagaaatgtatgtatattccctcatagaataatgtaggaagctgtgtactactcttgttaatttcttgaatacacactggttgaatattaattctgatgccagaatcacatgagttttcttatctactgtatgtctatttgggaacagctaaaaaaacttgatactagtatagcttmcactaacaaagctgatgcagtaagggcaagctgcgtctatgatagaaaaagcgaattccagatatttgaatgtaatataacagttagatgttctttataatagaaatatatctggtttctattcttggtatcttgatattcttgattacttgtatagaaagttaaa

SEQ ID NO: 410961 - DNA, 596 bp, Homo sapiens
aaatatttaaaatttttatgggaaacacagcaacacctactggatattacatgaactactttcagtttatgtgtgttttttgttttgttttgtttttttcaactggctactaagttaatagggcattaatacttgtggaattgtttagacctactcatttaataarcagaactgatacagatttcttttggcctagaatattgtgaaaaatattactaaggatactattaacagagaatatttaggactctctggcccaaggaaagatgtttgatatttttatcagagcaattaaagaacccttaaacaaaactgaactaggaaaatcttgtaggtaccaagggttcaggagatcaaaatgggactgtgaaactggttatgaaagtgatattcagttgggtgcacataaatacttatgtattttactcacaaagatattcaaataaatctcattttgatgaacttgagttattttgaatccaaattatgaaagatttttaggaaataggtcaaaacactttgagtgagctaattacatgatttggcttatgtttaaataataaaaacataataggctatcaatcttatatttgaag

SEQ ID NO: 410962 - DNA, 533 bp, Homo sapiens
actgcaatctgatgttccttcatgaaaatctggcttcctcatatatgcacacgtgtgttttgtattagtttcctgtggatgctataacaaatatcacaaattggctaaaacagaaatttattctctcccagtctggaggctacatatctaaaagttgttggcagggttggttccttctggaggctctgaaaaataatctgtttcatgcctctctcstagtttcttgtacttaccagcaatccttggtgttgctgacttgtatatgcattatcctattctcttattcagttttcacatagcattctcctttctgtgtctgaattttattttcttataaggacaacagtcattggatttagggtccaccctaatccagtatgaccttgtcttaacttgattacacctacaaagactctatttccaaataaggtcacattcataggtacctagggttaggatgtcaacatatcattttttggggtatagtttattccatgtctataaactagaaaaacataatacacacttacttg

SEQ ID NO: 410963 - DNA, 596 bp, Homo sapiens
tggcagggttggttccttctggaggctctgaaaaataatctgtttcatgcctctctcgtagtttcttgtacttaccagcaatccttggtgttgctgacttgtatatgcattaycctattctcttattcagttttcacatagcattctcctttctgtgtctgaattttattttcttataaggacaacagtcattggatttagggtccaccctaatccagtatgaccttgtcttaacttgattacacctacaaagactctatttccaaataaggtcacattcataggtacctagggttaggatgtcaacatatcattttttggggtatagtttattccatgtctataaactagaaaaacataatacacacttacttgtatctggatatacttaccatagaagcataaaatagcatgtaagtatcagatatttctattaagtcaaaaatagattttgataattaatattctcattgagctaggcctgtgcagtaatcataaatgtactacaggtgccatagatgacagcacaaaccaaaattatttcttcagctattgcaaacaccaagcacgaatagtatgaattacttaacatttgt

SEQ ID NO: 410964 - DNA, 615 bp, Homo sapiens
atttgtggatacaaatttgatttatgtgtcactgcatagctacagccatccatttttaaatacttttttagtggtggtaaaatatrcataacataaaatttaccatctttaagtctacatttcagtagtgttaagtatattcacattgttgttcaacaaaactctagaattttttatatttcaaaactgaaactctgggcccattgaacaacaactttcattttctacaacctccagcccctgcaaaccaccattctccttttgtttctatgagtttgactatattgggcagtttatgtaagtggaatcatacagtatttgtctttttttgactgttttgtttcatctaacatagtgtcctcaaggtttatttatgttgtagcatatgacaagatggccttctttcttaaggctaaataatgtttcattgaacgtatttaccacattttctttatccattcatccattgatggacatttgagttgcttctacctcttggctactgtgaataatgctgcattgaacaagtatctcttcaagatcctactttcagttcttttgtatgcatacccagaagtaagattggtggatcatttggtaattctgtaagcgaaa

SEQ ID NO: 410965 - DNA, 544 bp, Homo sapiens
atttcatttgaccatcaaagaaccttatttggtcagaaatgctgaaatcttcattttcacatatgtggacactgagcttcaagtttgcagcaccaaaagcagaaatgctgggcttcaaacccaggttcctataactccaaaatctatgctaggaacctctgacaagtgtaaatgttttaacctaaagaatagaaggtgagggggtaaagggatatgaaatctgtttactcatattcaatggatttttcccggatagtatttttgacatattttcataagtcttcaaattcatcacatcattgtgcctaatgtttgaaagaatatgatttggggaaactgtgttaaggacagaaacagttcctcctgttctctccctcaccacacattttcagtggtcctaactaagccccaagmctgcaggggttgtgtctatctttcccacattgttttttctcatatctgtgagaatacttcatacagagtaggtaattagtaatttttataaagatgatttcactaggaccccaacaatggacattgccaa

SEQ ID NO: 410966 - DNA, 588 bp, Homo sapiens
actaagcatgtttcaaccatgtgtactgtgactggaatgtgtaattcatgcatatattgaagagaattacagtttaggatggattcagaatgatattgccatgaaattttatggatcaaatggagattattatattttctggagtcatgctgttcttataaaggccttaggtatggaatgaatatctcatttccttttgctaatcacaagggtctrgacagtggatgacaggtaacacaagctttcatgttacattagtcagtgtgcaaaggaatcttagaagctttttctattcctaaatatgtttatttcttaatgagaaagttataatgtggtctttcaacagtctttctgttagataaattgaaaaatcagtttatcagcattcagctgagactacacatcaaataaaacactaaagtgattccaaaagagatttataatttgaaataactgggcagttgaaaaaaaaattcttgagcaggaccattcaaaaagcctgattctgtagttctggtatggctttgaaatctgttttataaaataaaaccaggtttgagaaacattgctttattaagtcatgggata

SEQ ID NO: 410967 - DNA, 567 bp, Homo sapiens
ttggttatctttacattggaaagttattatttgcacaggttattcattagatacagagagttaaatcaccaagctataaagtgatttgttcacaatgacaatatttcttaaaaatttgtaggttgattttgaacctcacttttgaaagatctcgcgtcccgttttcatataataacaatatgctgcatctctgaggatacgaaaggatgatttatcaaaaatgttgtgtacaattttgaaagttarttattggacttattctttatgccttatcatgataaatttatcttaaatgaatagtaattttcttctgggaagttctttttgaaaaggaatacattgtacttttttaataaacaaaaagaacataatttttgccttattattaaagctgtgaaagtaccttcatttttggaggaagggcaataatattttgtgttaaataaaagccacggacccagagtaccttttataaatataattagtttgtcctaaaagatgcattatgtttgagtctgttatttctttcagggttattaataggaaagcattattgagaactgccaa

SEQ ID NO: 410968 - DNA, 567 bp, Homo sapiens
ttggttatctttacattggaaagttattatttgcacaggttattcattagatacagagagttaaatcaccaagctataaagtgatttgttcacaatgacaatatttcttaaaaatttgtaggttgattttgaacctcacttttgaaagatctcgcgtcccgttttcatataataacaatatgctgcatctctgaggatacgaaaggatgatttatcaaaaatgttgtgtacaattttgaaagttagttattggacttattctttatgccttatcatgataaatttatcttaaatgaatagtaattttcttctgggaagttctttttgaaaaggaatacrttgtacttttttaataaacaaaaagaacataatttttgccttattattaaagctgtgaaagtaccttcatttttggaggaagggcaataatattttgtgttaaataaaagccacggacccagagtaccttttataaatataattagtttgtcctaaaagatgcattatgtttgagtctgttatttctttcagggttattaataggaaagcattattgagaactgccaa

SEQ ID NO: 410969 - DNA, 613 bp, Homo sapiens
tctgactttgcagtaaaaaaatacgcatagaaaataaagcatcttgatgatagcaatgccataattttacttattcttaaagagtttatactatggaacaatcattgcctcttctgggaagataataggacagagagaaaagtcaaaatatgatattttcttagaaagatgatcaaaaaacaagcacttacatggagttttcaactttgtatacaacataaaaggcataatcacttaaacgtttcctatgcctggaaaattctgttaaaagtaaatttttatgattgcagaagtgtaatatcccttagaagacctaatggagataaatttgaagccttccagtaagtcacattagttcagcttcctgaaaggttgaaggatgcttcttttttcacacacaataaacaggcttaatgacagcaagatacaagggtatgttgaagctgacarggtaatgacacataatatgattgatatagaagggaaattgtaatattagaactgaggcaggtatgagggattttcaagttcagtgtttatcatttttaaattgtttcagtgactcccttaaatacaatgcatcatggcccctagttttcacttatatttttct

SEQ ID NO: 410970 - DNA, 560 bp, Homo sapiens
cacatttacttcctttgtaacattatgagtaatttctttatcatccacttattttattcttaatttagttaaatctaaggtggtgggccgggcacagtggctcatgcctgtaatcccrgcattttgggaggccaaggcaggaggatcataaggtcaggagtttgagaccagcctggccaatatggtgaaacctcgtctctactaaaacaaaaatgagttgagtgtggtggcacgtgcctgtagtcccagctacttgaaggctgaggcaggggagaatcccttgaacctgggaggcggaggttgcagtgagccaagaccacaccattgcattccagcctgggcaataagagcaaaactccatctcaaaaaaaaaaaaaaaattcttagatggtgtttagccatacatttctaatttgaccaattatattttattactcagtttgatatttaatttgattcaattcttcctgttaatttttgataacaaaatgttgctagttcttatttatgacattatatttatgtaaacatagttttatgtatctaccagtaattctgtg

SEQ ID NO: 410971 - DNA, 563 bp, Homo sapiens
gagtgcagtggtgtgatcttggctcattgtagcttcggcctgctgggctcaagtgatccttccacctcagcctcctgagtagctaggatgacaggcacatgctaccatgcctggctttttttttttttttgtagagaaggggtctcactatgttatctagagtgataattktttttaatacatgaataatatgaagagatatgattagtgaggtgaggagcagcaatatttaagtttttgaagagcaagaaaatgccgcgccatttggactgactagtttcctgggaatcatgagagtttaggatacatagtgttatcctgaccacagacatgataataagtgggtcgtcatcttatttcagatcatagatgcctctgaaagacttattagtgaagtatataattagaggatcttaatcttctcagaaatcatcatcacctataaatgcatggtctgaacattttttaatagcttagtgggatttttagctacaccagattatcatgtagattttataacctcgttaaggtacagtgcttagcatagaaaccaagacagggga

SEQ ID NO: 410972 - DNA, 498 bp, Homo sapiens
ttgtggtggcgaggcttgcaagaactgaagttccaaccactgggatgggtgattcccacctgggtagggctggttcaaatgcttcttccatgggtgagcatcagttgagttcggtctagttttgctttcttctaaaacagggctgcactgagtccaactcagtgtctcaccatttttgtgctctccctttcccatgcactcagattttctctccaccacactgccactgtcaagggacgggggagaggtggcactgatgattcaggactgtttgtcctacctcctaagtacctcttttagtgatatgaatttaaaaccaggtactttgagcgctcatctgatttttggctcttatgaaggtatttttaaaaaattttttctgtagatatttgttaaattggtgttcttgtgagggtgatgataggtgaagccttccattttgcccccttgcttcagctttttgttgttgttkttttagaaattcttagtgtattgtct

SEQ ID NO: 410973 - DNA, 606 bp, Homo sapiens
gataatgcaggataatctcccattctcaagatccttaatttagttacatcttcaaagattctttttgcaaataaggtaattttcacagcttccagggattaggaatgaatatattgtttaggaaggcactgttcagccactgcaccctcttagtccaataaaatgccccccagatccattcagactccattgacatcctagacaagacattttactctgctgttgttttttcctacataatggtaataataaaaagaatagctaacatttattgagggattggcattatgtactcttgtaagagaattttgtattaaactaaaacttatgaaattgctaatgcttatcaggttttggcccacagaaacagcaatttcattttatttagtcacttaygttcactcatttaaaattcctatttactctataagaaactgactattattattcccagtttacagataaagaaactgaggtacagaaatgttaggagacttacccaaggtcatatatgaaatgttagtaacatcagtatttaccctagatggccaaagtcctgcactcctttaaccttcctccaactaggcttttcttcgctcactaaag

SEQ ID NO: 410974 - DNA, 575 bp, Homo sapiens
atacacatatgtacacagaaacatgtatatacggatgtgtgtatatatgcacatacatgtatttgtgaatgtgtacacatgtgtatatatacgcacatacatatacaaacattaagattttcataaattggctgggtgtgatggctcacgyttgtaatcccagcactttgggaggccaaggcgggtggatcacaaggtcaggagttcaagatcggcctggccaacacaatgaaaccctgtctctattaaaaatacaaaaattcgctgggtgtggtggtgggtgcctgtaatcccagctacttaggaggctgaggcaggagaatcacttgaacctgggaggcagaggttgcagtgagctgagatggtgccactgcactccagcctgggtgacagagctagactctgtctcaaaaaaaaaaaaaaagattttcataaattatgttaattaaataggaaacaaaaagtaaaagaagaacaggctcagggagaaatgtctattccacaccaaactatgtttcactaatctttaatgaaaacagtaaataaggccacaataagaaatatgacattttttt

SEQ ID NO: 410975 - DNA, 629 bp, Homo sapiens
gcaggaactttagaccctgattcaggacaattgcaacccacacttgtgaaaggtggttgtcccattagagtatccaacagactcatttatgatcgtggtattcataataaccatatctaataaagcaagcattgtttagtgaccctagaggatacttaggttcccagatgttgagtgatttgctcaaagttacagagtacrtagctgatgcagaattagcatccaattgttagagcaactctgaaacacctggtcttttacacacccctgagtttgaattctgactttatcatgagttttctgtctaaaactcagtctccttgtctgcacatggtttgctatgggaatcaaataccataacttatatctgacaacaacgaagcaacagcaacaagaacaatgtgaaagatgtctagaattatatctggtatgtagcaagttacctttacaggctagttcccaccatctctatgagtgagcacacatatatacataaaggaagtttaaaggaacctgtaaggttccaggtctcctctgaagcaggtatctcagctcagacacacccaccacagtgaagattaggctccggatctgggagcagtcagtctgccctttgatataaggtcctc

SEQ ID NO: 410976 - DNA, 589 bp, Homo sapiens
tgcaaaaaacttaacaatataacataacaatgcatgaaaagaattatatgactaactgggatttatttcaggtatgcaatgcataatattgcatgaaaagagttatatgactaactgggatttatttcaggtatgcaaggctgatttgaaaaatcagtgattgtaatctatcacatcaacaggttaaagaagaaamcctatcatatcaattgatgaaaagaaagcatttgataaaatccaatagccattcatgacaaaacttctcagcaaggtaggaagagaggagaatttcctctattaacaaaagacatttacaaaaaaacttataagtaacattatacttaattgtgagaaactagatactttcccaccaagatcaggaacaaggcaggaatgttcactttcaccattcctatttaacattatattggaagttctagctaatgtcataagaaaaacatttttaaaaaagatatacagattaggcaaattgtcatcattcacagatgacataattgtctatataggaaatccagaagaattaaccaccacaaaaaatcctgaaacaaaaaggcacctataataagtt

SEQ ID NO: 410977 - DNA, 518 bp, Homo sapiens
ttctaaggaatatgataaaacaatgtaggagatgaaaggtgaaatggccattaaaaaaaaaacacaacaaactgagctgatagagctggaaaactaacttccagaacttcagaatacartaacaagcattaagggcagaattgaccactgaggaaagaatttcagagctcaaagatctgttttttgaaataactatcaggccaaaataaagaaaaaacaataaagaagatcggaaaaaaaaaaaaaaaaacactgacaaatatggaattatataacaagaccaaatttgcaatgcattggcacccctgaaagagagaaagcaagcaacttggaaaacacatttcaggatatcattcatgaaaatttccccaaccttgctagagaggccaacattaaaattcaggaaatgcagagaagccttgcaaaatattatacaaaaaaaccattcccaagatacatagtcatcagattctctaaggctgaaatgaaacacaaaatgttaaaggcagcaagaaaga

SEQ ID NO: 410978 - DNA, 518 bp, Homo sapiens
ttctaaggaatatgataaaacaatgtaggagatgaaaggtgaaatggccattaaaaaaaaaacacaacaaactgagctgatagagctggaaaactaacttccagaacttcagaatacagtaacaagcattaagggcagaattgaccactgaggaaagaatytcagagctcaaagatctgttttttgaaataactatcaggccaaaataaagaaaaaacaataaagaagatcggaaaaaaaaaaaaaaaaacactgacaaatatggaattatataacaagaccaaatttgcaatgcattggcacccctgaaagagagaaagcaagcaacttggaaaacacatttcaggatatcattcatgaaaatttccccaaccttgctagagaggccaacattaaaattcaggaaatgcagagaagccttgcaaaatattatacaaaaaaaccattcccaagatacatagtcatcagattctctaaggctgaaatgaaacacaaaatgttaaaggcagcaagaaaga

SEQ ID NO: 410979 - DNA, 622 bp, Homo sapiens
catcatatgtatgtttttaaagatcatattggcagctaggaggagtaataggagartccttgctgtaagattgaagaaagacgatgctggaagaaaattctgtctaaaatgataaaaagtctccatggcatagtgttgattttttaaaaaagaaaaacatttctcactgtgatcctagttatgtaaatatagcaaaattagtactttcaaccacataatatagactgtatatgtgcgtgaatgtgagtgtgtaaatgcctattttaaaagctctcaggagagacatggaaggcaacatgcccaacagacaagagagttaatactggggtacagggtgggcttgactgtgggtgtggatgaactactcttgtattagttgtttctatttttatttttgcaacgataatttcacatctcaaatctgaattataaaaattataaagctgaatcaaacagttggagagttgtttacataaaaattagaaagattgctttttaactgctaccttaaaaaacgataattttttttaaaaaaatcagtgattctggagacatgaatacaatctaaccattttaagtttacaaatttactgttgaatcattttgctacaaaaataacttg

SEQ ID NO: 410980 - DNA, 622 bp, Homo sapiens
catcatatgtatgtttttaaagatcatattggcagctaggaggagtaataggagagtccttgctgtaagattgaagaaagacgatgctggaagaaaattctgtctaaaatgataaaaagtctccatggcatagtgttgattttttaaaaaagaaaaacatttctcactgtgatcctagttatgtaaatatagcaaaattagtactttcaaccacataatataractgtatatgtgcgtgaatgtgagtgtgtaaatgcctattttaaaagctctcaggagagacatggaaggcaacatgcccaacagacaagagagttaatactggggtacagggtgggcttgactgtgggtgtggatgaactactcttgtattagttgtttctatttttatttttgcaacgataatttcacatctcaaatctgaattataaaaattataaagctgaatcaaacagttggagagttgtttacataaaaattagaaagattgctttttaactgctaccttaaaaaacgataattttttttaaaaaaatcagtgattctggagacatgaatacaatctaaccattttaagtttacaaatttactgttgaatcattttgctacaaaaataacttg

SEQ ID NO: 410981 - DNA, 573 bp, Homo sapiens
agaagaatgggaaggtcctttctcaactcgacatgagaggcagactatgaataaggtatggggcaccactgggctttggggggaaccacagtggcaagtcatagttgttggagaccartgagaaacccagaggctctaggaattgggaggaaacaaaattgcttattgaaagaaggtagcaaaagaaaggaaaggatcagggcttgagtgaatcagaagacaactcctcaatttttccccatgactaatgaatggaaaagtaatttccatgtgtcttgaagaatattacttttcacaaaatatatcacgcaagagatgagagtgccttaaagtgttggcagtagcaataaagaaaaatgggtgtaaatacaatagctttgtaagtgaaattgacaggacttagtagagtgggagtgaaggaaaaaagatgtagtggattaggagtgcaggataaaggagaaaccggggtgtttctaaatttctgacttaggcaacagaatgcttgtaggtgacatttaactacatgggaaagactagaaaaagaataagcatgaagaagaaaataggaaaatt

SEQ ID NO: 410982 - DNA, 573 bp, Homo sapiens
agaagaatgggaaggtcctttctcaactcgacatgagaggcagactatgaataaggtatggggcaccactgggctttggggggaaccacagtggcaagtcatagttgttggagaccagtgagaaacccagaggctctaggaattgggaggaaacaaaattgcttattgaaagaaggtagcaaaagaaaggaaaggatcagggcttgagtgaatcagaagacaactcctcaatttttccccatgactaatgaatggaaaagtaatttccatgtgtcttgaagaatattacttttcacaaaatatatcacgcaagagatgagagtgccttaaagtgttggcagtagcaataaagaaaaatggktgtaaatacaatagctttgtaagtgaaattgacaggacttagtagagtgggagtgaaggaaaaaagatgtagtggattaggagtgcaggataaaggagaaaccggggtgtttctaaatttctgacttaggcaacagaatgcttgtaggtgacatttaactacatgggaaagactagaaaaagaataagcatgaagaagaaaataggaaaatt

SEQ ID NO: 410983 - DNA, 573 bp, Homo sapiens
agaagaatgggaaggtcctttctcaactcgacatgagaggcagactatgaataaggtatggggcaccactgggctttggggggaaccacagtggcaagtcatagttgttggagaccagtgagaaacccagaggctctaggaattgggaggaaacaaaattgcttattgaaagaaggtagcaaaagaaaggaaaggatcagggcttgagtgaatcagaagacaactcctcaatttttccccatgactaatgaatggaaaagtaatttccatgtgtcttgaagaatattacttttcacaaaatatatcacgcaagagatgagagtgccttaaagtgttggcagtagcaataaagaaaaatgggtgtaaatacaatagctttgtaagtgaaattgacaggacttagtagagtgggagtgaaggaaaaaagatgtagtggattaggagtgcaggataaaggagaaacyggggtgtttctaaatttctgacttaggcaacagaatgcttgtaggtgacatttaactacatgggaaagactagaaaaagaataagcatgaagaagaaaataggaaaatt

SEQ ID NO: 410984 - DNA, 607 bp, Homo sapiens
ttatgaatatgtcccccatcatgtcatatcctcaaagaaaggaaaccctaataatggtgcctggaattgagagctagacactgttggtatggtcgtgctgttgagcatgtaaaagcagcttctatctttaagttggttattaggttaataacttttttaaaatggagggctaaaaaaatatgtaatttgctataaagcacaaggtgatttggggtcagagtgattctcttctttatccattatagtcattgtaggattccaaatatttagtgccatattgagcacagatayacacaacagcaacccttggttttatatttacctggagaaccaatttgagatttatgtttgctctctattaatggtggattttttaaaatgaaagcagaatactaataaatttcctctgctttctctggtctgtattatctatgaatatttgaatccccttaccttcactatcccctttgcataagaattttgctgctttgagaagatagaggacacaatattaaaatatatgtgtggaatccaaggcagctgatggagatggcagcaattttgaatgacttcatcaagtatgacgttttttagcaatatgttataa

SEQ ID NO: 410985 - DNA, 607 bp, Homo sapiens
ttatgaatatgtcccccatcatgtcatatcctcaaagaaaggaaaccctaataatggtgcctggaattgagagctagacactgttggtatggtcgtgctgttgagcatgtaaaagcagcttctatctttaagttggttattaggttaataacttttttaaaatggagggctaaaaaaatatgtaatttgctataaagcacaaggtgatttggggtcagagtgattctcttctttatccattatagtcattgtaggattccaaatatttagtgccatattgagcacagatatacacaacagcaacccttggttttatatttacctggagaaccaatttgagatttatgtttgctctctattaatggtggattttttaaaatgaaagcagaatactaataaatttcctctgctttctctggtctgtattatctatgaatatttgaatccccttaccttcactatcccctttgcataagaattttgctgctttgagaagatagaggacacaatattaaaatatatgtgtggaatccaaggcagctgatggagatggcagcaattttgaatgacttcatcaagtatgacrttttttagcaatatgttataa

SEQ ID NO: 410986 - DNA, 617 bp, Homo sapiens
gtatatattatatattgatgagaatgaaataataatttcaatcttgccgtatgtgataaaggaagaaagatgagaaagtatcatctgattctcctgtaccttgattcccaaaagcataaagcatttgattgaagttagtaaccatgtttttcctagacatttcccctgcaatatgtggtggtgaaaaagccccgtcagggcactagtaggtaaaatttatagattaaacacacatatttatctttttttaccaaagcgattacaagacatactgagagcagacagtggacgagagatagcagctaactgttgtaagacacaaaatggtccaatgagtattgatgaattagtagttggtgaaactctctacctggataactgttttaaaacttgcatggaagaatgtccaatccctagctccccttcaaatcccatataagcaggcccaacacagcttcttaaagagggagtctgaagaatgcaaaagggggctgaactacaaattgtggctgcctgaaatgaggcaggtaggcttatayctccacagctaaggacatagaaaaatgtctcattatttggggaatcccaaagttgatcctccctctcttaaccatata

SEQ ID NO: 410987 - DNA, 557 bp, Homo sapiens
gaattggaagtagagccccaagatgtgactgatttgctgaaaccttataataaaattttactgaataagcagttgctttttatraaggaggaaaaagggagcttcatgaaatggaatccactcctaatgaagttgctatgaatattgttgaaatgacaacaaagaattgagaatattacataaacatagttgataaagcagtggctgggttttataagattgactccaattttgaaagaagttaaaatgcttttaaatagcatcacatgcttcagataaatctttcatgaaaagaaaagtcaaaaaatttggcaaacttcattgtgtcatcttattttaagaaattaccacagccaccccaactttcagtaagtatcactctgtttaattagcagccatcgagactgaggcaagacatcctgctaacaaaaagagtttggtttgctggaggctcagatgattgttagcattgtttagcagtaaagtattttaaattatgatatgaacattgttttttaggcatacttaatactacacacttaatagtctattgcaca

SEQ ID NO: 410988 - DNA, 550 bp, Homo sapiens
agtgtaaacatgacttttatactttaattcttgtgaaacagaaaagtttatgtgactggctttattgcaatatttgctttattgcagtggtctggaactaaatccacaacatcacaaaggtatgcttgtacgcagagagccccaaaatacatgaagcaaaatggacataattgacagaaaaatagacaattcaaccgaaatgattggacacttaaacagccactttcagtagtggatagagcaacaagacagaaaattaacggataatattagacttcaaaaacagtataaaccaacrggacctgacagacattttatagagcactccacccaacaatggtagaatacacagttgtcttgagttcacatttaactgtctctagaatacagcatgtgctaggccacaaaacgagcctcaataaattttaaaatatttaaaatatgaaaaatatcttctctgactatgatggaatgaaataaaaatcaacaacaggaaaaattgggaaaattcaccagtggaaataaaatactactttctaagtcacagatt

SEQ ID NO: 410989 - DNA, 501 bp, Homo sapiens
tgtattttacctggtgttcttttcagtaattggataaaatattctaaatatattgtggaaaagttaatttagaaatcagaaattagctaacaaactctcctrtgaacagaaggaagaaagtcacttggtttaacatgaccaattttaatattttaagatatcagaaaggacaagaggggctgatagagacagaatctatagggattgcctgtgatgggagatccagtgtagtatgaaaagctaagcttttattattcatacttttcaatttgcaggtaatgcccggttccttaaaactgggaaatctttgaaaattttaatcctttctaaaaatatagactttatttttagaccagttttaaggtcacagaaaattgaacaggaagtacatagcttttccatatagcccttgcccctacacatgaatagcctcttctgtgatcaacatccccccatcagtgcttcatctattataatacaactgatgagcctaggttgaca

SEQ ID NO: 410990 - DNA, 501 bp, Homo sapiens
tgtattttacctggtgttcttttcagtaattggataaaatattctaaatatattgtggaaaagttaatttagaaatcagaaattagctaacaaactctcctgtgaacagaaggaagaaagtcacttggtttaacatgaccaattttaatattttaagatatcagaaaggacaagaggggctgatagagacagaatctatagggattgcctgtgatgggagatccagtgtagtatgaaaagctaagcttttattattcatacttttcaatttgcaggtaatgccsggttccttaaaactgggaaatctttgaaaattttaatcctttctaaaaatatagactttatttttagaccagttttaaggtcacagaaaattgaacaggaagtacatagcttttccatatagcccttgcccctacacatgaatagcctcttctgtgatcaacatccccccatcagtgcttcatctattataatacaactgatgagcctaggttgaca

SEQ ID NO: 410991 - DNA, 590 bp, Homo sapiens
gttcattcatgctgtctactttatccagtasagccttagcatattaatcatggttgttttagtacccaatttgatatttttaacattcttaccatatctgagtctggttttagtgcttgttctatctttcaaactaagtatttcgtttgtagtatgtcttgtaatttttttcttcatagccagacatgatgtattgggtaaaaggaactgccagaaataagtctttagtatgtgacagtgaggcgtgggggagggaaagtgttctatattcctttgatcaggccttagtcttttagtaagcctgtacattggattgtgaatttcacaagtgtttctcaatatccttcctgccccagtgggacaagatggctagattgggctggagctcagtattttccttactccccatagaaggctagagcagctggagtgagagatttccctttctccaggtaacttaagctctgagaaaaccccagcaggttagactctgtttaaatagtttctcctgagggcagattttgttaagaagaatagaatgttctggtgtgtttcaggatggttattttcccctcctcctgccagaagca

SEQ ID NO: 410992 - DNA, 629 bp, Homo sapiens
tttttaacattcttaccatatctgagtctggttttagtgcttgttctatctttcaaactaagtatttcgtttgtagtatgtcttgtaatttttttcttcatagccagacatgatgtattggrtaaaaggaactgccagaaataagtctttagtatgtgacagtgaggcgtgggggagggaaagtgttctatattcctttgatcaggccttagtcttttagtaagcctgtacattggattgtgaatttcacaagtgtttctcaatatccttcctgccccagtgggacaagatggctagattgggctggagctcagtattttccttactccccatagaaggctagagcagctggagtgagagatttccctttctccaggtaacttaagctctgagaaaaccccagcaggttagactctgtttaaatagtttctcctgagggcagattttgttaagaagaatagaatgttctggtgtgtttcaggatggttattttcccctcctcctgccagaagcaagacaagatttttctttgataatcactgtgacgttctggtagagctcctggaggtaaaactcacagaaactcacaaaaccgggttcccctggagtttttaaagctaagttgtcta

SEQ ID NO: 410993 - DNA, 629 bp, Homo sapiens
tttttaacattcttaccatatctgagtctggttttagtgcttgttctatctttcaaactaagtatttcgtttgtagtatgtcttgtaatttttttcttcatagccagacatgatgtattgggtaaaaggaactgccagaaataagtctttagtatgtgacagtgaggcgtgggggagggaaagtgttctatattcctttgatcaggccttagtcttttagtaagcctgtacattggattgtgaatttcacaagtgtttctcaatatccttcctgccccagtgggacaagatggctagattgggctggagctcagtattttccttactccccatagaaggctagagcagctggagtgagagatttccctttctccaggtaacttaagctctgagaaaaccccagcaggttagactctgtttaaatagtttctcctgagggcagattttgttaagaagaatagaatgttctggtgtrtttcaggatggttattttcccctcctcctgccagaagcaagacaagatttttctttgataatcactgtgacgttctggtagagctcctggaggtaaaactcacagaaactcacaaaaccgggttcccctggagtttttaaagctaagttgtcta

SEQ ID NO: 410994 - DNA, 629 bp, Homo sapiens
tttttaacattcttaccatatctgagtctggttttagtgcttgttctatctttcaaactaagtatttcgtttgtagtatgtcttgtaatttttttcttcatagccagacatgatgtattgggtaaaaggaactgccagaaataagtctttagtatgtgacagtgaggcgtgggggagggaaagtgttctatattcctttgatcaggccttagtcttttagtaagcctgtacattggattgtgaatttcacaagtgtttctcaatatccttcctgccccagtgggacaagatggctagattgggctggagctcagtattttccttactccccatagaaggctagagcagctggagtgagagatttccctttctccaggtaacttaagctctgagaaaaccccagcaggttagactctgtttaaatagtttctcctgagggcagattttgttaagaagaatagaatgttctggtgtgtttcaggatggttattttcccctcctcctgccagaagcaagacaagatttttctttgataatcactgtgacgwtctggtagagctcctggaggtaaaactcacagaaactcacaaaaccgggttcccctggagtttttaaagctaagttgtcta

SEQ ID NO: 410995 - DNA, 541 bp, Homo sapiens
ttattgttgaaagtgaagtatggaagtcctgtacattattgtattgccatcaatttctccctccagttctattaatatttgttttatatatttaggtgctttgatgttgggcatgtacatatttatgattcttaaaccctgttgatgaattgacccctttataattacataataaatttgtttcttattaaaatttttgaagattaaaagactactctgtcttatgtaagtatagccatctccaatctgcttggtttttatttgcatggtttatctttttctatcccatcacttttagcttatctgtgttcttaaaggtaaagtgaggatttcgtaggcagcatatagttcttatagttgggtctccttcttyttcttttttttttgtggtctgtcaattactctatgtcttttgattgggtaatttattccatttacctttaaagtagtactttatagttaagaacttaatatttccattttattaattgctttctgatttttttggagtttcttcctattctatctcttgctgtcttcc

SEQ ID NO: 410996 - DNA, 563 bp, Homo sapiens
attcctgaccctcctggtggtcctgaattggtgccttgtgtgttcgaagaaataagcacctctttaagtctttacagattagctttggcaggaaagcacttcttcagcaatcttatctagagattctgggtgggctggctagtggggcctaaatgtatacttgctgcctaaattcttcaagcatgctggcctagtgcctgcatcagtgggctgatgggtctggtgcctagctacacatgggccagtctagtaccttgtctgtmgggacaggcccagagcctgggtccactggtgcaggcctgaagcttggatttgttgtatggttctagagcctaggtctgagggagcttgcctgtaatctcggtccatgagggtcagcatggcactagagtcctctgtgatgggcctggtgactggagtcattggggagtacctggaacttaggtacatgggagctgaactgaagcctgggtccatgagaactgacctggtgctgggccaggccttgaacttaggttcacagaggcacaactatcactgaagcaggcctagtacctgtgtcc

SEQ ID NO: 410997 - DNA, 563 bp, Homo sapiens
attcctgaccctcctggtggtcctgaattggtgccttgtgtgttcgaagaaataagcacctctttaagtctttacagattagctttggcaggaaagcacttcttcagcaatcttatctagagattctgggtgggctggctagtggggcctaaatgtatacttgctgcctaaattcttcaagcatgctggcctagtgcctgcatcagtgggctgatgggtctggtgcctagctacacatgggccagtctagtaccttgtctgtagggacaggcccagagcctgggtccactggtgcaggcctgaagcttggatttgttgtatggttctagagcctaggtctgagggarcttgcctgtaatctcggtccatgagggtcagcatggcactagagtcctctgtgatgggcctggtgactggagtcattggggagtacctggaacttaggtacatgggagctgaactgaagcctgggtccatgagaactgacctggtgctgggccaggccttgaacttaggttcacagaggcacaactatcactgaagcaggcctagtacctgtgtcc

SEQ ID NO: 410998 - DNA, 572 bp, Homo sapiens
cctggaacaagctatcaggctttttaagagtccttgtcacataaatgcaagtatctggtttgaggtatcaccagagatctgacaactgctttggaaacagagtaatagcacgtttttcccatgggagccatgggcaatttgattcatttcacatatttgtgagagagtgtgtatggatggggtgtttgcctctaaaatgcagctgacaatgagtatttgcaaaaattaaactgtctctatcagtgcacaccaaatgtcatgtcaaatttcacctcttaaacyttgctcctgctttgtgggcagtggatgtaagaagtggcatatgcacatatccatacccatctgcccacactcccaagctcacacatttggaatttgctcacaggttgcacgctggtaaatacaaggcacatctgccaaatgtctgcaccagtgacatctgatattcttgtgccagtcacttccccagagatgagatttacatagcaacagacccagcagggtccattaaatttctccttatcctttcctaggtgcagtgagtgcctgttaagaaaccccaacggctctgt

SEQ ID NO: 410999 - DNA, 592 bp, Homo sapiens
ggaagtgaagggtacaacaatatcggatgtcagattttaaaggaagggaatatcttcatctctcctgaaccactaattgagattatccattgcttgctgccaaaagaaagacataaatagaaacaaaactgaaagtagacaataaagcaaacaaaaatctgcraacaatgaaactaaatcaaatcttcccagtgtaaactctgggcttaacatgcctcctgttgtgttttgatatttttggtgtcataaaaaagtaaacaggatattttatttccagggccttataaagccagatggtaggggccttatctattctttggataattctggtatcctccattggcttaagccagatttagactcacctcatactaggtaaaaaaaaaaaaaaaaaaaagtgttctaaacatatgaaaatagaagcagaatggcaaggcctggactgagatgaagcaagtggggcatttgcattgtctgaaaaattttaaagggtgccaaaaaacttaggaattgagataaacaatattttaaagcagtatttttaaaaaatgaatgcaaaaaattgatgatgaacaaaatatcaaaattttaa

SEQ ID NO: 411000 - DNA, 346 bp, Homo sapiens
ttaatatcatctgctagattagtcttgttcagaatgattctgggtttgcgcttccacatctagaagaagttattaattctttcttacaacattaggacttagattttgaagaaattattaacatttttaaattaaaaaatttaaaaataactgggttaggactcaatctagtggctctgaaatgtgactatagcttatctaggacatgttggacgtcatttttaaaattgagctacaataaatatagcataaagtatattaagtatattaattttaagtatatagctttgwgaagttctgcataagaaaacaattgtggtgactatcaccttgatcaagatgtaaa

SEQ ID NO: 411001 - DNA, 346 bp, Homo sapiens
ttaatatcatctgctagattagtcttgttcagaatgattctgggtttgcgcttccacatctagaagaagttattaattctttcttacaacattaggacttagattttgaagaaattattaacatttttaaattaaaaaatttaaaaataactgggttaggactcaatctagtggctctgaaatgtgactatagcttatctaggacatgttggacgtcatttttaaaattgagctacaataaatatagcataaagtatattaagtatattaattttaagtatatagctttgtraagttctgcataagaaaacaattgtggtgactatcaccttgatcaagatgtaaa

SEQ ID NO: 411002 - DNA, 471 bp, Homo sapiens
tgacatctggctttctgaagcagatttaaaaagaaaaaaacagtgaaagtcagtgaaaaagaaaaggtaaataatcccatctacagaaataaaaatatatagtgtaaatcatatacaaagttgtaaagtcttggtgtattttttaggaaaataaaaatcaatttaactctaaaggttactaaaatgattttttaaatattcaacagtaataaaatataaataaatggacaatcttgatatgatctctcttattcttcctctctttcacacatatatacataattctgggaaacattaaaaaattcctacactataacttagcaactactrtattaggaatatactagttgagatgttagttaagagtataaaataagatatataaatattgggttgaaagagaaaaattatttgaagatattatgaatagatgcctagaaaacactaggaaaaataagaaaaaatagaaaa

SEQ ID NO: 411003 - DNA, 459 bp, Homo sapiens
tgcataagctttcagctcctttggataaatataaaggaatacaaaaattctttagtttttacattccttctatccaatgattagactcctatccaatcaagcagaacacagttagcttgacaatatcaaagttactaatatctccctaactccttgtgcctctctatcaatcaagtttatactaaccaaagtgatactttcaaaacaaatcttaaataacatcttgctccactttaaaccttttattggtttcccattacctattgctcttaggatacagcccaaaatccttattatgttctacaagttcatcaacattgcatattagaatctacccaaggagcttaagaaacagaaaaacaaaaaccactcccrgagaagggtaatatattaatcatatcccccctgaaagaggacacattcaaattagaataatttgaagaatgcttgtttacagat

SEQ ID NO: 411004 - DNA, 584 bp, Homo sapiens
tttaatatcaatttttcatattatactgctttgtgtcaattttccctttttaagaatgtgggatttcacagaagttgctcttccgttttgactcacatttggtctctgtcrgaaattattttggtatttctatgtctcataaattatcagcaaataaggcatagattctatgtttataggttttattttccataatcctttttcccccaatggtgtgtcttctcattcgtaatattttggttttcatttagtcctatcaatcactatatttcttcaggtaacactttcaggaaaggaacaaggatggtaaattttctgaattcctggatatctatggatggctttttttctcggcataaaaacaacaacttgcacatagaatttttccctcagaaatcatagaaattttcctttttagccaatacttattattgcataaattctgttgttgataatttttatttttattagagatagctgggcaataattaatattgtgtgtttgtgtgtgtgtgtgtgtattcctacataagtgcttggagaaaaaccatttggacttttcaaaatgttaccatgttttggtt

SEQ ID NO: 411005 - DNA, 584 bp, Homo sapiens
tttaatatcaatttttcatattatactgctttgtgtcaattttccctttttaagaatgtgggatttcacagaagttgctcttccgttttgactcacatttggtctctgtcagaaattattttggtatttctatgtctcataaattatcagcaaataaggcatagattctatgtttataggttttattttccataatcctttttcccccaatggtgtgtcttctcattcgtaatattttggttttcatttagtcctatcaatcactatatttcttcaggtaacactttcaggaaaggaacaaggatggtaaattttctgaattcctggatatctatggatgrctttttttctcggcataaaaacaacaacttgcacatagaatttttccctcagaaatcatagaaattttcctttttagccaatacttattattgcataaattctgttgttgataatttttatttttattagagatagctgggcaataattaatattgtgtgtttgtgtgtgtgtgtgtgtattcctacataagtgcttggagaaaaaccatttggacttttcaaaatgttaccatgttttggtt

SEQ ID NO: 411006 - DNA, 564 bp, Homo sapiens
caataaagttgaaatagtttactttagccactgaaaaggaaactgactgtgatgaagaaaggaaaatcttacattccacagcatttccccgtccacttttggatgatatagttgggtttygcatagtccagttctcagatgcatcatcaaatacctgatttaggtcattaatcccaagggagtggtatacatctcactttgctgaaatacttggctttatgttgccaattctctcctagtctcagcctgcttagctcaaagtgacatagaggcttgccaaatgaagacttatatatgtccatatatttgaccagtggagacattcaacttggataattagaaaaataaaaataacaaataaagaagatcaacaattaattaaatgatcagatcaactagactgctgccaaattgtttatgtctttggaccaggaaaagattgctaaaggttaatgaggtcatgaatgttcttccttggcacttcaaacttttccccacttacattttccctcttttctttgcttttctataaacttctgtgtgcttcactacctccatttgttg

SEQ ID NO: 411007 - DNA, 562 bp, Homo sapiens
tgtcttttatgaattttaaattaaactcaaatacacaaatcaatgttattttaactaaataaaaaatgaaaataaattgtaccccaaattctggtttgttaagttcaaaaaaagtaatatactgacaaaagtcataagcttaatatacactgggtgcatttaactagagtaatatttttaacaaagagagaataggttgtccataatgtttattttactgaatggtccgctaggatgatggcattataaatatgtatgtgtgtgtgtgtgacagagaaagaaagataatttttaggcaaaattcagttcaaaaattgcttgcattgaaatataaacactttacttattaaacagctcatttttctttcatttggatcgtattattttaaaattatttcaaacatagtaaaatgttcacatttaaaagcccatttcagaagaaaaacagcaggacttatagataaatgatagatagatgatagatagatagatagatagatagatagatagatagatagacatagatyatgtcttagtttgtttgtgcattgtcatagaatag

SEQ ID NO: 411008 - DNA, 612 bp, Homo sapiens
gtaatactaacaagtattggcaagtatttggaccaatagggagtcatccatcactggtagtggcttaagttgataaaatcagtgtgacacatgggaaaactgtcagtgtgtaccaaaactaaacatgtataccaaaactaaacatatgtaccaaaacaaacataaaggctttgatccaaaggattttctcccatgtgtatatgtaacagaaatgcatacagatatgcatcaaagacacgtataagaaagttagttgcagcattatttataatagttcaaaatcataagtaaatcaaatatcattaaatgtgtactggataaacagtgatatattcatataacaaaatattatacagcaataaaataaatgaattargttggttcctcactgttttttccttttataaatattcattaagaattctagtatattttggtttctagattttcctatcttgtttacgctacctaaatctttgccacagtttttctagttaataacaactccaaatttgaaatatatgatgggaaaactagtgttgggaatgaaaacaactagcattaaagattaatgtaaataaatatagtttattattttgcagattttattta

SEQ ID NO: 411009 - DNA, 519 bp, Homo sapiens
actctctctcctttgaactctcattacattatgacaatgcccaaatgtttacaattttacctgctctaatttttgtattttcatttgcagttgaaaccacacgagattttaggtcttttggagatagggacttgtgctatatttctttgagttaccctccatctgctttatttatgactgacagtcattaagaaactcgcatttcttgcaccccttcccttttagtaacagtcatttggscccctaatagcctgatctgttgatcaataactgattccagaatgggcatgtgaaccagatggtccaatcagagtaagacagaggatttttctttgatggttaagggaaaggaaactttctgttctaaactctgcggtgtgcaagggtggtatggtttggctctgtgtcctcaaccaaatcccatctcaagttaaaatccccacatgtggaggtagagacctggtgggaggtgattggatcatgggggcagtttccccatgttgttctcatgatagtgag

SEQ ID NO: 411010 - DNA, 545 bp, Homo sapiens
aaagtgtttgtcagctcccccctcgctctgtctttctctctctctcccctgctgccttgtgaagacatgccttgcttccccttcgccttcaccttccaygatgactgtaacttccctgaggcctccccagccgtgcagaactgtgagttaattaaacctttttgtttataaattactcagcctcagggagtacttttatagcagtgtaaaaatggactaatataggggataaggcttgaaacccctgcagccttttatcaccactagggaaagcatcctgaaaagacgccgttggaacaaagtgcatcagacaagaaaatagcagagaaactcagctgctggagaccaagttgatccatacacaaagctgcctgctacctctagtgttgtcttgtttcctgaggcaacacattctctgtattgtttaagctatgttatgtgaggtctttatggtacttgaaaatgattctgttctaattgatacttagataccaggagcaacaattttgcactagataattcctaggagatataatacagaagga

SEQ ID NO: 411011 - DNA, 567 bp, Homo sapiens
gataaatcttatcgagtacaggagtccagaaagcgaacattttggttctagttcttttgttccagttaaggaagttgagtaatttcatttttccagcactgcaaacagccagatttcaaatagtgatgataagtcagtagcattgacactgggttggtgttgaaatgggtgggtgagagcaaagctacgaggatgtgaagacatacagagcaaaatgatggactttggggctttggcgcggccaggttgggcaggggggsagggatcaaagactccatataaaatgtatagtcttttatccctcatcccctgtacccatatgggacatgcagggccactggggcctttgtctattcccccttcattccacccttatgggtacagtgtacactgcttgggtgatgggtgcactaaaatctcagaattcaccactatagaacccatccatgtaaccaaaactcacatgtaccccaaaacatactgcagtaaaaaaaaaattaaaaaataaataggcgggcgagccagaattatagcaatgcaagagaatcaaatatcaattgagagagt

SEQ ID NO: 411012 - DNA, 567 bp, Homo sapiens
gataaatcttatcgagtacaggagtccagaaagcgaacattttggttctagttcttttgttccagttaaggaagttgagtaatttcatttttccagcactgcaaacagccagatttcaaatagtgatgataagtcagtagcattgacactgggttggtgttgaaatgggtgggtgagagcaaagctacgaggatgtgaagacatacagagcaaaatgatggactttggggctttggcgcggccaggttgggcaggggggcagggatcaaagactccatataaaatgtatagtcttttatccctcatcccctgtacccatatgggacatgcagggccactggggcctttgtctattcccccttcattccacccttatgggtacagtgtacactgcttgggtgatgggtgcactaaaatctcagaattcaccactatagaacccatccatgtaaccaaaactcacatgtaccccaaaacatactgcagtaaaaaaaaaattaaaaaataaataggcgsgcgagccagaattatagcaatgcaagagaatcaaatatcaattgagagagt

SEQ ID NO: 411013 - DNA, 547 bp, Homo sapiens
gacaagagagtcacagatgtcaaggattttagtgcagatattagcactgtgttgggtgtgaytgagctgctatgtgagagtccataagtctgcctgaggatgagcggaaagaatacatagcagtgtgtttgcatcagcagggcctgacccaagagcgataaagtcttctcttcctttctgtcagagttttacctttggcctattctggactgcaaatagcattgccaagcacttcccttaaataacttctcttttttgcaggactatcctctcagccctgccaaaaccccatcacctactctttctttactactttgcctatttaatgctggaatttttatttaaactgtagctgatttactgaaggtaattaagtgctttcatgctgtagatctcctgctagactacaggctgtacttgggagtgagagtgaacaaaatgtaaataaatgatgtcaacagagtaggttcctttgtggtcatgttgctttgcttccaagacactcttttttttttcataagtagaatgattcatgaatatgttatta

SEQ ID NO: 411014 - DNA, 547 bp, Homo sapiens
gacaagagagtcacagatgtcaaggattttagtgcagatattagcactgtgttgggtgtgattgagctgctatgtgagagtccataagtctgcctgaggatgagcggaaagaatacatagcagtgtgtttgcatcagcagggcctgacccaagagcgataaagtcttctcttcctttctgtcagagttttacctttggcctattctggactgcaaatagcattgccaagcamttcccttaaataacttctcttttttgcaggactatcctctcagccctgccaaaaccccatcacctactctttctttactactttgcctatttaatgctggaatttttatttaaactgtagctgatttactgaaggtaattaagtgctttcatgctgtagatctcctgctagactacaggctgtacttgggagtgagagtgaacaaaatgtaaataaatgatgtcaacagagtaggttcctttgtggtcatgttgctttgcttccaagacactcttttttttttcataagtagaatgattcatgaatatgttatta

SEQ ID NO: 411015 - DNA, 552 bp, Homo sapiens
acctggtgcttaacacatagtagatgctctattagtgttggaatggatgagctctagtgagtaagcgcctaagacaacacagaccctaaggtcttctgaacccaaccaagtgccctgtttttgctgctataccaggctgtccttcttcccactgccatcctcctggttctgttctctcagcccaagcaccgtgtgtagcctaatcatgtatatctattctcagagtttgtaggacaggatacgagttaacracttaacgcccttcaagattttgtgtaacagggaaaggagagaacacctggaatggttcccgcttggagaaacgtttttcatccttcttagtttcagctccaatcagatggattcagcctgtgacagtcaacatttacagcccttgggagcagctccatactcacctcctttgcctgcttaccgcaagctcactgcctcctcctcagattgtgccagacataccaggtttgctgccggtgagaagcaacaatccaaatcctacctttctgttcaggtcccagtaaaatcttcactggcagc

SEQ ID NO: 411016 - DNA, 578 bp, Homo sapiens
tcaaaattgtttggctgttctagttagttcacctktgcatataaattttaaaattcgtttgtcagtttttacaaaaatccttctggggttttgattagaattgttgaatgtaggtgtaaatctagggagaaattacatcttaacaataattatgtcttccagttcatgaatatacatgtctgtatttatttagattgttaatttctttaattattgttttatatttttcagcgtaggaatattgtacatatttcctaaggtttataatgaagtattccatgttttggggtgcttttacaaatggtgatttaaaaatatgcaatttcaagtattcattgctactgtatagataagattgatctttgtatattgcccatgtgtgctgtaactttgctaaaattatttattctagtagctttttttttattcggggggaggtttaatgaaaaaaattatgttttcaatgtagtgcatctttatatatatatatatatatatatatatatatatatatataaaatggaatacaattcagccataaaaaagaatggaatcatgtcttttgcagcaacatggat

SEQ ID NO: 411017 - DNA, 528 bp, Homo sapiens
agttggggtaaaagtaattcacaaaatgtacaccatagggtctgggcactggctaaaagtaagcctctgaatttttgaacaaccaccacaacaacaaaaggaagcacattcaattatataattcaaaatgcccacaagattataaaactagttgctcaagaaaagcagttggccaggagcagtgactcacgcctgtcatcctagcactttgggaggacaaggtgggtagattgcttgagctcaggagttcgagactagcctgggcaatatggtgaaatcccatttctacaaaaaatacaaaaattagctgggtgtggtggctcatgcctgtagtcccagctacttggggggctgaggcaggagaatagcttgaacccgggaggtggaggttgcagtgagacaagattgcatcactgcactccagtgaaaccctgtctccaaaaaaaaaaaaagaaaaaaaascagttatttgtggtactaaatttctgcaggctcttgttaagagaacacaatgtgataagttagcac

SEQ ID NO: 411018 - DNA, 594 bp, Homo sapiens
tacaggcatgagccacctcgcctggcctcttttttttttttttttttttttaacggagtctcactctgtcacctaggctggagggcagtggcatgatctcggctcactgcaacctccgcctcctgggttcaagcaattctcctacttcagcctcycaagtagctgggattacaggtgcccgccccacgcccggctaatttttgtttgtttgtttgtttgtttgtatttttttttagtagagatggggtttcaccatattggccaggttggtcttgaactcctgacctcaggtgatctgcctgcctcggcctcccaaagtgcaaggattacaggcctcagccaccgtgcccagcccaatcttacaatcttattgagagaaaaaaatacaactgaaaaaaattaataagcaaagcaacacaatcacatgctagattagatgccacaatcagctgatacatcatttcactaaacagcctgcatattaaacaaccgttccgttttgtgtatgtggaatattttattatcaattattaggtgcccaatgtatgtcaatatcaaataaagggcaaggaacctggaaaagaattgaggaca

SEQ ID NO: 411019 - DNA, 594 bp, Homo sapiens
tacaggcatgagccacctcgcctggcctcttttttttttttttttttttttaacggagtctcactctgtcacctaggctggagggcagtggcatgatctcggctcactgcaacctccgcctcctgggttcaagcaattctcctacttcagcctctcaagtagctgggattacaggtgcccgccccacgcccrgctaatttttgtttgtttgtttgtttgtttgtatttttttttagtagagatggggtttcaccatattggccaggttggtcttgaactcctgacctcaggtgatctgcctgcctcggcctcccaaagtgcaaggattacaggcctcagccaccgtgcccagcccaatcttacaatcttattgagagaaaaaaatacaactgaaaaaaattaataagcaaagcaacacaatcacatgctagattagatgccacaatcagctgatacatcatttcactaaacagcctgcatattaaacaaccgttccgttttgtgtatgtggaatattttattatcaattattaggtgcccaatgtatgtcaatatcaaataaagggcaaggaacctggaaaagaattgaggaca

SEQ ID NO: 411020 - DNA, 539 bp, Homo sapiens
ggtctttgtttgcatgcatgtcacatatttaccagtcctgatctactttgttttaatttctagaaaagaaaaatgaaatccacataaattaagtaacttgccttgctaacttaatgactaaaccataactttgacctactgcttctgactaatgtggcaggcaccctttttacataccatactatacatctcaaattgatcaagacactagttctaatttattgaaaaaacaagagcttaattatcttaactttttcatgagtttttcctattcttaattgctgttttatcctgtttacaacctgtaactctaaattccaaatatttgcttgggcattgattaccgrtaaaagtttgtttacctaaatgaactaaagaatatgctaagacaatacgacaaggaaaactgacctattttgattaggttttctggagagtttatagtgtaatttgggaggcagtattaataacaataaaaacaatatgtaaagcataggcaaagtgctaagtgattagtaccaacagtggtacctgtgact

SEQ ID NO: 411021 - DNA, 648 bp, Homo sapiens
ggaattgggaataacacaactattagcctctatacattcctatttagggggataaatggagtgaatgtaaattaaacttttttttcttacaaaaaagcagttctaaaaatcaatttatttagcaaacattaattatctcattggatttcttgagaatgggaatgggggtaatgttttggggaggaagcttccctgggggttggaatacatgatgacattccctctcattttgtttttctgtcagaaaacccagtggatttgacaaccaaacctgtggccaatccagatatgggtcaatggatcctcctccggggtggggggtgattttccaagcctaaccagggctctggcagaatccagaggggcatacgagagaagaagggggttctggggaagacattcacagaacagctagccagacctgaccccagtctagaccttgcattgkagtcagagttctcattggcaaggaaccaaattgactttagcttgtttaaaactgacagaattcttgcttatctatttggaacaatttcttggctttagcaattttcttgacccatagagacacaatcacagtgatagaaagcccaggtgacagtgattttacagaacattttctatttcccacagattttatttctagga

SEQ ID NO: 411022 - DNA, 550 bp, Homo sapiens
ggcagaatccagaggggcatacgagagaagaagggggttctggggaagacattcacagaacagctagccagacctgaccccagtctagaccttgcattggagtcagagttctcattggcaaggaaccaaattgactttagcttgtttaaaactgacagaattcttgcttatctatttggaacaatttcttggctttagcaattttcttgacccatagagacacaatcacagtgatagaaagcccaggtgacagtgattttacagaacattttctatttcccacagattttatttctaggaaatttaatcagttattwccctaggatatagtggacttttcttcttttaattggcaccttagtgcccaattaaacaagcatgctaattaaaacagtaataataatacagaattaacttttgacgctagtgaatttatcaaaggcttaggtattaggaaactctaatattaaacctagcctgttattgacacactgtattttcattatccccatttcttctatttttgaaactaatatacaattgaaaatta

SEQ ID NO: 411023 - DNA, 564 bp, Homo sapiens
tatgcaatgcaagtagtcaagttatactgtgcgatcttgcctagaaaaagcactaacataccttgtactttgtattttataattcagtataattgtgcagaattcatccatttatatgcaaatcatactayagtttatgtttacgttgtgttctaattctttattttccctttcaaagctgtttattaactttgctttaaaattttaaaatttcatcttctgccacacatttttaaatcgctgcttactctttgattttgctgaattttatgtttaaaattttgaaactagtggctttgtgactgtatttacatgcataatcatttttctgagccactaatcttaaagcaggtatttgttgttacagtaactaacatcatgattagcctaggcagcctttttttttttatttttttttttatttttttttatttttgagatggagtctcactcttgtcacccaggctggagtgcagtggcgcaatctcggctcactgcaacctccgcctccacggttcaaaaaattctcctgccttagcctcctgagtagctgggactacaggc

SEQ ID NO: 411024 - DNA, 497 bp, Homo sapiens
tagtcatgcaggcagttatatcaaatattttgcagaatgttaggataaagaaagcaacaaggaaatagactgaattccaacggaagccagcactataattcataccatattcccataaaaatgaacagacacatgaaaaaaagcaccatagaggtttcactctttattatcataacctaggaagaatttttctttaacactagccaaacatcatgcccataccctttgtactgctgaatcttcattgctggctgtcactgccctagaaatggagctgacattccttcaaaacaagaaatccacaattttaacagacatatcaccactatcttttcctttacaatagagtgcttactatcaactcactgctatttttactgttttctccaagtctttgtaattttcttggttgttgcaagatcygaatactacttggcaaccctattatggtcctttctctcgaagtcttaaaatactaaactgattttaatgttaga

SEQ ID NO: 411025 - DNA, 558 bp, Homo sapiens
aaccatgctagatggtgctgtctatatggaagctctttatctacacagagggcctcatacgcccagtcttcacccaagggagaggacagtacagtaagtagtcccaatctctggtgcaggccttgggtggcctctgggtggatactctagaggaaagaatccccccgcacccccctagtgccttkctctgttggagttctgccacctgcctggacattctggcatttgcaaatagagccccagctgggcaggcaaggcaggggtgacagagcaaaagcagcaatgcctctgcagagccatttttcccaggcttcgtgaagactatgctatgacggggtgacttatgaagcttcttttttgatttgcccgtagccaggatagaagtattttcctgtgaagctgattttaacccaggatgaagtaggataagggagagacaggttggcaggatcattttgtgttcaatgtacttgatgaggtttttgaaatgtcactggatttccccttctcccctaaagcatactttgtagatttcccctttctcccctaaagcatact

SEQ ID NO: 411026 - DNA, 649 bp, Homo sapiens
aagagtgtaacctaatatctttcagatattctgcctcagaacataaatgtttaggcttttaatatatagttcatattttcggtacatttctgcctgtggaatcatctttgtacaaagtaaasttttctttggcttttaattttttaatttaaatttaacttaaatttaagttatttaataagaattgtaatttttaagtatccctgtgggtgaagttttttttttttccaggagactgttttctttgcttaagtctgtgtttattataggctgttagacagtttcttaattttcaccttgtgcttaaaaaaattatatatgtatataaaatcaagagaacttgagtataaatcaagattttaaaatagtgatggccattttcctttaaagaagttattcttttccgataaaacttggcaatttcagtgtagcatcaaatatataaactctgaactcttctctcagtagaacctgggatttcaaatgaaaaattgaaacttgtcaaataatcattttaatgctttaggaaacatttactttttaaaaagaaaaaattgctttctttcatgaacagacaaggaacttctgattttctgcccatagaccgttcgcttggctttcttggaaaagcaagaaatgtatgctaacc

SEQ ID NO: 411027 - DNA, 649 bp, Homo sapiens
aagagtgtaacctaatatctttcagatattctgcctcagaacataaatgtttaggcttttaatatatagttcatattttcggtacatttctgcctgtggaatcatctttgtacaaagtaaacttttctttggcttttaattttttaatttaaatttaacttaaatttaagttatttaataagaattgtaatttttaagtatccctgtgggtraagttttttttttttccaggagactgttttctttgcttaagtctgtgtttattataggctgttagacagtttcttaattttcaccttgtgcttaaaaaaattatatatgtatataaaatcaagagaacttgagtataaatcaagattttaaaatagtgatggccattttcctttaaagaagttattcttttccgataaaacttggcaatttcagtgtagcatcaaatatataaactctgaactcttctctcagtagaacctgggatttcaaatgaaaaattgaaacttgtcaaataatcattttaatgctttaggaaacatttactttttaaaaagaaaaaattgctttctttcatgaacagacaaggaacttctgattttctgcccatagaccgttcgcttggctttcttggaaaagcaagaaatgtatgctaacc

SEQ ID NO: 411028 - DNA, 649 bp, Homo sapiens
aagagtgtaacctaatatctttcagatattctgcctcagaacataaatgtttaggcttttaatatatagttcatattttcggtacatttctgcctgtggaatcatctttgtacaaagtaaacttttctttggcttttaattttttaatttaaatttaacttaaatttaagttatttaataagaattgtaatttttaagtatccctgtgggtgaagttttttttttttccaggagactgttttctttgcttaagtctgtgtttattataggctgttagacagtttcttaattttcaccttgtgcttaaaaaaattatatatgtatataaaatcaagagaacttgagtataaatcaagattttaaaatagtgatggccattttcctttaaagaagttattcttttccgataaaacttggcaatttcagtgtagcatcaaatayataaactctgaactcttctctcagtagaacctgggatttcaaatgaaaaattgaaacttgtcaaataatcattttaatgctttaggaaacatttactttttaaaaagaaaaaattgctttctttcatgaacagacaaggaacttctgattttctgcccatagaccgttcgcttggctttcttggaaaagcaagaaatgtatgctaacc

SEQ ID NO: 411029 - DNA, 440 bp, Homo sapiens
tggcctcccaaagtgctgcgattacaggtgtgagcaactgcacctggccttgccctgcctttttaaattaattattgtcatctattttattcttctgccttgtgtgggagaataaaatcatcctgttttgttgtttctttcttccatgwaacagtcactgagtatcatttatgtgctgggatcactccaggtcttggcgagttaaatgaaaatgacattggcccagctcaagggccaaggtgtggggtttgggcagatgtgcacattattataaagtgatgtggtggcgagaccacttgtattaatttagaattttacgtgtgtatatatatatgtgtgtgtatatatatatgttttaaaactttgtttggaatgcctcagaaaatgttttttattaacaggaaagaactgacttcctctggtgggccaacaaagtttga

SEQ ID NO: 411030 - DNA, 336 bp, Homo sapiens
cttcccggctgtgttctttgggaagactcagaggagactcccttcataaagcrcaaagacccactggtgagggaggcatgaccatctttgagaagcttggtaggaattgtcctttgtaggccagagccggccagtggaagatcctgccaatggatgccaggtatcaatgggcatgacgggattctgaaatcgcagagaggaggcagcagcagaaggggaatgaagttagtatcatgggcagcaaggccagcatggcagttacgctgctgtgacctgctaggatctgtgggctctgttccaggggctgagacgggtgaacaacaattaggttgtgac

SEQ ID NO: 411031 - DNA, 495 bp, Homo sapiens
  misc_feature (1)...(495): n = A,T,C or G
ctcacctgtattaaagcacgtatcagtactttgctcctttttgtggatgagtaatactccactcatgtggccatactacattttctttgtccattcatcagttgattaacatctgaattgcttccactttttggctgttgtgagtaatgctgctatgaacattcatgtacaaggttttctgtgaggtcggacacagtggctcatgcctgtaatcccagcactctgggaggccgaggcaggtggatggattacttgagatcaggagttcgagaccagcctagccaatatttgtatatttagtagcccgtctaancaaaatatacaaaaattagctgggtgtagtggtgcatgcctgtaatcccagctacttgcraggctgaggcaggagaatcactggatctcaagaggcagaggctgcactgagccaagatcacaccacgcactaggtgtgacagagcaagactctgtctcaaaaaaaaacaaaacaaaacaaaa

SEQ ID NO: 411032 - DNA, 552 bp, Homo sapiens
tgttaggccctctccttccacagaaatactaagagactggcttgcttgggcttgtcaaatgtgcaaaggttagccacaagacctcaagcagaggcaggtggctccagggaaaggtggaacagagtcataaagattgagaagatatcaggattaagggaccttgcagactgtttcagcctccctccaagtttaacagatggggaaacagggcaaatactgtttctgagccttcttattctgagacatttactaccgctggtaggtaatgccattgctaaggcactcaacactcttacaacgggggaaactgatgtctccattttacagacgaagaaactgctgagggtgagtgacttgcytaagactacacagccagtaaaggcaccactgggattaaactacttctgatcccacaggacatactcttctcttctgttcctctggttcccatcacactatatattgtagcatatctgatggtttacctgggactttcccatccagtatctcactgaggaactgtacgtggtacagggtagagctcaatacgta

SEQ ID NO: 411033 - DNA, 508 bp, Homo sapiens
actttgctacagactgattgtttgtgtccctcccttaccaaacttatatatggaagctctaatccccagtgtgatggtatttggaggtgaggcctttagaaagtaactaggtttaactgaggccatgagggtgcagcccccacgatgttgttaatgcccttattagaaagagaaggacaggagatttttctctctytttctctgtgtatgtactaagcaaagaccatgtgaggacataaacagaaagagagccttcaacaagaacccaatcatatgggcacactgacctcagacttccagcctgtagaactgtgtgaaacaaatgtgttgcttaggcaacccagtgtatggtaatttgcaatagcagcctgacctaagacaccctttattaccaccctgtgagtgagttatcattggctccacccaatacaggagggagctgacattcagaagaggaaggtagctttgtctaggtcacagtgccagtaagaagggagagtggtgatca

SEQ ID NO: 411034 - DNA, 508 bp, Homo sapiens
actttgctacagactgattgtttgtgtccctcccttaccaaacttatatatggaagctctaatccccagtgtgatggtatttggaggtgaggcctttagaaagtaactaggtttaactgaggccatgagggtgcagcccccacgatgttgttaatgcccttattagaaagagaaggacaggagatttttctctctctttctctgtgtakgtactaagcaaagaccatgtgaggacataaacagaaagagagccttcaacaagaacccaatcatatgggcacactgacctcagacttccagcctgtagaactgtgtgaaacaaatgtgttgcttaggcaacccagtgtatggtaatttgcaatagcagcctgacctaagacaccctttattaccaccctgtgagtgagttatcattggctccacccaatacaggagggagctgacattcagaagaggaaggtagctttgtctaggtcacagtgccagtaagaagggagagtggtgatca

SEQ ID NO: 411035 - DNA, 508 bp, Homo sapiens
actttgctacagactgattgtttgtgtccctcccttaccaaacttatatatggaagctctaatccccagtgtgatggtatttggaggtgaggcctttagaaagtaactaggtttaactgaggccatgagggtgcagcccccacgatgttgttaatgcccttattagaaagagaaggacaggagatttttctctctctttctctgtgtatgtactaagcaaagaccatgtgaggacataaacagaaagagagccttcaacaagaacccaatcatrtgggcacactgacctcagacttccagcctgtagaactgtgtgaaacaaatgtgttgcttaggcaacccagtgtatggtaatttgcaatagcagcctgacctaagacaccctttattaccaccctgtgagtgagttatcattggctccacccaatacaggagggagctgacattcagaagaggaaggtagctttgtctaggtcacagtgccagtaagaagggagagtggtgatca

SEQ ID NO: 411036 - DNA, 570 bp, Homo sapiens
acgctgtttcctcccaccggttctctccgtctctgacgtcaagtcttttccacccaaaagagcacgtttctaagtcagaatgagaccacggctgccttactgtcaaccttccctcgggagaaggggctctctcaagaccattgggtccactgccaccaataggtgctgaccctcagttaaatccctcaaaatcactggaaaatcctttagcctcagacccttccttaatattaagctggcgcaaaagtaattgtggtttttgcaattaaaaaaaaaaaaaaaaaaaaacaagattgcaaaaaccgtaattacttttgcaccagcctaataaaataagacagttatacctatttgagtttgagagtctcacagagctttagggtcaggccacccctcctgccaacccttgtccacaaaccccccaacattgacagccgcatttctgctgaagaaagacatctgtgaggaaccgtaaatgtccttcaccccttcggaaggtggctcaagcccrcacctggtcctctctctctccagcttaaaatccttccatggtcccatctccagcccact

SEQ ID NO: 411037 - DNA, 592 bp, Homo sapiens
ggctctctgtgtgatcctggggaagctgcttcaccactctgcttgtaggctagtgacattaactgcyacagtttcagcatttgtcccctccaaatctcatgttgaaatctgatccccaatgtgggaggtgtttgagtcctggaagtggatcccttatgaagagatgaatgccttccctcggagtgagtgagttccagctctattagtgtccataagagctgaatgttaaaaagagcctggcacctccaccttctatctctctagctttctctctcacatgatctctgcacagatggttcctcttccccttgtaccatgagtggaagcagcctgaggtcctcagcagcagcagaagctagtggcatgcttcggcacagcctgcagagctgtgagccaaacacatctcttttctttataaattatctagccgcaggcatttctttataacaacacaaatggactgagacattagcaatgatcacccctattgaatacctactatgtgcctagtgtttacacgtgttctaaatcctcacatcatacaaggcagatgctatattcatgttacagatgaggacccatagctcagtga

SEQ ID NO: 411038 - DNA, 592 bp, Homo sapiens
ggctctctgtgtgatcctggggaagctgcttcaccactctgcttgtaggctagtgacattaactgctacagtttcagcatttgtcccctccaaatctcatgttgaaatctgatccccaatgtgggaggtgtttgagtcctggaagtggatcccttatgaagagatgaatgccttccctcrgagtgagtgagttccagctctattagtgtccataagagctgaatgttaaaaagagcctggcacctccaccttctatctctctagctttctctctcacatgatctctgcacagatggttcctcttccccttgtaccatgagtggaagcagcctgaggtcctcagcagcagcagaagctagtggcatgcttcggcacagcctgcagagctgtgagccaaacacatctcttttctttataaattatctagccgcaggcatttctttataacaacacaaatggactgagacattagcaatgatcacccctattgaatacctactatgtgcctagtgtttacacgtgttctaaatcctcacatcatacaaggcagatgctatattcatgttacagatgaggacccatagctcagtga

SEQ ID NO: 411039 - DNA, 592 bp, Homo sapiens
ggctctctgtgtgatcctggggaagctgcttcaccactctgcttgtaggctagtgacattaactgctacagtttcagcatttgtcccctccaaatctcatgttgaaatctgatccccaatgtgggaggtgtttgagtcctggaagtggatcccttatgaagagatgaatgccttccctcggagtgagtgagttccagctctattagtgtccataagagctgaatgttaaaaagagcctggcacctccaccttctatctctctagctttctctctcacatgatctctgcacagatggttcctcttccccttgtaccatgagtggaagcagcctgaggtcctcagcagcagcagaagctagtggcatgcttcggcacagcctgcagagctgtgagccaaacacatctcttttctttataaattatctagccgcaggcatttctttataacaacacaaatggactgagacattagcaatgatcrcccctattgaatacctactatgtgcctagtgtttacacgtgttctaaatcctcacatcatacaaggcagatgctatattcatgttacagatgaggacccatagctcagtga

SEQ ID NO: 411040 - DNA, 615 bp, Homo sapiens
aatcttcccctttgtgtatcaggttactcccatcagtctgaatgtttgagacaaacccaggaagccaacgagagtgattggtctcattgcttttaaggagggcacatagttttaagagaaataggaaatggcttaatctaatacrgcacgtaaaccaggtataagatgaagtggctacagtattcattctttcatccaaccagacatttttgagcacatgtggctgtggccttggacattcacaggctagtgagaattccatgtgccagccactgcatgacagtgtggcaagggatgcaatgtggacaggtgtcggttgcagtgagaatgcaggagaaggaatgctagcagcctgcaggggccaggaaaggtttctcggaggaggccagaaggatctgccagatgctcccaggtatacctgagaaaaggtgttccaggtaaggggaacacctgtgccaaggctctgagagcaggtgtgccttcagtcctgctgccttgtttctcttctctttctgctttcttgaggggcaatctgtgatttccctgagctcctactttgtgccaggcatggttcaatggggagacccacatggggactggccattatacaatcat

SEQ ID NO: 411041 - DNA, 480 bp, Homo sapiens
gtttctttggagactcctctcctgggcttgcagatggccatctcctccctgtatcctcacttggtcttccctgtgtgtgtttgtgtcttaatatttatttcttttaagtacaccagtcatattggattagagcccatccttgtgacctcattgtgcacttaattacctctttaaagaccctaccttcaaatgcggtcacattctgaggtcctggttttaggacttcagcatatggatttggggggagaacacaattcagtccataacagctactgtcatcattgttgggttcctgatrtaaactagagaaagtaaaacacaacagtcatttgaagtgtcagggtatgggattaaaaacaggggagaacccgtgctctgcccgtccttcttggggaccacacatgcctggaactcccacatctctctctagctcagtctccagccagacttttttgagctcagatccactctgcctggaca

SEQ ID NO: 411042 - DNA, 571 bp, Homo sapiens
ttcaccagcatcattaggcaataagtctgaacaacactttaacagtttccaaagtcagagctgctgtggatggttgtgcaggctgttcatagaaacaaaggagcagtgcttatagaataaragattaaatccatcctgtgctccactcgccaatttcggggctgcatctgcccagagcggggcacttctttccaatgtgcacaaaggcactatgtgggccagcagcagctgcattcaccatactgcaagatgacagtttgctaaggttgtgtcctcctcaatgcccacagcagcctggcagggggcaggcagtcactctagctgtgctttacaagcaatgttatccaggttttcagacctgaggaatcacactccctcccttcagatcacctgaggggtatcactcacctgtctcagccagttcccgcccttggctgtcagcacagtggcaatacccagatacctcagggaacctcctctggaaggaactgaaggtcacaaatgcatctggaaaccttggagagaatgagatttacggtcaccattcataaaggcaagtcatcacaagctt

SEQ ID NO: 411043 - DNA, 581 bp, Homo sapiens
tcatttccccaactgttgttaagctgatggctggcagctcccaactgagtctctctctaggaattgtctttgatctaagagaactgcctccccttccccatggacagcctgcatcccaacactgtccatgggggtagataaakgttcgtacccccagcctcaagatggaacaaatctgaacggccagcctagcttcaaaaatcactggaagatcagtggggccatcatttgatttgcatcaaagtcttcttcctctgccaaatcctgcccctcacttccttctatatcccaagcatgctctgcaccaagcttcttgcatgcaaatctccatctgagagtctgcttctcggaaaaccccagctaagacgtcttcctttatatatgaagaaaataagacacaagaggttaaaatgactggcctgtgagggcactgttcctgctcggtggaacaggattggaactggcctttgtatgtagtgaagcttgtgccctccaactgctctctggtgctgcctccctagtcctgtacgtaggacgtggctgtctcagcatgggggagggaagcacaggcatagcagcca

SEQ ID NO: 411044 - DNA, 581 bp, Homo sapiens
tcatttccccaactgttgttaagctgatggctggcagctcccaactgagtctctctctaggaattgtctttgatctaagagaactgcctccccttccccatggacagcctgcatcccaacactgtccatgggggtagataaaggttcgtacccccagcctcaagatggaacaaatctgaacggccagcctagcttcaaaaatcactggaagatcagtggggccatcatttgatttgcatcaaagtcttcttcctctgccaaatcctgcccctcacttccttctatatcccaagcaygctctgcaccaagcttcttgcatgcaaatctccatctgagagtctgcttctcggaaaaccccagctaagacgtcttcctttatatatgaagaaaataagacacaagaggttaaaatgactggcctgtgagggcactgttcctgctcggtggaacaggattggaactggcctttgtatgtagtgaagcttgtgccctccaactgctctctggtgctgcctccctagtcctgtacgtaggacgtggctgtctcagcatgggggagggaagcacaggcatagcagcca

SEQ ID NO: 411045 - DNA, 604 bp, Homo sapiens
ctaaaggaacaatagataaccaaggaaacgggaagaaggtagaagataacaataagacatcagtgaaatagacttctgaaaacacagccatagagaagattttaaaaagcaaaacattgtttaagtagactaatgtgataaaaatatgaacaagcatgatcaagaaagatgatggagaatgaaagcaaatcaaatgcagttctgcttgtaaccatacctaaagagggagtgtgccccttaccagcaaagccctaagayggcaggtatggtcctccttcctctccatcccctccctactatctggaagccctggcagcccaaactcaaccctgcagatgaggaaggccttaagaaatggcagagaaatatccagaagaaaccagagccctgagtgatccagagacacctggactgcccccttggcagatgttatgagagagagagagaaagaaaaaagaaaatgaacttttttatccactaagctgctttagtactgggtctcctccttatatcaattgagcattttgcttcaataggtatagaaataaacccgccattatttgcagaataacgaggaaacttcatagaaaatccaaagaaacca

SEQ ID NO: 411046 - DNA, 367 bp, Homo sapiens
tctctttctctcccctcatgcctggtagttactgtccagattcctggatacactgtaagtcccctctttatatcacccactcccccagcacaattcttggcacagagctggtgttcagtatataaataaatgcaaggataaatgaaggagggagaacaaaacaatgaatgatacwcagagcccaccaaataaacacagaacattgccttcccacgcatcagaaggttagccccaaattagtttttctaaacagacttctgaccctttactccattccccaaaatttccctaatagaatagaataagaaggtacacagaatgcaagcaagcatcattccacctcttccctgataaatgatcacagttt

SEQ ID NO: 411047 - DNA, 538 bp, Homo sapiens
acatctcccagctcccctctgyaactcacagttgaccctacagctttcctgaatcttctgttcccttctcccaacagccctgtaaaatccttgaagtagaatatcccattagcaggtattaatacccaatatctggagcatagctggccccaaagtgatgtctgaggagtgacactctcagttaccggagaccccttaatttttctggcacaataacaaggagaactccaaagcactttccacttccagtaaattgcacataggatggtggaagcagaaggcggcagccaggagtgggtagagagcttccacaagatagcactggtctcctaagctgaaggcttgagccccagccatggcactaatgcaaagattgtttcttaaagtgtgtcaagtcacagctccaaacttcactctcatgagtgaaattgtgatataaccaactgcctcaccagagtgcccaaaggatcgattgagttgtacgtgaaagtgctttgcataatacagtgcagatattaatatatttactacttgaatt

SEQ ID NO: 411048 - DNA, 617 bp, Homo sapiens
ggagggaggaggaaacacaggggctgctccagcctggggaagggctccccacaaactcacctcctccaaaggtgtttgcacatctcccagctcccctctgcaactcacagttgaccctacagctttcctgaatcttctgttcccttctcccaacagccctgtaaaatccttgaagtagaatatcccattagcaggyattaatacccaatatctggagcatagctggccccaaagtgatgtctgaggagtgacactctcagttaccggagaccccttaatttttctggcacaataacaaggagaactccaaagcactttccacttccagtaaattgcacataggatggtggaagcagaaggcggcagccaggagtgggtagagagcttccacaagatagcactggtctcctaagctgaaggcttgagccccagccatggcactaatgcaaagattgtttcttaaagtgtgtcaagtcacagctccaaacttcactctcatgagtgaaattgtgatataaccaactgcctcaccagagtgcccaaaggatcgattgagttgtacgtgaaagtgctttgcataatacagtgcagatattaatatatttactacttgaatt

SEQ ID NO: 411049 - DNA, 497 bp, Homo sapiens
tcctcccaaccccgtgagatgggtactggtattactgtcattatatagacaggcaattaggcctgaaaacattcattcacctactccaggtcacacaagtggtgtccaaagctaggatttaacatcacagacaaactttccacagacaggcaaatgcgcaattgcggcacgctgctgactgcactgcctaacaaaggaatgggcagagcatccatgaagctctgtagtcgaggaagcactaagccctgtgggtagtcagggagggctcttggaggagrtgacatggaatgctctgccattggaaccctgagaaatgcaggatataaaggtgtgagtctcagaagcttccctgggaggcaggagagagtctctgccagcctttgagagaccacttcctgcagcaacataagcacccaagggttcccacagaaagaatcccactgaccctctcacatcaggtgctcagtctatctggtcagcacctgcacatgccttca

SEQ ID NO: 411050 - DNA, 497 bp, Homo sapiens
tcctcccaaccccgtgagatgggtactggtattactgtcattatatagacaggcaattaggcctgaaaacattcattcacctactccaggtcacacaagtggtgtccaaagctaggatttaacatcacagacaaactttccacagacaggcaaatgcgcaattgcggcacgctgctgactgcactgcctaacaaaggaatgggcagagcatccatgaagctctgtagtcgaggaagcactaagccctgtgggtagtcagggagggctcttggaggagatgacatggaatgctctgccattggaaccctgagaaatgcaggatataaaggtgtgagtctcagaagcttccctgggaggcaggagagagtctctgccagcctttgrgagaccacttcctgcagcaacataagcacccaagggttcccacagaaagaatcccactgaccctctcacatcaggtgctcagtctatctggtcagcacctgcacatgccttca

SEQ ID NO: 411051 - DNA, 594 bp, Homo sapiens
tgttattttttatcaatttctttaccttttcaaccatcttttaaattattgcttattcaattgttttgcgatctcaccttatccrttattatttttattaaattattctaaaatataaaacacttgaagtaattttctaaaaatgtctggactgtattttcttttggaattatcatcatcactttggttatgttttattttgtttcttctcttgcggtatatatttgcatagttgtcctgttaactctttatttttctcatcattaacgcggcacaccagattgaattatttttcctgattatttgcctcctccctgtgatgaagtcacatgctctttgccattttactgtcttgtgccctccttgtaagtagagtatactttcccatcatgttaattttgggattgagcatatgacttgcttggggtttagcatgtgacattgccaatggcatatgagcaggtgtgacatttgccacctattagcagatattttaaatgacttctgtggtttacctcctcactcctcccacattaggtggtgctgttgttttagcctgggttccataataacaagaaataagaaacagaagtg

SEQ ID NO: 411052 - DNA, 561 bp, Homo sapiens
gaatgatgagaatgatgaaggcccagacagttcagccataagctaaaatacctctagagaagaatctaagagctcagacccctaagagccttcatatggaagtcaatggtgccattgctatgtttctatactttatataccgccttgtgcttctcattctgagatcctgtaacttcattagctctgcccacatygtaactgaattaaacttggccttctttactattttgcataagagttgcaatcccactcagcagtgtttgactttagcaatcttagtcttgactggaagtatgtaacacggaatcacagagttccctgaaaagtctcagccatatcagtaccatcaaccctgatactctcttgcctttcacagcccacacactccctcctagttacccacctgctgcatggagcactctggatggtatatctttgttcgttgctctactgcactttcttatgggacccactggagtccccattctctagtgcccaggcatttctgcctgactaaacctgtctgaaatgctgacaaaagcagttttttccattctagtt

SEQ ID NO: 411053 - DNA, 614 bp, Homo sapiens
gcagtcttgaatgatagtaaaaacctgaatctcattttacaatttttaaatatcttaatattgccagtgtatgttgtggggaaaagagagatcagactgttactgtgtctatgtagaaaaaagtagacataagagactccattttgttctgtactaagaaaaattcttctgccttgagatgctgtttatctgttaccctacccccaaccctgtgctctcagaaacatgtgctgtgtggaatcaaggtttaatggatttagggctatgcaggatgtgctttgttaaacaaatgcttgaaggcagcatgcttgttaaaagtcattaccactccctaatctcaagtacccagggacacaaaacactgtggaagtccacagggacctctgcctagcaaagccaggtattgtccaaggtttcttcccatgtgatagtctgaaatatggccttgtgggaagggaaagacctgaccgtcccccagcctgacacctgtaaagggtctgtgctgaggaggattagtaaaagaggaaggcctctttgcagttgaggtaagaggaaggcatctgtytcctgcttgtccctgggcaatggaatgtctcagtgtaaaacccgattgt

SEQ ID NO: 411054 - DNA, 614 bp, Homo sapiens
gcagtcttgaatgatagtaaaaacctgaatctcattttacaatttttaaatatcttaatattgccagtgtatgttgtggggaaaagagagatcagactgttactgtgtctatgtagaaaaaagtagacataagagactccattttgttctgtactaagaaaaattcttctgccttgagatgctgtttatctgttaccctacccccaaccctgtgctctcagaaacatgtgctgtgtggaatcaaggtttaatggatttagggctatgcaggatgtgctttgttaaacaaatgcttgaaggcagcatgcttgttaaaagtcattaccactccctaatctcaagtacccagggacacaaaacactgtggaagtccacagggacctctgcctagcaaagccaggtattgtccaaggtttcttcccatgtgatagtctgaaatatggccttgtgggaagggaaagacctgaccgtcccccagcctgacacctgtaaagggtctgtgctgaggaggattagtaaaagaggaaggcctctttgcagttgaggtaagaggaaggcatctgtctcctgcttgtccctgggcaatggratgtctcagtgtaaaacccgattgt

SEQ ID NO: 411055 - DNA, 376 bp, Homo sapiens
cttcctatactccgaagattattagttctatatgtgggcataatttttaaatagaatattattaccagtcctttttggtatatgaacaattacaatattaataaggcattaatcaagtaacaaggcaratagatattctactaaattcagactattaaagaaaactgtatgtattttgcaaatgatttgaggtgacatatttagaaagtgtagttattttactttattgtgtttttgtgttctaacctttgaattcctttgctgagaattgaaattgtgctgtatgatgtcaaaactaatggcaattaataattgctattgttaagctacatacaagtagaaatttaggttgaaaaactctctaggaaaatggcct

SEQ ID NO: 411056 - DNA, 506 bp, Homo sapiens
gatgtggaaaaaagaggaatgtacaggacattacagcttagcagctcaggctcaatgttaactgtgatggctaatattatgtatcaatctccctgggttacrgtgcacaattgcttggtcaaacaccagtctagatcctgttgtaaacgtattttgttattcattaatttttatttgtaattgatacataaagttgtacaaatttgtgtggtacagtgtgatgtttcaatgcaggtatatattgcataattatcaaatctgggtaattactgtatctgtcgctttatacatctatcattttcttgtagtgataatgttcaaaatcttctcttctagctatctggaaatatacactacattgttatttgctatagtcaacctactgtgtaataaaacactataatttattcctcctgtctaactgtaactttgtacctattgacttatttctccttactagtttgtttcagttttctatgtctacatagttcaatcttgttaagttg

SEQ ID NO: 411057 - DNA, 506 bp, Homo sapiens
gatgtggaaaaaagaggaatgtacaggacattacagcttagcagctcaggctcaatgttaactgtgatggctaatattatgtatcaatctccctgggttacagtgcacaattgcttggtcaaacaccagtctagatcctgttgtaaacgtattttgttattcattaatttttatttgtaattgatacayaaagttgtacaaatttgtgtggtacagtgtgatgtttcaatgcaggtatatattgcataattatcaaatctgggtaattactgtatctgtcgctttatacatctatcattttcttgtagtgataatgttcaaaatcttctcttctagctatctggaaatatacactacattgttatttgctatagtcaacctactgtgtaataaaacactataatttattcctcctgtctaactgtaactttgtacctattgacttatttctccttactagtttgtttcagttttctatgtctacatagttcaatcttgttaagttg

SEQ ID NO: 411058 - DNA, 509 bp, Homo sapiens
gcagggacgcctgccttggtccttcatccttagcaagtcctgcttttctgggggaggggcaagtaccccaaccccttctctccatgtctctaccccttctctgcttttctaggggaagggcaagaacccctcaaccccttctccttcaccctcagcggcaagtcctgcttttctggtggagggacaagtaccccaacctcatatctctgtgccccaatcccttatttccatgccccaacctcgttatttctgcgccgcaacccctktcctgcttttctggagggtaagaacccctgaaccacttccctccatgtctgtactctcccttttctttaaacttgcctccttcactataggcaaccttccaccctccattcctccttcttctcccttagcctgtgctctcaagaacttaaaacctctttaactcacacctgacctaaaaccgaaatgccttattttattctgcaatgccacttgaccccaatacaaactcgacagtggttcca

SEQ ID NO: 411059 - DNA, 561 bp, Homo sapiens
tacacacacacacacacacacacacccaacagcatatgttaatgtttacataaggaaagattagcctgcaaagaaagagaaggaacaatcagaagttggagaaaaacatgagagtgtcatttcatgtggacttctaaagagtcttccattggagataatttgtgaattttgaactttctgagcacttgcacgtatcaaaatatctctattttcacctcaaaacttgaattgtaaattgggctgactttaggaatctaagttgaatattattttctcttagaacattgaaggccttcgctatggtcttctggtgtcctgaggagccattgggaatttcaaaggccactctcatttatattccattttacagaactggcttttggtgaacgaaaacctttaggatttactcattatcaytggaattcagtaattgtgctattttaatattttagatgagggaggggtctttaatgttaatcctcctcagcatgtatttgacactgtcaatgtctagacttatttctttcaattctgacagatttttttttatttctcccactc

SEQ ID NO: 411060 - DNA, 635 bp, Homo sapiens
ctttgtcacagccaggattccaactcatttcaactctgattccaaagtctatgccccttctttgacatcctctttctttaatacaatratgataatgataatgatgatgatgataacagttacaattttttaagtgcttagcattaactaccatgctgagtgtttagtgtactttttcttattttcttacattatctctttacatctctttgtgataatgaaagatttaagagatttttttatttaaatcctcctttattacagaggaaattattacaaattacttaactgttctaactttcagtaagaagagctaagtaatttgtaccaaattatgtagctcataagtggacctgctaggaggtaaacaactatgactgtctgaaatcacagctaaggcctttaaccttcattcagagttgatttcaatctgaggctttgaaaagaataaaaagaaagctgaatgcatttatataagataggatcatccttccaaatagctctcactacttcaaaaagattcactagtcactgacaaaattatgtggtggctacagtcaaagtaggaacatcaatatttttctctctttcatttatttgtctattaagataatttgatctcattttgaagtaaa

SEQ ID NO: 411061 - DNA, 498 bp, Homo sapiens
tgacatcctctttctttaatacaatgatgataatgataatgatgatgatgataacagttacaattttttaagtgcttagcattaactaccatgctgagtgtttagtgtactttttcttattttcttacattatctctttamatctctttgtgataatgaaagatttaagagatttttttatttaaatcctcctttattacagaggaaattattacaaattacttaactgttctaactttcagtaagaagagctaagtaatttgtaccaaattatgtagctcataagtggacctgctaggaggtaaacaactatgactgtctgaaatcacagctaaggcctttaaccttcattcagagttgatttcaatctgaggctttgaaaagaataaaaagaaagctgaatgcatttatataagataggatcatccttccaaatagctctcactacttcaaaaagattcactagtcactgacaaaattatgtggtggctacagtca

SEQ ID NO: 411062 - DNA, 498 bp, Homo sapiens
tgacatcctctttctttaatacaatgatgataatgataatgatgatgatgataacagttacaattttttaagtgcttagcattaactaccatgctgagtgtttagtgtactttttcttattttcttacattatctctttacatctctttgtgataatgaaagatttaagagatttttttayttaaatcctcctttattacagaggaaattattacaaattacttaactgttctaactttcagtaagaagagctaagtaatttgtaccaaattatgtagctcataagtggacctgctaggaggtaaacaactatgactgtctgaaatcacagctaaggcctttaaccttcattcagagttgatttcaatctgaggctttgaaaagaataaaaagaaagctgaatgcatttatataagataggatcatccttccaaatagctctcactacttcaaaaagattcactagtcactgacaaaattatgtggtggctacagtca

SEQ ID NO: 411063 - DNA, 547 bp, Homo sapiens
tctcatttttaaacaggaaccatctaaaacctaaagaactcagttcaattttctgatagcatgactgggtttcgtttcacatgtcctgccatctagttcacagctctttgatcaatattacattctgtctttatttggccataagtttttcagtcatgtggttcggtataccttataatgctcattgctataatcagcagtgacagtaatgttttgatggaaggttttccatatcttcctaacaagaattccacaacttctagaaataaatgtgtactcattttgtaaagtccagaacaacagttgtttacaatttaagctaaataatttcattaaatttaagatacaattaaagtaacaatacaaaatagatttagtgaatgaaaaacactgctgctatagcaaaaatgatcattatataattcaaaatttcaagagcaccatgttagataaacataraaaggtgttctgtgattgatataaatttagtagttttaaatatgcatatggttacatatttacctgtacccttccagaaaccataaat

SEQ ID NO: 411064 - DNA, 584 bp, Homo sapiens
atggtgtctagcaatgcttggagcaaatgcagcaacacccagtactggttaagaatggggctttttgaggcattttgtgggccaagggttagcaaggaaaggtacagtgccctaatctcttatattctctcaagggccatagagaccaagagtgtggtttttttttgaggaaaggggcattaccttacaaaaaaaaaaaaaaaaacagagtagcaaatatgcaagcattaaaaagaataattttctatcggaaaagtgcaggtttattggtgagcatggatttaggttcctgctatttgcttataggaattgcctcaraaaaccagatgtctcatgaggatcttgggccccataatttgtggaacttgggtgccacatcttcttctgggagaaatagccttggttcccaaatgggtcattgtccaggcaacttagaatggtttcccaaggtcaccattagacacatctccacaaaaatcaagatgagggagtgggagttagggaaaatgtggggaggtaggaaattttcaggattttaaccttacgcagagtcaaatcattttagtaataattttgtttttatg

SEQ ID NO: 411065 - DNA, 391 bp, Homo sapiens
tcatagcaatttctgaacacatttatttttctgattttaatttcagaaaaaaataaaacccccaacttctaaaattagacaatcgtaataaaatatatatcaattctctaggtattggttttgattcataaaatacttctgtaagttcttcataaaacattttctaggacagaaaatatgttcgtggacttttgttgttgtagttgttgagatggagctttgctcttgttgcccaggctggagtgcaatggcgtgatctcagctcactgcaacctccacctcctgcctcagcctctyaattctcgtgcctcagcctctcaagcagccgggattacaggcatgcaccaccatgcccagctgatttttgtattattagtagagatggggtttc

SEQ ID NO: 411066 - DNA, 540 bp, Homo sapiens
gcttggtatgctgtagtaaccttaaatgaagtaatagaagcccatgtccttcctacctcacctcagcccagaaggctgtgctgatcctcctcacacaggcattagaactctaaaaaggcaagaaaactaacatctatacagactccaaatatgcctttatgatagtttgtgcacacagagctatttggagagacagagagagagagagctatttacctccaataataaaaacagcaaatactggaaagaaatcctcaccytgttacaggtagtagcacttccaactgaggatgctattatgccttctaggggttctaatatcttatttgtactcatctgagtttaaaccccattatactaagcaagacaaaaaacaaacaggagaatggcatttcactaatactgattctgatgtcctatggaaaagtaatgatcataggaggatattaccccctgaggctttagtgtgtccagtccttaaacatttgataaagggcctatcttaaagggtcccacctacagaaaaccattcgaaatatt

SEQ ID NO: 411067 - DNA, 543 bp, Homo sapiens
ttctgttgtctgaagcaaccttcctgagagagttgagtgatgtcttctgggctgccagggaagtagcagtggaggaggcaacatctgccatggtcagggtcagggttctcatcatgtttcaygagcaccgactactatgtatactacaaaatatcttgaaaagaaaacaaattcagattcagtcaaacctcctggcacatccctagtaagcctggtgtatagctttaggctgcaggcttactcgtgcaccccattcccatagtgatatcgaggcacacccccaggactcccaatgtgcaggatcccaccatctgccagctttccagggatgatattgcccatcttgtatttgggtcacccttgtactgtccacagagaagttgtagtccttgggtacacacagcaccccttcacctgttttcttattcaatgtcattcatgggtgtggcactggcttttgccaacagtcttactgttgacacagttgcacaggctctgttttccccatgcaatattattcatgaaccccctacacaggatcag

SEQ ID NO: 411068 - DNA, 595 bp, Homo sapiens
tgccacgagctcattcagtctctgcatttcaaggatttgtcccaccataagattatctgtctgagagagttattacttttggacattgtatgagttggtattatttgatgctcgtcaatactatttaataaaacaaattctgaaaattgcttctactgctttctttctgaggctatataaccttgcatttgtttttaaatatttctttttcaagaactagaactttgagtctttatttttagcaactaaattgatcaattgcatgaaagaaagcaatatttttcacttattctaaaaaaaatacatctaatttggttgactagcragatcactgtgctttgttttaaaaatatgtgatagcttcattggtttcttgatgctattcaacaaattttcaatacaaacaatgttccaaagaatagaggtagatgaatcactttattggtccagtaaaatccaattctattatatacagttctccttcctgttggcaacttttatgactgcttgtgtaaaaacaccatgtcagatttacatgctatacccatgtaatttattctgtacttaaaaggtagtagattatatttataatgtt

SEQ ID NO: 411069 - DNA, 633 bp, Homo sapiens
cacttgtttttcaagtaatcaaaggaatatgctgcatcaaagtactaggccaacaaggtttagttacttgtggtaatcttagttgtgggcattttgccgtagagtcaattaaattaaaatggggcacctgcagctccctgccatgtggtgggtgccagatcctcacctgataatccagggctcgggttctggtgatataccctctggccttagagatgctggtgtcctttgctgctggcagaatgagagggtcrttgtggtctgtgacagattgaggtcggggatagcagatccaacactttgtcagtttgtccgcagtggccacagcttgggagagcctaattaaggcattatgattttgggtctttattgccatgttcttgtgggaaaacagcagactgacaggttagttcctcaccccatatccctcctggggtctcaggagtttcctacatatcagatagaaaataggctgacttgctgtaatgacccagtcctgtctgtcccagacccaaggctactatactacatttgtgggcacgcattgcccttgttggcccttgtagcttgactttgatctttccattcccatccttcagtccagggaggcagatcatgtcttgtacaaacttg

SEQ ID NO: 411070 - DNA, 587 bp, Homo sapiens
tacattgccaaatgattttcaataattttccacttatcccccatcacatattttttcacttccccatagcccccagtcccctttagttactttattttacttccttatagcccttttttgttctctctrttttctcctagttaattttgtcttagttggaagtgagcatagtttttaatggagtgtctctttcctactgcagaaggctgaataaatcagccttgccacttttaataagcgtctagtgctattaagtatttctctttgacatccttcagagcagttgtgaattgaggcaagaaggccaagcctttatacaattccatttattggccactggatgtgggctgcccttacgatcaggcatgatcttatgtaaggcagttttcttcaaccgtagcaatcctaaccctcccagaattctttgaattctgctctctaacattaatttatgccagtaccatgacacatattcctgagtattcatttgttatctcagttttttagaaggtcaagaaatatacagttctgtctcccccaaacgaaataaagaaaccatgtccataaagttatttcatactgacgta

SEQ ID NO: 411071 - DNA, 557 bp, Homo sapiens
atatacagtatttcaaattatcctgcaggagacgattgaactcagtaaaagccatggagaagatgggattgatatgaaagattctgcaaaggccgaatctatagaatataatgagtgactagcaggagggtaggaaagagaaaaaactcaagatagttttacatttttgagtctaggtgactgggagaatagaggagaatgcggagtctgtaatagaaaacaatatttaaaacaatctcttaagaacaaatttttgatgccctggttttggyctactaattttcataatttatcaccagaaaaaaaatttacatctgggctatataactcatgagtatgttattattaaaagatgatagagatagccatgaagaaccactagtaaatctgtgaatcttggtttcttggtgctactatatttaaggataagtgtatttgttaaatgttctgcatttttgttagtggtaccgttagaactataatcacctggagagtccctcctgcccatagcacagataaaaccagttcactgagatcatgcaattggagtagagaaa

SEQ ID NO: 411072 - DNA, 557 bp, Homo sapiens
atatacagtatttcaaattatcctgcaggagacgattgaactcagtaaaagccatggagaagatgggattgatatgaaagattctgcaaaggccgaatctatagaatataatgagtgactagcaggagggtaggaaagagaaaaaactcaagatagttttacatttttgagtctaggtgactgggagaatagaggagaatgcggagtctgtaatagaaaacaatatttaaaacaatctcttaagaacaaatttttgatgccctggttttggtctactaattttcataatttatcaccagaaaaaaaatttacatctgggctatataactcatgagtatgttattattaaaagatgatagagatagccatgaagaaccactagtaaatctgtgaatcttggtttcttggtgctactatatttaaggataagtgtatttgttaaatgttctgcatttttgttagtggtaccgtyagaactataatcacctggagagtccctcctgcccatagcacagataaaaccagttcactgagatcatgcaattggagtagagaaa

SEQ ID NO: 411073 - DNA, 576 bp, Homo sapiens
aagaatttttaagatgtcccatagcccaaggtagagataggcctgcttgaaatttgtaggtgtttttttctaatagagattrtaatttgatacatggaaaacccacatcattttttaaagaattgtaaaagcttggaccaaatagtacaaagacaatttaaaattaaaaagcatctgggcccccaagctcctatgggtagaaagcaggctgaaaaagctacacaactctaaatggtagttatttctatggaaaaggagatatgattcagagggcaaaataaagagtccaaagactaagtacatccaagaaccacagaattcactcccagggagtagaactgccctaatcaaagaatattccccaatccctgaaatcagaataaatgacaacttatgcatagctggatttcagagttgctatgaaatggtgacttctatggacttcctactttatccctttttaaacaattatagttgtaccatcctatattaacattttaagttaggaacatggatgacagataatttatctgttagtttatggttcttggtacccaaggaactgcacctgaggag

SEQ ID NO: 411074 - DNA, 576 bp, Homo sapiens
aagaatttttaagatgtcccatagcccaaggtagagataggcctgcttgaaatttgtaggtgtttttttctaatagagattgtaatttgatacatggaaaacccacatcattttttaaagaattgtaaaagcttggaccaaatagtacaaagacaatttaaaattaaaaagcatctgggcccccaagctcctatgggtagaaagcaggctgaaaaagctacacaactctaaatggtagttattkctatggaaaaggagatatgattcagagggcaaaataaagagtccaaagactaagtacatccaagaaccacagaattcactcccagggagtagaactgccctaatcaaagaatattccccaatccctgaaatcagaataaatgacaacttatgcatagctggatttcagagttgctatgaaatggtgacttctatggacttcctactttatccctttttaaacaattatagttgtaccatcctatattaacattttaagttaggaacatggatgacagataatttatctgttagtttatggttcttggtacccaaggaactgcacctgaggag

SEQ ID NO: 411075 - DNA, 576 bp, Homo sapiens
aagaatttttaagatgtcccatagcccaaggtagagataggcctgcttgaaatttgtaggtgtttttttctaatagagattgtaatttgatacatggaaaacccacatcattttttaaagaattgtaaaagcttggaccaaatagtacaaagacaatttaaaattaaaaagcatctgggcccccaagctcctatgggtagaaagcaggctgaaaaagctacacaactctaaatggtagttatttctatggaaaaggagatatgattcagagggcaaaataaagagtccaaagactaagtacatccaagaaccacagaattcactcccagggagtagaactgccctaatcaaagaatattccccaatccctgaaatcagaataaatgacaacttatgcatagctggatttcagagttgctatgaaatggtgacttctatggacttcctactttatccctttttaaacaattatagttgtaccatcctatattaacattttaagttaggaacatggatgacagataatttatctgttartttatggttcttggtacccaaggaactgcacctgaggag

SEQ ID NO: 411076 - DNA, 560 bp, Homo sapiens
cagtggtaccattacaagttttatgtgtattaacttatacggctctcataaccaacctataaagaggctgctaatattatcctcattttacagatgaaaagactgtggcacagataggtgaaattcaccaaaggacatacatctcaacaagctttgaacaccagccacagcatctgtgcttgtaatgagtactctatactacctctttaaatagagggctaacagtggggtaaaaaktagataatagatggaaagagttttgaaaagcttaagcatacaaaaataaaaagtataattaataaagccttttaaattaaacttttaatagtataattaacaaagccttttagatctgaaactgcattgaaagaaatcacctaacacctgtagtttcctgctgtttgcttagcaccaatatcctttctttgaatatgaatgccttgatttccttccccctaccctcattctgtggcttgggtgggaatagtcccactcctgcctccagggatgaaaatactgaaaactagctgtgtatcagttctggatcaagggtaaggcta

SEQ ID NO: 411077 - DNA, 596 bp, Homo sapiens
  misc_feature (1)...(596): n = A,T,C or G
gacagtaaatgtcagaggttaattgtgcagtgccatttctttattaaatatataagttcaggctgggattggtgtctcaggcctttaattccaacactttgggaggactaaggtgaaaggatcctttcaagccagaagtttgagaccagcctggatgacatascaagactctgtctctaccaaaaaaaaattttttaagtagccagttgtgatgatgtgtacctgttgtctcagccactcaagaggctgaggtggaaagatggcttgagcctgggagttggaggctgcagtgaactatgatcgagccactgcactccagcctgtgtgacaaagtctcactttatgtgagacccccatctctaaaaagaaaaaagaaaaatatatatctaggttcagaacatagacaacttgcttacagaccttcgtgaatgcaaaatgtgataattcttttcagaagaaagattttttaaaaaaataagcagggtctcnatggtacccataaaggcaaatcttgctttgtgagtattacatcaacatgaacagctggaacaggttgaacaaaaatggctggggagaagaaggtgggggaatttgga

SEQ ID NO: 411078 - DNA, 596 bp, Homo sapiens
  misc_feature (1)...(596): n = A,T,C or G
gacagtaaatgtcagaggttaattgtgcagtgccatttctttattaaatatataagttcaggctgggattggtgtctcaggcctttaattccaacactttgggaggactaaggtgaaaggatcctttcaagccagaagtttgagaccagcctggatgacataccaagactctgtctctaccaaaaaaaaattttttaagtagccrgttgtgatgatgtgtacctgttgtctcagccactcaagaggctgaggtggaaagatggcttgagcctgggagttggaggctgcagtgaactatgatcgagccactgcactccagcctgtgtgacaaagtctcactttatgtgagacccccatctctaaaaagaaaaaagaaaaatatatatctaggttcagaacatagacaacttgcttacagaccttcgtgaatgcaaaatgtgataattcttttcagaagaaagattttttaaaaaaataagcagggtctcnatggtacccataaaggcaaatcttgctttgtgagtattacatcaacatgaacagctggaacaggttgaacaaaaatggctggggagaagaaggtgggggaatttgga

SEQ ID NO: 411079 - DNA, 598 bp, Homo sapiens
cttctgttgccttattgctttgcacttgctgtttcctctctttggaaacctcctcccctaaatatttaggtaaattgttttcttacctcttttaaatctttgctcaaacattcctatctctggatagctttccctgatggtcctgtttattattgcaacccacccacacttgacactcttatctcctttcatgttttatttttctccatagcatttaccatcttctagcattctgtaaaatttacttatttattccttaactctccatctccccagcaagaaaataagatctacaagggtggagacttctggtttgtttgcattttttgctgatgtrtccctgccatctaggacaatgccttacataccacagttgcttagtaaatatttgctaaatgaatgctgatgccatgttacagagagtcctctatctcatcctcttctttattaaacaaattttcctctctattaattgctcaagaaaatggttttttttaaaaaaaaaagatacaaataaaaaaacaaaactaaaagtctctgttctcaaataaattggtcttagtatcatacaaaatgtcaagtttagggctggaaatat

SEQ ID NO: 411080 - DNA, 587 bp, Homo sapiens
gtgcaaaacacaccttttctacctagatcagacttaacatctgcacaaacctcaaaagcatcatttattttgaaaaataaagtaagacctatgctgagtcctgtccacagtgaccatcccagatgactgccccctggtgaaacaagacatttctccaatccccacgttatattctatctctataccagtgacttcatatcacaagtccagatgcactccagaaatcaggcctatactttcagctgcctactttggatcttcaaaataacacaggcaaaacagaactcttaattttcccccaaacctgctccttctggtgccttccttgtctcacctagttcctaaacctaaaaattattgatccctttcttttcctaccacaatcacaatctggcaataagaactgtggtttctcccttcaaaacacactttggatctaaccagtsctttccatctacacaacaatcagcctgcccaagtcaacacatctcttgcttgaacaaccatggtggcctctttttgtttcctctttccctttacatccattccccacctagcagtcagtgttatctttttaaaacgtgtat

SEQ ID NO: 411081 - DNA, 579 bp, Homo sapiens
ggcagtttcccccacgctatgctcttgatagtgagggagttcttatgagatctgatggtttaaaattgacagtttcccctgggctctctctcctgccacctgtgaacaaggtgcttgcctctccttcaccttccaccatgattgtaagtttcctgaggcctcccyggccatgtggaagtatgagtcaattaaaccttgtttctttgtaaaagtctcaggtagtatctttatagcagtgtgagagaactaatatgccaacataacttatttttaaaaatatgtataataaaataaaatcattaaaaatttaaaatacactcctaaattttatattcctggtaattttgtaatatgtacactttaagaggcagttaggttcaaattcctcctagaaatattattcaacttagagaaaaagcaggtgatgcattctattttactttagtaaaattggttcttgtcaaagtttatattcaaactcaatatttaaaaatctttcaagaagtgggtggagcccactgcagctcaaggaggcctacctgcctctgtagactccacctatgggggcagggcatagcc

SEQ ID NO: 411082 - DNA, 579 bp, Homo sapiens
ggcagtttcccccacgctatgctcttgatagtgagggagttcttatgagatctgatggtttaaaattgacagtttcccctgggctctctctcctgccacctgtgaacaaggtgcttgcctctccttcaccttccaccatgattgtaagtttcctgaggcctccccggccatgtggaagtatgagtcaattaaaccttgtttctttgtaaaagtctcaggtagtatctttatagcagtgtgagagaactaatatgccaacataacttatttttaaaaatatgtataataaaataaaatcattaaaaatttaaaatasactcctaaattttatattcctggtaattttgtaatatgtacactttaagaggcagttaggttcaaattcctcctagaaatattattcaacttagagaaaaagcaggtgatgcattctattttactttagtaaaattggttcttgtcaaagtttatattcaaactcaatatttaaaaatctttcaagaagtgggtggagcccactgcagctcaaggaggcctacctgcctctgtagactccacctatgggggcagggcatagcc

SEQ ID NO: 411083 - DNA, 483 bp, Homo sapiens
gcctgggaataattctctttagctctcagctcctccctctccrcttttggtttcaccctctgagtcaactttcttttttcataaagagtagatgaatagttttatctccctgcttctcgcagtagaatttgagcagatgtaagagtctcttttcattttatactctctctgtcccttttggtccagctggtagtatttctgctgatacaattttctcaagaactttctggatctcctgtggatatcacagtgattcactgcatcatacagaacacatgctgacaagtcttttgagataatcccttctctatttttggcttctactgaaatggttgagggacagaacccttaagcccagaggtcctctggtttaactgagaagatctgtgagaaacacccttaatctcctggaagggtagtttgtgtggtaaaatactctggccttttgatatttctgagttttcaacaaagaactgtatagta

SEQ ID NO: 411084 - DNA, 592 bp, Homo sapiens
tattagtctctgcattttattctaaaaatcctaaaacccacttggaaccaagaggcctctgtcatttaatggctcctaggaaggagctttaggagagagaaaggtgaagggttagataccttcccctctccaaagttgtatggaagtgagcaatgtgcgtttttcattcttctctaaagtacaaaaggaaaccacagtggacttccaccctgatccattttaccctgcctgccttcctgaccttcctaatttttttgtttgtttgtttttttggtctggtatgacttatctagagcagtagttctccaacttgagcaagcatcagaatcactggagagcttgttaagacacagattcctgagtcccaccctcagagtttctgtttcagtagatctggggtggtggggggtcctgttaatttgcacttctacaaatacccacgtgtgctggtctgcgaattacactttgagaactactagtctggagcagtagtggggttttttgttgttgtttttacctctggctatgttagaattatctaggggagtttttyttatgaaagatcactgccagatcccagccccagagatac

SEQ ID NO: 411085 - DNA, 618 bp, Homo sapiens
acaaaacatggttgtaacaggacatcaatataaaaagagtaatacagagtgttctgtctctggtttaaatagttagcctacctttgaagtgtacagaaacactattggatggagatagaatccccaattataatcctaatagaaaacaggagaaaggagtgtctattcagttgccttattgtatktacctagaacttcaaatttggttatttcccccctttcttattctcatcttaagaagtcattttcttttcatactaaatacattttcaggtcataaaaaacaatttttcccctctggccagtgatcagaaggcctcaagtttctctaatttgaagttctacttcagttatgtttgaaatagcctgagtttgaaagatatggtggattgggctctgtatttaaagtgtagcaggggatattaaactttacagaacattcgtcaacaactcaagtcaccagtgtccatgatggacagaatcaggttgatttcactttccaggacaggagagtagcctaacaactctgattatcctcaggctattgctcctcgtgccttaaaagccattcctgaaatgtcattttctgtcaccatcattttctgccagagctgccag

SEQ ID NO: 411086 - DNA, 542 bp, Homo sapiens
cccaacatgcattagctgtttatcctgatgctctccctccccctgacccctgacaggccccagtgtgtgttgttcccctccctgtgtccatggatggagctggaaaccagtatcctcagcaaactaacacagtaacagaaaaccaaacaccrtgtgttctcatttatacgtgggaggtgaacaacacagagtctttttcaatccaccattaatggtgtggctctctgcttccattgacgggcttataatgtctggctctttttttatttttgccttctaattttgtgcatattttggatgagggctgtagtgtgcttgtctatcaaggtttaatgaagatattaatattcacttagtaagcacaaggcctgcttgtgtctctaaggagcagagatagacaacaaagggtcaaacttactgaaccagaataatagcactttttcctaaaattcagaggccccagtttgaagagctgacacaggacagcttcagcatgcaatgcgaaatttgtggtccctttcaaattcctttgttcatagaat

SEQ ID NO: 411087 - DNA, 699 bp, Homo sapiens
aatctcctttaacacagcccaatactcttttatgataaaaatcattcaacaaaccagtgaaaaaaacacagaacttcctcaatctgataaagcccagccatatatagaacccatacggctaaaataatacttaatggcgaaagaccagatgtttttccctttcccaagacaaagctagctactctggtcacttctattcaatatagtattgggggtgctagccaggctaattaggcaagaaaaagaaatcaatgcatctagcttgaaaaggaagaagtgaaactatctctatttgcagattacgtgatcgttatatagaaaaccctaatacacacacacacacacacacacayacacacaagttcagcgaggtttcctgatacaagatcaatacacaagcattagttgtatttctgtgtattgacaatgaacaatttggaagtgaaattaagacaaaaattccttatagaatagtatcaaaaagaaaatgcctagtaatagatttaaaaaagaaatgcaatactttcacactgaaaactaaaatatcattgcaagaagttaaagaaaaactaaataaatggaaagaaaactcatgttcatgtatcagaagactgaatacgtgaagatggtaatactcccccaaattgatctacagattcaatccaatacctattagtatctcagctgccttatttgtag

SEQ ID NO: 411088 - DNA, 350 bp, Homo sapiens
agttatctatgatatcccacaatgttacttacacagttytctttggaaataaaaatataaacaaatggtacaggcagattaagaacaactccagcattattattattattattattattatttttttttgagacagggtctcactctgttgcccagattggagtgcagtagtgcgatcatggctcactgtagccttagcctccctgggatcaggtgaccctcccactttcaagtagctaggactacaggtgtgagcttttgtttttttttttttttttttttaatagaaacagggtttcaccatattgcccaggctggtcttgaagtcctggcctcaagtgatccaccca

SEQ ID NO: 411089 - DNA, 350 bp, Homo sapiens
agttatctatgatatcccacaatgttacttacacagttctytttggaaataaaaatataaacaaatggtacaggcagattaagaacaactccagcattattattattattattattattatttttttttgagacagggtctcactctgttgcccagattggagtgcagtagtgcgatcatggctcactgtagccttagcctccctgggatcaggtgaccctcccactttcaagtagctaggactacaggtgtgagcttttgtttttttttttttttttttttaatagaaacagggtttcaccatattgcccaggctggtcttgaagtcctggcctcaagtgatccaccca

SEQ ID NO: 411090 - DNA, 522 bp, Homo sapiens
  misc_feature (1)...(522): n = A,T,C or G
caatttctaagactttatattttcaattagacatttattttactaccaagaagtatcctgatccagaggtactattctcccagccatggagagttcctccaaaagacaaaattctatctttgctaatgaaaatgcaaataaaactgtatcaagagtttcatgattttactaggtatttcccatcatatgtttatcatacagctcaaaattgatgtcaagttttttactctactcttttctcaagttcattcactataaattgaatttcatttttctgcacttgggttgtattttttgaaccactgaytttgcttatattagttttactatgatattcatcaatttgtttaaaaaaattcagaagatacctcttgcacaaattcattttataatttaagaactcacttcagaatgttgagactctgttaagtatcaattctaggattatgaagatcctgtctaccacaaagagccccacaaaggtcttttctccctcattcccaagcagtttaacttaatnnn

SEQ ID NO: 411091 - DNA, 567 bp, Homo sapiens
cagcctgctcataccaggtgaagatggcttaaggattaatcctcaatcatctttccagtttctgaagaaatgaaayacggatccagccaatgctggcagtttccaatgttggggctagaaaggttgatgacatcagaagctgtaggctggggcttggccagaagatgattgattatatgcagtatgatggttttggcaaaatgttctccaagcttaggctgtaccaactaaattggtctcgaaaaccaatgtttaaaatcaacgtcatttcatcatgcagttacaattccataggcaccaatctcaacaactgttacaaggattttcaaatggacatatttattccagttaaggtttctgccctgatattttttaaagactcgataaaatatcaactatttctatacaaattatgtgttaacaatttttattttaaaggttggtgtaaatatgattaaatgcttatagccttacaaaaacctacctgactgaaatctaatagcaccaattaattagactttatcaatgcttctcttttcacttcattaggtcctatttcaaaaaggc

SEQ ID NO: 411092 - DNA, 413 bp, Homo sapiens
caatacttctaataataccttacctatccaataataatacctatctgatacttgtaataatacctatccaataataataaatatattttaaaacgttcattctaaatttatttcttctgtgtatagataccatatagatcagaccaggttttaaataatttaacagtaagatattctcttatgagtttaaatttatgttttggtattttatcattttctttttcctttccagcaaggctacacyaacaccttccttggggactggaaacaaatcaggatcttaagatttcttaataatcttaagatttaaatcaaaagacttctaggattcttttttcacctgctgtttctttgttatttcattggacatcattttggcagagtctaagactttaattgcactttcatcttct

SEQ ID NO: 411093 - DNA, 541 bp, Homo sapiens
gggtatggcagtaaaaagtgatctcttcatggttctcgtgtatttttcgttgtgtttagtaaaatatcacaaacttggaataacataagacccatacaaagtgccactagtgtataattctttgtatacattatgggatttgatctgctaatattttgtcgagaatttttgtgtctattttcatgagagattttggtttgtagttttcctggaagttctcccaagagacagagaagagtcattacwttacaagaaaaaatggaattgtttgatatttaccataaattgaggtctgcagcatggttacccaccatttcagacagacatttcatcttgtaaacagattatgtaaatttacagtattggtaaatacagtatataccgtaaatgcatttttcttattatttccttgataacatttttctggtatactttattgtaagaatatagtatataatgcatatgacatatatgtacaattaactgtttatcagtaagattttcagtcaacaatagactactagtagttaagttttggggg

SEQ ID NO: 411094 - DNA, 613 bp, Homo sapiens
tcttgatagcctgatgagcataacaaaaaaactttaggaaatcccttttctctcagtcaagtgtggcttttcagtatttgttggggaaaattcagttttggtagtgaaactgagcattgaggttttcttcctttttatttccaccatcactgctctaatcctggcaaggcagatgtaagcctcagtctgactgggaagaaaatcacaagcttggaaaggaaaaaaaaaacacccaaaacatattcatgtgtttaaacaaacacttattatttcatgttatatgtttttctgttatttgacaacagttaagtgacacctwctcattattttgagacatcttgtgacatttttgctacatattttgacattttgttagcctagtataaattatctattttataggtaacaatttgctagtccagatttatctattttataaaatatataggtatattttactttgtatgtgaaaacagaagatttaaggcaaaatgtttatataatttattacaatgcatttctaatccataatatttataagggaggaattatatagatatcagttttgcaaagtacacatcatatctgcatatattcttcccaaaaaggtagt

SEQ ID NO: 411095 - DNA, 613 bp, Homo sapiens
tcttgatagcctgatgagcataacaaaaaaactttaggaaatcccttttctctcagtcaagtgtggcttttcagtatttgttggggaaaattcagttttggtagtgaaactgagcattgaggttttcttcctttttatttccaccatcactgctctaatcctggcaaggcagatgtaagcctcagtctgactgggaagaaaatcacaagcttggaaaggaaaaaaaaaacacccaaaacatattcatgtgtttaaacaaacacttattatttcatgttatatgtttttctgttatttgacaacagttaagtgacacctactcattattttgagacatcttgtgacatttttgctacatattttgacattttgttagcctagtataaattatctattttataggtaacaatttgctagtccagatttatctattttataaaatatataggtatattttactttgtatgtgaaaacagaagatttaaggcaaaatgtttatataatttattacaatgcatttctaatccataatatttataagggaggaattatatagatatcagttttrcaaagtacacatcatatctgcatatattcttcccaaaaaggtagt

SEQ ID NO: 411096 - DNA, 549 bp, Homo sapiens
cattggtactctgttcctattttttgttgctgagttccattttatgaatatatcactgtttatgtattctcctacwgatggacctctgggctatttctagtttctggctatacaatgtacttgttttaactaggtattgctacccatcttcaagatacagtaacttgataatttatgcaatttcatgggtaccttttttattagctatcattgttagtctgataactataaaaacttttcaaatggcctttattgttatccttttatttatatcactttgaaaaacttggaaaactactttcctttgagaaatagttttctataatggttatgtagtgacactatcatctaattttaaaagtcttttcatgggactgtgtctcaaatatgctgtgatagatactatggagctcttagatttatcagatactagtctaagtgccctacatcttcacaacatcctgtgagttaggtattattattatcccattttatagatgaggaaattgaagcccagaatgatttagtaattttaaattagtaaagata

SEQ ID NO: 411097 - DNA, 522 bp, Homo sapiens
  misc_feature (1)...(522): n = A,T,C or G
atttaaaaatctctaatcactcataaaacatgctaaataacaattaaacaggtgaaccaaactgccantatgatgaagataggagttataaaaattatgcctcataactatggtagaagcaatttaaaattcaccaaacaatgatgtattaaactaatatactttaaatttttaattacccccaaactcatatgtacaaactatatttatcctraagagcagagaaacggtttcaagaaataaagtttttgtgctagaagcagcacttccccaaaagcatttacctccatcacttcctgcttctcatctgctgcaaaaatgttaggcacttctcctgtattgagcacactgtcgatatcctctaggaaagcttcctctttaatctgagtgtccgtgataagaaagacggtcttctggcccttcatgcccacattccttaacagacccttaaaataaaaatggacttgtaagcagaatatggtagacatctgttggttttgatttccctcactttccctttcc

SEQ ID NO: 411098 - DNA, 627 bp, Homo sapiens
atctgtccaatgctaagagtagggtgttraagtctccaactgttgttgtattggggtgtacctctgcctttagatctaataataattgctttatatatctgggtgctctggtgttggatgcatatatatatatacacacatatatatatttttttgagatggagtttcactcttcttgcccaggctggagtgcaatggcacaatcttggttcaccacaacctccacctcccaggttcaagtgattctcctgcctcagcctcccaagtagctgggattacaggcatacgtcaccatgcctggctaattttctatttttattagaaacagggtttctccatgttggtcaggctggtcctgaactcccgacctcaggtgatctgccctccttggcctcccaaagtgctgggattacaggcgtgagccaccgtgcccagctgaaaagttctctcttttacaaaaattttattattaaaatagagggtctccctatgtgacccaggccggtctggagctcctgggctcaagcagtcctcctgcctatggcctcctaaagtgctgggattacaggcgtgagccaccgtgcctggccaggtgcatgtatttttataattgttatattctcttgc

SEQ ID NO: 411099 - DNA, 627 bp, Homo sapiens
atctgtccaatgctaagagtagggtgttgaagtctccaactgttgttgtattggggtgtacctctgcctttagatctaataataattgctttatatatctgggtgctctggtgttggatgcatatatatatatacacacatatatatatttttttgagatggagtttcactcttcttgcccaggctggagtgcaatggcacaatcttggttcaccacaacctccacctcccaggttcaagtgattctcctgcctcagcctcccaagtagctgggattacaggcatacgtcaccatgcctggctaattttctatttttattagaaacagggtttctccatgttggtcaggctggtcctgaactcccgacctcaggtgatctgccctccttggcctcccaaagtgctgggattacaggcgtgagccaccrtgcccagctgaaaagttctctcttttacaaaaattttattattaaaatagagggtctccctatgtgacccaggccggtctggagctcctgggctcaagcagtcctcctgcctatggcctcctaaagtgctgggattacaggcgtgagccaccgtgcctggccaggtgcatgtatttttataattgttatattctcttgc

SEQ ID NO: 411100 - DNA, 627 bp, Homo sapiens
atctgtccaatgctaagagtagggtgttgaagtctccaactgttgttgtattggggtgtacctctgcctttagatctaataataattgctttatatatctgggtgctctggtgttggatgcatatatatatatacacacatatatatatttttttgagatggagtttcactcttcttgcccaggctggagtgcaatggcacaatcttggttcaccacaacctccacctcccaggttcaagtgattctcctgcctcagcctcccaagtagctgggattacaggcatacgtcaccatgcctggctaattttctatttttattagaaacagggtttctccatgttggtcaggctggtcctgaactcccgacctcaggtgatctgccctccttggcctcccaaagtgctgggattacaggcgtgagccaccgtgcccagctgaaaagttytctcttttacaaaaattttattattaaaatagagggtctccctatgtgacccaggccggtctggagctcctgggctcaagcagtcctcctgcctatggcctcctaaagtgctgggattacaggcgtgagccaccgtgcctggccaggtgcatgtatttttataattgttatattctcttgc

SEQ ID NO: 411101 - DNA, 349 bp, Homo sapiens
agctgggctgagcatatctggttaattttccccaagtttaccagtccggtaggtcactcctctctcctgcagcaagtgagtacaagaatggagaaaagtccagcgtgttacattattaattgggcacatgaaacattactgtgagaaaatcatcccctgccctcaccccaacatgtactatttatcatattttcatgtttgagctagaaaaaatgatattgaaggtaaaattaactaaattctttgaaagtcaggtattttccctctgcttaatgayactttctgtgtaccctagttctgcgccataattttgtttgcaaatcttagaacaagagaggatattttgtgg

SEQ ID NO: 411102 - DNA, 398 bp, Homo sapiens
aagcaaggaagacaattgccaattctgtgacatttctagtatagcagttttttgtttttttttttgagacagggtctcactctgtcacccaggctggactacagtggtgcgatcacggctcactgcagtcttgacttcccaggctctagcgatcctcccacctcagcctmtcaagtagctgggactacaagcatgcaccactatgcctggcttttttttttttttttttttttttttttgtagagacaggttgcccagactcatcttgaacacctgagctcaagcaatccacccacctcagcctctcaaagtgctaggattacaccgtgcctggcaatacagttcttttgtgccaagaaccatttgtcagaataatacttttaaataagtacaaatag

SEQ ID NO: 411103 - DNA, 398 bp, Homo sapiens
aagcaaggaagacaattgccaattctgtgacatttctagtatagcagttttttgtttttttttttgagacagggtctcactctgtcacccaggctggactacagtggtgcgatcacggctcactgcagtcttgacttcccaggctctagcgatcctcccacctcagcctctcaagtagctgggactacaagcaygcaccactatgcctggcttttttttttttttttttttttttttttgtagagacaggttgcccagactcatcttgaacacctgagctcaagcaatccacccacctcagcctctcaaagtgctaggattacaccgtgcctggcaatacagttcttttgtgccaagaaccatttgtcagaataatacttttaaataagtacaaatag

SEQ ID NO: 411104 - DNA, 545 bp, Homo sapiens
aggggtggggagacccagggagaaatgwgagaactttgaattgttctctcaagaccctcctggatggtcattaggggcatttgctgctccctggacctttcaaaccatgggcctgtgacaggaaccatgtgagtgcatcctaccctttgccctcaaatgtgtcaaggtgaaactgaccttgacacatttcatgaaactgtttctaattgccgtttttatcatacatttccaaatttatacctatccattctctcctggcctcatttctgttgttttaagtctatgttcttcactgaacttcaaaatcttacaaatttagaactcctttactgtggagctttatttgaatgaaaataattttggtttatttttccaatggacaagtgagttcccaaagtattagaactataagaaagcatccacatttattttagctataaaaagctgccaaatgtaaagattaatgcatttaaatattaagtaagttaaaattaatagatacattgttgagtacggatggacacaaagaagggaacaacagaaat

SEQ ID NO: 411105 - DNA, 545 bp, Homo sapiens
aggggtggggagacccagggagaaatgagagaactttgaattgttctctcaagaccctcctggatggtcattaggggcatttgctgctccctggacctttcaaaccatgggcctgtgacaggaaccaygtgagtgcatcctaccctttgccctcaaatgtgtcaaggtgaaactgaccttgacacatttcatgaaactgtttctaattgccgtttttatcatacatttccaaatttatacctatccattctctcctggcctcatttctgttgttttaagtctatgttcttcactgaacttcaaaatcttacaaatttagaactcctttactgtggagctttatttgaatgaaaataattttggtttatttttccaatggacaagtgagttcccaaagtattagaactataagaaagcatccacatttattttagctataaaaagctgccaaatgtaaagattaatgcatttaaatattaagtaagttaaaattaatagatacattgttgagtacggatggacacaaagaagggaacaacagaaat

SEQ ID NO: 411106 - DNA, 584 bp, Homo sapiens
acataagttgtcaacttctttgagtaaataccaaggaacacaattgctgaacaatatggtaagaatacgtttagttttgtaagaaaccaccaaactaccttccaaaataaccataccattttgcattcccatcaggaatgaatgagagttagtgttgctccacgtcttctctggcatttggtattgtcagtgttctagattttggccactctaatgagtgtgtggtggtatttcattgttttaatttgcatttccctgatgacatacggtaagaagcatcttttaatatgtttatttgccctctctgtatcttacttggtgaggtgtctgttagggtctttggccatttttaaattgggttgtttgctttcttatcatttagttttaagagttctttgtatattttggataatagtcctttatcagatgtgtcatttgcaattattttctccaagtcaggcctgtcttctcattctcttgacattgtctttggcagmgcagaagttgttaattttaatgaagtccagtttctcaaccaatctgttggtgttgtgtctgaaaaagtcattgccatacccaagttc

SEQ ID NO: 411107 - DNA, 586 bp, Homo sapiens
cctatggctgctttcacggattggtgtcgagcacctgcatcttttccaggtgcagtgtacaagctgcctgtgaatctaccattctgtggtctggagaacagtggctcaattcccagatttctactgggcagtgctcagtaagggttctctgtgggacccccaaacccgttcttaccctctgtactgcccttgtagaggttttctgtgagggctctgyccttgaagaaaacttctatctgggaacccagactttctgatacatcctctgaaatctaggcagaggctgccaagcctctttcacacttgaactctgcccctacaggcttaacaccatgtagaagttgtcaaggcttacagactgcagcctctgcagttgtggcccgagctaaacctagagccctttgagctgtgcctagagctggagtggccaggacacaaggaggagtgtcttgatgctgggcagagcagagaggtcctatgcctggtccaggaaaccattctttccttttcagccttaaagcctgcgatgggaggggctgccacaaagatctctgaaatgccttcaaggcctttttcccattgtttg

SEQ ID NO: 411108 - DNA, 595 bp, Homo sapiens
acaacaacaacagcatcaagaaaatagtccccacaaaaaccccatccacatatcagcagcctcaaagattaaagctagataaactcaggaagatgagaattaatgaaaaaacactgaaaactcaaaaaggccaagtgcctcttctcatccaaattatcataacacccttccagcaagaacacagaactgggctgaggttgagatggagaaactgaaagaagtagcctacagaaggtgggtaataatgaactttgttgaggtaaaggagcattttctaacccaatgcaaagaagctaaaaaccataagacaacattatagggagctgttaaccagaataagcaatttagaggggaatataaatgacctgatggaactgaagaacacaacaggagaacttaagaaggcaaccacagtatcaatagctgaatagaccaagcggagaaaataatttcagagactgaagatgatcttgctgaaataagacaggcagacaagattagaggaaaaaaagaatgaaaagcaatgaagaaaaccttttgagaactaygggattatgtaaaaagactgaagagactgaacctatgattgattggg

SEQ ID NO: 411109 - DNA, 507 bp, Homo sapiens
ctttgtcttttggaggggtttattttaatagagtttctgtgcatgtacctgtacatgatttattgtgcatttatgtagatatatgctgaaaagagaaataaaattgcagactaatggaatataaatatgtataaatatacagatgtatctatctatcgagagatgattgatagatagatagatagattctgctctatttgatactaaaatggtttacagaattgttgacataaacttgcatttccagcattagtatataagcaagggttgcagttactttacatmttttcaaacattttatattgtttgtctttttttttctacttttgccattcctgtgcgtgtatagtggttttagattatggatttaatttaaattttcaaatgaaactcagtaacttttcatttgaatatccttttttatgaaataccaatattttcaaaggattctctttctcatgcttattagaatttcattacatattatggatatgagtcatgtattga

SEQ ID NO: 411110 - DNA, 624 bp, Homo sapiens
ggaaactgaacttttgactaagggtcatcaagtcaccatgtgatctgcactgcctatcatgaactgggtgctgtctgacccatctagtcataaagtgagtcatgcacagcagcattccattatcaaatagaagtgtctatacgtgtttgggctcaagcaggtcctaaaagcacacgtaagttacatgaggaagtgactcaaatacccatggtcttcactcctgccaccctgtacctctcccccagcctgcaccagccttatggggagttccttattatcaactgacagaagaagagagactaagcctggttcacagatggtcccacacaacatgcaggcaccattcgaaagtggacagccacagcattacagctcctttctaggacatccctgaaggaggactgtgctagggggaaatcttcccactgggcagaacttccagcagtgcacttagttttacacttcacatggaaggaaaaatggccagatatgcgattatatactgattcatggcmtgtagccaatgctttggctggatggtcagggactggaaagaagcatgatcggaaaattggtgacaaagaaatttgggtaagaggtatgtggatggacctctctgagtgg

SEQ ID NO: 411111 - DNA, 269 bp, Homo sapiens
tggtttttttttattccttcaggatcagtggtaacattccctttgtcatttctaattgtgtttatttgtatcttctctcttttctttactagtctgratagtggcctattttattaatgttttcaaagctaactcctgaattctttgatcttttgaatggtttatcttgtcttgacttccttcagctcagctctgatttttgttatttcttgtcttctgctagctttggggttgatttggtcttgcttcaattaattctttcagttgca

SEQ ID NO: 411112 - DNA, 613 bp, Homo sapiens
gcctcttaggtggggcatttaccacatttacattcaaggttagtattaatatgtggatttgatcctgttgttgtactgttagctagttattgtgttgccctgtttggttggttgctgtctgctgaccctggtctctgtgtttaagcgtgtttttgtattagctgatagtggtcttttctttctatatttattgctcctttcaaaatcttttgtaaggcaagtctagtggtaatgaagtccatcaccatttccttatctgaaaaggatcttttttcttcttcacttaggatgcttagtttgactggatatgatattcttggttgaagatttttgttttctttaagaatgttgaatatagcccctgaatctcttctgggtataggatttcagctgaraggtcctctgatagcctgatgggcttcctttgtagatgacctgccttttcctctagctgcctttaacattctttctttaatgttgaccttggaaaatccaataattatgtgtcttgaggatgatcttttcgtgtagtcaagtagccagactgttttccgcaggggtccctgcctttactccttctcactgggcagctcctccctaactgtgtttccag

SEQ ID NO: 411113 - DNA, 556 bp, Homo sapiens
cccattattcactggcaaaaaagtcacaactttcagatgacaaatagattaacaaactcacattccaatccttgaaagcctatttctgagtttgcttctttaacaaataccaaagcagccaaagtttagttgggaaatgaaagcctytctggtgatatcaaacagacaggaatagaaataaataaattgatggcagagagttctagagagttaaaggaaggggttttctggagaagtgactggagattatgaaggggatggtgagcagccattggagagtgttacggtcacttgccttagtccataaggtcacacttacctccaacaagctgagggtgatgtcactgccttttcttctgttgctattgctgcttcatatgaactaagcttgccctctctgctccagatgctgttgacacaaccactgactctgctgaagccactgtaacagtctctgtgtaggcaacacatgaagcagcaaaaatggctttttccttcctcttgccagtgcactcattgtaaaagctgtctcctggtaaactgccctgaaagtctg

SEQ ID NO: 411114 - DNA, 301 bp, Homo sapiens
aggtcgttatttcagcctgtaatctgacatraaggcttcccatttttcagctacataaagtaatataacacacatctcagcatcagacattaggattaacactgacaaggcttacgttaaaatgctctgctaggcagcatctctaaagtgaatagaatagctaacgtgcttgcacgatgaatgattcttcatggggagaaggatttatgtttaaatactattaacattttcactgtgacagccatggtttaaaagactggtatttaaatataagatttaatgtatttctataataatgcta

SEQ ID NO: 411115 - DNA, 301 bp, Homo sapiens
aggtcgttatttcagcctgtaatctgacataaaggcttcccatttttcagctacataaagtaatataacacacatctcagcatcagacattaggattaacactgacaaggcttacgttaaaatgctctgctaggcagcatctctaaagtgaatagaatagctaacgtgcttgcacgatgaatgattcttcatggggagaaggatttatgtttaaatactattaacattttcactgtgacagccawggtttaaaagactggtatttaaatataagatttaatgtatttctataataatgcta

SEQ ID NO: 411116 - DNA, 526 bp, Homo sapiens
aagtactttgggaatttcagaagaaaaagtattgaatgtcaacacaaataatcttttttgtctttataatttctaagatctctattattttagaagatattctaaatattattttagaagattactgaaattgctcaaaaatccccaaagagctattaaaggtctgtgatttttttaaatctttttggcattctttccctataaayataggtatattaaaatataattgatgggaagattatagagtatgaagcttgagaaatctgtatttccacatagataacaattgcattggcagaatctgtctgttgtagctattttggaactctggagtccactgaaggcctgaatattccagggaaaggggcacaaattgtgattaatttcaatcaatttcagttcttagcacagtaataactacccattccccatctttcagccccatggcaggcagctgtgcatgtactcctggtttgcacatggcttgtgggagccacggtgggcaaaaaggactctatcctgcaaa

SEQ ID NO: 411117 - DNA, 618 bp, Homo sapiens
tggtgtgatgtggctcaataaccacttggggaaaaacaatgagagggtttttattgaccaaagtggtttaacaaatgacacttaagtgatctactggcattttagaacagaggcaagactgctcactcattaagtcattttaaaaatagtcattatagagcttttgccataaatcaagaacaaaagattccaggaaataattttttataattcataaacacatagtaatgtggaaagaaggactctagagttgaacagggttatcaattacattttccagttgtctatcctagagacaacattccttccgtgagttcaaaccttaaacatcmagatgaggtattgtgggtaaacttgaggattgacacacttcagcagactaccagctccatgagatcaagggccacatctgttttatttagcgagaagcagaattaggccatgtgtgacagtgggtgttactcagcaggtgctcagtgaataatgaatggattaatgacattgtatagtagtgtctgactttgcaaacagaaaatcacagcctttgtgaatgtaaatttacacagtaaacccaataccatatagacttttagtgatattttggtatttagaaaaaag

SEQ ID NO: 411118 - DNA, 534 bp, Homo sapiens
aaacaccaaaaatccatactagaagattttaagccacatgaaattcacattgccatttaggaaaaaataatcttttttaagatcatagctccctattcagatacctaattaatgaatatatatttatatatgttttttctgcatatatacatatatatatttgtggtaagatacacataacataaaatttactattttaaccattttcaagagtacagttcagtggcattaaatacaggcatatgaaactataattacatctaccaggtgtccccacctaatagacctatgtatatttgagtgatgattctttttgatttctgtgtctctatactggaataaagaatctctgaaatttgtaatctataaaattcttgaactaaaatcttttttttttyttttttttttctttttttatcaaacagacgagttgtttctcatcctgagggcatatgtgcttgggaaaaactctgacatcttaagaaatgatgttactcatggctgacgcatggctggcatatgaatccatatgaa

SEQ ID NO: 411119 - DNA, 506 bp, Homo sapiens
gtcttgctggatggtcattggtcttagctggctgattgctgttatgattgttgatatggtttggctgtgttcccacccaaatctcatctcaaattgtagctcccataatccccatgtgtcgtgggagggacctggtgggaatcatgggagcgggtttttcccgtgctgttcttgtgatagtgagtaagtctcacaagatctgatggttttataaagggcagctcccctgygcatggcctcttgcctgccaccatgtaagatgtgcctttgcttctcctttgcctttcaccatgattgtgaggtctcccccaccatgtggggctgtgagtccattaaacctctttttctttataaattacccagctatgggtatttcttcatagcagtgtaaaaatgaactagtacagttttgctttcaaaaatactggcagggtacactgtagcatcagttacaggtttttttttttcccaaaggcatcttgtgataatttggcattttttgttta

SEQ ID NO: 411120 - DNA, 581 bp, Homo sapiens
tatgaattagaaaggctggactgcctcttgatgcctggtgtctagtcccatttttattggycagtgcccaagcattgttgaatatctttgaatatcatcccaggttagtagggaaaaattaagacaaagggtattactgagaataggatggtgctctggtttgaatgtgtttccaaagtttatgtgttagaaacgtaatccccagaacaacagtattgacagatgggaacttgaagaggtgattaggttatgagggccctgctgtcatgaatgaattgatgttgttatcatgggagtaggtttcttgtaaacactagctcagcccttctcaccctctcttctggctatgtgatgcctttcaccatgttatgacatagcaagaaggccctcactggatgcagcttgccccttgatctgggacttcccagcctccagaaccatgagccaaataaatttctgtttattataaatcttccagtctcaggtattctgttaaagcagccaaagcagactaagacagatgagaacccaaaagccaacttctgagtctttctaaaaggtcatgtgggcaaagccatatc

SEQ ID NO: 411121 - DNA, 656 bp, Homo sapiens
tctgatggttttataaggggaaaacccttgcacttcgttctcattctctcttgcctgccaccacataaaacatgcctttcaccttctaccatgattgtgaggcctccacagccacatggaactgtaagtccattaaatctctttttctttttaaagtacccagtctcaggtgtgtctttatcagcagcatgaaaacagactaatayagatgtatataacctaagagcatagacaatagtaaaatgtagtgacattatgaggaattacagagtttttaatattttcttccctttgtttttaatatttattactttcaaattacacaatttaatttttaatggctttttaagctaccagcttacaaaatttctgaaaattatacaaacagctcttgtgatctggtacaaaccagctctcacacatcactgcttatatcctccttatatgggtcctgaaataagcaggagacccggaaaatttggaaagaatggaggtttgctgacctagtaaggacactgccaagaaaataatttccactgaacattctcattttcctcctccgaacagcatagtcatggccaaagtcattttagctttgccttttatcagcttaagaaactgtagatcagctttaggcttatgtgttcaacactaag

SEQ ID NO: 411122 - DNA, 512 bp, Homo sapiens
catggtccaaacaatattcaaataaaatttttaaatataactgatctgtatgtgaaagcttatatttataatatttagaaagtgtattaaaaaatatacaccttcactgaagtctagtatctagtgtacaaaataatccagtgacccatgaatacgtctgaaacaaaaagtttagtggtgccttcygcaaccaaccaagtggataaatgtattttggattgccttgtctgtatgaaaatttagtatatagagtacagtttctatgttatctggtccaacatcccaagcagaatcctgtacacaccaattatgggcctgtcattaatcctttcattaatgatttggcttatgcaatttaattatgcaaatgaaagtatgctatgtagttctgctaatagtatttagttgagtaggttcactagtaccttacagaacaaactcagaattcaaaatgccatattttgttcacagggcctaacagtatagggaaaaatatcttagtaaagctattt

SEQ ID NO: 411123 - DNA, 604 bp, Homo sapiens
attatttattgtgtatttcagaaagccctaattgaacaaattctacaggaaaacatgcaccagtaaggatgttgggcrtcactggcaagatcacaaatttttcagatggttcaatggttattctattaaatatggagcaggttgtttggaggagaaaggtaatgtttgatcttgagatttgaagaattccgcaattcttccagataatttgaggaacaagcactctgaacaatatataggaaatcaatgaataaaattaattcaatcaaaagtttgaaaataaaaagttcagtgatacatttttctcgaaaaaccatatttcagcatttttccacctacaaatcattaatctagcattatgcctttggtttagaagaggtttttcctaaattttaggagtaactttttagtagaatttcataagcatctttcagttcatatgagtctttttgctgtcagcacatcataatgcactattgtcacagaaaaattacctcatgatttggttttaaattacataattaaatttaattgcataaagatgttttcatttaatcatataggaccatttcaattgccaataatacatccgatgtaacaataa

SEQ ID NO: 411124 - DNA, 553 bp, Homo sapiens
caaaggttggagattactaaataatctccaattttaggtagacaattgtattcaaattttaatatctaaaattatttttaataagtaaagacaaataaaataactacagggataaaagtacagagtgtgattaaaaatgatgacaccaaggtcaataatccagaagagaccatcagtgtttattacactataacaaagctcctttatgaatattattcttctgtctagaaaataaaacttttcactatttcaaattatagaatgtatctcatactccagaaaaaacacagcactgcttatcaaaaaaaaaaagatctaaaaattaggtttgtatttcagagaatatttgaataaaaattggatttgggttgatttagaatgcatctgtctcatctgctcactgtgtacctgaatccayaaatctgtctactgcagctaaacacaatattttacggattgagacaatgaatgaaaagtaacaaactaacaacctgtttcacaaacaatcaagctggtattttcatgtaaatatctacatcaataataactaaac

SEQ ID NO: 411125 - DNA, 481 bp, Homo sapiens
atgctgcctataatagatccaacctgagataattaaaaccaaacaaaaatatgtttagctatttattcatgtcatagtcaaatcatgcctggaaaggaaaattttayagttgctcatctggcagaaacaaagacatgtagcgtattgtcactgccaataaaaattcagctttgataaatactcagatacatttcagtgctgcttttacttattttaaatttttttgattgaattactgacacacgcttctccagtatactggagatactttatgtatctcctaatgtaccctaaatattactttatagcctgaagttcgattttctgctccctaaatcaagaattttgtcattgcttttaaaatttagtctctggagttcaactgtgacattcttagttccagcctgcttatgcacgtagttttagatactcataatttttaatttgtatcaacatatgagagaaggaaaatcaagccttc

SEQ ID NO: 411126 - DNA, 568 bp, Homo sapiens
gagtcacatactttatactcattatctcatwtaatcttcataaaattcctgtgtggtaaatatttcatgctgacacattgcactgctctagaaactgccaatctcattaccaacggtgagaaaagtgcacccaggagttgtataactcaactcagaggctcagaagttaaccattgtcccaaaggacaggacttgaacccaggtcagtcttattttagaattcatgctcttaactacagctaaaccccatcttataaaagcacctgtaatctcacctcttggatgcatgcttatattaacaccatgatatatgtacctttatataagtttttatataaaatttcatctttctcaaatgttttaagaggagtattacatttttatttttgtatttattcttacttttctattccatcacccacacaatttctagagaggttgctggagggcttaattctttcttccatgaaatagcccacatgccacactcccagtgtcataaaaatgagtatctgttgggattttgttgtgtcttagaaaattaaaatctcccagaaacttataaaac

SEQ ID NO: 411127 - DNA, 590 bp, Homo sapiens
aaagatctttataaatgctcagataacattgcaagaaaataaggaccaatcagaagcttaaagtgaagtcagaaagataagcagaactgaacactggagaacttgatcttaggcttctgatttttatggttacttagggcacaaaaattagagagaaaatcaagaggaggtgggactcacaaggtgggaaattcaataaacagccaacccacagcataaagcttatatctcattaactagattgcctgattgtagcatgagttatatataaacattcactttatgagcctaaaaaataaatcgctgccttaaaaggtggagatgagtgaaagagaaaaaaatgtatcctaataatttaaggctcaaccaggcttgctgtcttaattgacatcacttgagtagttaccaaaacttcaaaccaagaattacatttaattcaagtgatcatggttgcctggtatatgcaaatcctctccagaaaagtttcccttcaamttacatctcaaaatatctcacatttaaagttttaaaagtaaatgtgaagctcgttttataatattaaaaaataaacaaggaaaaatgcacccacc

SEQ ID NO: 411128 - DNA, 556 bp, Homo sapiens
gtgcctgtagttccagctattcagaaggctgaggcaagataatcgcttgaacccaggaggaggaggttgcagagatcgtgccactgcactccagcctggatgacagagtgagactctgtctctgaaaaaaaaaaaaaaaaggacccattaaggagcaataagaaatcatctgaaggtacaaaactcactgactcactgatagtagcaagtacacagaatattataacactataactgtgtaactgtggtgtgtaaaataatcttaagtagaaagactaaaaaattaaccaataaaaaaaaaaaacatgatatggtttggctgtgtccccacccaaatctcatcttgaattatagctcccataattcccacatgttgtggagggacctggtgggaggtaattgaatcatgaaggcaggtatttcccaggctgttcttgtgatagtgaataagtcttagaagatctgatgattttataaaggggagttcccctgcacatattctctccatgtaaaatatgactttgmtaatcattcaccttccactaagattgtgagg

SEQ ID NO: 411129 - DNA, 582 bp, Homo sapiens
aatattagttgtcatatttattatctaatcctctatcacactgtgcccaagagcttttcacatgtcattcaatctttcctcaactaaaaataaaagatgcatgcaagtacagtttaaaactaatgattcatttaatttaaagcagatgcatttatctttctatgcagttttttattttcaaattattaacaacatgtcatttctaagattttaataaattcgctgtcacacatgaaacacactatgctcactgttaaaatacatcatatgccagaaactaaaattgcaacttttgtttaaaatttaaaacactatgctcatcaaaaaatccatctgttacccggtaatttttaacatagtaattagactaaatgggatctcattttatagttagaatgtaaatgttgacattaaaaggaaagcaaaatagttattatcatggtaaggaatcataaggagtacaataaattatgtaatacrtagatttttcagtaacaaaaacaaagtaaactgctcaacctctggagattcagattttgtttttaaaaataaacaattattgaatagagtagcatattccta

SEQ ID NO: 411130 - DNA, 622 bp, Homo sapiens
tggctcactgcaacctccacctcctaggttcaagcaattctcgtgcctcggtcccccgagtagctgggattacaggtgccttcatcacgtccagctagtttttgtattttcagtagagatggagtttcaccatgttggccaggctgctttcaaactcctgacctcaggtgatccacacacctcgacctcccaaagtcctgggaatacaggcgtgagccaccatgcagggcctggaattctatttcataacatcaagtgttttaaacatctaatatatgtaacaggcttcccaaaatcaaatttcagcttcaaggttgtctttcttaccccttgctgttggatgctacagagggcccctggagcatccagaagagaggtaaacaggattatttgacatgtacacrgaattgccaaaatgatgtttaatcttcatattatattttagtgaatattaatatgttccaaaattgtgtgggatgtctacagttctaatgtctgagtatatgctatcaatatcataattaaggttattatgatattgtatcaatatcataatatcataattaaggttattatgttattgtaaaccacagagataaccaaattttctttgtcaatgttt

SEQ ID NO: 411131 - DNA, 552 bp, Homo sapiens
acactaagtagtaacttgaattaatgtcaagaactaaaaagctctgttcaaggtaactacatagataaacataaaagacagtataaatgtattttttttttgttctggacttctttttttcccctctgatttaaaaaaaaaaactgctgaaagcaataattataatctatactgatgggcagaaaatgtataaagatgtaatttgtgacaagaatagcataaaagtggggggggasagatttatatagaaagaaagtctttttacgctattgaaattaaattgctggtaatctgacctagattgttataaatcaagatgttaatggtaatcccagtgcaactaccaagaaaataactacagttctagtcaccaactaatctcacaaaaccagatgttaagaaatgagacagcattcaatagtcccaagtactgtccccaaacattattttctctgttttatacagttaaacatggagaaagcacatctcaggtctagataggctgagggcagtagaccaaatggattaaatatatccactgattctagtaaa

SEQ ID NO: 411132 - DNA, 552 bp, Homo sapiens
acactaagtagtaacttgaattaatgtcaagaactaaaaagctctgttcaaggtaactacatagataaacataaaagacagtataaatgtattttttttttgttctggacttctttttttcccctctgatttaaaaaaaaaaactgctgaaagcaataattataatctatactgatgggcagaaaatgtataaagatgtaatttgtgacaagaatagcataaaagtggggggggacagatttatatagaaagaaagtctttttacrctattgaaattaaattgctggtaatctgacctagattgttataaatcaagatgttaatggtaatcccagtgcaactaccaagaaaataactacagttctagtcaccaactaatctcacaaaaccagatgttaagaaatgagacagcattcaatagtcccaagtactgtccccaaacattattttctctgttttatacagttaaacatggagaaagcacatctcaggtctagataggctgagggcagtagaccaaatggattaaatatatccactgattctagtaaa

SEQ ID NO: 411133 - DNA, 610 bp, Homo sapiens
ataatctatactgatgggcagaaaatgtataaagatgtaatttgtgacaagaatagcataaaagtggggggggacagatttatatagaaagaaagtctttttacgctattgaaattaaattgctggtaatctgacctagattgttataaatcaagatgttaatggtaatcccagtgcaactaccaagaaaataactacagttctagtcaccaactaatctcacaaaaccagatgttaagaaatgagacagcattcaatagtcccaagtactgtccccaaacattattttctctgttttatacagttaaacatggagaaagcacatctcaggtctagataggctgagggcagtagaccaaatggattaaatatatccactgattctagtaaaaaaacaagtttagcccagaggccaatgcacaaagcccagaagattggtccagcttggcaaagaaccacagccctgttcatgygataagccaattagcaagacttcctgaggagtaccctctttactgctttggcctcctgaactttgggtaaccaatattcaatttttcttctttcctctaataccctattataaaaaatttcaaacagcaaatttgaa

SEQ ID NO: 411134 - DNA, 559 bp, Homo sapiens
cagattctataataattaaaaataaaataatatgaataactttacgccactacatttacaagtttaacaggaaatgaaaattttttcagaaaaatacaacagaaagaaaatttttaaaatctgaaatcttcctatgaaatagactgcatctgtaattaaaatcttcctgcaaagaaatctccacgcccagaagcattcaattgggcttccacaaaattaatatggaaaaaacaatgccaatgttacataaagtcttccagagaatgaaagaaaaaggtatatcctccccaactcattgtatgaggctatcacaatcttgatagcacaaaacccratgaggacagtataaaaagaaaatttagagcccaatatcattcgcgagcatggatgccaaaatagtctatactatacaatatagtatacatatttgttacgaaggtaacaaaatttggagatgcaggtaagtagtaaatacagggaagtttgctgtataatactatatagtatacatatttacaaatagtaaatcaaacatcaaattttaaaaaggggagaggga

SEQ ID NO: 411135 - DNA, 565 bp, Homo sapiens
atctaggtcttccccacaccaggctcttttaggaacttagtacattttgcagcctgagagttagatacctaccagtcattgtcctgactggtagatcccagagatcctcaaggcctccccactgactttcaccaccatctgggagatttaagaaaacgactaaaacccctagtcccataacctgtggggtctggagcccttcctaggatttggacaaatcccaaggagtagatggactctttctgtttcatgtgccgtgagcactaccttgacttgccccacaccaaacctgaactcaaagctcagcatccaccaaacatttcacaagggcggcagcttcactgaaggacagagaacttgtggaagggcacatctcagccccagcctcctgctgctccctgcttcccttcaccttctctattcctcygtcctcctccttccacagcaagaaactaacttttcttcttgtcccatgcaatgcaagtcctccctcacccagacctccagggatttcaccttctaccctaggcactcattgaggtattgcatcaaaccaagtttcctt

SEQ ID NO: 411136 - DNA, 565 bp, Homo sapiens
atctaggtcttccccacaccaggctcttttaggaacttagtacattttgcagcctgagagttagatacctaccagtcattgtcctgactggtagatcccagagatcctcaaggcctccccactgactttcaccaccatctgggagatttaagaaaacgactaaaacccctagtcccataacctgtggggtctggagcccttcctaggatttggacaaatcccaaggagtagatggactctttctgtttcatgtgccgtgagcactaccttgacttgccccacaccaaacctgaactcaaagctcagcatccaccaaacatttcacaagggcggcagcttcactgaaggacagagaacttgtggaagggcacatctcagccccagcctcctgctgctccctgcttcccttcaccttctctattcctccgtcctcctccttccacagcaagaaactaacttttcttcttgtcccatgcaatgcaagtcctccctcacccagacctccagggatttcaccttctaccctaggcaytcattgaggtattgcatcaaaccaagtttcctt

SEQ ID NO: 411137 - DNA, 507 bp, Homo sapiens
gtgaaaatcatccaagatgcctgggatcctaccccactgttgtgtgtgggtgcatgttttaaatgaagcagcagtcatgagaaccagacaatcagatatccaagaagcagggcacccttaccattccctttaggcatggyttcccgggtcatgctcctcgtacccaaggtgatgcccagtgcaccactcgcctgacacatggacacatggagggcaaagccctgtttcctgttgttatgcagagtctgtggtatacaatgatcccatagcaaatgttgctgggaagacacgcacaggagactgtaaaaatccatatcctcatatccatcagctaagtgactttacctatacctacaccttgaggggccctggacctccattccctggtgcactagggaccttctagagctcacccaccttagcctgctctgggtcaggggacatgcctgtggtggacctatcactccaccttctactctctccctgcacctgcctcaaaaggccaga

SEQ ID NO: 411138 - DNA, 589 bp, Homo sapiens
gttgtgtgtgggtgcatgttttaaatgaagcagcagtcatgagaaccagacaatcagatatccaagaagcagggcacccttaccattccctttaggcatggcttcccgggtcatgctcctcgtacccaaggtgatgcccagtgcaccactcgcctgacacatggacacatggagggcaaagccctgtttcctgttgttatgcagagtctgtggtatacaatgatcccatagcaaatgttgctgggaagacacgcacaggagactgtaaaaatccatatcctcatatccatcagctaagtgactttacctatacctacaccttgaggggccctggacctccattccctggtgcactagggaccttctagagctcacccaccttagcctgctctgggtcaggggacatgcctgyggtggacctatcactccaccttctactctctccctgcacctgcctcaaaaggccagatgttccctaggaatccttacgaggagctaggtcctacagtggaatttcggacactagcagcaggtcagtggggccaagttagactttcctagcatttctcagatcacacctcacatatgt

SEQ ID NO: 411139 - DNA, 642 bp, Homo sapiens
taatacaggagaggagagcctgagtgttagaatggggggcctagaagggagcgcacagaggaagctggtgggtcacactctgcatgaagtgggcacaggagcatgttcctgatggcaattcgagtcccaaagtctgcagatgatttaaatttaaataaattctgatgaactcaaagctcatcctttaataaaacttccactcattcacatcttaatgggccttcttggtggtgagagaagaggataaagtcacagctatgttgagggccctgcagaaaggagaatatagtggggccctgacttcatgtccttcattcaggtcttcaaggctcttgtggaacacgggctgagaacttctgggccagccacaggtgagaggccagaggtctgtggctgccttcttagctgggttttaacatcacctccagtcagccttgttcatctctaggggagtgtccctgtgagcctagaaatcctgcagctgagaaatctaattaaactcagtgtttcctcagtcttttccwacccatacacccattgataataaagagaaactctctcatgccccaaactgacctgtaaagttcagtatccccttctccctcattcataagactctcttctgcaaagtctgctcctcaa

SEQ ID NO: 411140 - DNA, 641 bp, Homo sapiens
atttcagtccttatctctatggcataagacagacactcccagagcagccgtttatagacctcccccaaggaatgcatttctttcccagagtattaatccttgctaggaaaagaatttagygatatcttccctatttgcacatccatttataggctctctgcaagaagaaaaatatggctctattttgcccaaccctgcaggcagtcagaccttatggttgtcttccctagttccctgaaaattgctgttattctgttctttttcaaggtgcaccgatttcatattgttcaaacacacgtgctttacagtcaatttgtacagttaacacaatagtgggcctgaggtgacgtacatcctcagcttatgaagataacaggattaagagattaaagtaaaaaaaagacaggcataagaaattacagaactgttaatttggggaactgataaatgtccatattaaaatgaaatcttcacaatttatgttcagagattgaagtaaagacaggcttaagaaattataagagtattatttgggaactgataaatgtccatattaaaatgaaatcttcacaatttatgttcctctgccgtggctccagctggtccctgtgttcagggtccctgacttcccgcaacagttg

SEQ ID NO: 411141 - DNA, 619 bp, Homo sapiens
gcacttataccgcaggtactaccaaagcagttcttttagcctcaagctctcttctaagtaatatatctaatgttcaccacttggtggagatctccttctggttcttcctgaatgtctggtctcaaatattattttctcttctgatctactccttcatgcctaataccatcaagatttttcacaactactgaaattgtttaccttccagccacattcaataaccagattctttgatgccccctcctaaaatttgtttaccactgataagatttaaattmctttctagctctgtttctagtatgacctctgaaaaggtactcctttctgggtctgtttttctccatgtttaaaaatgtttgtattagatccaagggtccaccccagtagggtcccaggggcccaaccccagtcttctacccatttttgtaaataaaccttttgtttgtggttgttttccatgttgcaaagttgagtagtgacagagactttgtgtccccacaagccttaaatatttactgtctggccctttccagaaaacatttgctgacccctgaactagaaaatctctcatctagtttcctcttttttttaataatttttttggggaccattcatgatc

SEQ ID NO: 411142 - DNA, 606 bp, Homo sapiens
tctttaatttatccatttatctttaggctactatgaattatgctgccataaacattggtatataaatatttgtttgagcttctgcttcatttcttttggatatatacctagtagtggaactgctaggtgtttgagtccactcaaaattcatatgttgaaatcctaacccccaaggtgatggttttggaggtggggcatttgggaggagattrggtcatgaaggtggagccctcatgattgatgcccgttcttccacctgaagttatagtgagaagactgtcatctatgatccaggaagggatcatagatcccttcaccagtcactgaatctgctggcaccttgaccttggacttctcggtctctataactatgataaataaatttttgttgtttataaactatccagtttatggtatttttgttgtagtatcctgcatggactaagacattgggtcatgtggtagttccacatttaactttttgaggaactaccaagctttaccacagcagtggcatcgttttacactcccaccaccaatgtacaagggtcccaatttcttcatgtcctctccaacatcctctccttgttattttccattaaaaaa

SEQ ID NO: 411143 - DNA, 627 bp, Homo sapiens
tctcaagattctctttgtcttctgacaatctgcctatactgtatcttggtgtatctcttcgtgtttattttgcttgggctttgttgagcttcctggatatgtagactcatgtcttttatcacatttgggacacttttggccattcacatataatttctgtctctctctctcccttgtccttctgagactctcataatgcatatgttggtccacttgatggtgttccacaggtatcttagtctttgttcacttttcttcactctttcattctgcttctcagaatggataatttcaattgtcctatcttcaagtttgttaaatcattcttctgcctgatcaaacctrctgttgaactcctctagtgaaatttctcatttcagttatcatacttctcaccttcataatttctatttgattcctcattataatttctatctctgtattgatattctcgttttgttcatatattattttcctggtttcctttcttcgtttccatgatttcttttagttttttgaatacatttaagacagttgtttttaaagtctttgcctaataatttcaatgtttgagctttctcatggacagttttgtcagtttattttttttcctttgaatgcattatc

SEQ ID NO: 411144 - DNA, 627 bp, Homo sapiens
tctcaagattctctttgtcttctgacaatctgcctatactgtatcttggtgtatctcttcgtgtttattttgcttgggctttgttgagcttcctggatatgtagactcatgtcttttatcacatttgggacacttttggccattcacatataatttctgtctctctctctcccttgtccttctgagactctcataatgcatatgttggtccacttgatggtgttccacaggtatcttagtctttgttcacttttcttcactctttcattctgcttctcagaatggataatttcaattgtcctatcttcaagtttgttaaatcattcttctgcctgatcaaacctgctgttgaactcctctagtgaaatttctcatttcagttatcatacttctcaccttcataatttctatttgattcctcattataatttctatctctgtattgatattctcrttttgttcatatattattttcctggtttcctttcttcgtttccatgatttcttttagttttttgaatacatttaagacagttgtttttaaagtctttgcctaataatttcaatgtttgagctttctcatggacagttttgtcagtttattttttttcctttgaatgcattatc

SEQ ID NO: 411145 - DNA, 633 bp, Homo sapiens
accatacatgtatgagatgatgtctggattccctattctgcaatatatgtctatttatctatccttatgccaatatcacactgtcttgatcactgaggctttatagcargtcttgaagtaggtagcatgagcctttcaactttgccctttatcaagattattttggcccttccttccttccttctttcttttctttctttccttctttccttttctttcccttctttctttctttctctctctccctctctctttctttccttctttctgacattttttcactctgttactcagtctggagtgcagtggtgtgatcatgactcactgcagcctcaaactcctgggctcaagtgatcctcctgcctcagcctcctgagtagctaggtgtgcattacgaggcccagataatttcaaaaaaaatgtttttgtagagatggggtgtcactttgtcgcccagattggtatcaaactcctggcctcaagtgatcctcctgcctcagcccccacaccacccctacaaagtgctaggattacaggtgtgagccctgtgcccagccattttggctattcctgtattctttgctttaccgtataaattttagaatcaactttgaaaagttattaaaatgcctg

SEQ ID NO: 411146 - DNA, 510 bp, Homo sapiens
gctttaccaaggagccgctgccttkttcaggacaggagtattagcttattctcttgcttttctcactgtgaacacttggcttgcaggctgaggccgagattcccactgaagtaaaggcagtgcttcctcttcccgtcctagtcataggttatgatttccccggatatgagacaatcttgtctctcacctatatttcagtccaagtcagatgtaggcactaagcggctccattgcccctcctaagtcccaagtccagcacttgaactagcaaatgaagagattaccgtatttgttctcattatgttctccctacttttttctttcaggtctcttcactacaaaaacacaggaaaaggggaagagagtggcaaatatccgctttgtctaagtaattctgagtgcatttcatcagtctgagggtctctgtcctttaccactaggggcaacattaatttgaacctagatctccttatacttcctcctttgttgaaaccacctccctggatagtg

SEQ ID NO: 411147 - DNA, 510 bp, Homo sapiens
gctttaccaaggagccgctgccttgttcaggacaggagtattagcttattctcttgcttttctcactgtgaacacttggcttgcaggctgaggccgagattcccactgaagtaaaggcagtgcttcctcttcccgtcctagtcataggttatgatttccccggatatgagacaatcttgtctctcacctatatttcagtccaagtcagatgtaggcactaagcggctccattgcccctcctaagtcccaagtccagcacttgaactagcaaatgaagagattaccgtatttgttctcattatgttctccctacttttttctttcaggtctcttcactacaaaaacacaggaaaaggggaagagagtggcaaatatccgctttgtctaagtaattctgagygcatttcatcagtctgagggtctctgtcctttaccactaggggcaacattaatttgaacctagatctccttatacttcctcctttgttgaaaccacctccctggatagtg

SEQ ID NO: 411148 - DNA, 574 bp, Homo sapiens
cactgctggggacttactgccagcagtggggactgggacccacagccatagagctctgtcctttttccagtcacatttctgattatccacatgggattctgctagggctaggaggyattggattacaaatcccactggacagaaagttgacttgggccttaggcagggaggacctagagtaagtgaaatattgaatgtcatgaggatattggaaagaaaaagagtaagtgaaatactggatttcagtaccagtggaagtagcctgaacagtgtgctctggggtaggaggacagcatggggctatatctggggcctgcaggtcccctgagaaacacagatcagaaggccatggctaaagccaaagagggtgggaaagctggaaagggttaagaactcaccccaggaaacttatttccaagatcaaaagtaggcctttctgcactgacaggtatctccaagtccagggaaaaaaggcatgactccagctcaggtaggccaccttgccagaagtccttaggttatgggtaacatacgtagctttcatcatctctcaaatcccttctggctcacaagg

SEQ ID NO: 411149 - DNA, 549 bp, Homo sapiens
aggctgggatttcctaggggttgacatttctcaagtggatgcttgccttgctgttttcaaccaagcgcagaatgtaaggtgcttacacagctcactgctggggacttactgccagcagtggggactgggacccacagccatagagctctgtcctttttccagtcacatttctgattatccacatgggattctgctagggctaggaggtattggattacaaatcccactggacagaaagttgacttgggccttaggcagggaggacctagagtaagtgaaatattgaatgtcatgaggatattggaaagraaaagagtaagtgaaatactggatttcagtaccagtggaagtagcctgaacagtgtgctctggggtaggaggacagcatggggctatatctggggcctgcaggtcccctgagaaacacagatcagaaggccatggctaaagccaaagagggtgggaaagctggaaagggttaagaactcaccccaggaaacttatttccaagatcaaaagtaggcctttctgcactgacaggtatctcca

SEQ ID NO: 411150 - DNA, 620 bp, Homo sapiens
accactactagaagctgctgacactttcatgcaccagccattgtgctatatgcctaatgggcttgtcacacttaatgctcataactcatctgtgaggtaggtggtggcattattcttgttttacggataagaacaataagactcagagtcagataacataagccratgactactaagtgagaatcaaacccagaatctgtgcccctaacccctactctatactgtctttcccggatacaagggtgacctccacgtttaagccttctagctacctctctacactgacctgtcataagttccagcctaccaccttgcattctctgtagcatatgtctctgtaaatgccccactaagggaggcacttcagtgggctcaaagtcaaccttcatgtcatctgcccacaaaccagcttccctttatgatgtctccctgtttgttaacgcatttcccacctgccttatcaccgtggggtgtgaaacccaggaattactttctatcattctccttcctgaaccttcctcctcctaggcaattggtagagagagaagcttgttgagactctcctccagaatgtctcttgcatctctgctgtaagctcctgggatcagttttcagttagc

SEQ ID NO: 411151 - DNA, 620 bp, Homo sapiens
accactactagaagctgctgacactttcatgcaccagccattgtgctatatgcctaatgggcttgtcacacttaatgctcataactcatctgtgaggtaggtggtggcattattcttgttttacggataagaacaataagactcagagtcagataacataagccaatgactactaagtgagaatcaaacccagaatctgtgcccctaacccctactctatactgtctttcccggatacaagggtgacctccaygtttaagccttctagctacctctctacactgacctgtcataagttccagcctaccaccttgcattctctgtagcatatgtctctgtaaatgccccactaagggaggcacttcagtgggctcaaagtcaaccttcatgtcatctgcccacaaaccagcttccctttatgatgtctccctgtttgttaacgcatttcccacctgccttatcaccgtggggtgtgaaacccaggaattactttctatcattctccttcctgaaccttcctcctcctaggcaattggtagagagagaagcttgttgagactctcctccagaatgtctcttgcatctctgctgtaagctcctgggatcagttttcagttagc

SEQ ID NO: 411152 - DNA, 625 bp, Homo sapiens
ggctgaaactgctgtttttgaaatccctgttgtggattggccaactgttgctacttgaaagcttataatcctagcagatttagacttttcttttttgtggagaaggccacaatattaactagatcacatatctgagtggttgctcaatttayctgatgtcacttaacgagggtaacaaactcttagtcaaggccgttaagaaaagctgagcttaacatagattcatttttttctattattaacactgttatcagacacaccaaagtattgtttaaatgtctttttgaatcattcaaaattatctaaatctgttatgttaggaccttggcagcattgccaaattttacccaatctatatgttttggaaagacttttgggatggcatctaaaagctctctggctaaagcgctagcttctattctgttgtataccttcatttgctctattaaagttttccagaggattttgccaattagcatttttaatccatttggtgtccctctcttctgaaatcaatagtccccctagtagctgggaccacaggcacgtgccaatatgcctgtcaaatttttgtattttttgaagagatgggctcaagcaatccacctgccttggcctcccaaaa

SEQ ID NO: 411153 - DNA, 556 bp, Homo sapiens
gagggtaacaaactcttagtcaaggccgttaagaaaagctgagcttaacatagattcatttttttctattattaacactgttatcagacacaccaaagtattgtttaaatgtctttttgaatcattcaaaattatctaaatctgttatgttaggaccttggcagcattgccaaattttacccaatctatatgttttggaaagacttttgggatggcatctaaaagctctctggctaaagcgctagcttctattctgttgtataccttcatttgctctattaaagttttccagaggattttgccaattagcatttttaatccatttggtgtccctctcttctgaaatcaayagtccccctagtagctgggaccacaggcacgtgccaatatgcctgtcaaatttttgtattttttgaagagatgggctcaagcaatccacctgccttggcctcccaaaatattggaattacaggcgtgaaccactgcacctgactatgacccaatttttatgttctgttttatcccagggagtataaacaagagcaggtgtgcctca

SEQ ID NO: 411154 - DNA, 556 bp, Homo sapiens
gagggtaacaaactcttagtcaaggccgttaagaaaagctgagcttaacatagattcatttttttctattattaacactgttatcagacacaccaaagtattgtttaaatgtctttttgaatcattcaaaattatctaaatctgttatgttaggaccttggcagcattgccaaattttacccaatctatatgttttggaaagacttttgggatggcatctaaaagctctctggctaaagcgctagcttctattctgttgtataccttcatttgctctattaaagttttccagaggattttgccaattagcatttttaatccatttggtgtccctctcttctgaaatcaatagtccccctagtagctgggaccacaggcacgtgccaatatgcctgtcaaatttttgtattttttgaagagatgggctcaagcaatccacctgccttggcctcccaaaatattggaattacaggcgtgarccactgcacctgactatgacccaatttttatgttctgttttatcccagggagtataaacaagagcaggtgtgcctca

SEQ ID NO: 411155 - DNA, 601 bp, Homo sapiens
tgtggttccttcacttaaggctgcagctgtttctgggttcagctatcactgttgccacaccttgttcactcaagcttaaggcaataacagcttcctgctcttgctagtccctgagtgcttccccaacccttgttggtttccttaaccctatgcacatctctgtaaaaaggcccttgttcaaactccctgcagttacccccttttgagtgtgccaggttttctctcatgaaactgacattgactgatgcatatgattatttaaggaagtttaaatattcatcaaaggtcccttgaaacttcttcttmttattattttgagacagggtcttgcactgttctctaggctgaagtgcagtggtatgatcacggctcactgcaggcttgacctcccgggttcaagtgatcctcccacttcagcctctcaagtagctgggaccagaggtgtgtgccaccatgcccagctaatttttgtattttttgtagagataggattttgccatgttgccaaggctgaattatttttaaaatttattagatttattgatagaaatatgtcttaggtgacttttgcaataatgatgctatataacaaaccacccca

SEQ ID NO: 411156 - DNA, 601 bp, Homo sapiens
tgtggttccttcacttaaggctgcagctgtttctgggttcagctatcactgttgccacaccttgttcactcaagcttaaggcaataacagcttcctgctcttgctagtccctgagtgcttccccaacccttgttggtttccttaaccctatgcacatctctgtaaaaaggcccttgttcaaactccctgcagttacccccttttgagtgtgccaggttttctctcatgaaactgacattgactgatgcatatgattatttaaggaagtttaaatattcatcaaaggtcccttgaaacttcttcttcttattattttgagacagggtcttgcactgttctctaggctgaagtgcagtggtatgatcacggctcactgcagkcttgacctcccgggttcaagtgatcctcccacttcagcctctcaagtagctgggaccagaggtgtgtgccaccatgcccagctaatttttgtattttttgtagagataggattttgccatgttgccaaggctgaattatttttaaaatttattagatttattgatagaaatatgtcttaggtgacttttgcaataatgatgctatataacaaaccacccca

SEQ ID NO: 411157 - DNA, 581 bp, Homo sapiens
ggacttgcactgtgactaggagagggacctcaccaggtcctactcgacttacaatgaacttagaggtgacatcaattccctcatccttttcacaagcggtgtggttattccctgagtccattttccagtaacagaccaacagcacaaatctgaatatccctctgaccgtttcactastagatagaaccaacattggttttgtttctgtcatctagtatattagtcacacctctcatctttgaatcatctaccaagtgccatcgatatacaaattaatatttattcttcttatctttattctaagagtgttggtgtgagaaggtggagattattatagggaaaggatgggccaaaaggagagagtagaagttgaggcccagggaggtgaagctcaaggacacacagagctgggcacagttggagctgggatcatggttgggtctcttgcatcttggcttagggctccgccacaattagatagcccagtgagaaatgcggagcctcataaatcccgctttgtcctttattccatgtttagtatgttatctgtagatacgaatttaagagctgggcaaactcca

SEQ ID NO: 411158 - DNA, 444 bp, Homo sapiens
caccttttgcagtgttttgcggtgatgggcattccagcttctattaaaacagataatgccccaggctrtactagccaagctctagctacatttttctctatatggaatattaaacacattactggcatcccatataattctcaaggacaagccatagtagaaagaatgaatctctccctgaaacagcagttgcaaaagcaaaaggggagaagcagggactacgggacaccccatatgcaattgattctagcattattgactttaaattttttgagcctgcttaaaggccagcagctgaacagcatctacagaaaccagctgcaaagacagaagcagaacaactggtttggtggagagatacaataacaaaaagttgggaaataggtaaaataataacttggggtagaggttatgcttgtgtttctccaggaccgaatcaatagc

SEQ ID NO: 411159 - DNA, 444 bp, Homo sapiens
caccttttgcagtgttttgcggtgatgggcattccagcttctattaaaacagataatgccccaggctgtactagccaagctctagctacatttttctctatatggaatattaaacacattactggcatcccatataattctcaaggacaagccatagtagaaagaatgaatctctccctgaaacagcagttgcaaaagcaaaaggggagaagcagggactacgggacaccccatatgcaattgattctagcattattgactttaaattttttgagcctgcttaaaggccagcagctgaacagcatctacagaaaccagctgcaaagacagaagcagaacaactggtttggtggagagatmcaataacaaaaagttgggaaataggtaaaataataacttggggtagaggttatgcttgtgtttctccaggaccgaatcaatagc

SEQ ID NO: 411160 - DNA, 513 bp, Homo sapiens
gacacacggttcagccaattggaatgagtagtgcagaacctagaatcagttcgcattccagcatgggtcaggcttccaggtggaaaggttagtggtaaaatctgtacacctgaggccttgcctctcattaccaagagagtgatgactcagccctgggctaggtttaccgaggggaaccccaaagggagccttctctacarctttatcaggggctggccttataccttgttgcaacagaagaagacccacttggtggggtttagaaataataggaaggcctatctagccccacaaatctctgcccacagcacttgaatccctctgctttgtcaagttgcctggcttagcctcattagggctgcattcctttgagttaattgaatccagagaaccacccaggtggccaagattgttaggtttaacctaatctaatataaatcagttagctttgcataaaggaaaataccattgctagaccactgtatcccattaggtttggtccagcccaggaca

SEQ ID NO: 411161 - DNA, 591 bp, Homo sapiens
agccacaccaatggcatacctgctgtcagtataaacatttgcagtttttccttcaactaagaaacaaacacgagttgaagttgctaattctgccttctgggctgatgaaacattaggtaatcatccatcctcgataacatccttgatcacgtacttgaaactactgtataacctgcagaaaatttcctatctttacttctcaagtaggatccatctgtgaaccaaataaaatctggattgtacaaggttctttcctgtaactcagctcttgggagaaggagttgagcagttaagtgtcaaacagttatggtgagatgcgttgaatggaaggggcaaaagcgtagcagagttcaactattgcattgagtaatagttacrttaggagatgaaagtaaaaggatctcataagaagccagtggactcattgattaacattgggtgtgatatgaatttaagagtgcttcaatggaatgaatggagcatatatagttatgggggacccattgttatttcttctatagacctaaatagcagggcaatagctgaaatagcacttagacatgggggcaggccttgagccactgagtccac

SEQ ID NO: 411162 - DNA, 446 bp, Homo sapiens
agctgaactgtttctgcctcggggccttggcatgtgctgtacttattttcagaatccttattagcaggcctcagcttctcagagacaccttccttcaccacactaagatttcccccagcccacgccttcactgcctctttatcatatttaccttgttctcttttcttcatggtatttagcagtatcaaacattctctatgtatttttttcgttatctacgcccccttgccttaaayggaagtgtcatgagagcagggagcttgtctgtttcatcctgtatcccgtcatggaatcacacccaacacgcaaaagattcttcataaatatgcactcgtgagttaattagcaggtcgaatgggaacccaaacattctctgggcacattcccactgtattctaggcactgtgccaggcactggccagggtcacactgccagtcagtgcagg

SEQ ID NO: 411163 - DNA, 552 bp, Homo sapiens
cactggaaacttggccactgaggacctggactccagactcactggagggagaaataagataatggcacagggagtatcatgtctggattaaactccatgccaccccgggaagccaccatgacaggcgagtacaggtttggtggggagagtcctggytgggatgagatcaaggaccccatagagtctctggcattcaggcttctgccttgctgtgtccctggggcaacgtgctgaatgactcctaagttcacatttcttcccctgtgagaatgtgttagggtggagtgggcttgaaaccagagggtctgggctaagtttgactttaccatttactatctgatttttttatctgtctgcaaaaccaggataaaaatacccaccctattttatctcacagggtaatcttatgaagaggaatgtttgaaaatctgaaggtagggagaactatctctttagctagtggtcatgaatatcatctgtaaccgtgttacatttttttctgttgatgtcctgggaatgcatcctgtgtatccggtcaaaagagaaaagggt

SEQ ID NO: 411164 - DNA, 583 bp, Homo sapiens
caaccttgcaaatataattaagggtttataattgcacattattaattcagccttctcacccaaaatatatttcttctgatcaggatatacatttactgcaacccaaggacagaaatgaacaatgaaacattattaaatgggcattctttatcccttctccatccatagagcaaatgaactgtcacttaaaatacgtgaaataaaagatgtagttaattcaactattctaaattgaatatggaagaaatatatataggtagagtactaccctggaaagatttctgggattagaaagtgtgaataaagaagtaggaaaaatgcaaatatacaactgaatctttttccacctcagagtgatttttttttttttgttttgccttaacagtggacttgggcaacatttaagtttgtgagtactcatagagtactcataatgcagatgatgcagtataattrgtcttaacaatatatatttttaacactacttgagaaggataataatttcatcccatatagccaagttgggactgtgaatacaggtccattatcatgtgacagagacagttaaactctatgatacctg

SEQ ID NO: 411165 - DNA, 640 bp, Homo sapiens
gttttaaagcaggaatgaaatttattagaaagttttagagcaaaaaagaaaggaaggaaagtacacttggaagaggtccaagcaggcgatttgaaggacgagtgtgggattgaacttttgacttggggttttatatgttaccatacttccagggtcttgcatcccttctcccatgatttttcccttgggctgggctgcccacatgcatggtggcctactagcccttgggagataaacatgcatagtgtgtttactggagttgtatgtgtgctcacctgaggcattcttccctttctggtggaatgccccaggaaggtcatataccagttaaattccaccattttgcctctcaatgtgcttgcttgarctcattcgcccaactcctgagattttatcaggaagctactgatcaccagtgtcaggttttttctacctattgggaaactccccttccctggggctggttgcaaccaattattgctttagaaaggcagtgtgacgactgccttttcgtcacctcatggtcccctcactttcctggtggggtgtaggggccctctcttgccctgttcatgtctgcctagctacctacttgaacagcgatggagtttacacttgagtgggagagaatgcttctatg

SEQ ID NO: 411166 - DNA, 570 bp, Homo sapiens
atgtttctgttgtttcagattcttccaccrcatctttaataaaatgttgacttgtgttaggcacaattatacaggaagcagagcttagttcacagaataaggcatcctgaatcctctgagtcaatagctagacttagaaacattttgaaataaacgtcattccttattcctaaggattcagactctgtagcttgctatatgcaagagtagaaagtatatctcaaatgtattagccattcacacaccctgtacatcaataattttaccaatgacagcccatttctaaaaggtattgtcataattaatgggccattgatattacaaaacaaaactgatttccaaaatttattataaaaattaacaaactttggtcataaagatagttgaaatatataaaacactgccctctgtagtgtgtgctttctctttgaatgctagttgactctcctgaaagtgtgtaaactcctgattagagaacatgacagctccttcagtacagacaaatatggaattacacacacaaacacacatgcacacattatatgtaaatataaatgtacatatgctgct

SEQ ID NO: 411167 - DNA, 510 bp, Homo sapiens
tcactatctgggtttggtgtgttttgaccagcttctttactgcaaactgttttatcagcaaggtctttatgacctgtatcttgtgccaacctcctatctcatcctgtaactaagaataccttaatctactgggaatgtatcacagtaggtctcagcctcattctacctagcccctattcaaaatggagttgctgtggttcaaatgcctctgacaaagattcatcttgatttttcaaaaagagcttcagaatcacaatatctaaccaataccttaatgaatacctgaatttcaaatgtacaaaattattttgtaaaaacaacacaatagacatccagggttaatattayggaaggatatagatctgacctacaatttgatatttcctatttctgaagcctcttttgacattctctttgccacttccattatatttattatatattggggatcaatgaaaaaatattaataattgctaggatatattttttaaacatgaatttgaaaatcat

SEQ ID NO: 411168 - DNA, 509 bp, Homo sapiens
tgagaatattttgaaagaaatctcaaaacctgaaaacaaaaacaaagattgacagaaacaaaataaacgaacaaatccaagaactgtgggactggtacaaaagaygtaaaacatgtataatgaaagtaccagaaggagaaaaaggagagaaagaagcaaaataaatattcgaaacagtagcgactgagaattttgccaaattaatattatacattaaatggatgattgaataaaatgaatgaataaaagtccttatgactcttattcttgccattctaacacacttagtttaaaaatattggtgattatcataacttgcctactgaagtattagaaaaccagatatttattgatgaagacaatgcactaagtcttctgatcactaaaacattctgatcacttaagtaatcataatttctaaaaagttttaagctattcctacatttcttttcttctgagctttcatcggaattttccttattgctctgtttatggtaatgtaggctttt

SEQ ID NO: 411169 - DNA, 509 bp, Homo sapiens
tgagaatattttgaaagaaatctcaaaacctgaaaacaaaaacaaagattgacagaaacaaaataaacgaacaaatccaagaactgtgggactggtacaaaagacrtaaaacatgtataatgaaagtaccagaaggagaaaaaggagagaaagaagcaaaataaatattcgaaacagtagcgactgagaattttgccaaattaatattatacattaaatggatgattgaataaaatgaatgaataaaagtccttatgactcttattcttgccattctaacacacttagtttaaaaatattggtgattatcataacttgcctactgaagtattagaaaaccagatatttattgatgaagacaatgcactaagtcttctgatcactaaaacattctgatcacttaagtaatcataatttctaaaaagttttaagctattcctacatttcttttcttctgagctttcatcggaattttccttattgctctgtttatggtaatgtaggctttt

SEQ ID NO: 411170 - DNA, 509 bp, Homo sapiens
tgagaatattttgaaagaaatctcaaaacctgaaaacaaaaacaaagattgacagaaacaaaataaacgaacaaatccaagaactgtgggactggtacaaaagacgtaaaacatgtataatgaaagtaccagaaggagaaaaaggagagaaagaagcaaaataaatattcgaaacagtagcgactgagaattttgccaaattaatattatacattaaatggatgattgaataaaatgaatgaatraaagtccttatgactcttattcttgccattctaacacacttagtttaaaaatattggtgattatcataacttgcctactgaagtattagaaaaccagatatttattgatgaagacaatgcactaagtcttctgatcactaaaacattctgatcacttaagtaatcataatttctaaaaagttttaagctattcctacatttcttttcttctgagctttcatcggaattttccttattgctctgtttatggtaatgtaggctttt

SEQ ID NO: 411171 - DNA, 564 bp, Homo sapiens
tttggctaactcaggcagtagtcacagagagaaagaggctcccaattgagatcagcaatctaatcttgttgggggatgaatccctgtggccagatctgagaggcaagcagagagtgggtttttgttacaggaataggaattgagtaacacctgctttgtagcctggaccaataggagtgtggctgggagctgggattcatttcccaggaagagagtctggggcaaattcacaatttgagcatagactttttgagactcagctggctgttttggcttgctgtcagtggcaggctgtcatctcaaggatgtgggagctgagcgactctcactaccatgtatttcgctgtggagcctgggctgcccctctctccccataagggctcttttgagtagcagaggtgttcctccctgaactttgctttagtggccagggaactactttctgacctccattgggtgyccccctttgcctgctgttagaaaacctaaaaacaggattttttgaccaagccctcacacagcttttctctcttattcaccctgttggcagaacataagagagaa

SEQ ID NO: 411172 - DNA, 637 bp, Homo sapiens
gtgaaagataagatttattttagwaggtttgcttgtacagattcatactggcatggacccctgcttccagtgagaagaatgttctttgttttctagtatggtaagggcatctttctaaagaaaaagttattatttgattttaggtagaaagctggaattcaggcacctcttcctacatttgctatttcttaattgcccttagcagaaaataatcaatatgctaaatggcatgttttagggtgatatatcctcatcttcttgtacatccagtagtaatgagcaactcattgagagccctcatcttagtttcaaaataccatcttccaatatctagaccaaggttacttggttaaatggttaatactaatgttgggtgaaggaaaatacaaaatgagtctgcaatattttgcactaaaaaagtaggaaaatgttcaatttattgtgggatttaaaagcatcatctaaacaaccacaaatatctgagttctcatactctatgctagcccactagcaggaggacaacaacaaatattttaagttctttcatgtgtcatgtacaatttctattatagtaacaaattctattatagtattatggtctctaaagacaacatatacaacatactacagtttaaac

SEQ ID NO: 411173 - DNA, 637 bp, Homo sapiens
gtgaaagataagatttattttagtaggtttgcttgtacagattcatactggcatggacccctgcttccagtgagaagaatgttctttgttttctagtatggtaagggcatctttctaaagaaaaagttattatttgattttaggtagaaagctggaattcaggcacctcttcctacatttgctatttcttaattgccctyagcagaaaataatcaatatgctaaatggcatgttttagggtgatatatcctcatcttcttgtacatccagtagtaatgagcaactcattgagagccctcatcttagtttcaaaataccatcttccaatatctagaccaaggttacttggttaaatggttaatactaatgttgggtgaaggaaaatacaaaatgagtctgcaatattttgcactaaaaaagtaggaaaatgttcaatttattgtgggatttaaaagcatcatctaaacaaccacaaatatctgagttctcatactctatgctagcccactagcaggaggacaacaacaaatattttaagttctttcatgtgtcatgtacaatttctattatagtaacaaattctattatagtattatggtctctaaagacaacatatacaacatactacagtttaaac

SEQ ID NO: 411174 - DNA, 637 bp, Homo sapiens
gtgaaagataagatttattttagtaggtttgcttgtacagattcatactggcatggacccctgcttccagtgagaagaatgttctttgttttctagtatggtaagggcatctttctaaagaaaaagttattatttgattttaggtagaaagctggaattcaggcacctcttcctacatttgctatttcttaattgcccttagcasaaaataatcaatatgctaaatggcatgttttagggtgatatatcctcatcttcttgtacatccagtagtaatgagcaactcattgagagccctcatcttagtttcaaaataccatcttccaatatctagaccaaggttacttggttaaatggttaatactaatgttgggtgaaggaaaatacaaaatgagtctgcaatattttgcactaaaaaagtaggaaaatgttcaatttattgtgggatttaaaagcatcatctaaacaaccacaaatatctgagttctcatactctatgctagcccactagcaggaggacaacaacaaatattttaagttctttcatgtgtcatgtacaatttctattatagtaacaaattctattatagtattatggtctctaaagacaacatatacaacatactacagtttaaac

SEQ ID NO: 411175 - DNA, 569 bp, Homo sapiens
tatgaccagactgttaggaggtttgagtactttgttgtgtatgcttgtcagtgaggagatggttcagaagaaataaattaaacttagaatgttttaagctgaaggtatcattgagcaggcatttggttataaatcaaaatcatttatatttcatgaaaagaattttgtttctcttgaagcaaggctgattcatgcctaaatattttattcatagtacattaatcacaaccrttttgtatcattgcttactaaggttatggcatataagcagagaaggagactaatgatgaggttatttagataagatgaaaacagtgcttttgaatgaaatttgtaaataatgtaacacaaaaacattgttaagaataataatctacatgatagtttaaatttggtgcatataagatcagttaactgatatcctaatgatatgctctcacacatggcctgaaagcatttcaaaaatgggttataatttaaactttatgtttagttttaattaaagcatattttgaacatataaaataaagtataaagttaaattgaatagtgataaggtgtggggattt

SEQ ID NO: 411176 - DNA, 301 bp, Homo sapiens
ggagtgcctagaactccccaactctactttttactatttttttgtgtgtgcatttttgttttgccttggcagactagttactttaacttttgtgatataaaaccagtcataaggagacaatatgaaagggaaaaagtaataagagaaggtgtaaagtgatggttaagccaggataggaggttwggaggatttgaaatgaaagaggctgatatggtttggctccgtgtccccacccaaatctcatcttttagctcccataattctcatgtgttgtgagagggaccaagagggagatgattga

SEQ ID NO: 411177 - DNA, 301 bp, Homo sapiens
ggagtgcctagaactccccaactctactttttactatttttttgtgtgtgcatttttgttttgccttggcagactagttactttaacttttgtgatataaaaccagtcataaggagacaatatgaaagggaaaaagtaataagagaaggtgtaaagtgatggttaagccaggataggaggttargaggatttgaaatgaaagaggctgatatggtttggctccgtgtccccacccaaatctcatcttttagctcccataattctcatgtgttgtgagagggaccaagagggagatgattga

SEQ ID NO: 411178 - DNA, 571 bp, Homo sapiens
cttttcacatagataagttaaaattaaagtttaaaaccacagttttctggaagattgagtccaaatctttcattacrtaagaagaacaagcttatcagggttcagtaaattatcctagttccacatctaagtcagtgacatttctagaattaaaaccatgtctttctctggatttattcagaactctttctaatatatatcagtcttatttactaatcataattattttttcagttgcagttaattacatttacatataatcatatttacatagactttatcagccatcaaaggaatctaaaacatcctgattatttcttttgaatttcatgagattcaacagcataccttccaaactcttttctcaaattatttgcttcaaattgacttttgccttgaaaagtaaatcctgtttatgacagtagagctaagttttagacatgtcactcttttgaaccaggacccagcagcaacattgatgttattgcctagagtatcactcttagaatggttcagtgctgaaagggaatgcagagctctgctttgctattctaagtccactggaggttac

SEQ ID NO: 411179 - DNA, 571 bp, Homo sapiens
cttttcacatagataagttaaaattaaagtttaaaaccacagttttctggaagattgagtccaaatctttcattacataagaagaacaagcttatcagsgttcagtaaattatcctagttccacatctaagtcagtgacatttctagaattaaaaccatgtctttctctggatttattcagaactctttctaatatatatcagtcttatttactaatcataattattttttcagttgcagttaattacatttacatataatcatatttacatagactttatcagccatcaaaggaatctaaaacatcctgattatttcttttgaatttcatgagattcaacagcataccttccaaactcttttctcaaattatttgcttcaaattgacttttgccttgaaaagtaaatcctgtttatgacagtagagctaagttttagacatgtcactcttttgaaccaggacccagcagcaacattgatgttattgcctagagtatcactcttagaatggttcagtgctgaaagggaatgcagagctctgctttgctattctaagtccactggaggttac

SEQ ID NO: 411180 - DNA, 501 bp, Homo sapiens
tgaaaaactcccctgctctgtctttatttgtgagaatcaagaggatgattagttctttattatcataaacctaaaaactgtatgacaagccatctcccacagagtcttctcaaatgtccttccatctccaaggcaaccagacagatttctaggctttaaagtatttcttaagcttagattcctcatatcctcgccaaacaactttgagttagaaattaatccccacaataagctcatacattctgttccttacacagtatcattttgtacttgaatatggtaatttaatggtatttgactaattgtttataagacatccacttactcttttatgtgttgatcttctacatactcccmacatggatttttttttaaataaaaaaaatctgttagactcttttgtaattctacttcatttacaataatacaattctttgatgttttacagagagtaataaatagatagtatcaaaatattctaagagagatgattggatctga

SEQ ID NO: 411181 - DNA, 443 bp, Homo sapiens
ttccttctgtgttttatagattacgtagattcttggcagtttctacttggtagaatctacttatgtaggttctatcttcaagttcattaatcttttttttttttctggagatactaaactgactatatwgtgatttattttttacttttaatactgtatttttgagtacaaggtattgcattttgttatttttatatcatccatttctatcaccaacttgattttccttcaaatatttaaatatatttgtaatagctcttttatacaaccatctaataattttatctttgtcatttaatgctgttttaattgattaactttcccctagttatgggtcatatttcctgcttctttgcatatctagtaatctttgaataaatagtttacctcatgttttatgttaccaattcactggatattgttgttgtcctttaaatgatgtt

SEQ ID NO: 411182 - DNA, 565 bp, Homo sapiens
accctttcttatctttcataacatcctctatttactgccattttttcgtccgccttattaagttcaccttatcagtttctatggtacctactttgactccttaaagagaaagtcaatgtcttattatttttgatacattcaaccaagatttggcacaaagaatatatccaataaataatggctgattattgattctttccttttacttactaaactgtggtcaaatctttatacattattgtattttattatgtgctgtaccccagagagaaggaatttgaagaatcataaaacagatgtgaacatgaatcttawtgagaatagattaaaaagagagagaggcacacatctaagtgattatctggagagagccttaaacaacaacaaaaccctaaaatcaaggccccggcaggtaagaagactgtgagaatgtgaccgggggtaggtgactctgggacaggaacagtgtgccagagcccatacgggaggagatggtcatttgtatgaagtggggatattgtggaggaggtcatccgtggagtctcaaagtacctttgtataaatt

SEQ ID NO: 411183 - DNA, 565 bp, Homo sapiens
accctttcttatctttcataacatcctctatttactgccattttttcgtccgccttattaagttcaccttatcagtttctatggtacctactttgactccttaaagagaaagtcaatgtcttattatttttgatacattcaaccaagatttggcacaaagaatatatccaataaataatggctgattattgattctttccttttacttactaaactgtggtcaaatctttatacattattgtattttattatgtgctgtaccccagagagaaggaatttgaagaatcataaaacagatgtgaacatgaatcttattgagaatagattaaaaagagagagaggcacacatctaagtgattatctggagagagccttaaacaacaacaaaaccctaaaatcaaggccccggcaggtaagaagactgtgagaatgtgaccgggggtaggtgactctgggacaggaacagtgtgccagagcccatacgggaggagatggtcatttgtatgaagtggggatattgtsgaggaggtcatccgtggagtctcaaagtacctttgtataaatt

SEQ ID NO: 411184 - DNA, 626 bp, Homo sapiens
tatttagataaataaaataatgctccatttgttatgcattttattgcactctactaaaataaacatttagaattgatgtttcaaataaatgttgaactcatatttattatctctgtcatacattcataataaaataatatatttgatstttcatgacatttttataatctgaaaaatcacttcaattaatctatgaaatattcacaactgctatatagcagaaagaaaaaccatgttttagaagtatttcacattcttaaaatgtgacagcatttttttctaacttaaaaggcaaagtctcttttcccatcacttgaatccaactgtccctgtgagttgctttggctgttaaaatacggcagaagaagttgcacgccaggtcagagtctaggcctcaagaggctacatgtgcttcattgggagctacatcactcaaggaaagtaacagggtgtgaaagttgcaacgtctccgcaaagtaacaccagcatggtcaaatattcgtatccaaaggctgtcaccacatttttattcagttattttctgctgctttttcatttttccactattctttttatgtctaaatattattatttgttttatatatactgtataataaatcataagt

SEQ ID NO: 411185 - DNA, 626 bp, Homo sapiens
tatttagataaataaaataatgctccatttgttatgcattttattgcactctactaaaataaacatttagaattgatgtttcaaataaatgttgaactcatatttattatctctgtcatacattcataataaaataatatatttgatgtttcatgacatttttataatctgaaaaatcacttcaattaatctatgaaatattcacaactgctatayagcagaaagaaaaaccatgttttagaagtatttcacattcttaaaatgtgacagcatttttttctaacttaaaaggcaaagtctcttttcccatcacttgaatccaactgtccctgtgagttgctttggctgttaaaatacggcagaagaagttgcacgccaggtcagagtctaggcctcaagaggctacatgtgcttcattgggagctacatcactcaaggaaagtaacagggtgtgaaagttgcaacgtctccgcaaagtaacaccagcatggtcaaatattcgtatccaaaggctgtcaccacatttttattcagttattttctgctgctttttcatttttccactattctttttatgtctaaatattattatttgttttatatatactgtataataaatcataagt

SEQ ID NO: 411186 - DNA, 626 bp, Homo sapiens
tatttagataaataaaataatgctccatttgttatgcattttattgcactctactaaaataaacatttagaattgatgtttcaaataaatgttgaactcatatttattatctctgtcatacattcataataaaataatatatttgatgtttcatgacatttttataatctgaaaaatcacttcaattaatctatgaaatattcacaactgctatatagcagaaagaaaaaccatgttttagaagtatttcacattcttaaaatgtgacagcatttttttctaacttaaaaggcaaagtctcttttcccatcacttgaatccaactgtccctgtgagttgctttggctgttaaaatacggcagaagaagttgcacgccaggtcagagtctaggcctcaagaggctacatgtgcttcattgggagctacatcactcaaggaaagtaacagggtgtgaaagttgcaacgtctccgcaaagtaacaccagcatggtcaaatattcrtatccaaaggctgtcaccacatttttattcagttattttctgctgctttttcatttttccactattctttttatgtctaaatattattatttgttttatatatactgtataataaatcataagt

SEQ ID NO: 411187 - DNA, 595 bp, Homo sapiens
ggttttaacaggaattgaaaattgtgttagtaatttttttgcattgatataaaggaagaactgagactggataatttatgaaggaaaatggtttaatagattcccagttctgctgctgcacaggaaacacagtggtggcttctgcgtggcttctggtgagggcttcaggaagcttttactcaaggcagaaggcaaatggggagcaggcatatcacagggagcaggcatatcacatggcaagagcaggagcatgagacagaggaggaagaggccatatccatttaaactaccaggtctcctgtgaactcagagcaagaactcactcatcaccaaggggatgacactaagctatgcgtgagggatctgtcctcataatccaatacctcacaccaggcccctcttcaacactggggattacatttcaacataatacttggaggggacaatcacctaaaccatatcaaaagttgcactacaattggtgagatatggtttgactgtgtccccgcccaaatctcgccttgaattgtaataacccccatgggaaaaggkcaaggccaggtagagatagttgaatcatgggggcagctccctc

SEQ ID NO: 411188 - DNA, 598 bp, Homo sapiens
atctttgttggcatacaatgacacttccttcaaaacagtcaaaattaattaaatgcttattagttacaataggtaggaagaaataagacagctagttgcccatatgactgtatagttaactaatgtggaatagcatcaaacagattgatcagagaaaaaataagtactagaagaatatactaagaaataagttataaaatgcgagtgatatagaaagcaggagatatgattcttattgcatgcataggaatagggtataagaacaggaataggaaaaaggatagaagatatgattcttattctatagcagtaaatatgattcctattggtggcaacaaacagcttatttaaacaaggacatcaaataatcattgtgaaaatgtgtgtaattttccctcttaaattatgrgtatttcaaaaaattatatataaatttcaaaaaaatgtcagattggcagagaagcaacatcctaaaaagtgaaaactacagcactttaaagttgtgtataaacaaatgaaacaatgaatgaaaacaagttttagtagcttccaattatttattgattatgatggggcaagctatgtatcaaagacatta

SEQ ID NO: 411189 - DNA, 601 bp, Homo sapiens
ttatattgaggactagagacaaaaaaatcccaagtcatgcaactgggggcaagattccttcttaatattacttttccaaactaaggtcatatagttgtatgacttttgtgtgtcagtgccttattctccagaatgttgaaatgaaaatgagtctttctcttttcagtttattgggttctgatcaaaaatgataaatcaatcccactgtttccagaatttatagccaaagatgttcctagaaaacatattctgttactgaagacatagtgacaatataaaatgttcatcagaatacccaataaaaacctctctcaagagtgtagatttttcttagagaccacctgcctgaatgttcccttaaaaatttagcacatcattcactctttaatgtacctgggcatcttattatcactgatcctttaagaaaagtaatagaagaaacttacatataaagtaataatattctcctccaataaaggaccttaaaaagttatacagaaaatgaataygatatttaatttctagtattttaaataatagcatattttaaatatatatattgttagattgcaaattgaactgagctggcataaatcaaact

SEQ ID NO: 411190 - DNA, 542 bp, Homo sapiens
acttaactgaattgatgaatttggatactattctgaggaaatggtaagctctcatgccttaatggatgaaggttgtgtgaaaactcccccaattcattataatttccccttttgcttccaccttgtcccagtgttgttccatctgtcaacaatggctgaatagctcttattcatttctaggaaaggagctaagcaattgctttatgtaaaaagtcttctctgactctctgactggctcaccctgattttcatatccttgttgccatactgctgaagcacccagcatttgcttcattgtaggcaaacaaacttactacaaaaaataaataaatatacaatacaactcattcttaacwttctgtcattcatatctgatgttttcctcaccaagtaagtagaaatcactttcttctaaaattggcaacggcctacattttgccaatttctttttcttttctttctttcttttttctttttttttgacacagactcttgctctgttgcccaggctggagtgcagtggcacaatcttggctcacagc

SEQ ID NO: 411191 - DNA, 593 bp, Homo sapiens
tgactggctcaccctgattttcatatccttgttgccatactgctgaagcacccagcatttgcttcattgtaggcaaacaaacttactacaaaaaataaataaatatacaatacaactcattcttaacattctgtcattcatatctgatgttttcctcaccaagtaagtagaaatcactttcttctaaaattggcaayggcctacattttgccaatttctttttcttttctttctttcttttttctttttttttgacacagactcttgctctgttgcccaggctggagtgcagtggcacaatcttggctcacagcaatctcaacttcctcagctcaagagatcctcccacctcagtctttcatgtagctgggactacaggtgcatgccaccatgtcctgttaatttttgtattttatgaagagatgggtattcgccatgtttcccaggctggttttgaactcttgggctcaagcaatgtgccctcctggccttcctaaactgctgggattgcaggggtgaaacactgtacctggcccttaccaatttcaaataatgaacttggtgataaactttctagaacttctcaaaagtac

SEQ ID NO: 411192 - DNA, 593 bp, Homo sapiens
tgactggctcaccctgattttcatatccttgttgccatactgctgaagcacccagcatttgcttcattgtaggcaaacaaacttactacaaaaaataaataaatatacaatacaactcattcttaacattctgtcattcatatctgatgttttcctcaccaagtaagtagaaatcactttcttctaaaattggcaacggcctacattttgccaatttctttttcttttctttctttcttttttctttttttttgacacagactcttgctctgttgcccaggctggagtgcagtggcacaatcttggctcacagcaatctcaacttcctcagctcaagagatcctcccacctcagtctttcatgtagctgggactacaggtgcatgccaccatgtcctgttaatttttgtattttatgaagagatgggtattcgccatgttkcccaggctggttttgaactcttgggctcaagcaatgtgccctcctggccttcctaaactgctgggattgcaggggtgaaacactgtacctggcccttaccaatttcaaataatgaacttggtgataaactttctagaacttctcaaaagtac

SEQ ID NO: 411193 - DNA, 540 bp, Homo sapiens
aataaaatttaaatattgactcacaaatttgtatctcatgtgcaacttttctgttagctgcagatacatttatctaactgctaacttatattctactcgtaatctcttcccctctgttctccagagtagtatgtccaattatttataaagtattcagcacatattgtaacacttgtacttcaaaaccttcaaaaacatcccactgcaccccaaacagagcccaattttgaagatagcctatgttaacctggtctggccttactttcctgtctgaatacatgccttaccagctcttcctctgcttcaccaagtctatccacacmatttttccattagttctttgaagataatcagttttttgccacatcagaatttttttatataccttcccttctgctgtaaattgtcttccccctcctcttcatatagcttcacagtcaattattaaattaagctgtccctcacctctttaaagctgatctttctctttacaagctgttcactatctttatatcacacatcataacttgtcattaaatt

SEQ ID NO: 411194 - DNA, 547 bp, Homo sapiens
ccacaccatttttccattagttctttgaagataatcagttttttgccacatcagaatttttttatataccttcccttctgckgtaaattgtcttccccctcctcttcatatagcttcacagtcaattattaaattaagctgtccctcacctctttaaagctgatctttctctttacaagctgttcactatctttatatcacacatcataacttgtcattaaattacttactgatagagtctggatgtcccttccaactctcatattgagatataatctctctcaggaggtggggtgtggtgggaagtgtttgggtcatgggggtagatccttcatggtttgatgctttccttgtgatagtgggtaagttcttgacaaatatgattgtttaaaagtatgtgatacctcccgggacccctctcttgccaggggacatgcctatttctgcttccctgaggcctccccagaaactgagcagatgttagtgccatgcttcctatacagcctgcagaactataagacaattaaatctcttttctttataaatt

SEQ ID NO: 411195 - DNA, 564 bp, Homo sapiens
gcctatgttaacctggtctggccttactttcctgtctgaatacatgccttaccagctcttcctctgcttcaccaagtctatccacaccatttttccattagttctttgaagataatcagttttttgccacatcagaatttttttatataccttcccttctgctgtaaattgtcttccccctcctcttcatatagcttcacagtcaattattaaattaagctgtccctcacctctttaaagctgatcyttctctttacaagctgttcactatctttatatcacacatcataacttgtcattaaattacttactgatagagtctggatgtcccttccaactctcatattgagatataatctctctcaggaggtggggtgtggtgggaagtgtttgggtcatgggggtagatccttcatggtttgatgctttccttgtgatagtgggtaagttcttgacaaatatgattgtttaaaagtatgtgatacctcccgggacccctctcttgccaggggacatgcctatttctgcttccctgaggcctccccagaaactgagcagatgtta

SEQ ID NO: 411196 - DNA, 615 bp, Homo sapiens
tgtacatattttggggtacatatgataatttaatacatccatatctgtttaaagatcaaatcagtttaattgagatgtctgtcaccttaaatatctgtctttyctttatgctaggaacattggcaataattctcttctagcattttgaaatttataacagtttattgtgaactatatttaccctactgatctatcaaacaccatgtcttatttcttctatcaaattgtttgttggtccccattaatcaacctcttttcatttcccatctgccctacccttcccagccttggtaaccaatccactctatattttcataagctacagtattttagcccctatatatgagtgaaaatatgtaatatttttctttttgtgtttagcttatttcatttaacataatgacctccagtttcacccatgctgctgcaaatgataggatttctatttcattgtttgtataggccacatagaaaaagtttttataagttcattgacaatcatataaatttatttgagagataaaaagattccgtgttagatattcaaaataaatagtagatgtatttgatgtcaaataggggatcattcattatagaatcaaataagatacagaa

SEQ ID NO: 411197 - DNA, 609 bp, Homo sapiens
ctgatctatcaaacaccatgtcttatttcttctatcaaattgtttgttggtccccattaatcaacctcttttcatttcccatctgccctacccttcccagccttggtaaccaatccactctatattttcataagctacagtattttagcccctatatatgagtgaaaatatgtaatatttttctttttgtgtttagcttatttcatttaacataatgacctccagtttcacccatgctgctgcaaatgataggatttctatttcattgtttgtataggccacatagaaaaagtttttataagytcattgacaatcatataaatttatttgagagataaaaagattccgtgttagatattcaaaataaatagtagatgtatttgatgtcaaataggggatcattcattatagaatcaaataagatacagaaaggccaagaaacatggaaatgcataatgggctgtgagaacagtgagtaatgttattttggttttgttaaagtgtagactttgtgcgtttgtatatgagtgtctgccttttgtgttaatgtgtgtgtttgttgaaggggtggttgctggtggctggtgacaggaaagaacgccagaaatg

SEQ ID NO: 411198 - DNA, 609 bp, Homo sapiens
ctgatctatcaaacaccatgtcttatttcttctatcaaattgtttgttggtccccattaatcaacctcttttcatttcccatctgccctacccttcccagccttggtaaccaatccactctatattttcataagctacagtattttagcccctatatatgagtgaaaatatgtaatatttttctttttgtgtttagcttatttcatttaacataatgacctccagtttcacccatgctgctgcaaatgataggatttctatttcattgtttgtataggccacatagaaaaagtttttataagttcattgacamtcatataaatttatttgagagataaaaagattccgtgttagatattcaaaataaatagtagatgtatttgatgtcaaataggggatcattcattatagaatcaaataagatacagaaaggccaagaaacatggaaatgcataatgggctgtgagaacagtgagtaatgttattttggttttgttaaagtgtagactttgtgcgtttgtatatgagtgtctgccttttgtgttaatgtgtgtgtttgttgaaggggtggttgctggtggctggtgacaggaaagaacgccagaaatg

SEQ ID NO: 411199 - DNA, 609 bp, Homo sapiens
ctgatctatcaaacaccatgtcttatttcttctatcaaattgtttgttggtccccattaatcaacctcttttcatttcccatctgccctacccttcccagccttggtaaccaatccactctatattttcataagctacagtattttagcccctatatatgagtgaaaatatgtaatatttttctttttgtgtttagcttatttcatttaacataatgacctccagtttcacccatgctgctgcaaatgataggatttctatttcattgtttgtataggccacatagaaaaagtttttataagttcattgacaatcatataaatttatttgagagataaaaagattccgtgttagatattcaaaataaatagtagatgtatttgatgtcaaataggggatcattcattatagaatcaaataagatacaraaaggccaagaaacatggaaatgcataatgggctgtgagaacagtgagtaatgttattttggttttgttaaagtgtagactttgtgcgtttgtatatgagtgtctgccttttgtgttaatgtgtgtgtttgttgaaggggtggttgctggtggctggtgacaggaaagaacgccagaaatg

SEQ ID NO: 411200 - DNA, 536 bp, Homo sapiens
gtgtttttatataacctatgtacattctactgtgtacttttaaatcttctctagattatgcatattatctaatctaatataaattatgtgtaaatagttgttatatttctaatagatattcatttttattattgctttgtatctttccaatccaagatgggttgaatttgcagatgtgaaaattgcatataaggaaggctgatggtataactattaaaaacaaacaaaaacacaaaattgactaatattcatagattttcagatatagaggaactaccmgatagacagttaagaaaaagtcattacctagaaaaacattatatcacttactctaacaagatgcatccactaacttaccttgggttctccaaagacaaagactagcaggttctagtaaaaaggttaggagaccagtagtttaaataaaaggaaaggaaaccactttatgaacatagttattgagttggccaccactgcaggtgcctagtgcccaatctcacaggtaggtcagagaagcattatgcatctcaaaacta

SEQ ID NO: 411201 - DNA, 563 bp, Homo sapiens
accagatagacagttaagaaaaagtcattacctagaaaaacattatatcacttactctaacaagatgcatccactaacttaccttgggttctccaaagacaaagactagcaggttctagtaaaaaggttaggagaccagtagtttaaataaaaggaaaggaaaccactttatgaacatagttattgagttggccaccactgcaggtgcctagtgcccartctcacaggtaggtcagagaagcattatgcatctcaaaactattttcccaggagacaataagtgaaagaatgtatcccttgacttctttctcccattggtcaaggttggttcctcaggtgttaactctgctgcacttgtatgctgcttgtgctagaatgtgaaagaattcctgcagatgtaacacacaccacagtgttagagaagccatggtatgggaattgagaagcactaggtacaggtcttagtagtggcaaagtcaaatctcaactgtaagtgactggtcaaagcctgattgaaacttattaccagaacagtggccaacaagagtcatcccataatccca

SEQ ID NO: 411202 - DNA, 563 bp, Homo sapiens
accagatagacagttaagaaaaagtcattacctagaaaaacattatatcacttactctaacaagatgcatccactaacttaccttgggttctccaaagacaaagactagcaggttctagtaaaaaggttaggagaccagtagtttaaataaaaggaaaggaaaccactttatgaacatagttattgagttggccaccactgcaggtgcctagtgcccaatctcacaggtaggtcagagaagcattatgcatctcaaaactattttcccaggagacaataagtgaaagaatgtatcccttgacttctttctcccattggtcaaggttggttcctcaggygttaactctgctgcacttgtatgctgcttgtgctagaatgtgaaagaattcctgcagatgtaacacacaccacagtgttagagaagccatggtatgggaattgagaagcactaggtacaggtcttagtagtggcaaagtcaaatctcaactgtaagtgactggtcaaagcctgattgaaacttattaccagaacagtggccaacaagagtcatcccataatccca

SEQ ID NO: 411203 - DNA, 427 bp, Homo sapiens
cccacatatcgctattgtaaaaaggtaattgaaaaaaaggtctctttatttttatactagctggatgtctgatagaaattatataaataagacaaattcctgacgaatttttcacttttccrccaaatgccgacacagcctcacatatgcacatgttttgtcttataagcatacggtcacaacaattcgaatacaaatctcagcttactagcaaggtgaaacacatgctttctttttccagttcaggagtaacattggcctaaatgagggttttgggctggaaaatcctggtgttccttaagcatgttttccgtgttgactttatctcaacagatgatctttctgcctggacatcgataattcagtttctctccttttcccactaatgggttttcattttaatctttttccagaaatcatcaatgta

SEQ ID NO: 411204 - DNA, 569 bp, Homo sapiens
ttgggtgccattttaaacggtgaaatcaccaaaaaagcacacgtggcactaaataaaccatgataaggatacttgtttacattatgagagctaaaacaagaaagcagattattgtttagttcaacttcaagtgtatcagacaagtcaaaaattccaccactctgttcatgtctgtgaagaattgtgaaagtgacctgagtatcaattttggggttaaaaataaattttatggacatgtatctgcagatacagactcttcaaaaaatgaagattaagtgtatttgaactacatatgtacacgttttctgttgcatagacttttatgtgtaactctgtacagagtttattgtctttttattctataaaaatggatgtcactagcyacattaattaggaagattgctcgttgaacatatatacatatatataactttaatagattttatatttcttgtaagcaataaatgatatagcttttaaaaatttaagatttgctattcaaacaatatattaaacttaatttttaattttataacaaaatttgagaattttttcatatattatttgac

SEQ ID NO: 411205 - DNA, 575 bp, Homo sapiens
tttagcactttggtttatgggattttttgtttgtttagggggtaatgggtaaaggattgtttgtttaataagccatttttaaaagaagtgattcctttatttaaaatacatcacttcaaatttgagaatacactagcgcctaaataaaatccacagcattcaaaatattttcacttttatgtgatgctatataagaggaagattttggttttagacttgtgggcatataggtataagttacaacatatgtgtattttttaatgtttatgtgcacttatccatatttctctgtagaaattgacagttgtaatttattttgtattacaaagtcatttattaccataggaaagcaactgcggggtgtggtgttgctataataggtcacccctttttaaagttatgtttacctattgtgggggaaaggggactggtaaggtatcagtcttcctggtagcattgattttcatttgtttgcccccacactatttttaaaaattcaaataaaagtgcagtttcagacttttwaaaaaaatactgttgacctgtcttagttgtacattcagaaaatgtagcct

SEQ ID NO: 411206 - DNA, 550 bp, Homo sapiens
agacagagtgcaagtcctctccttgcctgccaaagcacgtcctcactgtggttgcttctttaagaatctttgtgaatgaagcattaaatgaaatgattaaaagagaaagaatacaccatgttcattattctgacgctgcacagtaaaaagttactttcattttctttaatsacatttttgtagaatggtatcagaagtttaaaacagtctaatctcaaacttcttaaatagttgaaagaaaaatctctaggataacaactgaagtagtataatcttttcttataactgttcaggaataaaaggtttatgtttgcttgtgtgtgtgtgtgtgtgtgtgtgtgtgtgtgtgtgtgtgttcataatcagtgattcatactgaatcaataccttttgtggttttattgaaataatatgtttgaagtaatcaagaaaatttttaacctcgattcaaatttcaatacttaaagcttagtaaattatttataacttctgtgcattcaaagggaacaaccaaaagatgaaaagataacctatggaatgggagaattca

SEQ ID NO: 411207 - DNA, 432 bp, Homo sapiens
ggaagtgaaatctgagctgttaaggcactgaagtggactggagaggtagttcgaggcctgtgaagcaggagctagagatggcaagctgggatgacacagaaaaaactggagaaagaattcacatagtcaagatagtcttaggagtggtcttaacagccattctgaatttcccctgayttcttgcagagtcatcatatttccgaagctgtcattggataacattacatccagctttaaattctgtgaatgtcagtcttgaccaacatttggagaacatgttttccaaggcacccttcagtacaactttagactgcaataaaataggtcatactggctgactcagaagaatgcaaatctccagtaactcatcagctaataaatgcggaacacaaatattaaacaaacaccaagacacatatttactctatccca

SEQ ID NO: 411208 - DNA, 564 bp, Homo sapiens
catgccttgtttttctccttccataacattttatggaacacctactatatgcatgccactgtgctgatgctgggaatgtagtcatcataattaagatggtcaaagttgagcttccattgtaatgaggagaatcttttttattggtttttcaatctcttcccctcgagtggtctatgtgatctaagacatttccaacttttccgctgtataaaaaaaataaaatcctagactctcttaatgttatacctccttcttgatactacctgattcttcccttcccttttcaaccaagcgccttgagaaaacattataatgtttctgaaacttgagttcacccaaactattyttaaagaaccttgttctgtatcttgtaacctatacaaaaataactaaaaatggaatatagacctaactgtaaaacttgaaactataaaagttcttaagataacacggaagaaaatctttgtgactttgggttaggcaaagatttgttagctgtataaccaaaatttgagccataaaagaagaaaaaaaattaaacttcataaaaattaagtatggtag

SEQ ID NO: 411209 - DNA, 558 bp, Homo sapiens
cccaatatgcctactacaagaatgttattgtggacaaatgcaataaaactttcagccattccaactctttgatgcacaagaatcatcagaagtttactgcttagtatgatttttcttttagactatgtcacagcattcctgtatttactcaaataagccacaacaactgcactgttctaatgctttgatggaactgtgagttaccaattaggctttaacataccaatcaatactttactgttttgtcatgaaaattgcttcttgtttcccttttccttcatttccttttgacacaggcagtctaccagttccattcattgccagtttttaaaagttaatayatattcccccaactcatcagtcaataaattaagcataataataattgttattgtagagaattactatctctgtgaatcatacaacatcagaaaacacaaaaacaccagggcaaataaatggagagtcctcttgattcatcatttttacctcatatctgaactatcactaagccctattaattctatgtctctcagagcaaaaaattccatttgtcat

SEQ ID NO: 411210 - DNA, 412 bp, Homo sapiens
atcccattcatggtagccagaaataaaataaattactgagaaatacagcaaagcagaaaggtaaaaaaaaaaaaaaaaaacacacaatgagaattttaaaacactgctcaaagaaattagcaatgacaaaaataaatggaaaaaaactctctgctcatgagttggaacgctcaatattgttaaaatggtcatactgcccaaagcaatttacagattcaatgctattcctgtcaagctaccaatgatatatttcagagaactagaaaaaagttatgttaaaatttatataaaacmacaaaagagcctgaataattaaggcaatcctaagtaaaaagaacaaagaaggagaaattatgctacctgatatacaactatacgacagagctattgtaaccaaaaaaacatggtgcaa

SEQ ID NO: 411211 - DNA, 448 bp, Homo sapiens
ttatttccacatgtacgtattggatttgtatggaaaatgttgcaagaaatggaaatataaaatataacatttatttataagataaaattatgcttcyttaggacttctatgtttgcagaaaaagtgcagtctcctgaaaatctttctgggatttttctttttctttgggatttttcacaaatcacttctgcccccaccacacatacaattggattctacttcttcaattatgtgattcaacttggtttggcctaacaaagcacgactttatttaaggccctagagtaacaaaagatgaaaatagagtaccataaagccagaaagtctgtgttaagaaatagcttgctctactgaaaggaagtatgacatcatggtgaaaaatcacaatctaggacctatctgtctggattttattctcaattttaacatttataagctttgtgacttg

SEQ ID NO: 411212 - DNA, 532 bp, Homo sapiens
agtcaacaaaaatatacactggtgacaggaaatcgccaataaatggtcctgggaaaattggattgccatatgcaaaagaatgaacctaggctcatacaactcaccatatgcaaaaattaactcaagatggactaaagacctaaatgtagkacctgaaactatgaaaatcctagaaaacagtctaggaaaattcttctggacattggtctaggcaatgaatttatgaccaagttcttaaaagcaaacacaagaaaaatagaaaagtgggacttaattaaactgaaaaccttctgcacagtaaaataaacaatcaacagaataaacagacaatctacagaatgggaagacacttttgcaaactatgcatctataaaagggctcatatctagaatctacaaggagctcaaacagctcaagaagaaaacaaataacgtcattaaaaagtgggcaaaggacatgaacatacatttttcaaaggaaaacaaacaaatgttaacaactaattcagggaggaggggagctgatttccaca

SEQ ID NO: 411213 - DNA, 532 bp, Homo sapiens
agtcaacaaaaatatacactggtgacaggaaatcgccaataaatggtcctgggaaaattggattgccatatgcaaaagaatgaacctaggctcatacaactcaccatatgcaaaaattaactcaagatggactaaagacctaaatgtaggacctgaaactatgaaaatcctagaaaacagtctaggaaaattcttctggacattggtctaggcaatgaatttatgaccaagttcttaaaagcaaacacaagaaaaatagaaaagtgggacttaattaaactgaaaaccttctgcacagtaaaataaacaatcaacagaataaacagacaatctacagaatgggaagacayttttgcaaactatgcatctataaaagggctcatatctagaatctacaaggagctcaaacagctcaagaagaaaacaaataacgtcattaaaaagtgggcaaaggacatgaacatacatttttcaaaggaaaacaaacaaatgttaacaactaattcagggaggaggggagctgatttccaca

SEQ ID NO: 411214 - DNA, 600 bp, Homo sapiens
aattcctagcctagcctattaaagggtaccaacagaaaaggaggattggagatagaatgatagcagtgaagatacacaactatccagaaaaactgttaccaaccttaaatactttactcagaggtatcgagacatttatttatcttactctttgtaagtgtcattaaggactaatccttcagtccaaactttcactcagtccagaaatatttgttaaaatagccctgaaagatgatgtgtcatcttctgctgaagacttctatttttcttccacagacatagctgttatgtattgtcttttagttttgagacaaaactgcctcttacagttttaaaatatttatttaaagctctttaatcccaggacaatcattcacttactattatttttaattttctcatattataaaatacactcaagaaagtgcagacatcattaatgaacaaaatacaaccagcccacaaataaagaaacagcatatgatcacaagagcctctttgtgtgtcaccttccaataactatcctctcctaatgaagttcctgaayttcctaacaagtagaataatatatagtatgtattcttttgtgtctggcttttt

SEQ ID NO: 411215 - DNA, 548 bp, Homo sapiens
tgtagaacattttcaacactcccaaaagaaaccctatatgcattagaaattaattcttattttccccccgtaaccctcagtcctatacaactacaaatctactttttgtctttctctatttgcctattatgggcattttatataaatgaattaatgccatgtatggtttttgtgactagttttatttacttagcttcaggatctcaaggttcatctatgttgtagcatatatcagtacttcatttccttttattgccaaattatatcccattgtatgcattcaccacatttatttacatattcattaattcatgaayatttgcataatttccactttttggctattatgactaattctgctataaaaattaataaatatctttttttcatggacacatgtttttatgttctttggatatatacttaggattgatatttctgggtcatatggtaatgctgtttaatatttttagaaactggctagctgtattccaaggtaaatgtactattttaaaatcccacaagcagtatatgagaattacaacttc

SEQ ID NO: 411216 - DNA, 514 bp, Homo sapiens
tatctgacaactcgaattctctctttctgtgactctgtcattgctttacaaagagaatactgaagggttggttggggcctctactctagttgacagggtaatggttaatattatccataactacaactccatgtaagctgtataatctataaccagaaatttttaaatcacgggaccctgagtaatcatcctccattacagactacaattgaagaattattgttatatgagaatccagaagtttaataattttacagattgtttttatacattgtacaaacattgagagagctactttgaagtagaaagtagtgaaaataagatagcttttatctttgaaataaaactacagtcttaaaagtttcaaaaataaaaacaagtaactgattgttaaacctaaagatttttctctagccacagagcaattacttcyctagtgttctctgaacaaccccttgaaattttggatattcaataccactctattattatagtatctctccatcttgtgttg

SEQ ID NO: 411217 - DNA, 556 bp, Homo sapiens
aacaatctttaaataaaattgaatgtcttacacttcttgatttcaaaactgcctattatgctagactaaacaaaatattgtggtaatggcacaaaggcataaacatagaccaatggaatagaatacgggccacagaaagaaatcctaacatgtatgatcaaatgatttttgaagtttgccaagaccattcaataaaaaacacaatcttttcaacaaatggtggtgagaaaccttatatgcacatgcaatagaaggaaattggacccttamcttacattatatatgaaaattaattcaaaatggaccacaaatctaaacataagagctaaaactataaaattcttagacaaaaacatagggatatctttatgtcattaggtttggcaaaaattgttttggatatgacctcaaaaacacaggtaagagaaaaaaagttaataaataagactttgtcaaaattaaaaacttttgtgtatcaaagtacagtgtcagcagtgaaaagacaacccatacagttgaagaaaagtatttgcaatcatatatgtgatatgcaatt

SEQ ID NO: 411218 - DNA, 592 bp, Homo sapiens
gccaaggtacagctcagaccatggcttcagaaggtgcaatccccaagccttagcagcttccacatggtatcaagcctgtgagtgcacataagtcaagaaccggggttttgtaacctccgcctagatttcaaaagatgtattgaagcacctggatgcccaggaagaagtttgctgtaggggtgggtccttcacggacaacctccactagggcagtgtggaagggaaatgtggggtcagagcccccacasagagcacctactagggcactgcctactggagctgtgagaagagggccaccgtcctccagaccccagaatgataagtccactgacagcttgaaccatgctcctagaaaagccacagacattcaatgacagcccatgaaggcagctgggagggagactgtaccctgcaaagccacagtggggagcttcacaagaccatgggaacccaccccttgcatcagcgtgacctggatgtgagacatggggtcaaaggagatcattttggagctttacgatttgactgctccactggattttggacttgcatagggatggtagcccctttgttttggccaatttctcccatt

SEQ ID NO: 411219 - DNA, 601 bp, Homo sapiens
aggggaagtaattttgagccaggtcataaggattaatacaaggtttaacaggctgaagaataagaaagaaatttaagcagaagaatgcaaaggtgaggaggtacaaactgattggaacttttaaggaaatgagaaggcattttgttggacagggcttggacaactgtttctcaaatggagaactgcttatcaactgtcayagaatcaccttagttcataagacctccaattcctggaagctcctgccagacttcaaaagataagtcccaagcagctgcaagtttattttcatttttaattttaatttttgtgggtacacagtagtgtatatattaatggggtacctgagacatttcaaaacaggcatgcaaggagtaataataacatgatgtaaaatgaagtattcatcccctcaaacacctatgccccatattataattgaattatactcttagttttaataaaatgtacaattaaattattattgaatacaatcactagattgtgctatcaaatactaggttttattcatttttttctaactcgtcttttgtacccatgaaccatcctcatattccccccatccaccattaccctgcca

SEQ ID NO: 411220 - DNA, 601 bp, Homo sapiens
aggggaagtaattttgagccaggtcataaggattaatacaaggtttaacaggctgaagaataagaaagaaatttaagcagaagaatgcaaaggtgaggaggtacaaactgattggaacttttaaggaaatgagaaggcattttgttggacagggcttggacaactgtttctcaaatggagaactgcttatcaactgtcatagaatcaccttagttcataagacctccaattcctggaagctcctgccagacttcaaaagataagtcccaagcagctgcaagtttattttcatttttaattttaatttttgtgggtayacagtagtgtatatattaatggggtacctgagacatttcaaaacaggcatgcaaggagtaataataacatgatgtaaaatgaagtattcatcccctcaaacacctatgccccatattataattgaattatactcttagttttaataaaatgtacaattaaattattattgaatacaatcactagattgtgctatcaaatactaggttttattcatttttttctaactcgtcttttgtacccatgaaccatcctcatattccccccatccaccattaccctgcca

SEQ ID NO: 411221 - DNA, 576 bp, Homo sapiens
aataatgctgagcatctttccatatgcctatttgccatttgtatgctttcttttgagaaatatctattgaaatcttttgtctatctttggatcraattattaggtttttttccctgtagagttgtttgatctccttatatattctggttattaatcccttgtcagatacgtagtttgaaaatattctctcccattctgtgggttgtcgcttcactgttgaatttttttctttgctatgcagaagcttttaaatttgatgtaatattagtctatttttgctttggttgcctgtgcttgtggggtattgctcaagaaatttgtgcctagaacaatgtcctggagattttcctcaatgttttcttgtagtagtttcatggtatgagatcttagatttaagtgtttaatccattttgatttgattttgcatgtggctggagatatgagtatagattcattcttctacatatggatatccagttttcacagcaccatttattgaagagactgtctttcccccagtgtatgttcttgtcatctttgtcaaaaatgagtttactatagttgcgtggatttgtt

SEQ ID NO: 411222 - DNA, 576 bp, Homo sapiens
aataatgctgagcatctttccatatgcctatttgccatttgtatgctttcttttgagaaatatctattgaaatcttttgtctatctttggatcgaattattaggtttttttccctgtagagttgtttgatctccttatatattctggttattaatcccttgycagatacgtagtttgaaaatattctctcccattctgtgggttgtcgcttcactgttgaatttttttctttgctatgcagaagcttttaaatttgatgtaatattagtctatttttgctttggttgcctgtgcttgtggggtattgctcaagaaatttgtgcctagaacaatgtcctggagattttcctcaatgttttcttgtagtagtttcatggtatgagatcttagatttaagtgtttaatccattttgatttgattttgcatgtggctggagatatgagtatagattcattcttctacatatggatatccagttttcacagcaccatttattgaagagactgtctttcccccagtgtatgttcttgtcatctttgtcaaaaatgagtttactatagttgcgtggatttgtt

SEQ ID NO: 411223 - DNA, 488 bp, Homo sapiens
ccatccagccctacttaaagagaagggagataaaactgagaagcacttgtaaaattcacagcccagggacataggttcactgaaagactgagacctaatcataggactatagaaaacttcccytcctccaacaccttaccacctcattaataaggtctattgccacaattccttttactcactacatcatgtccaactcaacaacaacaacaacaaaaacaaaatacagggccatactgtctgggaatggtggctcatgcctgtaatcccagcactttgggaggccaaggtgggaggatcacttgagctcaggagtttgcgaccagcacaggcaacacaaggtgaccccatttctacaaaaaaattacaagcacactgaaaggaaaaatatacaggttgaagagacagagcacatatcacaaccagactcagatatgacaatgatgttggaatgatcagatcaggaatttaaacaactatcattaata

SEQ ID NO: 411224 - DNA, 488 bp, Homo sapiens
ccatccagccctacttaaagagaagggagataaaactgagaagcacttgtaaaattcacagcccagggacataggttcactgaaagactgagacctaatcataggactatagaaaacttcccctcctccaacaccttaccacctcattaataaggtctattgccacaattccttttactcactacatcatgtccaactcaacaacaacaacaacaaaaacaaaatacagggccatactgtctgggaatggtggctcatgcctgtaatcccagcactttgggaggccaaggtgggaggatcacttgagctcaggagtttgcgaccagcacaggcaacacaaggtgaccccatttctacaaaaaaattacaagcacactgaaaggaaaaatatacaggttgaagagacagagcacatatcacaaccagactcagatatgacaatgatrttggaatgatcagatcaggaatttaaacaactatcattaata

SEQ ID NO: 411225 - DNA, 544 bp, Homo sapiens
accatatgaccaatccttttgatgggctcattagtagactggacatcactgaggaaagaatctccgagtttgaggatatgatgatagaaactcccaaaactttaaagcaagacaaaacagactggaaaaaaaaaaaaaaacagaacagawttctacaagaagaagaaagagaaatgaacagaaaaagtatttgaagcaataaggactgggaatttaccccaaattaatgtcagacaccaaaccacagatccaggaaactcagaaaataagaagcaggataaatactaaaaatactaccacacctatgcatatcatgttcaagcttcaaaaagtcaaatacaacattcttgaaagaagcaagagaaaaaaaaacacgttaattatagaagaacaaagctaagaattacattctcctcagaaaccatgctagcaacacaagaatagaataaaatatttgaagtggtgagaggaaaaaatacctcaccacccaaaattttgagcccttcaaaattatctttcaaaaataaaggagaaataaagactt

SEQ ID NO: 411226 - DNA, 544 bp, Homo sapiens
accatatgaccaatccttttgatgggctcattagtagactggacatcactgaggaaagaatctccgagtttgaggatatgatgatagaaactcccaaaactttaaagcaagacaaaacagactggaaaaaaaaaaaaaaacagaacagatttctacaagaagaagaaagagaaatgaacagaaaaagtatttgaagcaataaggactgggaatttaccccaaattaatgtcagacaccaaaccacagatccaggaamctcagaaaataagaagcaggataaatactaaaaatactaccacacctatgcatatcatgttcaagcttcaaaaagtcaaatacaacattcttgaaagaagcaagagaaaaaaaaacacgttaattatagaagaacaaagctaagaattacattctcctcagaaaccatgctagcaacacaagaatagaataaaatatttgaagtggtgagaggaaaaaatacctcaccacccaaaattttgagcccttcaaaattatctttcaaaaataaaggagaaataaagactt

SEQ ID NO: 411227 - DNA, 544 bp, Homo sapiens
accatatgaccaatccttttgatgggctcattagtagactggacatcactgaggaaagaatctccgagtttgaggatatgatgatagaaactcccaaaactttaaagcaagacaaaacagactggaaaaaaaaaaaaaaacagaacagatttctacaagaagaagaaagagaaatgaacagaaaaagtatttgaagcaataaggactgggaatttaccccaaattaatgtcagacaccaaaccacagatccaggaaactcagaaaataagaagcaggataaatactaaaaatactaccacacctatgcatatcatgttcaagcttcaraaagtcaaatacaacattcttgaaagaagcaagagaaaaaaaaacacgttaattatagaagaacaaagctaagaattacattctcctcagaaaccatgctagcaacacaagaatagaataaaatatttgaagtggtgagaggaaaaaatacctcaccacccaaaattttgagcccttcaaaattatctttcaaaaataaaggagaaataaagactt

SEQ ID NO: 411228 - DNA, 522 bp, Homo sapiens
taccacacctatgcatatcatgttcaagcttcaaaaagtcaaatacaacattcttgaaagaagcaagagaaaaaaaaacacsttaattatagaagaacaaagctaagaattacattctcctcagaaaccatgctagcaacacaagaatagaataaaatatttgaagtggtgagaggaaaaaatacctcaccacccaaaattttgagcccttcaaaattatctttcaaaaataaaggagaaataaagactttctcaagcaaaaattgaggaaatttgttgccagtagacctgctttttgagaaatgttaaaagaagttctttagaagaaaaatgatggaggtcagaaactcagacctacataaagaaaaaaaagagcatttgagaagaaataaatgaaggtaaaataaaaagtttaatttttatccttcttaattgagttaacaaatcacaatttcaaaataatagaaactaattgcatatacttaactgaaataaattacagcattgatacaagggataaga

SEQ ID NO: 411229 - DNA, 633 bp, Homo sapiens
caaagagtcttataatgttatttgaaagtggacttggaataggtggaaatgtatgtatatataaaactttggggcatcactaaaaccagacaaaagaaaaaaaaagcgwgtaattgacatgctaagaaaggtgaaaaaatggaattacataaattgttcagttaaaaccacaaaggcagaaaaagagtagaagacacaaatagaaacaaagaacaagggcaactaataaagaagagtaacaaatatgctagctattaatttaactatatcaataattcacataacatacaattaacccactttaaatgcacaatttaatggtttgggtatagaattaatttttaaaaattgtaaaatatatacaacaaaatttgccattaaaaatatgtggtacagaaaatacatgtattatgctacaattagtataaaatgtaagtatttatacacaaatgtccttgaaagcacagaatatctctgacagaaacttacaacaatagttgcctctaaggagtgccacttggggatagagaaagaaaaataaaagggaaaataatttttattttatattcttctgtatcattttcatggtttgctatgttaatatattatctactcaaaaaaccaaaaccatta

SEQ ID NO: 411230 - DNA, 633 bp, Homo sapiens
caaagagtcttataatgttatttgaaagtggacttggaataggtggaaatgtatgtatatataaaactttggggcatcactaaaaccagacaaaagaaaaaaaaagcgtgtaattgacatgctaagaaaggtgaaaaaatggaattacataaattgttcagttaaaaccacaaaggcagaaaaagagtagaagacacaaatagaaacaaagaacaagggcaactaataaagaagagtaacaaatatgctagctattaatttaactatatcaataattcacataacatacaattaacccactttaaatgcacaatttaatggtttgggtatagaattaattttwaaaaattgtaaaatatatacaacaaaatttgccattaaaaatatgtggtacagaaaatacatgtattatgctacaattagtataaaatgtaagtatttatacacaaatgtccttgaaagcacagaatatctctgacagaaacttacaacaatagttgcctctaaggagtgccacttggggatagagaaagaaaaataaaagggaaaataatttttattttatattcttctgtatcattttcatggtttgctatgttaatatattatctactcaaaaaaccaaaaccatta

SEQ ID NO: 411231 - DNA, 561 bp, Homo sapiens
gattcagacgtggaagatatttggaagtgtatattttcttctaggcaaatccagaatatgtcactgtgagagaattccagcctcctaccccctgaattgtaggttagtaactgactgcaacacatcgttggtggctccaaaacaagaatgattgcatcttgcatttgccactggccaaaaatctgtagagtccttggcagaaagttatttcaaatctaagtcaaatgctcaagtctgcagcattttttaaaacaaagccagtagcagtcagagttttgcaatctccaacacatatgcaagtgtgcaggtgtatgtgtatgcacaggcacacacacacacacacacacacatcttctttgctgtaaccccatcctcctcttaagcagaaagggaacactttcagattttaagagctagagttgaaattttcttgatataattttaacctaaactgcccrtattatacccaaaaggaaaactcctgtagcataattcaacagtaggtaagaccttacacaagttatttcatttccctgggtgtattagtccattttcacactg

SEQ ID NO: 411232 - DNA, 604 bp, Homo sapiens
catgcaagtctgaaatccagtggggcagttaaatcgtaaagctccaaaatgatatcttttgaccccatgtctcacatccaggtcacgctgatgcaagaggtgggtttccatggttttgggcagctccacccctgtggcgttgcagggtacagcctccctcccagctgcctgtggcttttccaggtgcgtgrcacaagctgccagtggatctaccattgtggggtctggaggacagagcctctcttctcacagctccactaggcagtgccccaatagggactctgtgtgggggctctgactccacattttccttccacactgtcctagcagaggttctccaggaagggcccgccccttcagcaaacttttgcctgggcatccagtcatttccatacatcttctgaaatctagacagaggttcccaaacctcaattcttgacttctgcacacctgcaggctcaacaccatgtggaagctgccaaggcttggggcttccaccctctgaagcaacagcctgagctgtaccttggccctctggagcggctggacacagggcaccaagtctctagactgtacacagcatggggtccctgggctcagccca

SEQ ID NO: 411233 - DNA, 575 bp, Homo sapiens
atgtatctgtacattcctaataaaagcaaagtgagctttaccataaggtaatcccaaaatgtctatccctgcttcatctgggttaggattttcctggagaccattggcctgcttcatagtcratcaacaccagcttacctaggaccacttacacccagaaagtaatataaagtaggacagagaacaaatagtttgatgggatcaaaatttacaaatcctgattattatcgggggaggggggtgaatataatggctttaaaggaagaaagatgaagttaagattttagttctacaatttattagctgtatcatcctggataaggtatctaagcttgtatatttcagtttcctcaattcaatgaggataatggtactgaattcttaaggccaatgttcctgcaacactgaaggtattcaagaagtagctattaaaattaacatgtccttctggacactatatattctgtcctaccttagctagtcttttgattccactcagtctcactccccccaccatcatttcttcccctatctctttctctgtatttgagcttttgcagtctacccagccaggg

SEQ ID NO: 411234 - DNA, 562 bp, Homo sapiens
ggcttttggaaagtcatataaatagagtcaaacaaaaagcgttaggatactcaattcacaagtcaaaatgtgaaacaggtagtacgatttcactgttaatcccttctgaataagttaaaaatctgtgtctccaaatttccgccccccgcccacccccaccacacacacacacatacacataaatgctaaacaaatgggaagaagaatacttggcactagagtctgggattcattaaaaaggattatctctttctgaggtatcaatttctcaatggtctctaawccatgcaggttatgtaaaaatgcaaaatgacttgatggaggagattaaaattccatgatgtagatggagatgtccttcctcagtgactagattctcaggcaactatacatatatgtgtatgggtatgtatgtatacacatatccagtctttgtgaatagtggccttgggaagaccctctaatttttagggcttttttcttagaccacagaccctatagaaagccgcactgctctgatgctgagatagtgttcctacttgttcaagagtgagttcaaaag

SEQ ID NO: 411235 - DNA, 439 bp, Homo sapiens
tacatgttgaactgggagttacaccatgggctcccctggttctccggcctttggaattgaactgaattatgccatcactttcctgtttctccaacttgcagatggtatatcatggggcttctcagcctccataaytgcacaagccaattcacacaataaatttcctcctatatatatatctctctatatcctattggttctgtttctctggagaatcctgactgatacatactctcttagtgaatttcaagtgtacaatacaggattactaactacagttaccatgctgtacattagatctccaaacttactcattcagcataactgaaacattgtacccatttctcccagcccatggcaatcactaatctaccctctgcttctaggagtttaactcttttagtatccacatatgagaccatgcaatatttgtttttct

SEQ ID NO: 411236 - DNA, 613 bp, Homo sapiens
actgtctctgtaggatgatatcctttatagcacatttttattaccaaacccaggccttgacaaaatcccataagtcagattctaataggcaagtagtaaaatgagtaaacacctgagaggtgggcttcacccctctccccaacccccagagatatgaagaggggacaaagcattttgtcatgaacaaaaggcagaggttttagaatctgtagtttcaaggcagctgcatacataatattacatcactttgtgtgtgtgtgtgtgtgtgtgtgtgtgtgtgtgtgtgtgtgtgtctgggtttcattccgttgcttaggctggagtacagtggttccatcctagctcactgcagcctcaaactcctgggctcaaatgatcttcccaccttggcctactgagtagsagggaccacaggcatgtgtgcaccacacccggctaaatttttattcttttgtagagatgggatctcattatgttgcccaggctggtgtcaaactcctagccccaagcgatcctccccacttggcttatatcacttttaaaagtaaaatttgcttctgattctgtaacacacatctttgaaagaagtcccacatctgctaagtgtgagctt

SEQ ID NO: 411237 - DNA, 557 bp, Homo sapiens
ggcattgatatttgatcttgttctttttgaaaatactgttccttatcatccattacctatagtttttgatatactcttcgcacctgaagaatgaagaatttttagaatctacaatctagcatttcccacaattagacacctggctggaactggaaagaacacccttcctttctgaattccattgagccccaaggcatatacacggagttcagtgagtgtgagagtttargtttcttgtttctctattatttgagccatatttgccacagaatgccaagggttaggatgtgacagtctgtcacacagcatacttcccataatacagcataaacgttgacacttctgtctctacaaaataattccatcttcctaattttcacacttccttcagaaaaatcctataatcctgccctcgggtccaagtcttagttaacggctaccgtaactttgataataaggtgttactcatgaggatagtatagcaaatacctctaaaaaactaccaagaatttaatgtagggcccaaacttctggggatttcagaaagaaatttgaaa

SEQ ID NO: 411238 - DNA, 595 bp, Homo sapiens
ggcatgttctcttttttggcmtttgcctcaatgagctcccgaatgtccatttgcagatggttaaaaaccatgtttctgaactgctaaattaaaagaaaggttaaactatgtgagatgaatgcacacatcacaaagcagttcctcagaaagcttctttctagtttttatctgaagataatttctttttcaccataggcctcaatgtgctcccaaatatccattcacagattctacaaaaacagtgtttccaaacagctgaatgaaagaaaagtttaactctgtgagatgaatgcacacatcacaaagtggtttcccagatagcttctttctagtttgtatcctgggatattccctttttcaccattgtcctcaatgagctccaaaatattcattcgctgaatcgacaataacagcttttccaaactccgaatcaaaagaaaggttttaacactttgagatgaatgcacacctcacaaagcagtttctcagaaggcttctttctgtttttttttttttctgaatatattttcttgttcaccataggccttaatgaactcccaaatatcccttcgttgattgtacaaaaatagtgttt

SEQ ID NO: 411239 - DNA, 503 bp, Homo sapiens
cttctttctagtttgtatcctgggatattccctttttcaccattgtcctcaatgagctccaaaatattcattcgctgaatcgacaataacagcttttccaaactccgaatcaaaagaaaggttttaacactttgagatgaatgcacacctcacaaagcagtttctcagaaggcttctttctgtttttttttttttctgaatatattttcttgttcaccataggccttaatgaactcccaaatatyccttcgttgattgtacaaaaatagtgtttctaaactgctgaatgaaaagaaagatttaactctgcaagaaaaaacacacctcacaaagtggtttctctaatagcttccttctagtttttatcctgggataatttcattgtcaccattggcctcaatgagctcccaaatatccattcacagaatggacaataacagtgtttacaaactgctgaatctaaaaaaggttgaactctgtgagatgaatgcacatatcacaaa

SEQ ID NO: 411240 - DNA, 399 bp, Homo sapiens
caaatttattaactgcaagccagtcattaacattgtttctatagatagtaaattaacttaaagtatctcttatgggctatgaagggatgggcaaaattaaaggaataggttggggtagttaactgcagctggaacatgacawtaaggcacagatttctcatgctgtttgtggcttaagaaagcctttaagtggttttccaccctggacaggccagttgtttcttgccttcattctggtaaacccccaatctttcagtgtcagcattagtgccatcatgaacatgtcacagtgcttattgtttatggccagttttggggccagtttatggccagatttttggggagcttgctcccaacatgtaccccttctttgattttcaaattgataaaagcaaaggc

SEQ ID NO: 411241 - DNA, 474 bp, Homo sapiens
ttggggtagttaactgcagctggaacatgacattaaggcacagatttctcatgctgtttgtggcttaagaaagcctttaagtggttttccaccctggacaggccagttgtttcttgycttcattctggtaaacccccaatctttcagtgtcagcattagtgccatcatgaacatgtcacagtgcttattgtttatggccagttttggggccagtttatggccagatttttggggagcttgctcccaacatgtaccccttctttgattttcaaattgataaaagcaaaggcagctttgtcatggtgagctgcttctcacaggagtcagggtctgcatctgcagactatacaaagacaaacaataaagattaaaagtacaatcatcattgaaatcacagagttaccaagtgtttttatccattctaatggatgacttgctgctactttgtctgcagatctttaaacactccagttc

SEQ ID NO: 411242 - DNA, 569 bp, Homo sapiens
tgcagatgccagtccccaaaagctggtctgcaattatattaatttgaggtttggcctgggcattgcaagcagcctgaatggaagcttcatctggccaccaagttttaaaytgtagcaactgagcaggagttagacaagctcaagtaagagtgtcccggtcagtaggaatcatctgactggaaacagcaacattctttaacagtcccattagaaaaggagaacctgatccatactgatttatagtttatttaaattctttgagtaatttaaaaggaaaaggctcaaatatagctgtaatattttcctgtttatctggggtgtgtattctaacagggaactgccaagcctctaaatcaccctctcatctaactggctgaattcctgccggaataaaactaagagcagtcactcaagctactgctcaaacagtctctggggcaactatattcacccagtgtcctctgggaaataaagttctgtagggtctttttcttcaaaataatatggagggggtgccaaaggttagggatgaacctctccctcctttgccactttagctttagctggca

SEQ ID NO: 411243 - DNA, 569 bp, Homo sapiens
tgcagatgccagtccccaaaagctggtctgcaattatattaatttgaggtttggcctgggcattgcaagcagcctgaatggaagcttcatctggccaccaagttttaaattgtagcaactgarcaggagttagacaagctcaagtaagagtgtcccggtcagtaggaatcatctgactggaaacagcaacattctttaacagtcccattagaaaaggagaacctgatccatactgatttatagtttatttaaattctttgagtaatttaaaaggaaaaggctcaaatatagctgtaatattttcctgtttatctggggtgtgtattctaacagggaactgccaagcctctaaatcaccctctcatctaactggctgaattcctgccggaataaaactaagagcagtcactcaagctactgctcaaacagtctctggggcaactatattcacccagtgtcctctgggaaataaagttctgtagggtctttttcttcaaaataatatggagggggtgccaaaggttagggatgaacctctccctcctttgccactttagctttagctggca

SEQ ID NO: 411244 - DNA, 537 bp, Homo sapiens
ttcctttttaaccacaggccacaatgcacttccaaatattccttcatggattttacagaaacagtgtttcctgactgttgaatgaaaagaaaggtttaactctgtaaggtgaatgcacacakgacaaactgtttctcagatagcttccttctagtttttatcctgggatattctcttttttgccattggcctcaatgagctcccaaacttcctttcacaggaaagattaaaacagagtttccaaacagctgaataaaaagaatggtttgactctgtgagatgaatgcacacatcacaaggcagtttggcagaaagcttcattctactttttatctgaatataatttctttttcaccataggcctcaaagtgctcccaaatatcccttcacagattctataaaaagagtgtttccaaactgctgaatgaaaaaggaggtttaacactgcaagatgaatgcacacatcacaaagtggtttctcaggtagcttccttctagtttttatctgggaaattcacgttttcaccattggcctca

SEQ ID NO: 411245 - DNA, 529 bp, Homo sapiens
catcacaaagccatttgtcagaaagcttctctctagtgttcctctgaagatattttcaccgtattcctcaaagcgctcccaaatatcccttgccagatttaataaaaacagtgttgccaaactgctgaatgaaaagaaaggtttaatgatgcgaggtgaatgcaaacatcacaaagcagtttctcagatagcttccttccggttttttatyctggtttattcacttttttgccattggcctcaatgagctcccaaatatcctttcacagaaaggacaataacactgtttccaaactgctgaatctaaaaaagatttaactctgggagatgaatgcacacatcacaaagcagtttctcagaaagcttctttccacattttaactgaagatactttctttttcaccataggcctcaatttgctcccaaatatcccttcgcagattctacaaaaacagcattttcaaactgctgaaagaaaagaaaagtttaactctgcgagatgagtgcacacatcacaatgcagtttctt

SEQ ID NO: 411246 - DNA, 551 bp, Homo sapiens
gtttcaaatttgctgaaccaaaagaaaggtggaactctgtgagatgaatgctcacatcacaacacagtttcacagaaactttccttctactttttatcttaagataaattctttttcaccataggcctcgatccactccaaaatatccttttgcagattctataaaaacagtgtttccaacctgctgattcaaaagagaggttaaacactgtgagattaatgtacacatctgaaagtggtttctcagatagcttccttctaggttttatcctgaaatatttgctttctcatcattaggttcaatgaactacaaaatgtccatttgcagaatgtacaaaaccagtgttcccaaactgctaaatctaaaaaagatttaactctggaagatgaatgcacacatcacaaagcagtttctcagaaatttctatcttcattttttctgaagatacattctttttcaccataggcctcattgtgctytaaaatatcccttcacagcttctacaaaaacagtgtttccaaactgctgaatgaatgcgttaactctgcga

SEQ ID NO: 411247 - DNA, 553 bp, Homo sapiens
gttttgtaatgtgtgcattcatctcacagagttaagaccttcttttgmttcagcagtttggaaatactgtttttgtgcattctgtgaatggacatttgggagctcattgaggccaacggcaaaagaatgaatatcccaggataaaaactagagggaatctaccagaaaagctgctttggaatgtggacattcatctcactgagttaaacctttcttttcattctgtattttggaaacactgtttttgtggaatctttgaagggatatttgggatcacattgaggcctatgatgaaatagaaagtatcttcagacaaaaagtagaaagaagattcctggaaaaacttctttgtgatgagtgcattcttcttacagagtttagtatttcttttgattcagcagtttggaaagactgtttttctcctttctgtgaatggacaattgggagctgattgagatcagtggtgaaaaaccaaatatcccaagataaagttgtaggaggaagctatctgagaaactgctaagtgatatgtgcattcacctcatggaggtag

SEQ ID NO: 411248 - DNA, 510 bp, Homo sapiens
aggccaacggcaaaagaatgaatatcccaggataaaarctagagggaatctaccagaaaagctgctttggaatgtggacattcatctcactgagttaaacctttcttttcattctgtattttggaaacactgtttttgtggaatctttgaagggatatttgggatcacattgaggcctatgatgaaatagaaagtatcttcagacaaaaagtagaaagaagattcctggaaaaacttctttgtgatgagtgcattcttcttacagagtttagtatttcttttgattcagcagtttggaaagactgtttttctcctttctgtgaatggacaattgggagctgattgagatcagtggtgaaaaaccaaatatcccaagataaagttgtaggaggaagctatctgagaaactgctaagtgatatgtgcattcacctcatggaggtagttacctttctttcagcagtttggaaatacttttttatagaatctgtgaagggatattcggaaacgt

SEQ ID NO: 411249 - DNA, 510 bp, Homo sapiens
aggccaacggcaaaagaatgaatatcccaggataaaaactagagggaatctaccagaaaagctgctttggaatgtggacattcatctcactgagttaaacctttcttttcattctgtattttggaaacactgtttttgtggaatctttgaagggatatttgggatcacattgaggcctatgatgaaatagaaagtatcttcagacaaaaagtagaaagaagattcctggaaaaacttctttgtgatgagtgcattcttcttacagagtttagtatttcttttgattcagcagtttggaaagactgtttttctcctttctgtgaatggacaattgggagctgattgagatcagtggtgaaaaaccaaatatcccaagataaagttgyaggaggaagctatctgagaaactgctaagtgatatgtgcattcacctcatggaggtagttacctttctttcagcagtttggaaatacttttttatagaatctgtgaagggatattcggaaacgt

SEQ ID NO: 411250 - DNA, 553 bp, Homo sapiens
acagagtttagtatttcttttgattcagcagtttggaaagactgtttttctcctttctgtgaatggacaattgggagctgattgagatcagtggtgaaaaaccaaatatcccaagataaagttgtaggaggaagctatctgagaaactgctaagtgatatgtgcattcacctcatggaggtagttacctttctttcagcagtttggaaatacttttttatagaatctgtgaagggatattcggaaacrtgttgagatctatggtgaacaagaaaatatcttcagataaaaagtaaaaaaaaaaggttctgagaaactgctttgtgatgtgtgcattcatctctcagacttaaacctttcttttgtttcagcagtttggaaacagtttttgtagaatctttgaagggatattttgctgctcattgaggcctatgctgaaagataaaacatcttcaactaaaaattagaaagaatctatatgataacctgctttgtgatgtgtgcattcatctcacagagataaaccttccttttcattcagcagtttggaaact

SEQ ID NO: 411251 - DNA, 591 bp, Homo sapiens
aggcctatggtgaaatagaaaatatcttccaatagaaactagacagaagcatactgagtaattgctttgtgatgtgtgcattcatctcccagtgttaaacgtttcttttcattcaccagtttggaaacagtgtttttgtccattctgtgaatgggcatttgggagctcattgaggccagtggagataaatggaatagcccaggataaaaacttcaaggaagctatctcagaaactactttgtgatgtgtgcatttatctcgcagagttaaaactttccttacattcagcagtttagaaaactgattttgtagaatctgtgaagggatatttgggagcacattgaaagctatggtgaaaaagaaaatatcttcagataaaaactgaaggaagctttctgacaaactgctttgwgataggtgctttcatctcatggagttaaacctttcttttgattcaatagtttggaaacactgtttttgttcattctgtgaatggatatttgggagcttattgaggccaaggcagaaaaagggaataccccaggataaaaactacaaggaagatatcagagaaacagctttgtgatgttt

SEQ ID NO: 411252 - DNA, 614 bp, Homo sapiens
cacagagttaaacctttctattcattcagcagtttgaaaacactggctttgtcatttctgtgaaaggacattatggagctcattgaggccaaaggtgtaaaagtgaatatctcaggataaaaatgagaccatctgagaaacaactttgtgatgtgtgcattcatctcgaagagtaaaatgattcttttcattcagcagtttggaaaygctgtttttgtagaatctgttaagggatatttcagagtgcctagaggcctacagtgaaaaagaaaatatcttcagataaaaactagaatgaagctttctgagaaactgctttgtgatgtgtgaattcatctcagagagttaagcctttcttttgattcaacagtttgaaaagactgtttttgtccattctgtgaatggacattttggaccccactgacaccaatggagaaaaagcaaatattccaggataaacagtagaaggaagctgagaaactgctttgtgatatgtgcattaatctttcagagttaaacctttcttttcattcagcagtttagaaacactgtttttgtagaacctccaaagggatatttgggaccccattgaggcctatggtgaaaaaataaat

SEQ ID NO: 411253 - DNA, 614 bp, Homo sapiens
cacagagttaaacctttctattcattcagcagtttgaaaacactggctttgtcatttctgtgaaaggacattatggagctcattgaggccaaaggtgtaaaagtgaatatctcaggataaaaatgagaccatctgagaaacaactttgtgatgtgtgcattcatctcgaagagtaaaatgattcttttcattcagcagtttggaaatgctgtttttgtagaatctgttaagggatatttcagagtgcctagaggcctacagtgaaaaagaaaatatcttcagataaaaactagaatgaagctttctgagaaactgctttgtgatgtgtgaattcatctcagagagttaagcctttcttttgattcaacagtttgaaaagactgtttttgtccattctgtgaatggacattttggaccccactgacaccaatggagaaaaagcaaatattccaggataaacagtagaaggaagctgagaaactgctttgtgatatgtgcattaatctttcagagttaaacctttcttttcattcagcagtttagaaacactgtttttgtagaacctccaaagggatatttgggaccccattgagrcctatggtgaaaaaataaat

SEQ ID NO: 411254 - DNA, 537 bp, Homo sapiens
gatcatggtggattagctttttgaatgctgttgaattcagtgtgctagtattttattgaggacttttgcatctatgttcatcagagctattggcctgaagttgtcttttttgttgtatcyctgccaggttttgatattagaatgacggtggcctaatagaatgggttagggaagggttttggaatagtttcaaggttttggaatagtttcagtaggattaatacagttctctttaagtctggtagaattcaactatgaatccatctagtccagggattttctggttggtaggttttttattattcattcagtttcagaactcattattggtctgttcagtttcttcctggttcaatcttgggaagttccatgtttccagtaatgtatccctttcttctacattttccagtttgtgtgcaaagaggtgtctgtaataataaatttctgtgggggtagttgtaatgtcacctttgtctattctgattgtgtttgttgggatcttctctctctttttattagtctagctagtggtctatc

SEQ ID NO: 411255 - DNA, 595 bp, Homo sapiens
tttatccatttctcctgtatatatgtatgaaacagttctcttatttatcaatgtattgtaatctcaatgtaataaaatttttaattaacctctcatatttgaaaccatgacttcaattttcttgcattataagatgatttattttctccaaatatagatatttctagaaatttccctattaggaatrtccctatatctatgactaaaacacaaattatgtcccaatattgtgcatgtgtactatgacatataaatcaagtatatagatttcttaaagtgtatgtaaacaaatagtaactgtaaaatatataacataattatataagcaaattgatatattatgagggctaacactttgaaaagccttttaaaattaaaatatttgagttaataggtctgtgtgctgcccagtacaatacactacaaactatttttctctgagacaattaggtttacccatctaatttttaatcttcttatcctgactattaatcaaatgtaaagcttagttaatgtaaataaaaattcactgagagttaacaaaatgagaatactaactcaggttatacttctttgtggctttgtgcaaatcact

SEQ ID NO: 411256 - DNA, 438 bp, Homo sapiens
tgagttaaatggacacatcacagagaagtttccgagaacacttctgtctactttttatgtgaagatactcctttttccaaagaagrcctcaaagcgctccagatatccacttgcagactttacagagtgtttcaaaactactgtatcaaaagaaaggataaactctctgagttgaacgtacacatcacaaagtagtttctgagaatgattttgtctagtttttatatgaaggtatttccttttctactattggcttgaaagcgctctaaatattcaataggaaattctacaaaaagagtgtttcaaaactactctatcaaaaggaaggttcaactctgtgagtttaatgcacacatcacaaagaagtttctgagaattcttccgtgtagctttataggaagaaatcctgtttccaacgaaggccacagagaggtccaa

SEQ ID NO: 411257 - DNA, 438 bp, Homo sapiens
tgagttaaatggacacatcacagagaagtttccgagaacacttctgtctactttttatgtgaagatactcctttttccaaagaagacctcaaagcgctccagatatccacttgcagactttacagagtgtttcaaaactactgtatcaaaagaaaggataaactctctgagttgaacgtacacatcacaaagtagtttctgagaatgattttgtctagtttttatatgaaggtatttccttttctactattggcttgaaagcrctctaaatattcaataggaaattctacaaaaagagtgtttcaaaactactctatcaaaaggaaggttcaactctgtgagtttaatgcacacatcacaaagaagtttctgagaattcttccgtgtagctttataggaagaaatcctgtttccaacgaaggccacagagaggtccaa

SEQ ID NO: 411258 - DNA, 479 bp, Homo sapiens
tttaactctgtgagttgaatacacaaatcacaaagcagtttctcagatagcatcattctagtttttatcctgggatattcactttttcaccattgtccagaatgagttcacaaatgtccatttgtagaatggtcaaaaacagtgtttccaaactgctgaattaaaagraagttttaactctgtgagatgaatacacacttcacaaaaagtttctaggaaaacttccttttactttttacgtgaagatattttcttttttaccatagggctcaatgcactcccaaatatccctttgcagattctataaaagcagttttacaaactgaagagtgaaaagaaaggtttaaatcttccaaatgaatgcacacatcaaaaagcagtctcagatagcttccttctagtttttatcctgggatattcatttttctccattggcctcgttgacctcccaaatgtccattcacagaatggaaaaaaaa

SEQ ID NO: 411259 - DNA, 507 bp, Homo sapiens
tttagctttgggagatgaatgaacacatcaaatagcagtttctcagatagcttccatctagtttttatcctgggttattctctttttcaccacttccttcaatgagctcccatatgtccatttgcacaatggacaaaaacaggtttccaaagtgctgactcaagagaaaagtttaactctgtgagatgaatgcaaaaatcacaaaccagtttctcaraaagcttctttcttgtttttatctaaagatcttttctttttcaccataggcctcaatgccttcacaaatatcccttcacagactctacgaaaacagtgtttccaaactgctgaatgaaaagatttaattctgtgagatgaatgcacacatcacaaggtggtttctcagatagtttctttctagtttttatcttgtggtctttgctttttcatcattggcccaatgagctcccaaatatccatttgcaaaatggaaaaaacagtatttccaaactgctgaatcaaaagaag

SEQ ID NO: 411260 - DNA, 639 bp, Homo sapiens
atggtaaactcatcaaggttatcaagtgaaaatattttcaatagtataatattttaatatgtaataggaatcaaacagcaatagtagtcaaacagttgaagatccatccttgaagccagggtatatgtcaaaaattgttgacttgtgatccctatkggaatggaaaagtatgtttgtaaaaattaccaccaggaaaggaacttcttacgttaaactcattcgttgagaaaattacgaatactgtcttagtagccaaggctcttaattgcaaataacaaatacaatttttctagtttaatcagaaaaaggaatttactaatagatgttgaagagtttatggaggcttttgagagaactgtcaaattatactggaaattaagttttcaggaaaaatgtataaaaccaggcaatgaactaacacttgatgaagaaattgccattgctgctaccactatgatgtcaccaagcgtaaaatggaagaaaattgaccttgctgcaattactactcttccttgccattccacttaccatgccacttctgactcaaacagttgattttgcaaactcaaaaaaccagacagtctgctactattatcaccttgacgagtctcttgcccaaactgctcccatctgaaacag

SEQ ID NO: 411261 - DNA, 639 bp, Homo sapiens
atggtaaactcatcaaggttatcaagtgaaaatattttcaatagtataatattttaatatgtaataggaatcaaacagcaatagtagtcaaacagttgaagatccatccttgaagccagggtatatgtcaaaaattgttgacttgtgatccctattggaatggaaaagtatgtttgtaaaaattaccrccaggaaaggaacttcttacgttaaactcattcgttgagaaaattacgaatactgtcttagtagccaaggctcttaattgcaaataacaaatacaatttttctagtttaatcagaaaaaggaatttactaatagatgttgaagagtttatggaggcttttgagagaactgtcaaattatactggaaattaagttttcaggaaaaatgtataaaaccaggcaatgaactaacacttgatgaagaaattgccattgctgctaccactatgatgtcaccaagcgtaaaatggaagaaaattgaccttgctgcaattactactcttccttgccattccacttaccatgccacttctgactcaaacagttgattttgcaaactcaaaaaaccagacagtctgctactattatcaccttgacgagtctcttgcccaaactgctcccatctgaaacag

SEQ ID NO: 411262 - DNA, 613 bp, Homo sapiens
agacagtctgggtcagagggtatgaaatgggactggacatccgaagactcatcagtcccaccagtgtgatgcagaaacacttggcctgaggaccagactctgagaaatgaaatctctgaatcctatgacagtctggagtccagactccccgggcagcttcctgacaatgtggctttttgtgaagcttgcccgcaagggtagaatgcaccagcctgatgattctagtgccttgcctcaaaagttagggattctcgctatgaataaatgatttgacrtccggcttcatgtatgggcctccttcgcttaggaaatccatgggtatggcacagattatttttcaaagggggacttttcctctctgtactattgttgcataaagtttaaaaaaaaaaagatcttgcttgccaaatgaattagtaaattgtaaatgggaaaaaaattaaaaacagaatgtttgcatgtcttttggttagacacaatctctggaagcaaaatatgaaacccaggagcaaaaaaagagtcattagcaggtttcactatataaaaatttagaacttttatagggtaaaatataccataatctaaaaaaatttaaataatagaatggaagaaa

SEQ ID NO: 411263 - DNA, 613 bp, Homo sapiens
agacagtctgggtcagagggtatgaaatgggactggacatccgaagactcatcagtcccaccagtgtgatgcagaaacacttggcctgaggaccagactctgagaaatgaaatctctgaatcctatgacagtctggagtccagactccccgggcagcttcctgacaatgtggctttttgtgaagcttgcccgcaagggtagaatgcaccagcctgatgattctagtgccttgcctcaaaagttagggattctcgctatgaataaatgatttgacgtccggcttcatgtatgggcctccttcgcttaggaaatccatgggtatggcacagattatttttcaaagggggacttttcctctctgtactattgttgcataaagtttaaaaaaaaaaagatcttgcttgccaaatgaattagtaaattgtaaatgggaaaaaaattaaaaacagaatgtttgcatgtcttttggttagacacaatctctggaagcaaaatatgaaacccaggagcaaaaaaagagtcattagcaggtttcactatataaaaatttagaacttytatagggtaaaatataccataatctaaaaaaatttaaataatagaatggaagaaa

SEQ ID NO: 411264 - DNA, 613 bp, Homo sapiens
agacagtctgggtcagagggtatgaaatgggactggacatccgaagactcatcagtcccaccagtgtgatgcagaaacacttggcctgaggaccagactctgagaaatgaaatctctgaatcctatgacagtctggagtccagactccccgggcagcttcctgacaatgtggctttttgtgaagcttgcccgcaagggtagaatgcaccagcctgatgattctagtgccttgcctcaaaagttagggattctcgctatgaataaatgatttgacgtccggcttcatgtatgggcctccttcgcttaggaaatccatgggtatggcacagattatttttcaaagggggacttttcctctctgtactattgttgcataaagtttaaaaaaaaaaagatcttgcttgccaaatgaattagtaaattgtaaatgggaaaaaaattaaaaacagaatgtttgcatgtcttttggttagacacaatctctggaagcaaaatatgaaacccaggagcaaaaaaagagtcattagcaggtttcactatataaaaatttagaacttttatagggtaaaakataccataatctaaaaaaatttaaataatagaatggaagaaa

SEQ ID NO: 411265 - DNA, 613 bp, Homo sapiens
gatgaggaagacatagccctctgtattagccctctagggctgttgtaataaaatagcagagattggggggctgaaacaatctctgaaatatgaragacttttattctttcacattatggaggttggaagtccaagaacaagatgtgggcagggttggtttctgttgaggcctcattccttgccttgcaggcagctaccttcttgctttgtccttatgtggcctttcttctgtgtgaccctccctagtatctcttcattttcttataaggacaccaatcatattggattaaggccccacccttatgatctcattttaacttaatgacctcttgaaagatgctgtctctatatgcagtcacattatcaggtactggcagttaaaccccaacatataaatttggagaggggggcatgattcaacccgtagctgacccctcaggaacccaggaataataagtgctttatgatgaggtgtcacaaaggttcatctagaaccaagctgcttttaggaatttcagaagcaaaagttcatagatcttttaccatcaggatgaacttgattatgctgtgtaataagcatctctccaaacctaaatagccaaaaacaacaaag

SEQ ID NO: 411266 - DNA, 613 bp, Homo sapiens
gatgaggaagacatagccctctgtattagccctctagggctgttgtaataaaatagcagagattggggggctgaaacaatctctgaaatatgaaagacttttattctttcacattatggaggttggaagtccaagaacaagatgtgggcagggttggtttctgttgaggcctcattccttgccttgcaggcagctaccttcttgctttgtccttatgtggcctttcttctgtgtgaccctccctagtatctcttcattttcttataaggacaccaatcatattggattaaggccccacccttatgatctcattttaacttaatgacctcttgaaagatgctgtctctatatgcagtcacattatcaggtactggcagttaaaccycaacatataaatttggagaggggggcatgattcaacccgtagctgacccctcaggaacccaggaataataagtgctttatgatgaggtgtcacaaaggttcatctagaaccaagctgcttttaggaatttcagaagcaaaagttcatagatcttttaccatcaggatgaacttgattatgctgtgtaataagcatctctccaaacctaaatagccaaaaacaacaaag

SEQ ID NO: 411267 - DNA, 594 bp, Homo sapiens
ttctgtgtgaccctccctagtatctcttcattttcttataaggacaccaatcatattggattaaggccccacccttatgatctcattttaacttaatgacctcttgaaagatgctgtctctatatgcagtcacattatcaggtactggcagttaaaccccaacatataaatttggagaggggggcatgattcaacccgtagctgacccctcaggaacccaggaataataagtgctttatgatgaggtgtcacaaaggttcatctagaaccaagctgcttttaggaatttcasaagcaaaagttcatagatcttttaccatcaggatgaacttgattatgctgtgtaataagcatctctccaaacctaaatagccaaaaacaacaaaggtttatttcttacttgtactacttgccttttgctagccaacaggtctctcccttcataatgtttactcaaggtctttagcttatagagcagttaccatattgaacattgctggtcactgtgctgggggaaagagagatttctggagggtctcacctcagcaagcaaatgccccattctggaaatgacatatatctcttctatttgaa

SEQ ID NO: 411268 - DNA, 617 bp, Homo sapiens
acaagcaattcacagattaataccatctacacaccacattttgattagcatttatctaatagaatattagtttcatgagtacatttatattggaattgtayctgtagggattttatctttggttaagaaataattgaagaaaccagaatcacattttacaagggcaattagaccatttataccatgaaagccagcccagctctaagatattatacactgtgaccccttcccacctctgaaagggattaaaaaacgggttatgcctgtgcccaggttagtagtcaatgcacaattgtcctctggggattataaagtcctgacattgctgggggaagaatgatcatgtgacaaatgtatttgattacaatctagtggcagtaattttaaaaaactttgtattacatgaataatatatattccatgtggaacataagaacaaaaaggagagaactaaaaataattaactccctttttaatactatcaccttccttaacatcttgatataaaccttaatgggtttgtttgtttgtttgtttgtttctagcctcagctcttttgaattttgaacgcataagggcactgaagcctttgatatctgcttgcatatgctcttaag

SEQ ID NO: 411269 - DNA, 617 bp, Homo sapiens
acaagcaattcacagattaataccatctacacaccacattttgattagcatttatctaatagaatattagtttcatgagtacatttatattggaattgtatctgtagggattttatctttggttaagaaataattgaagaaaccagaatcacattttacaagggcaattagaccatttataccatgaaagccagcccagctctaagatattatacactgtgaycccttcccacctctgaaagggattaaaaaacgggttatgcctgtgcccaggttagtagtcaatgcacaattgtcctctggggattataaagtcctgacattgctgggggaagaatgatcatgtgacaaatgtatttgattacaatctagtggcagtaattttaaaaaactttgtattacatgaataatatatattccatgtggaacataagaacaaaaaggagagaactaaaaataattaactccctttttaatactatcaccttccttaacatcttgatataaaccttaatgggtttgtttgtttgtttgtttgtttctagcctcagctcttttgaattttgaacgcataagggcactgaagcctttgatatctgcttgcatatgctcttaag

SEQ ID NO: 411270 - DNA, 612 bp, Homo sapiens
atgacctcagcctggagtcagggtcaatggcttcctccctcacccatcgcctggatctagtgctcccatccaggcctgtgtaacaggttctgctggatgtcatccatttatgcaaccatggaggaagctataaggaaactatttgtcagccagcacctcccaaacagccaactcatggggtttttcacgtgacaccgggcatgttttttttcccactgcagcccaacacacccacagacccttaaggatgcatgaacgggtgttgttgggggtgggacagctgttgaaaaccacaggactaggaaagtccccaggctgtgcttgaagctctacgcttttctctcaagtcaggaatttctattaatgtattatgcaacttcctaggaattctctgtggctagaaaggattytaataaaatacagaacaagcaggtccatggttaaaaggaataatctacaaacaaaaagaaataagtcatgtgttcatagctgtggctcctcaaaggcaggagatgaagcttgtttgcttctgcatcccaggcactcagcaaggctggcgggagagaacttctcccatgcgcttttctgccctctttctgattactccctaaa

SEQ ID NO: 411271 - DNA, 560 bp, Homo sapiens
tgttaactttatcactgaaatttccaacaaggatgttgcttggtgccaaagccacagtggtttttatgatgtgggtgcctctgtgaataaagagcagaagagtgtttcacgcaggccccaagacgacaatgacttttagccactctgaacttggatcacatccagamtggtgggtgtgacacactgcatgtgaatgagtccagacattgcttttatttattgctcagatgataaatcattttattccttcagaaaagacagagtataagagcttgatgtttatacgtgagtggaacactattttaactgcaggttaaactctggtaaaggaaacacacttatgaggaggaaattggcctcgtctatcagaaacagtttcatggccctgcagcccatcaccttattacttaggagaacttaaagggagacgcccagatcggaagcccataggatcgccagcctcagcagaaggttcaggctacagctctgttcacattccattcttgctgctgtttaaccagtgtatatccttattccccagactcttagctgcactgctg

SEQ ID NO: 411272 - DNA, 560 bp, Homo sapiens
tgttaactttatcactgaaatttccaacaaggatgttgcttggtgccaaagccacagtggtttttatgatgtgggtgcctctgtgaataaagagcagaagagtgtttcacgcaggccccaagacgacaatgacttttagccactctgaacttggatcacatccagacwggtgggtgtgacacactgcatgtgaatgagtccagacattgcttttatttattgctcagatgataaatcattttattccttcagaaaagacagagtataagagcttgatgtttatacgtgagtggaacactattttaactgcaggttaaactctggtaaaggaaacacacttatgaggaggaaattggcctcgtctatcagaaacagtttcatggccctgcagcccatcaccttattacttaggagaacttaaagggagacgcccagatcggaagcccataggatcgccagcctcagcagaaggttcaggctacagctctgttcacattccattcttgctgctgtttaaccagtgtatatccttattccccagactcttagctgcactgctg

SEQ ID NO: 411273 - DNA, 521 bp, Homo sapiens
ctataacatgtctcagagactggtctcaaagattaccctgcaaaggagcctgactttaattggatcggactgtggagtaatttataacccaaggcattgttgaaaacaataggccatttcagccagcagttactggaggctaacagttgagtgtgatgtcaatagatacaacagaccagctagaagcttaatakatcagtgaaagaaagtcagagaagcctgctaaaaccattgttattctgggggaagggagaaagggcttaggggtattataaccatgccccaggcttcactggctgaggatcagtataaaaagctgcacagggaaatagactttgctgatatagtccagccaagtcactaaacaaacagcaaacaattaagcaacaacaagccctggagttgggggagggggagaaagcagcatcaagaattgctacaagaaatcatctaaaatatccagtttttaggcagaaaaaaattatggactacatactgtctacagaagtcacattttagtt

SEQ ID NO: 411274 - DNA, 579 bp, Homo sapiens
ccgaatgtacccattcgacaggtgagacatctggggtcagagaggcggtaaccggcctgggaatcagacatgaccctggattctgctctcagccctgctgtgtgccgtgctrgacttcaggcctcaaccctgagacctccctgctctagatcccaaatctgcccagatttccgatccggatggggcagagcctggccctggcagagacactggaatggatccactgtgggtggggaggagggaagggtcctcagaacacacctggggcctaagctgggtcctgatggtcaccgtgggacccactggacacacatagtcccttgtctgggagtggcatggggaggcttctgcccttgggcagttgtggaaagtgaaggagtcctggaggactggctgaggggagactatcttcccttgtgttcaaaggggtccgggcactggggttctccccaagtatttcttattctgtctggcctcgctttccttttgccctgagtattctcaggagggacggcccatctagatgttcttcaggagcaaggacccactcttctacatcagtgacacaggaacatgaag

SEQ ID NO: 411275 - DNA, 579 bp, Homo sapiens
ccgaatgtacccattcgacaggtgagacatctggggtcagagaggcggtaaccggcctgggaatcagacatgaccctggattctgctctcagccctgctgtgtgccgtgctggacttcaggcctcaaccctgagacctccctgctctagatcccaaatctgcccagatttccgatccsgatggggcagagcctggccctggcagagacactggaatggatccactgtgggtggggaggagggaagggtcctcagaacacacctggggcctaagctgggtcctgatggtcaccgtgggacccactggacacacatagtcccttgtctgggagtggcatggggaggcttctgcccttgggcagttgtggaaagtgaaggagtcctggaggactggctgaggggagactatcttcccttgtgttcaaaggggtccgggcactggggttctccccaagtatttcttattctgtctggcctcgctttccttttgccctgagtattctcaggagggacggcccatctagatgttcttcaggagcaaggacccactcttctacatcagtgacacaggaacatgaag

SEQ ID NO: 411276 - DNA, 579 bp, Homo sapiens
ccgaatgtacccattcgacaggtgagacatctggggtcagagaggcggtaaccggcctgggaatcagacatgaccctggattctgctctcagccctgctgtgtgccgtgctggacttcaggcctcaaccctgagacctccctgctctagatcccaaatctgcccagatttccgatccggatggggcagagcctggccctggcagagacactggaatggatccactgtgggtggggaggagggaagggtcctcagaacacacctggggcctaagctgggtcctgatggtcaccgtgggacccactggacacacatagtcccttgtctgggagtggcatggggaggcttctgcccttgggcagttgtggaaagtgaaggagycctggaggactggctgaggggagactatcttcccttgtgttcaaaggggtccgggcactggggttctccccaagtatttcttattctgtctggcctcgctttccttttgccctgagtattctcaggagggacggcccatctagatgttcttcaggagcaaggacccactcttctacatcagtgacacaggaacatgaag

SEQ ID NO: 411277 - DNA, 579 bp, Homo sapiens
ccgaatgtacccattcgacaggtgagacatctggggtcagagaggcggtaaccggcctgggaatcagacatgaccctggattctgctctcagccctgctgtgtgccgtgctggacttcaggcctcaaccctgagacctccctgctctagatcccaaatctgcccagatttccgatccggatggggcagagcctggccctggcagagacactggaatggatccactgtgggtggggaggagggaagggtcctcagaacacacctggggcctaagctgggtcctgatggtcaccgtgggacccactggacacacatagtcccttgtctgggagtggcatggggaggcttctgcccttgggcagttgtggaaagtgaaggagtcctggaggactggctgaggggagactawcttcccttgtgttcaaaggggtccgggcactggggttctccccaagtatttcttattctgtctggcctcgctttccttttgccctgagtattctcaggagggacggcccatctagatgttcttcaggagcaaggacccactcttctacatcagtgacacaggaacatgaag

SEQ ID NO: 411278 - DNA, 475 bp, Homo sapiens
tgcctggcttgttctttcttttttactggcgtacagaaagaaacaaaagactcaagggcttgtcaaaacttctatgcatgtgaaatgatagaagttgacttaacaagaagcggcagtgaccaaatgactcagcacccgattgcaccgcaccggtctcttgaacagctgcgaggagactaaagccttctaaacgcttccrgtggaaggatgggccacaggccagcaacatgggcaggacctgggagcgtgttagatgtgcagaatctcaggcctcatcccagacctactggatcagaatccacatgctaaccaggtgatcatatgcatgttaaagtgtaagaagccctgctctgactgccccatcctgtggtgcaatgaggctgggtgtccccacagagcagtcaggaagcctaggtatagttataggaagactcatgccaggtaggactgcggagctggggtgacatgggcagag

SEQ ID NO: 411279 - DNA, 475 bp, Homo sapiens
tgcctggcttgttctttcttttttactggcgtacagaaagaaacaaaagactcaagggcttgtcaaaacttctatgcatgtgaaatgatagaagttgacttaacaagaagcggcagtgaccaaatgactcagcacccgattgcaccgcaccggtctcttgaacagctgcgaggagactaaagccttctaaacgcttccagtggaaggatgggccacaggccagcaacatgggcaggacctgggagcgtgttagatgtgcagaatctcaggcctcatcccagacctactggatcagaatccacatgctaaccaggtgatcatatgcatgttaaagtgtaagaagccctgctctgactgccscatcctgtggtgcaatgaggctgggtgtccccacagagcagtcaggaagcctaggtatagttataggaagactcatgccaggtaggactgcggagctggggtgacatgggcagag

SEQ ID NO: 411280 - DNA, 383 bp, Homo sapiens
gacttcctgtcttcctatttgaatagcttttctttctttctcttgcctgattgccttggtgagaatttctaatactgtgttgaataggagtggtgagagagggcatctttgtcttgtgtcagttttcaagggaacgcttccaggttttcaggtactcaggcaacaaatagcgttacaatagaatagtacctcacatctcaatgctaatgttgaacgtaaatggcctaaatgctccacttaaaakatatagaatggcagaatgggtaagaattcaccaaccaagttgctgctgtcttcaggagactcacctaacacatacggactcacataaacttaaggcaaagggttggaaaaagacacttcgtctaaatggacacatcaaa

SEQ ID NO: 411281 - DNA, 531 bp, Homo sapiens
gtctgtggaaaaattgttttccacaatgccagcacctggtgccaaaaaggttggggactgctgttgcagagggagcacaccyggctcccacactggcatatgaacttgggccctctcttctcggcattgtgagagagaaagctactcctcttcttgagctcaggccacagacaccagctcagtatacttgagcagtgtgcttgaatcctgggggtattgagaccaggttcatgactttgtcttctggtctcatggggttgagctttggctgtgctgagggtgggggctgaactgctcccaggcctccggcaaagcactcagatggggcagtggaggctgcgctgtgtgcttacccttgcgtgagtagctaggcaggggccttgggaggggctggtggacaagaaggtacacagaccagatatgctgcagtcccatggtaaatgcagccctactgtcttctggcctggcagtaagcaggagctagagtcactcagagcaagatggagagccttgggggatgggtgcctatgg

SEQ ID NO: 411282 - DNA, 531 bp, Homo sapiens
gtctgtggaaaaattgttttccacaatgccagcacctggtgccaaaaaggttggggactgctgttgcagagggagcacacctggctcccacactggcatatgaacttgggccctctcttctcggcattgtgagagagaaagctactcctcttcttgagctcaggccacagacaccagctcagtatacttgagcagtgtgcttgaatcctgggggtattgagaccaggttcatgactttgtcttctggtctcatggggttgagctttggctgtgctgagggtgggggctgaactgctcccaggcctccggcaaagcactcagatggggcagtggaggctgygctgtgtgcttacccttgcgtgagtagctaggcaggggccttgggaggggctggtggacaagaaggtacacagaccagatatgctgcagtcccatggtaaatgcagccctactgtcttctggcctggcagtaagcaggagctagagtcactcagagcaagatggagagccttgggggatgggtgcctatgg

SEQ ID NO: 411283 - DNA, 520 bp, Homo sapiens
gacataacatgtggccaagaaggctacgaaaaaaatgctcaaactcactaatcattagagaaatgcaaatcaaaaccacagtgagacaccatctcacaccagtcagaatgactattattaaaaggtcaaaaactaacagaagctggcaaggttgtggagaaaaggggaygtttatgcacttctggtgggaatttaaacttgtttagtcattgtggaaagcagtttggcgatttctcaaagaacttagaattgccatttgatccagcagtcccattgctttccccattgctttttttaagtggagttgttgaaggttggatggttgtaggtgtgctgcattatttcttagctctctattctgttccattggtatatgtgtctgctgttgtaacagtaccatgctatttctgttactgcaggtttgtagtatagtttgaagtcagctaccaaaccaccaatgacattcttcacagaattaggataaactattttaaaatttatatcgaaccccaaaacagct

SEQ ID NO: 411284 - DNA, 520 bp, Homo sapiens
gacataacatgtggccaagaaggctacgaaaaaaatgctcaaactcactaatcattagagaaatgcaaatcaaaaccacagtgagacaccatctcacaccagtcagaatgactattattaaaaggtcaaaaactaacagaagctggcaaggttgtggagaaaaggggacgtttatgcacttctggtgggaatttaaacttgtttagtcattgyggaaagcagtttggcgatttctcaaagaacttagaattgccatttgatccagcagtcccattgctttccccattgctttttttaagtggagttgttgaaggttggatggttgtaggtgtgctgcattatttcttagctctctattctgttccattggtatatgtgtctgctgttgtaacagtaccatgctatttctgttactgcaggtttgtagtatagtttgaagtcagctaccaaaccaccaatgacattcttcacagaattaggataaactattttaaaatttatatcgaaccccaaaacagct

SEQ ID NO: 411285 - DNA, 520 bp, Homo sapiens
gacataacatgtggccaagaaggctacgaaaaaaatgctcaaactcactaatcattagagaaatgcaaatcaaaaccacagtgagacaccatctcacaccagtcagaatgactattattaaaaggtcaaaaactaacagaagctggcaaggttgtggagaaaaggggacgtttatgcacttctggtgggaatttaaacttgtttagtcattgtggaaagcagtttggcgatttctcaaagaacttagaattgccatttgayccagcagtcccattgctttccccattgctttttttaagtggagttgttgaaggttggatggttgtaggtgtgctgcattatttcttagctctctattctgttccattggtatatgtgtctgctgttgtaacagtaccatgctatttctgttactgcaggtttgtagtatagtttgaagtcagctaccaaaccaccaatgacattcttcacagaattaggataaactattttaaaatttatatcgaaccccaaaacagct

SEQ ID NO: 411286 - DNA, 520 bp, Homo sapiens
gacataacatgtggccaagaaggctacgaaaaaaatgctcaaactcactaatcattagagaaatgcaaatcaaaaccacagtgagacaccatctcacaccagtcagaatgactattattaaaaggtcaaaaactaacagaagctggcaaggttgtggagaaaaggggacgtttatgcacttctggtgggaatttaaacttgtttagtcattgtggaaagcagtttggcgatttctcaaagaacttagaattgccatttgatccagcagtcccattgctttccccattgctttttttaagtggagttgttgaaggttggatggttgtaggtgtgctgcattatttcttagctctctattctgttccattggtatatgtgtctgctgttgtaacagtaccatgctatttctgttactgcaggtttgtagtatagtttgaagtcagctaccaaacyaccaatgacattcttcacagaattaggataaactattttaaaatttatatcgaaccccaaaacagct

SEQ ID NO: 411287 - DNA, 604 bp, Homo sapiens
gggcaatcttgtcttcttccagttttcaggaggaatgctttcaacttttccctgttcagtataatgctggctgtgggtttgtcatagayggcttttattaccttaatgtatgtcccttctatgctgattttgctgagggtcttaataaaataaggatgctggattttctcaagtggtttttctgcatctattgagatgatcatgtgacttttgttttttaattctgtttatgtagtgtatcgcatttattgacttgtagatgttaaaccatccctgcatccctggtatgaaacccacttgatcatgatggattatctttttgatatgttgttagattcagctagctagtattttttttgaggattactgcatctctgttcatcagggatgttggtctgtagctttcttttctcattatgtccttccttgcttttggtattagggtgtctattagtctgtttcagtattagggtgtgtattagtccattttcacactgctgataaagacatatctgagactgggcaatttacaaaagaaagaggtttatttgacttacagttccacatatttggggaggcctcaaagtcatggtagagtcaagga

SEQ ID NO: 411288 - DNA, 503 bp, Homo sapiens
tctacacttaaccttcctgtgactaccatcaatgaaaatcactacattacatgttctaacgtgttttttgcttccttacagggagctttgattacctatgttgattcagtccaattgctgaattctctgatcatttctagtaattcttcaaattttctcttgaattttctgcacagctaacatattgtttccacgcagtgaccattctctccctcgtgcctgctcatgtctttgtgtgcctgtctgcgttggccgtgcagctcaagggtacagcstctgcatcctggtctccaccccactgccatcaccattactaggctgagactacacagccccatatctcagatcctcctctgcctcatggggatggttctatgatgacgtcagaggtgtgtgagatggttaatctgcccatagcctgggaggcccctgcgtgcggaacaggaaggggtcagcgtcttcaatctccccatcttcttgtctgattaaaggtcctcagaagg

SEQ ID NO: 411289 - DNA, 589 bp, Homo sapiens
tgtgtgtgtgtgtgtgtgtgtgtgtgtccttcaaatcaaagagaagaacctgcgactaacacatttaaagagtgggcaaaggacacaaacaatttaaataaagttgtataaatgacaaataaacctaaaatatgatcgacctcactagacatttaaaaattctaataaaaacaggccaggtgcggtggctcatgcctgtaatcccagcactctgggaggccgaggtgggtggatcacctgaggtcaggagttcaagaccagcctggccaacgtggcgaaaccctgtctttactaaaaatacaaaaattggccaggtgtggtggtgcgcaccagtaatcccagctactccggaggctgaggcaggagaatcgtttgaacctgggaggcggaggttgcagtgagttaagatcacaccatcgcactccagcctgggcgacacagggagactccgtctcaaaaaaaccaaaaatttataataaaaacaataaagacctctgtcaaattggyaacattgaaaggactcatagcattcaggtttgacaggaggctgctggggggcccctttctggtttgcactgaggttcggaac

SEQ ID NO: 411290 - DNA, 589 bp, Homo sapiens
caagctggaagatttctgctttggagtaaatgagaattctataggagtttgttcttatggcctctgggggaaaaaaaaacacttgtcactggaatgagggctccccagtctcttccagcctctcactgtttgtctgcccttgctggttcatctgaatattctaagctaaatggagaagttgttattccttaataaactagcactggtaatgaagtaccttagtgtacttaggcattaaatcctacttcagttccttctctgatcttgattcagctgcaaaggtgatattctgataagttccaggcactctttctttagtcctatagcctggaaagtttcttaaaacgtacattttaatgaaactcattacaacatggcattttaaaagttaagattttatactgccatttacctttctggttatcataggaagcgtctcccacmttgtgactaggaggaagggtagcatttgtagactagttaatgtattcctaatttgttttgactgaagtctgagcatcaatatacataatagctgttagcaaattattttatcagtcatatttttctaccacaagctataatttat

SEQ ID NO: 411291 - DNA, 614 bp, Homo sapiens
ctctgccttggaaacttttcactgaattgcacaaagaagtggaatatttgtacagatgttttgttaaggaaagacctaaaaatagtgccactaacatgaattaaaggaagaatggaaactggaagggttatggtggtagttgtagttgggcctgtttttgtctttgaagactaacacttgataaaagctcactggttatgtgatttgcctccgtaaaagacaccacaaacctagaaactgccctacttttgggaagttttccaacaagcctaaatattccagataaaaataggggggtctgaatttggcaggatggaggagaggagttctgtcctaccatatcctcttgctgacaaaaactgtttcttaccrtctttcttttagacccaggttcttctgtgctttctaccaagaaggtactttgaccttagaggaaactgatattttggcttgccttctaggatgtattgggttcttccttaacaaatcaggatgcagacttccaagtgactggcacaattaagaaaagccaattatttaactgttctgtgattacttcaagtgtttgacttttagctagtttttgagaaaaaagtagtgttaaatttttaccc

SEQ ID NO: 411292 - DNA, 596 bp, Homo sapiens
catataacttttgtgagacagtcgctagaccttggtaataaagagtaagctttggttttagggtcagtcattcctgaattaaaactgagttcatagctgtgtggccttgaacaaattatttaaccccacgaaaccttgtctttttcatctgtaaaatgaagttaatgataatcacttcataggggaatttggggtataaacaagtattaagatacttagcaaaatgcttgcctcagtgctcaaaatttggtagttatttttaagaatttaaagaattttaacctattgcctacttttttggaactacttccaaacctttgacattacagtcagcttgcaaaacagtaatttttgaaatagtgtttttatggttctttgtgaacattttttcatctgcatgtaaaatgatttagccttcagaagcccaagatcctgaactacttcatawataagtataaaaacgctttcaaaatggaccactgcacataatctagttattgccatcttgaacatcgggaattaaaatcgcttctcaactcttttcccctcatctccattcccttattgtgaacagccctgttggtattcctttattg

SEQ ID NO: 411293 - DNA, 604 bp, Homo sapiens
ttgaagcttcttacaataacactgtaacttagcaaataagataccttttattgagcaattcttaaatgtcagtgtcatgattcactataacaagtgatgtacacatatttaattctcacccaactctttaaagtaggtcttattcccatgttcacaaaggaaatagacccagcatgctcagcattagtcagtaaggggctggttttctttttttttttgagayggagtctcactcttgtaggctggagtgcaatggcagggtctcagctcactgcaacctccgcctcctgggttcacgtgattctcctgcctcagcctcctgagaagctgggattacagcctcccacaccatgcccagctaatttttgtatttttagaagagacagggtttcaccatcttgatcagactggtctcgaactcctgacctcaagtgatccacctatcttggcttcccaaagtgctgggattacaggcgtgagccaccatgcccggctgagggcactggttttcatacttggttttctgactgtagagtgcatactactatctgaagtaagaagagttgcctgcctagttgcctgatttttaccttgacacaaccac

SEQ ID NO: 411294 - DNA, 511 bp, Homo sapiens
acagttaatcattgctccttgaaactattactcatttggtttaggggactacccttcttttttgagacagggtcttgctctgtcacccaggctggagtgcaatagcgccatcatagctcactgcagcctccaactcctaggctcaagcaatcctcctgtctcagtctcctaagtagccaggactacagccacttgctaccatgcccagctcatatttttattttttaattttctgtagagacccggcctatgtttcccaggctagtcattaactcctggactcaaatgatcctgccccacttagcctcccgaactgctagatttataggcctsagccaccacacccaaattattttttaataaatccaccagtggaatacccttctttgaatgtcactactcccaacccaacctcactggcagctccctcatttgctggctcctcacctccccaaatctaaacataagcatacatcagtgctcggtccttgtaacccttctctgtctgcac

SEQ ID NO: 411295 - DNA, 600 bp, Homo sapiens
tttaaaaactaatatttataagacatgtagtatgctaccactttgtatgcttcacttcatttaaaattttaaaactctcaacaatactgtgaggaaagcacttttattatgattttgcccayagagaatacaggcttaggagctgtaaatgaaaagaacaaagaatagaagtcaggtctatctaatgccaaaaaaacagctatccacagctatccagcatatgagaccctcatggaaaagctatctgaggtctagtcactcaaggaggcttctaattttccagggtgcagcatgcttttctttgtggacaatgaagagcatgcaatctgcattgtattcagttctcttactttggccacgactaagctcttcttctttttttctttttttaatagagaatagtacaaagtagaaagtttttaaaactaacaaaattctatcatccagaaatccctgaaatcagctctttctgaagataaaaataactgatgatatgcaatgttggtgagagaaatacaagacagtcacatttatatcctgctagtgcaagagaaaagaggggaaatctttctggaaagccatttggcagctaactaaaga

SEQ ID NO: 411296 - DNA, 568 bp, Homo sapiens
ctcactgccacctcaaactcctgggcacaagcaatcctcccacctcagcttcctgagtagctasgactacaggcactcgccaccatgcctgactaatttaaaaaaatttttttgtagaaacagggtctcagtatgttgcccaggctggtctcgaactcctgtccttaagtgatactcctgctttagcctcccaaagtgctgggattataggcatgagccatcaagcctagccaaggagtctaataagagtcttaatgctctttcctgttgaggatcttagcacaattttgaggtcttcagctatgacttacacacacttcatttttcataatttttctttcttacaaataactttgtaaataatgttatgattcagtagtgctaaaaaaggaggatgagagagtttaattctttgatgcaggtttggagaggaagtgatagaaaatcagaggccagcctgttaatcagctctaccagacctgtgcacctatcttggttccataatttctttgagcaaggttcctattcttccttgggctctgtttcctcatctacaaaatgaagacaa

SEQ ID NO: 411297 - DNA, 579 bp, Homo sapiens
tgggacttataaacaacggaatactattcaaccataaaaaagaataagatcttgtcatttgcaacaacatggacagaactggaggacrttatgttaagtgaaataagccaggcccagaaaaactttacatgttctcacttatttgtgggagctaaaaattaaaataattaagctcatggagagaaagagtagaatgaaggttaccagagtctaggaagggtagtgggggttggggggcaagtggagatgctaatgagtattaaaaatagtttacaagattgaataagattaggatttgatagcacagtgggtgactatagtcaataataatttaattataaattttaaaataactaaaacagtgcaattagattgtttgtaacataaaaaaaaatgctttttataaaaggtgacagatgtcccatttatcctgatgtgattattacagattgtatgcctgtatcaaaatatctcatataccctataaatatatatatatatatctaatatgtacccacaaaattaaaaataaacttattttttttaaagacaaactctaaaaataggatgaggcatttg

SEQ ID NO: 411298 - DNA, 581 bp, Homo sapiens
gtaattctgtgatattagttgtaatatctcctttttgtctctgatttttatctatttgggtcttttcctttcttagtttatgtaggtaaaggtttgtcaattttgtttatcttttcaaaacacaaaytttttatttcattaatcttttgtgttgtatttttagtctcaactttatttatttctgttttgatctttattatttatttccttctactaatttgggggttgattcatttttctttctctaattcatcgagctgcatcattaggttgtttatctgaagactttctgctttttaatgtagggtttgttgctacaaacttctctcttagtgctgcttttgctgtatcgtcttggtatgttgggtttccattttcatttgttcaagcaattttttgatttcctttttaattcttcattgatctattcattgttcaggaacattttgtttaattcccatgaatgtgtaccattttcaacattccttctgttattgagttccagttttattcaattgtaaccagaaaagatatttgatatgattttgatttttttaaatttgttaagacttgtttctgac

SEQ ID NO: 411299 - DNA, 558 bp, Homo sapiens
tttcctttttaattcttcattgatctattcattgttcaggaacattttgtttaattcccatgaatgtgtaccattttcaacattccttctgttattgagttccagttttattcaattgtaaccagaaaagatatttgatatgattttgatttttttaaatttgttaagacttgtttctgacctaacatatggtctaccccagaatatgttccatatgttgttgagaaaaagtcataatctacagctgttggatcaagtattctgtaaatgtctattaggttcatttactctagagtgcagtttactccactgtttctttgttgattttctatcaggataatctgtctattgccaaaagtggggytttgaagtttcctactattaatgtattgcagtcaatctcccttttaggtcttttcaaatgggttttatatatttgagtgctccagcattagacacatacatatttataattgttacgtcatcttactgtgttgatccctttatcattctataatggtattctttgtagccttttaaaaaaactattattggttt

SEQ ID NO: 411300 - DNA, 565 bp, Homo sapiens
tgggttttatatatttgagtgctccagcattagacacatacatatttataattgttacgtcatcttactgtgttgatccctttatcattctataatggtattctttgtagccttttaaaaaaactattattggtttaaagtctaatttatctgaaataagtatagctactcctgctctttattgtttccatttgaatggactatcttttgccatctcttcatattcagtctgtgtgtgtctttacaggtgaaatgcatttcttacagacaacatataattgggacttgtttttatacattcagccactytcccttttaattggagaatttaatctattttcaagactattattgataaggaaggatgtattgttgccgttttgccacttgttttctgctggttttgtggatccttttttcctttttttttcctctcttactttctttgtggtaaagtgattttctctggtaggatatttggattccatgctatttatttttagcatatctattactggattttgctttgtgattaccatgaggcttataaaaaatgtttataatt

SEQ ID NO: 411301 - DNA, 565 bp, Homo sapiens
tgggttttatatatttgagtgctccagcattagacacatacatatttataattgttacgtcatcttactgtgttgatccctttatcattctataatggtattctttgtagccttttaaaaaaactattattggtttaaagtctaatttatctgaaataagtatagctactcctgctctttattgtttccatttgaatggactatcttttgccatctcttcatattcagtctgtgtgtgtctttacaggtgaaatgcatttcttacagacaacatataattgggacttgtttttatacattcagccactttcccttttaattggagaatttaatctattttcaagactattattgataaggaaggatgtattgttgccgttttgccacttgttttctgctggttttgtggatccttttttcctttttttttcctctcttactttctttgtggtaaagtgattttctctggtaggatatttggattccatgctatttatttttagcatatctattactggwttttgctttgtgattaccatgaggcttataaaaaatgtttataatt

SEQ ID NO: 411302 - DNA, 513 bp, Homo sapiens
ttccgttctgatgcatttcagagccttcaggaagtaatatctaaaccactcttcagtcgtcccaggagtggcatttgtaatttgtactggagatgcagactyatattttggtgaagtcctgtgaggaccatggtcactaaggttgaccatggactaaacaataaagatgatcgagttgacagcaaaaagctaaagaatgttagagaacatttctcccctacatcttacattttcttctgtgttaaagaaactcggtttgacttctgacctttctccactccaggtaagatagagtgactcacctgatttgcatctgtgagaagcgcagactgggcatgtttcaaccatatctacctttcttcctcttgggaatgtgctattctcaggaagtcatgttcctcttggttcttccagggaatgcttgccctattcaattccactgcctgcatcagggtggttatgtccacttagtttacttagcccacctgtgctttgttctaaaccatttcagag

SEQ ID NO: 411303 - DNA, 513 bp, Homo sapiens
ttccgttctgatgcatttcagagccttcaggaagtaatatctaaaccactcttcagtcgtcccaggagtggcatttgtaatttgtactggagatgcagactcatattttggtgaagtcctgtgaggaccatggtcactaaggttgaccatggactaaacaataaagatgatcgagttgacagcaaaaagctaaagaatgttagagaacatttctcccctacatcttacattttcttctgtgttaaagaaactcggtttgacttctgacctttctccactccaggtaagatagagtgactcacctgattkgcatctgtgagaagcgcagactgggcatgtttcaaccatatctacctttcttcctcttgggaatgtgctattctcaggaagtcatgttcctcttggttcttccagggaatgcttgccctattcaattccactgcctgcatcagggtggttatgtccacttagtttacttagcccacctgtgctttgttctaaaccatttcagag

SEQ ID NO: 411304 - DNA, 452 bp, Homo sapiens
gtctcttgatataattttgttcttctccttttccagcattgtggtgctaattaggagacttttatataaaccttttccctaaccatttcagcaagtcacaattcattacacccaaaagcatcagtccaaattctaacataataaaccccatggctacaggccctaccccaccccaccccctgaaaaagagatcaatgatctgtgggtgttggttgcartgtaaaagtcaaaacctgactacagttaagtttgtaggggccctggcactgctacctgcctaggaattgatgacctacggttttcaacctctcctagaaatatgaactgggttcttggcatagagtctccacaaaatcaccagtgcagtacttcctaaatacagatatccctcattctctttctctaagtatgaaatggaatccaaactttggtcaagctttcaaaagacatcc

SEQ ID NO: 411305 - DNA, 529 bp, Homo sapiens
tgaaaatgcagattgttgggcctgacctacagaagttttaacagatatgcaatagatacrgcatgggtcccgggaatttgcgttttaccaagcaccccagtaatccttggactacactttaagaaacttagaatctaattccaattctttccatttataaataaagaaaataaaaatcataatgataataataacagttgtatagttataaggttttcatgcctttttgtgcctttgctttcactctgccaagatctttcttcccttatcttttggttgcttatcaaattattacttatcctgaaagacccagttctggcatctctacctctgaggaatttaataacacatctctttgcttactaaactcccattacatacgtttattgtagctaccaccatatttccttataattattttcatatatgcctatatcctccactaaaagttttgagattaaggtttgtgactcactcacctttcatctccaataactggcttaaatgcttccttcatcccaagaaatta

SEQ ID NO: 411306 - DNA, 545 bp, Homo sapiens
acagttgtatagttataaggttttcatgcctttttgtgcctttgctttcactctgccaagatctttcttcccttatcttttggttgcttatcaaattattacttatcytgaaagacccagttctggcatctctacctctgaggaatttaataacacatctctttgcttactaaactcccattacatacgtttattgtagctaccaccatatttccttataattattttcatatatgcctatatcctccactaaaagttttgagattaaggtttgtgactcactcacctttcatctccaataactggcttaaatgcttccttcatcccaagaaattagatctgattgagtaacctgaatcataggactttatacccaccagagagcacaggacatgacttccattagctgttccaaaacttgagtagcataaccaattttacagccatgaggggtgcaggaggagacacgatgattgaaaatcatctggactccatggaagctccctacaggaaaagtgacatgctgtcactggaaaaaagaggca

SEQ ID NO: 411307 - DNA, 545 bp, Homo sapiens
acagttgtatagttataaggttttcatgcctttttgtgcctttgctttcactctgccaagatctttcttcccttatcttttggttgcttatcaaattattacttatcctgaaagacccagttctggcatctctacctctgaggaatttaataacacatctctttgcttactaaactcccattacatacgtttattgtagctaccaccatatttccttataattattttcatatatgcctatatcctccactaaaagttttgagattaaggtttgtgactcactcacctttcatctccaataactggcttaaatgcttccttcatcccaagaaattagatctgattgagtaacytgaatcataggactttatacccaccagagagcacaggacatgacttccattagctgttccaaaacttgagtagcataaccaattttacagccatgaggggtgcaggaggagacacgatgattgaaaatcatctggactccatggaagctccctacaggaaaagtgacatgctgtcactggaaaaaagaggca

SEQ ID NO: 411308 - DNA, 555 bp, Homo sapiens
acaatctgtcctcccagagccttagcctggcctctccagggccccaagaccagagctcaatgtggaaaagtgactcctcagccataaatccaaagtacctctgctcctacatgtgaggttaaagaatgttccccctaatgattttatttaaaaatataaaaacaatatgcacttctgtcttccagagctattgcagaatagacatacagaaatacyccctcccaaaacaaaatacctaaagttctagaaaattatttgaaaggatctttatttaaaaatatggggctgggcacagttgctcacatctataatctcagcactttgggaggccaagctgggcagatcacttgagtccaggagttcaagaccagcctgggcaacatggtaattccacatatctacaaaaaatacaaaaagttagccaggcatgcgggtgcacacctgtggtcccagctacttcggaggctgaggtgggaggatcacttgagcccgagaagcagaagttgcagtgagccaagatggtgccactgcactccaacctcggcgacagtgcaa

SEQ ID NO: 411309 - DNA, 555 bp, Homo sapiens
acaatctgtcctcccagagccttagcctggcctctccagggccccaagaccagagctcaatgtggaaaagtgactcctcagccataaatccaaagtacctctgctcctacatgtgaggttaaagaatgttccccctaatgattttatttaaaaatataaaaacaatatgcacttctgtcttccagagctattgcagaatagacatacagaaatactccctcccaaaacaaaatacctaaagttctagaaaattatttgaaaggatctttatttaaaaatatggggctgggcacagttgctcacatctataatctcagcamtttgggaggccaagctgggcagatcacttgagtccaggagttcaagaccagcctgggcaacatggtaattccacatatctacaaaaaatacaaaaagttagccaggcatgcgggtgcacacctgtggtcccagctacttcggaggctgaggtgggaggatcacttgagcccgagaagcagaagttgcagtgagccaagatggtgccactgcactccaacctcggcgacagtgcaa

SEQ ID NO: 411310 - DNA, 555 bp, Homo sapiens
acaatctgtcctcccagagccttagcctggcctctccagggccccaagaccagagctcaatgtggaaaagtgactcctcagccataaatccaaagtacctctgctcctacatgtgaggttaaagaatgttccccctaatgattttatttaaaaatataaaaacaatatgcacttctgtcttccagagctattgcagaatagacatacagaaatactccctcccaaaacaaaatacctaaagttctagaaaattatttgaaaggatctttatttaaaaatatggggctgggcacagttgctcacatctataatctcagcactttgggaggccaagctgggcagatcacttgagtccaggagttcaagaccagcctgggcaacatggtaattccacatatctacaaaaaatacaaaaagttagccaggcatgcgggtgcacacctgtggtcccagctacttcggaggctgaggtgggaggatcacttgagcccgagargcagaagttgcagtgagccaagatggtgccactgcactccaacctcggcgacagtgcaa

SEQ ID NO: 411311 - DNA, 588 bp, Homo sapiens
actttctaatttgctcatgattatattctaaatgtatcaatttcatcaaaaaaactttgtagcactacaatcaatgaaaagccactatcatttatcttagagttggaaaaacacaacctttttttttataactcacctgtatcccattttgactctgtacatagcacccatgcaaatcttcttggcacctgagaaacactgctgcagtgggctgggctaagcactagggtgagaccccaaggttctggtttaggctgtgtcacacattgtgtaatcttggacaactttctcagtttcctcaaccattaaaagaatttatactagaaggmcctatccagctttaacattatatcatatacaattcagagctgtgggtcctactcttcctctctgctactgtggctgataacaatctgtatttgtaaaatcactaataacctaaatgggaaaaggagaattcagctaagctacaggacggttcccatttatgctctgtatacatttccctgccaaagagatcctatcaaaattataaagcccaaacaagaacacatattatttcatcttcctttatgttttgccaacaac

SEQ ID NO: 411312 - DNA, 509 bp, Homo sapiens
gggtgcccacgcttgcctgttcccagtgtgtgccttcaagcccgagccgcaaaagagttttccttcatgaaatcgaccaagaaccatttaggacactgttccttggaagggacatattgggatgccaggttcttggctggaatcattaagtgaatttacatcctgatctgctgcacgtgaaacatctatccggataggagaggctttagctgggtcttggatccttatgttttggggtactttgtttctcctttgtgctatctgttggcattcccaattgctgggcaattattcctgtatttcttatgttctctcttacctttcggcctctacctagaaaaattgccccctcttcttctcccatcctccataccagccctttagctttcagtttctacaccattytccctagaaatctctcttgacccccaaagatttttggatggtttcttttccttcagcatcgtgtacttgcctccagtatgaggcttctaacacttgggttacct

SEQ ID NO: 411313 - DNA, 458 bp, Homo sapiens
tttttatttgttttagagcttattaattttctcttctgcagtatccaaactgccattgacctatccattgagttcttatttttttagatatttatttttagctatgggatgcacacttataattttctcataacttctgattctacctcatagttttgcatcatttttccgttatttcctttactttcttgaactctgaaggaacgcttttcagcttgctccactattagctcacttgaggatctgcttctacaatatgattttcccaggggtattggtgccatggtgttgtccgttggcctgtaagtactcggagtcacttataaacaagactacattatctctgtgaagctatacaggctcttcagtattttttcctggaaaactccataaaygctttctggttgaactagttattgaacacctattctttaaggcactgccacggacttaaggaa

SEQ ID NO: 411314 - DNA, 541 bp, Homo sapiens
atagtaatgtcttttatgtaaggaaagcactgtgtctgctgcagcattcactttttagagaatgttgttgatattttattagaagtaagttcgtaaccaacagcaacatttcttaatatccactttcctcctttctactgttcaacagtgtcctcagactcacgcaattgctccaaagcctttctgtttacccctgactctcacattcccacccaaacccaactcactatttgctaaaaacccagaagtgctctctcggcagctgtccaaattctctccgtctgttcagaattgtgctgcgattctgatcttctattcacatcattttttcttccaccaaataartgtgactggtgcttccttctcagaagcctcatttggtgttcccaacacaggagggaatgtggaaaaatataacaagtttctaaattctgacggcgtttctcaagaaattcagcctactgcttaaattctgctctataaagggtaatccaagaactggtcagaaagtatccttcttacctaaaaagaaagaagggca

SEQ ID NO: 411315 - DNA, 597 bp, Homo sapiens
ttttctattgttaaggatcaaattccttaaagtacaattctttcatagataaataaactaattcatggcatctctcttcttttcctgataaaatatgtgctttttagccatggcattttgtaaataaaaccccagcatttgtcacatacaaactgacttgctttggtatggtgaattttaggcatagcaagagaaaaagggaagaagagtttgtgacagggtgataaaatacatgctgcatgtatttggagccaggcatatctctgaagttccctaaattgtcaacataaagcttactggcagttgagtgcaaatggtaacgtgaattcagcaaggaactcatacacacaatttcatgtagaaatgtagtgmaacttaatggattattttgccaggataaagtttttggcttttgaataaagcaaatacatatagataaactgggattaacagtcaactatctctctcacacagaggagcaaatatagttggacaatctgtacactccacaaaggcactgggttaggactgtacaattctgggccctgacataggactgtatacacctggaggaagggtgcttctttctccagagaa

SEQ ID NO: 411316 - DNA, 599 bp, Homo sapiens
ggttttatgtggatataagtttttatttccctgggataaatgcccaaaatgagattgtagtgttatgtggtaagtgtatgtttagttttaaaaagaaactttctaactttcccattttacattcctgtaaacaatgtatgagattcagtttgtcaggatccttgccagaattctgtactgtcatgatttttattttagcttttctgataggcgtgtcgttatatctcattgtggtttcatttacatttctctgatggttagtgatgttgaatattttgtcctgtgcttatttgccatccacagacccttttccaggagatctctctttatatcttctgctcattttctaattgcattattttttttacagttgagttttataatcatttaatattctagatatgagtcttttgtcaaatacacggtttgtaaatgttttctcacagtttgtggcttgtcatttaattctttcagcagagtcttttgtagaacagaatattttaattttgatgatgtcgaatttaccagtgctgattctttrtgggtcatgtttttggtgtaaagctcaaaaacattttctagctcctgaagattttctc

SEQ ID NO: 411317 - DNA, 623 bp, Homo sapiens
tggatttttttcatctcagtttcattcagttcctatctagttttagttatttcttttcttctgctagctttggaattggtttgtccttttttctagcctttttttcctttaggtgcaatgttagattgttaatttttaatttttctaacttcttgatggaggctttttagggctataaacttttaatgctgctttagctgcatcccagagattttggtaagttgtgtccctatttttattaattccaaattattttttaatttctgccttaattttgatggtcatcctggagttattctggagcaagttgtttaatttctatttatttgtgcagttctgagagatctccttgacattgatttctatttttattgcacttcagttgaagagagcasttggtatgatttcaattggtttgaacttattgagacttgctttatgaacaaccatggggttgatcttagaatatgttctgtgtacgaatgagaagaatgtgtagtctgtgtttgttgggtagaatgttctgtagatgtctattaaatccaattcgtcaagtatcaagttcaagtccagagtttctttttcagttttttgtcttggtgatctgtcttaacactgtcagt

SEQ ID NO: 411318 - DNA, 578 bp, Homo sapiens
aagggtcactaagattactgagctcaagcattacaggacatcctattctagaagggacaaggacaaagcctaggctgtcatggacagttcctccttatctcaggatattgcagtcttagtacgttctacccaagaattgcaagcacaaaggggaagatctggtcaccgaagatcatttggggacctgtcctcttgcaaagtatggtattgttacctatagtcatcatgctctacattagatctccagaagctatttgtacartttcaagtcttcaggctagaagtctgtaatggttagttatatgtgtcaacttgactgggttaagagatgcctggatcactggtaaaggaccctcattcaccagtgtaaacaggtatccaatccagtaagggcctgaactgaacaaaaagtcagagaaagggcaaattttttatctctgcttgagctgagacatttatccactcctgtccttggacatcagtccttctgtttttcaggcttttggactcagatcaggaattacaccatcagccacctgattctcaggccttccaactttgactgaattatattaacc

SEQ ID NO: 411319 - DNA, 578 bp, Homo sapiens
aagggtcactaagattactgagctcaagcattacaggacatcctattctagaagggacaaggacaaagcctaggctgtcatggacagttcctccttatctcaggatattgcagtcttagtacgttctacccaagaattgcaagcacaaaggggaagatctggtcaccgaagatcatttggggacctgtcctcttgcaaagtatggtattgttacctatagtcatcatgctctacattagatctccagaagctatttgtacagtttcaagtcttcaggctagaagtctgtaatggttagttatatgtgtcaacytgactgggttaagagatgcctggatcactggtaaaggaccctcattcaccagtgtaaacaggtatccaatccagtaagggcctgaactgaacaaaaagtcagagaaagggcaaattttttatctctgcttgagctgagacatttatccactcctgtccttggacatcagtccttctgtttttcaggcttttggactcagatcaggaattacaccatcagccacctgattctcaggccttccaactttgactgaattatattaacc

SEQ ID NO: 411320 - DNA, 484 bp, Homo sapiens
acatttgagattctacagattcacaaagaaaccttcccagaccttcccttagctgggtaaaagcagacttctgagaaataaggagtgccataaatcccctctccaagggaagttttattgctaaaagaaagcagaaaatcagtgccaagaygaacctgcagacacacaaaatcttgttaagatagcccttattttccattagtttccccctatatttaccttcccatagtttgctgcacttggaagccacacacctttttcctttgttttgtcacatctccacaatttattgttatttgttaaaatggtatataagctttaagccctctctgcttctttgggtcatcacttttctaagaagtctcctgtgtcatgtcaattatatcaaataaaatttgtatgccttctctcctatcactctgtatttcttcagcctagtgtttaggacctcaggcaaagaacctgagagaaaagaggaaaaaaa

SEQ ID NO: 411321 - DNA, 597 bp, Homo sapiens
tttaagggtaattttggtatattttgcaataaaaagaacgtattccaaggtttgtcatttaatttttatgtggaatcattattatgcaaacaaagaatacaccaattaattttgtttcctgaagtcwtttcattcaaagacaacagcaggatattccactgcttcaaataggcattagcagttaacggtacaaaaaaattaacagagaatgctacagttttattctgcccagcaatcagagaaaagcctcctactgtagaatgtgttctatcaaaaggagttgaaaggggcttccttagaccctgaccaccagctccatttgtagttcattgtcccaaatctcttgttctaaaaagcttttgtagagcaacaccttgacaacttgttctgtcacttccattgcactttgtccaatacatcaggtcaatatacttttcttctgactcagcaggatgctggcatcattccaaacctgctgagtcccaatcttggcttcatagaaattttaaaaaataaaatcaatgagagaaaaaaatgtctctggctagctcagctgacatagccacaggcaggagctggctggtgctatttggtatt

SEQ ID NO: 411322 - DNA, 563 bp, Homo sapiens
agcactctgcatgccatatatgaaaagatgaactttttttctcaagaagttgtagtccttattgtttgttggaaaattcatcattgaaaccacaggattctgtagagcagtttgataattactgccttagatatttcctatgtgacttgtgaaaaacataagattatagtcatattgcaactaccccctacatgccagtattcttcaatttgtgaatctttcataagctcatcaatttggaatatggagtcagatggaactggactcaaactctgattccattgcttgctggttgtgtgacctcgagcagtttatataaactctcaagtcagagctttgttaccaatgaagtgaaaaggcaatccatgtgatgtatggtaactttgaggagtaaatgaggtcaatgcaatagattttgacattcagcaaagctctctggagacaccttgtctcttctcctccactatatatgtcatratacacactaatattcagaccacaaaaataaaatgtaactgcgctattgtcttcacttcctactggttttcagaaagcttgtaaag

SEQ ID NO: 411323 - DNA, 602 bp, Homo sapiens
agggaagaattagacattagaataatgtttgcattgtttcaaatatttagcttcattcttctccttaaatttgacacaccaatattatctcccctttgctaaggctggtttgaattggtttaacgttgttagccaacaaaatagccccaagtaaaactctagaatatagctcatgtgaccttaaaagtagagcatcttgcttccaggcaaatggaccccagcagttttttkaactcaaaccagcctagacctcctttttttctaattggggagacacagaggattttcaatgagcaagatactggatatgttgtcagcttctggacaaatatcatcaccccgggctgaattgtactgtccaccaagaggctgtagcagatgcctaatggtcccatcaagtccagtgcttcactttaatgttgacagtgcttaaaggttcccaatttacggtcctaataaacatagcccaagccaaacagctaagaaaattctcaaaatgagacctaggcaatcaaaagtagggcctggtagaaaatatcctgatataataatttttttaaaaaggtataggtgggaggcactgaatattacaagaaagtttt

SEQ ID NO: 411324 - DNA, 586 bp, Homo sapiens
tccttctgttcagctatgatttttgttatttcttgtcttctactagcttttggtttagtttgctcttacttctyttgttctttttgttgtgatgttagattgttgaatttaagatatttctaactttttgatgtgggtatttagtgctataaatttccctcttaacatcctattagctgtgtccatgaggctctgttagattgtgtctttgttctcattagtttcaaataatatctggatttttgtatcacatcattatttatgcaagagttgtttaggagcagcttgtttaatttttatgtaattttatggttttgagaatgtttttcttggccttaatttctatttttattgtgctgtggtccaagaatgtggttggtatcatttcagtttttttgaatttgctgagggttgtcttatatatgattgctggttgattttagagtatgtaaggtggtgataaaaggatgcatattctgttgtctttgagtagttttgtggacatctattaggtccatttagtcaagtgttgagtgtatgtcatgtatctctgctaattttctgccctagtgatctttctaataat

SEQ ID NO: 411325 - DNA, 586 bp, Homo sapiens
tccttctgttcagctatgatttttgttatttcttgtcttctactagcttttggtttagtttgctcttacttctcttgttctttttgttgtgatgttagattgttgaatttaagatatttctaactttttgatgtgggtatttagtgctataaatttccctcttaacatcctattagctgtgtccatgaggctctgttagattgtgtctttgttctcattagtttcaaataatatctggatttttgtatcacatcattatttatgcaagagttgtttaggagcagcttgtttaatttttatgtaattttatggttttgagaatgtttttcttggycttaatttctatttttattgtgctgtggtccaagaatgtggttggtatcatttcagtttttttgaatttgctgagggttgtcttatatatgattgctggttgattttagagtatgtaaggtggtgataaaaggatgcatattctgttgtctttgagtagttttgtggacatctattaggtccatttagtcaagtgttgagtgtatgtcatgtatctctgctaattttctgccctagtgatctttctaataat

SEQ ID NO: 411326 - DNA, 591 bp, Homo sapiens
tgtggttttccattgctgtgtgcataatagctagttcctattggcaaggtaggtcttgcaataaacatcttacctaaaactcaatctagtgttctttatgactttattttattcttctcctactggttttcagttccattaatgaaaacatacctcaatggcatactgaattcagggcaattacaggtattgaatcagaattccttgcaactagtacatgtatacacagacctaacagtggtgctttttacatgtaacccatttccatgaatagtaggcccgcttacgtaaagttaacactattaaaataatgtytccaacagggcattctgtgttctatggtgattcccttggggtgttgtgtgttttatggcacttcccccagcattttctatggtgtttcccacagagtggtccgtggtgatataaacttgggaaatgttggattatagataaagtgcaagattaatgttagataaatttgggaaaagttctgtaagagtgtgtgtgtgtgtgtgtgtgtgtctgtctgtgtgtatcctagggatttaaatatattagtgagtgcattttccaaatgtatttgtaaca

SEQ ID NO: 411327 - DNA, 563 bp, Homo sapiens
ttaatcccacacatctccataactaccatccctcctgccactagctccccaccctccagcccattatgcagtctttaaatcagattctgttatcagtaaaattgtgtatcatcattaacttcttatctaaacattcttttcttattttatttaaacctgaccatccctggaagacattggattcctttgcagacttccaactgttcctttccctcccattccctacatagcagattgttagagatggagtgtcttttttgcttttattaccaatccaagattattcagctctcacacccccaaacccttagctttttgaacagtaagttaacaaacaatacaacccactgtccctccttgttgcastatctgtcaacttcctggtaattcttccttattcactgacaattttaacagttgtttacatttttttcaccatcatagccctaccattcttttggtgacttcagcatcgtatgaatgacccatcccatgctctggcttttcacactcttgagcttcttacctccagtgattacttcttcaacgcaagctcagatacc

SEQ ID NO: 411328 - DNA, 583 bp, Homo sapiens
gtgctcagtcccagagagatgggaattttatctataactccctgactggggctgctaccttttattcagagatgccatgcccagagaggaggaatctagagaggcagtctggctgcagtggccttgctgagctgcagtgggctccacccagtttgaacttctccgcagctttgtttacactgtgagggtaaaaccacctactcaagcctccgcaatggtggatgcctctccccacaccaagctcaagcatcccaggttgacctcagactgctttgctgacagtgagaatttaaagccaggatcttagcttgctgggctccgtgygggtgggacccaccgagccagaccacttggctcccttgcttcagcgcctttccaagggagtgaaaggttctgtcttgctggcgttgcaggttgccactggggtatgaaaataaactcctgcagctagctcagtgtctgcccaaatggctgcccagttttttgcttgaaacccagggccctggtggcataggcacctgagggaatctcccagtctgctggttgtgaagactgtggggaaagcacagtatctgggccagag

SEQ ID NO: 411329 - DNA, 547 bp, Homo sapiens
catttaaaaccatatatttcaattctattttcataaaatgtatttaaaaatatagtgttcacatcaaataagaggtatgatgctattattcccacattatagatgaagaaattgaggcagtagcttgaccaaattcttgtggctaataagaataattgttagaatttaaactcaggtcttttttggtataaaagtttagggcctatttcatataccccattgtgaccaagagcacatatattctctagggagatttccagatctggtttttgtatttcccatstattccatctaattggaaatataaaaattaagagaattgtaatctataaaagcaaaaacaaatatgacaaaatatgcacaagatctacttgaggaaacctataaaactctgatgaaagaaatcaaataactaagaatggtgagatattccatgttcatggatagaagacaatattgtcaagatgtcagttcttcccatcttgatctatagattctgtgcaatcccatttcaaatctcagcagttagtttgcggatattgacaaa

SEQ ID NO: 411330 - DNA, 467 bp, Homo sapiens
tctctggttccttccagcaagagtctgaagctaagaaatggctttgggagaaagatccaatccagagcactaccagcaaaggatgacctcagggtaaagagctcgaggtgcggctataaagctttttgaatggtatttatagtaggacttctaagagtcttgagtataygccttagagctttctactagacatgagggcctctaagcatcttttagatgtttttttgagacaggatctcactgtcattcaggatgaagtgcaccagtgagatcacagctcacggtaacctcaaactcctcagctcaagagatcctcctgcctcagcctcccgagtagataggattataggcattacaccaccacgcctggccaactttaaaaactttttgtagagacatgatctctctctgttgcccaggttggtctctaactcctggcctcaagcaatcctcctgcctcagcttcc

SEQ ID NO: 411331 - DNA, 640 bp, Homo sapiens
tctgtgtatgccataggggtgtgcgtgcatttctcgtatatatacacatccaggaaaggagtgggctggatgggctgtgagagctgaaaggcgggagctgtgatctagggaagagcatcagcacacacccagcccacagcaacctcccaaaggctatcagccctactacacaggcttgacttagggtctagtatctgccttttagaatagtgagtaaaatactcattctagagtccttaattctctttagaaataaactgacacatcaaatgacataaaataaatakgtcactgccttacatctgcagatcaaaatacacttactgataaccacatagaattagtcaatagcacatacattcttagcaaataataatttttttgttgttgttgagatggagtctcactctgttgcccaggctggagtgcagtggcgtgacctaagcccactgcaacctccgcctcctgggttcaagctattctcctcctgcttcagcctcccgagtagctgggattacaggcacatgccaccacgcccagctaatttttttgtatttttagtagagactgggtttctccatgttggccaggctgctctcaaactcctgacctcgggtgatctgcccgcctcggcctccca

SEQ ID NO: 411332 - DNA, 594 bp, Homo sapiens
  misc_feature (1)...(594): n = A,T,C or G
ggctttaattatgactatttaaagccatttccacagttaattgcttaatgctgatgcagtttctgaaaacttcacaagcacaccaaatcctagaatatggtgtcttttgggaggttcatgaaaggatggaaaagaccctgaaaatcactcttgtatacaggtttctggtaactttaaaatcatatcatttggactgggtaataattcctggaactttaatgaaaagactgactgggttacaaaactgctaacccaagtaaaataaaaattaattgaataccaagaaaatactttgcaagattttcacgctaaatcagccaatactgaaattgtttagatatacaaattgaatgaactccatggtctaagtcaaattacctatgttaacccatcagttrtcagcattatgtatctaaattggagaagtaactggtattcgagaagacataagtccaatgttaagcatggactcatggagaaccaggacaggcaccttgtcctttctgactctttaaaaattttattaaatggctgttgcatatcctatgacgtcattcagcagtaataagatattnactgtttccccacattgaa

SEQ ID NO: 411333 - DNA, 544 bp, Homo sapiens
atagtggtaatcaatatcatcgtgatgttaattctttctacccaagaagggtttgctmgtatcttgatttgtacttctcagtggtattttaaacattttttcacataggttttgtacatttcatattaagtttattcctaaatacatatttattgttgctaaaaaatagttttttctgtcattaaagcatttaaatagttgtagtttgcacacatgaacccaaatatttctgttttaattttatttttaattagctgattgcatcctctatttgtaacgttgtcttgtaactttcttagaatttccaaatataaagtatactatctgcaaataatgaccactttgtcttctcttttacatttttttttttactttttgcattggctaatagttttgaaataatattaactagtagtgatatttcacatccttgttttttacctaattttagtggttggaagagattcttgtgttttctcattaaaaatgacactggcctttaatttgagattacacacacacacacacacacacacacacacac

SEQ ID NO: 411334 - DNA, 541 bp, Homo sapiens
tgtgtgataggtgcgctcattattcctggggyatcactgcttctaggccctcttaacaaaaagagtatatacatgtatgtgtgtacacaccctacgtatgagtttgcatttatagatactgctagagatttttaaagttaaggaggtatgtattcttattttattaagggtttcataaaaaataaatggcaaatatttaaaatatatcttttcattttctacagggatgatggctttttacatataaatgtataaattatattaataacattgcattatattcagaaaattatatgaagagattttccagtattgaaccacacttgcatcctttaaataaaccagaacagggtttatttaatcctcatgaggcaggagaacagggaattagggtaaccagaggttaaggcataagcaaaagaacagcaggtgcagccatttctaggcgagattaggcggcatccaggccacatcttcacttctctgataacaagacagaagtttccacttcagcctctgattcaccgcaggccaagtctcc

SEQ ID NO: 411335 - DNA, 534 bp, Homo sapiens
acagtgcctgcaattgacgtaacctaatcaggagccagctggtcaggtgaactggaaatatttgtaagattacagctccctgaaatacagagcagaggaagcaagcctaacatgtatcatactttytgttactacttgtttgtctgctggtcttctctgaaactgtaagtttttggttttgagcttatgtaatgaactagtcccaaaatatactgcttacaacaaaacaaaacaaaacaaaaaacgttgttctgcttatgattaaggaagggctcagctgtgtggtttgctgctcttccccgcaacatttaccacggtcactcccttggctggattcagctggtagttggatggagctgatgctagtacctcaccatgtggcatcttgttctccagcacttctccacatgccgtgggagtgtgtctctgggtagttgcactccttacatggtagctggcttccaaaaggaagaaagcaggaattttcacttttcttaaaaaggtaggctcagaactggcctagtgtgacttatg

SEQ ID NO: 411336 - DNA, 534 bp, Homo sapiens
acagtgcctgcaattgacgtaacctaatcaggagccagctggtcaggtgaactggaaatatttgtaagattacagctccctgaaatacagagcagaggaagcaagcctaacatgtatcatactttctgttactacttgtttgtctgctggtcttctctgaaactgtaagtttttggttttgagcttatgtaatgaactagtcccaaaatatactgcttacaacaaaacaaaacaaaacaaaaaacgttgttctgcttatgattaaggaagggctcagctgtgtggtttgctgctcttccccgcaacatttaccacggtcactcccttggctggattcagctggtagttggatggagctgatgctagtacctcaccatgtggcatcttgttctccagcacttctccacatgccrtgggagtgtgtctctgggtagttgcactccttacatggtagctggcttccaaaaggaagaaagcaggaattttcacttttcttaaaaaggtaggctcagaactggcctagtgtgacttatg

SEQ ID NO: 411337 - DNA, 578 bp, Homo sapiens
taggtttcttactcttagagaagagagttacaaatatgagaaagggaaaaactataaagaacactgtggatttggattggtattggaagtattggtgtgaactcctggtttttaatatggataaataaaaagatgatggatagatgatagagagatagtctaatsatagagagataaataatagatgatagataatagatgatatagactgatagatgatagacagagaaattaataaagatgtacatgtgtatgtacatacatttgttccctagctctgtcccctgagagagcttgagaacattagcaccctagtaccagtgagcacagctagtgcccatgtgtagtgaaaaatttagccctgcccaaagaaaagttctgatctttgtcccccagcttctgagaggcaatctctggatccctggaatatgatgcctgataagattgtgtctgttttcctggggtccttggatcatactggatagcctagcaatgtgatttagggcaggcactgaccacatccataatactcaacgtagggctggccatcctagaaagaacaacaatgtggcttaggg

SEQ ID NO: 411338 - DNA, 578 bp, Homo sapiens
taggtttcttactcttagagaagagagttacaaatatgagaaagggaaaaactataaagaacactgtggatttggattggtattggaagtattggtgtgaactcctggtttttaatatggataaataaaaagatgatggatagatgatagagagatagtctaatgatagagagataaataatagatgatagataatagatgatatagactgatagatgatagacagagaaattaataaagatgtacatgtgtatgtacatacatttgttccctagctctgtcccctgagagagcttgagaacattagcaccctagtaccagtgagcacagctagtgcccatgtgtagtgaaaaatttagccctgcccaaagaaaagttctgatctttgtcccccagcttctgagaggcaatctctggatccctggaatatgaygcctgataagattgtgtctgttttcctggggtccttggatcatactggatagcctagcaatgtgatttagggcaggcactgaccacatccataatactcaacgtagggctggccatcctagaaagaacaacaatgtggcttaggg

SEQ ID NO: 411339 - DNA, 620 bp, Homo sapiens
ttgagtcatctgaaattatgttccaacacttgagctccaaatacttcttagcatgcaagaataattcttagcatggaaggtaattctctaaatcatttctctaaaatcatttaatcatttagagaatcattaaattctctaaaatcattaaatatacattctattttcaaatgttccaaattatatcctttatttttagttgtttttttctttgaatcccccaaaaggatccaatcaaaggtcatgcatcagttgcgtcacaagcctctttagtcttgtaatctagaacctacaatagtccccgcattyatgtcacaacatggactctgtgaagagtccaggaccattgtcttgtagcatattccacattctggatttgtcatgttcattcctcattcctgtatcctttatttttcccataaactgtaaattatgcctggagacttaatacttccagattaaacattttggaaaaaaataccgcacaggtgatggaggtgcttcctatggcattacatcaggaagtacataatttcagattttcccttcctaggtcaagctacatgtgatcatttggttagagtggtgactgcttactctgtgaacttaaacattagatt

SEQ ID NO: 411340 - DNA, 620 bp, Homo sapiens
aggtgatactttgtcactacgtaaatattctattcccccaaaatcttttgtattttttgagacggggtctcactctgttgtccagattgtagtgtagtgacaagacctcagctcactgcaacctctgcctcctaggcacaagcgatcctcccacctcagcctctcaagtagctgggactacaggcacgcaccatcatgcctggctaattaaaaaaaattttttttttgtagagatgaggtcccactatattggccaggctggtctccaactcctgagctcaagcaatcctctcaccttagcctccgaaagtgctgggattacatacagtttttagccactgggcccagtccctccaaaatctttcacagaacaatttcarccttcattgaaaattctcgcagtatcagtcattacatttggggttgcaaaatgtttattttcacattctattatcctttctgcttttattatgtgacattcttttataaagaagggcttccctttttctctttttgtcgaaatatcactctaaattcatgaattttcattcagtcagtatgtgttttagttattaatattatggctgtgtaaaaattatctcaatgaataaacaaaacac

SEQ ID NO: 411341 - DNA, 535 bp, Homo sapiens
aaccagtcacaaacaaaatgcagttgagcaaatctttctaggatcttaattgtttatgcagtaatgggtggcatttatctgatataatttgtcaattgaaaaggcaaacagtttcaattcagtggtggaaaactgcattcaggaacgagtgacagaataatcactgaaggaaaatgttattggaaaccattaagcaagaatttatgggaaaatgaaagacaagctgtcccctcatcccactctgttgagctttccctggaaactgcaagctgccaatgagaagccaagttgaaatgcaaggccagccaatcaaacagtttatcacgtaagacaacgtaggcraaacaaaggtactatggctgaaagggaacagggaggaaggactcaggaagccttgtgtgctcagtctaaacacctggctacccagcaaaaagcaggtatatttcatctaaaaattaggtcagaatactagtcaaatccaattataaaacacctcccttttttcctcttctgcaaaacatatttcacgataaaa

SEQ ID NO: 411342 - DNA, 641 bp, Homo sapiens
ttaactttttaaagaaaagatagtaatagtcttttttccaacattaaccttctgaggacataagaaaatatgtacacaattaatgaygccaaagatttataggaacacggtgacctgactgacattatctgaagtcaactgaccaagaataaagaagctttacaacctcctcggacccttgctgctacccagatgtctgtggttattggtcccctcttggtctcaatcccctccctcttctgccttctactaacgtaaaaggagcctaaaattctattaacttgagatggttctttaggacactagtctgccatctccttgcttcgctgctctatgaataaagttacctttcttgccccagcaccttgtttctgtacttattggctgctgcacagtgtactgtaggagcttggattgggctacactaagagggagataagcagatgaagggtaaagtccagaatggggaaattgaacataactgaaaaaaaatgcaccatccttagcttcccgaggctcacaatggtatgcagggctcagtttgagtgtgttgatgggaagcagttgcttggctgtgaaaaacggaaacaatctttggtcatgctcattcccatcctcagtcctggatttggctgctatgt

SEQ ID NO: 411343 - DNA, 447 bp, Homo sapiens
atggaaaaaaaaaaaaaaaccatccgtaggcaggtaaagctattgtaacaatgaaaaggaggcctagcgtgagtaactttttctcctaacccccctgcacgcagtgatgtcttttaggttcattgcttttacttatctctacatgtatattaaggtaactatgggaagaatttagtttatagtttaactttttaaagaaaagatagtaatagtcttttttccaacattaaccttctgaggacataagaaaatatgtacacaattaatgatgccaaagatttataggaacackgtgacctgactgacattatctgaagtcaactgaccaagaataaagaagctttacaacctcctcggacccttgctgctacccagatgtctgtggttattggtcccctcttggtctcaatcccctccctcttctgccttctactaacgtaaaaggag

SEQ ID NO: 411344 - DNA, 641 bp, Homo sapiens
ttaactttttaaagaaaagatagtaatagtcttttttccaacattaaccttctgaggacataagaaaatatgtacacaattaatgatgccaaagatttataggaacacggtgacctgactgacattatctgaagtcaactgaccaagaataaagaagctttacaacctcctcggacccttgctgctacccagatgtctgtggttattggtcccctcttggtctcaatcccctccctcttctgccttctactaacgtaaaaggagcctaaaattctattaacttgagatggttctttaggacactagtctgccatctccttgcttygctgctctatgaataaagttacctttcttgccccagcaccttgtttctgtacttattggctgctgcacagtgtactgtaggagcttggattgggctacactaagagggagataagcagatgaagggtaaagtccagaatggggaaattgaacataactgaaaaaaaatgcaccatccttagcttcccgaggctcacaatggtatgcagggctcagtttgagtgtgttgatgggaagcagttgcttggctgtgaaaaacggaaacaatctttggtcatgctcattcccatcctcagtcctggatttggctgctatgt

SEQ ID NO: 411345 - DNA, 641 bp, Homo sapiens
ttaactttttaaagaaaagatagtaatagtcttttttccaacattaaccttctgaggacataagaaaatatgtacacaattaatgatgccaaagatttataggaacacggtgacctgactgacattatctgaagtcaactgaccaagaataaagaagctttacaacctcctcggacccttgctgctacccagatgtctgtggttattggtcccctcttggtctcaatcccctccctcttctgccttctactaacgtaaaaggagcctaaaattctattaacttgagatggttctttaggacactagtctgccatctccttgcttcgctgctctatgaataaagttacctttcttgccccagcaccttgtttctgtrcttattggctgctgcacagtgtactgtaggagcttggattgggctacactaagagggagataagcagatgaagggtaaagtccagaatggggaaattgaacataactgaaaaaaaatgcaccatccttagcttcccgaggctcacaatggtatgcagggctcagtttgagtgtgttgatgggaagcagttgcttggctgtgaaaaacggaaacaatctttggtcatgctcattcccatcctcagtcctggatttggctgctatgt

SEQ ID NO: 411346 - DNA, 577 bp, Homo sapiens
tctacaccataaaatccgtatgaaaatctttgacttgcaagtatttagcatttgcttgagtgaaccacataaatctcagccataaggataatctctcagagcatcatcagaaagataatggtgggttacaatgaagatgcagcatccgactaaggtttcacaataaaatgtaaaacaytcagagatagcccttcatgcaatgagagtgctgaataataacaatgatctcatttaaatttatgtatcggataatgaaatgaaatggccccatcatttccagaggaatctgtagaaatcactggtttcattatttcatgtcctgtgctctagagctcacctggcgtgtaaatggtctcatttatatcctgtgttccttccacatcccttacactctcatcgccatagtcactaatgtactttaatgagagcaaagcatggggagactcaaatgaaccaataaaaatagaagggataaagtattattaggtggaatgaatacaaaactaaacttatgctatgtgaagtgctgttgattttattgatgcaggcttacaaaggcatgccaaattcatgcttt

SEQ ID NO: 411347 - DNA, 459 bp, Homo sapiens
actttattttgttttaagtgcaaatttataagaaatcttgacccttgtacatgttagaaatkcttgttccctggtgccgtaaagaagtagcacttgaacataaatttaatttcctcacaaggccatttttttcctttctgcagaaagggtacacttgccagcagttttgccatgacagtacaccgaacaaaggagacagggtcacttataacctgacacggccaccctactgctgtgtcccgtttcctttggctggaacgggacctcagattctgtatttgtcccgattggctagcaacttagaacttttgaaaagaggcaaaggcagaggagaacaaaggaaggaggaagtaacttgtggaatggtgagaaaggtaaaaagaccttcaaataaggaagaagaacaggctttgacctaatgcttgcttggaccagtataagcatgccagggctaagttg

SEQ ID NO: 411348 - DNA, 459 bp, Homo sapiens
actttattttgttttaagtgcaaatttataagaaatcttgacccttgtacatgttagaaatgcttgttccctggtgccgtaaagaartagcacttgaacataaatttaatttcctcacaaggccatttttttcctttctgcagaaagggtacacttgccagcagttttgccatgacagtacaccgaacaaaggagacagggtcacttataacctgacacggccaccctactgctgtgtcccgtttcctttggctggaacgggacctcagattctgtatttgtcccgattggctagcaacttagaacttttgaaaagaggcaaaggcagaggagaacaaaggaaggaggaagtaacttgtggaatggtgagaaaggtaaaaagaccttcaaataaggaagaagaacaggctttgacctaatgcttgcttggaccagtataagcatgccagggctaagttg

SEQ ID NO: 411349 - DNA, 459 bp, Homo sapiens
actttattttgttttaagtgcaaatttataagaaatcttgacccttgtacatgttagaaatgcttgttccctggtgccgtaaagaagtagcacttgaacataaatttaatttcctcacaaggccatttttttcctttctgcagaaagggtacacttgccagcagttttgccatgacagtacaccgaacaaaggagacagggtcayttataacctgacacggccaccctactgctgtgtcccgtttcctttggctggaacgggacctcagattctgtatttgtcccgattggctagcaacttagaacttttgaaaagaggcaaaggcagaggagaacaaaggaaggaggaagtaacttgtggaatggtgagaaaggtaaaaagaccttcaaataaggaagaagaacaggctttgacctaatgcttgcttggaccagtataagcatgccagggctaagttg

SEQ ID NO: 411350 - DNA, 459 bp, Homo sapiens
actttattttgttttaagtgcaaatttataagaaatcttgacccttgtacatgttagaaatgcttgttccctggtgccgtaaagaagtagcacttgaacataaatttaatttcctcacaaggccatttttttcctttctgcagaaagggtacacttgccagcagttttgccatgacagtacaccgaacaaaggagacagggtcacttataacctgacrcggccaccctactgctgtgtcccgtttcctttggctggaacgggacctcagattctgtatttgtcccgattggctagcaacttagaacttttgaaaagaggcaaaggcagaggagaacaaaggaaggaggaagtaacttgtggaatggtgagaaaggtaaaaagaccttcaaataaggaagaagaacaggctttgacctaatgcttgcttggaccagtataagcatgccagggctaagttg

SEQ ID NO: 411351 - DNA, 697 bp, Homo sapiens
aggaaactgctcactttttaactcaattttttgaaaagagctcaaatgattttactttcaacacacagctattaatagatttggaaacactactgtgcctaaaaacatagggaagctgttgaaatattgtgatttttttatacccttttgatgtcacctcttattcatagtcatctgctgggcagttgggctggttcagaaaactaaatcagagtctckaagcagtaagaccctggtgagtctgtgaatcctaaatctgaaactcaatattgaacctcggctttctggatcatctccatcttgtcccagaaggccattataaacatcacacaggatttcaacagagacaaaagagcttgcatcaaattctgaaatagcataactactgcaatgtttttcagtttggaggaaaacctgaaattattatgaatgataattagttatggttttaggtctgtgtttgtcaaatatgtacgccactcacaaacaccctaacctctcacagctcaggctctggagcacggaacagcagcaccaaccagagctgaacgattgtcagaaacagagaatctctggactcactccagaactgctagatcacggtctgcattttgaaaagatctccagtgagtcctgtgcacatgacagctggagaggaacgtttaatagataaatatgtacttcggtcaaaattcca

SEQ ID NO: 411352 - DNA, 602 bp, Homo sapiens
cacaacactgccaatcaatatgtaaccttaactttcttgtttgggtttcctagatgttcccaaatttctataacatacctacattgctttttataatacaaatttcatactagcattcatttttaaagtagcttatttttcaaattgttttgttgtatacacagttctctttttattaaaatattattaagactataacaaatatcttaaaaaccacaacttaacccaagaagtttattaaaaactaatcatacgcttcttccttatgccatctcccttctccccccgagattatgtctacatttaaaatatatgtatgtatttgtccatattttrcatatatgtccaaattgtcatttacttttctactgtttttattttttggaggcataatagatgtacatatttccatgctacatgtgataattcaatacattcatataatcaaattggggtaattataatatccatcaccttaaaatttatcatttatgctagaaaataaaaataactcatatgtatacagttaagaagaaataaaagcacatttcaaaataaaatattcagaatattcagtaaaatttaaattgtgctagagaaca

SEQ ID NO: 411353 - DNA, 470 bp, Homo sapiens
ttttttgtcttttaatttaaaaaatactggcacgacaacacagtgacttagatatattgtgacagtttcaccagtacgttactaaggggaggtctaaattattaagttttattttgttactcaggaaaatcctgcttttcagagaagataaatgcaataaaatctctctattaccccacattacctgggattcaacttcggaatttatgtttgtcattaaacaagctgaatgcattgktatcttatgataaataatataaaaatgactcaattgaggatgtttcctggtgttcgatttttatcaactgttttgatttaacctttgtacaatcaacattttaaataattttagttctatattttataaagtgtatgcaaagcactttatcacccttgacaactgcagaactagaagagtgaagtattcttgtagtgagtgaactcaattttgttaaaaaaaaaaaagtcag

SEQ ID NO: 411354 - DNA, 609 bp, Homo sapiens
gacatggcagctaaatgcaacctgtgatgctgaattaggttctgrgccagaaaacacaatggtggaatgttaggtaaaatttgaattaggtctgaaaattaggcaatgatattaaatcagagttaatatattgactttaatagttatactgtggttgtgaaagaacatgttcttgtttttgctctcaactatttcaagaaaaatatacagtgagaaagaataaagcaaatgtgataaaatattaatatttggggaatcttagtgaaggctacacagaatttttttactgtttatgcaacacttttgtaagtctgaaatggtttgaaaataaaaagttaagaaaactgtctctcaggctggtgtttttaaaaggtgtctccttcaaagagagagcaaagtagagaaatcaaacctgtcagtttgagccccggataattaacttttgcataatgccttattttttaaagaataatttttgtaccaaaataagatgtgttcctctctacgactgaatattgacaattaactgagtgggtgattcttcttcatattcaactgataaaataagcctttctagttttggttttttttccctgaaagttttgatgt

SEQ ID NO: 411355 - DNA, 609 bp, Homo sapiens
gacatggcagctaaatgcaacctgtgatgctgaattaggttctgagccagaaaacacaatggtggaatgttaggtaaaatttgaattaggtctgaaaattaggcaatgatattaaatcagagttaatatattgactttaatagttatactgtggttgtgaaagaacatgttcttgtttttgctctcaactatttcaagaaaaatatacagtgagaaagaataaagcaaatgtgataaaatattaatatttggggaatcttagtgaaggctacacagaatttttttactgtttatgcaacacttttgtaagtctgaaatggtttgaaaataaaaagttaagaaaactgtctctcaggctggtgtttttaaaaggtgtctccttcaaagagagagcaaagtagagaaatcaaacctgtcagtttgagccccggatarttaacttttgcataatgccttattttttaaagaataatttttgtaccaaaataagatgtgttcctctctacgactgaatattgacaattaactgagtgggtgattcttcttcatattcaactgataaaataagcctttctagttttggttttttttccctgaaagttttgatgt

SEQ ID NO: 411356 - DNA, 609 bp, Homo sapiens
gacatggcagctaaatgcaacctgtgatgctgaattaggttctgagccagaaaacacaatggtggaatgttaggtaaaatttgaattaggtctgaaaattaggcaatgatattaaatcagagttaatatattgactttaatagttatactgtggttgtgaaagaacatgttcttgtttttgctctcaactatttcaagaaaaatatacagtgagaaagaataaagcaaatgtgataaaatattaatatttggggaatcttagtgaaggctacacagaatttttttactgtttatgcaacacttttgtaagtctgaaatggtttgaaaataaaaagttaagaaaactgtctctcaggctggtgtttttaaaaggtgtctccttcaaagagagagcaaagtagagaaatcaaacctgtcagtttgagccccggataattaacttttgcataatgccttattttttaaagaataatttttgtaccaaaataagatgtgttcctctctaygactgaatattgacaattaactgagtgggtgattcttcttcatattcaactgataaaataagcctttctagttttggttttttttccctgaaagttttgatgt

SEQ ID NO: 411357 - DNA, 592 bp, Homo sapiens
caccaacagagacttttcctttataactggtggattcatttttggggaatggtgggaaataaaaagatctatgttgaaaatgcctcaggacatttgtctcttgacaatatttcaaaataatgcacttttcaaaactatactctcaactcttttcttacaaatacccaaatgatctattctgtttttgcgtttcttcccccgccaatccaataattagagctagttctatgagttggccacagctctgacagttgattctgggttgtgttttctaattcatccccacaatcagtgtttytgaacgctgtctctcactttgttattcttcgacattacaaggatgacaaagatatctaataattatccatctaatgcggttcacccgcaagtcaaatgtgaaatgtcagatgtccaggacatccagagagagctctataatccctcattttataaatgtttaagacaatgtgaacaggctgaccccagataattataaaattaagcctttgtaagtgatacacaatttgaacaatgattgccaataatttgaccatgagaaagacaaaaaaaaaaaaaaaaaaacagaagctaa

SEQ ID NO: 411358 - DNA, 540 bp, Homo sapiens
ttttggattctttcacacaaagttatgtttgtgacattcacctacattgttgtgcacatttgtaatgtgttccttttcattgctgtgtagtattttgttttgtgaacataccacaacttatttatatccctgagggcaattacataattttcagtttgcaaaggttacaaatagtgctactatgaacattctagccttgggtgaatattgggtatatgcctaaggatgcratcgtccactcacagtgtatgcatgtgctcaaccgaggcagagagagtctaatagttttgcaaaataattctactgatttgtaataccaccgtagtgtaggaaatttccagttgctccacataaccaacatttggcaggtttcctgtttttaaaattgtattttaaccattctagtggggatgcagtattctgtcatcgtcgagattttatttgaatttatctgactgctaatgaagttgaatgactttgtgtgtttattggattgatgatttggtgtctttttctaataagtgtcagttcaaatcaatt

SEQ ID NO: 411359 - DNA, 526 bp, Homo sapiens
cttctctaaccctgctgctgctttattaactgagtttatgaaataatcacaatcttttgttgtcatttcaacaatgttcacagcatcttcaccaggagtagatttcatctaaagaaaccactttctttgctcatccataagaagcagctcctcgtccattaagatcttatgacagtgcagcaattcagttctacttctaattctgtttctcttgctgttttcaacatgtctgaagttacttcctccactgaaacctttaacccaacaaagtcattcacgaggattgaaatcaacttcttttaaactcctgttcgtgctggtattttgacctcttcccatgaatcacaaacattcttaatatcaytggaatggggaattctttccaaagggttttgttttaccttgtctagctagatccatcaatggactcactctccatgcagcaatagccttatgaaacatatttcttaaataacaataattgaaagtcaaaagtttttcgtgtttcttgggctgcagaatggat

SEQ ID NO: 411360 - DNA, 495 bp, Homo sapiens
aggctgagacagttatcctctcaacctcgtcctggcttggaggagatgtagacccaaaaggtgtcagtgttgaggcactttccctcattgaagtctgtaacttttacttctcctagggtgattcgtgtgggcatccttgctgggaaatgccagtstgactcacattcgtcaggaggaacccagaccaaatctacaggaaaaatgagctcaagggtgccgagggcaggatacgcagaaaaaggcagaacacacggcgtgctcctgagacagcagtgcggaaatatccagagagctttctcccagaagcaggaatgttcccacagcgtggtcgctctccccaggtatttcaaccctagggaggtgggtgccttttcgtggcatagagggaaaacttctaataaggccctctgttaggctcaggagcttgtttgtgctgcaggaatgggtgaagagtcacctgggaaccctccttttcctaacatcatcattcctcct

SEQ ID NO: 411361 - DNA, 495 bp, Homo sapiens
aggctgagacagttatcctctcaacctcgtcctggcttggaggagatgtagacccaaaaggtgtcagtgttgaggcactttccctcattgaagtctgtaacttttacttctcctagggtgattcgtgtgggcatccttgctgggaaatgccagtctgastcacattcgtcaggaggaacccagaccaaatctacaggaaaaatgagctcaagggtgccgagggcaggatacgcagaaaaaggcagaacacacggcgtgctcctgagacagcagtgcggaaatatccagagagctttctcccagaagcaggaatgttcccacagcgtggtcgctctccccaggtatttcaaccctagggaggtgggtgccttttcgtggcatagagggaaaacttctaataaggccctctgttaggctcaggagcttgtttgtgctgcaggaatgggtgaagagtcacctgggaaccctccttttcctaacatcatcattcctcct

SEQ ID NO: 411362 - DNA, 495 bp, Homo sapiens
aggctgagacagttatcctctcaacctcgtcctggcttggaggagatgtagacccaaaaggtgtcagtgttgaggcactttccctcattgaagtctgtaacttttacttctcctagggtgattcgtgtgggcatccttgctgggaaatgccagtctgactcacattcgtcaggaggaacccagaccaaatctacaggaaaaatgagctcaagggtgccgagggcaggataygcagaaaaaggcagaacacacggcgtgctcctgagacagcagtgcggaaatatccagagagctttctcccagaagcaggaatgttcccacagcgtggtcgctctccccaggtatttcaaccctagggaggtgggtgccttttcgtggcatagagggaaaacttctaataaggccctctgttaggctcaggagcttgtttgtgctgcaggaatgggtgaagagtcacctgggaaccctccttttcctaacatcatcattcctcct

SEQ ID NO: 411363 - DNA, 495 bp, Homo sapiens
aggctgagacagttatcctctcaacctcgtcctggcttggaggagatgtagacccaaaaggtgtcagtgttgaggcactttccctcattgaagtctgtaacttttacttctcctagggtgattcgtgtgggcatccttgctgggaaatgccagtctgactcacattcgtcaggaggaacccagaccaaatctacaggaaaaatgagctcaagggtgccgagggcaggatacgcagaaaaaggcagaacacacggcgtgctcctgagacagcagtgcggaaatatccagagagctttctcccagaagcaggaatgttcccacagcgtggtcgctctccccaggtatttcaaccctagggaggtrggtgccttttcgtggcatagagggaaaacttctaataaggccctctgttaggctcaggagcttgtttgtgctgcaggaatgggtgaagagtcacctgggaaccctccttttcctaacatcatcattcctcct

SEQ ID NO: 411364 - DNA, 534 bp, Homo sapiens
aacacaaaaatccagatatataatagataaattaggccattttattttactataaaatagcctttcctttaaaaaaaaaaaaaagattcatggcagaatttattttaaaacaaaaacaacagcatctctaatatgttttaaatatattgtttgtggatatactctctcagaaacacataaagttctacacgtactatgattaagaattcccaagtttcattcattattcatgaatgttactgggatgttttttagatgttaaactatttcttgacaaaagattgaaggagtttttaaatccctcataacaattatattactataataccacaattatattaaaatgtttatatttcttagtctttatagttaasttgaaatatacatatgtatacagcttaacgtagataaatttgttctgctttttcacagatcagacattatacccttttttctgttttactatagagtatttatggtgattaattttaattttatttagttgatcatatattttctgagtctctgaatgtt

SEQ ID NO: 411365 - DNA, 642 bp, Homo sapiens
ttaaacctgaacactttaaaactgcttcagttatctgttttagatcttgaaatatgactaaacaagaatgggtatgttgaaactcaggtagacacagaggaaatgttggccatttatgagtaggaagaggggaatatggaatgagtgattgtgaacatgtcggcaggttgcagtttgcattttagtatgaaggctaccagacaaacatgtcaaacatgaagcatattgtaaatatgagcacctgttttaaaccgattattggaattgaattgagttgyactttgttttccaaatcacaaggctcaatgctgatgattcctattcatggagaagtcctttcctggttgattttattgtgcttgttttaaatgttatttcaaataggagggaggaagaaaccaaacaaattctacctagattgtctttgttttcaatttttttcatgctgaacaacacttttagattagccaggaccaatctgcttaatgtaggttgtatgactttaactttaaacactcaggaatttgtttaaattattacctatctcgctatgtctaacattagagttcatggaagcaaaagctgagccgagaggtggataacctaagttataccacaggttctgccaaaagcaaatcctta

SEQ ID NO: 411366 - DNA, 636 bp, Homo sapiens
tgagaccacatttcatcgctaatttcaaaacaggaagatggaagcagtgtgtcggcactccactctcaycctagaatttcttcagcaaccttctgccttagtgcatacaaagaaagtgccctccacttctaatttgtagtcatctctgttactgtgtggtggagtcatcactagctactcttacgtgtttctaataccagcattattcactagacagtaatgtaatcatcttagcatacttgcttgttgagcatatttctgggtataacataatgatagatattatcaggcttctaagaggacacatgaatgacaagctgatgttaccatgaagctgtcgcataaagatgtgactaaacagggttatatatgcaaccgtgacgcactgaagtcttatttaggtggagaaaactggccatcccagactacgccacaacctaggtacctccaccctgaaactcaataggcaaataatgcgaacttctttcaataccagctaattctactgtacggataatttctaacttgattggtggctttctttcacatgccttatcctggatatttttgttttcacctgggtggattaggcaccctctccacaatgtctactgtggggccaatttccagtctcta

SEQ ID NO: 411367 - DNA, 636 bp, Homo sapiens
tgagaccacatttcatcgctaatttcaaaacaggaagatggaagcagtgtgtcggcactccactctcatcctagaatttcttcagcaaccttctgccttagtgcatacaaagaaagtgccctccacttctaatttgtastcatctctgttactgtgtggtggagtcatcactagctactcttacgtgtttctaataccagcattattcactagacagtaatgtaatcatcttagcatacttgcttgttgagcatatttctgggtataacataatgatagatattatcaggcttctaagaggacacatgaatgacaagctgatgttaccatgaagctgtcgcataaagatgtgactaaacagggttatatatgcaaccgtgacgcactgaagtcttatttaggtggagaaaactggccatcccagactacgccacaacctaggtacctccaccctgaaactcaataggcaaataatgcgaacttctttcaataccagctaattctactgtacggataatttctaacttgattggtggctttctttcacatgccttatcctggatatttttgttttcacctgggtggattaggcaccctctccacaatgtctactgtggggccaatttccagtctcta

SEQ ID NO: 411368 - DNA, 636 bp, Homo sapiens
tgagaccacatttcatcgctaatttcaaaacaggaagatggaagcagtgtgtcggcactccactctcatcctagaatttcttcagcaaccttctgccttagtgcatacaaagaaagtgccctccacttctaatttgtagtcatctctgttactgtgtggtggagtcatcactagctactcttacgtgtttctaataccagcattattcaytagacagtaatgtaatcatcttagcatacttgcttgttgagcatatttctgggtataacataatgatagatattatcaggcttctaagaggacacatgaatgacaagctgatgttaccatgaagctgtcgcataaagatgtgactaaacagggttatatatgcaaccgtgacgcactgaagtcttatttaggtggagaaaactggccatcccagactacgccacaacctaggtacctccaccctgaaactcaataggcaaataatgcgaacttctttcaataccagctaattctactgtacggataatttctaacttgattggtggctttctttcacatgccttatcctggatatttttgttttcacctgggtggattaggcaccctctccacaatgtctactgtggggccaatttccagtctcta

SEQ ID NO: 411369 - DNA, 636 bp, Homo sapiens
tgagaccacatttcatcgctaatttcaaaacaggaagatggaagcagtgtgtcggcactccactctcatcctagaatttcttcagcaaccttctgccttagtgcatacaaagaaagtgccctccacttctaatttgtagtcatctctgttactgtgtggtggagtcatcactagctactcttacgtgtttctaataccagcattattcactagacagtaatgtaatcatcttagcatacttgcttgttgagcatatttctgggtataacataatgatagatattatcaggcttctaagaggacacatgaatgacaagctgatgttaccatgaagctgtcgcataaagatgtgactaaacagggttatatatgcaaccgtgacgcactgaagtcttatttaggtggagaaaactggccatcccagactacsccacaacctaggtacctccaccctgaaactcaataggcaaataatgcgaacttctttcaataccagctaattctactgtacggataatttctaacttgattggtggctttctttcacatgccttatcctggatatttttgttttcacctgggtggattaggcaccctctccacaatgtctactgtggggccaatttccagtctcta

SEQ ID NO: 411370 - DNA, 524 bp, Homo sapiens
gccaatcatggacattttctcagttgagttagtactaaaattataatttaaaagagaagaatatccagaatttattggtcaacattaagtaacgtctttttgtttaaccaaatcagaacaaatgacttctcaccgatgtttccatgtgtatgtgtgcaattccacacccaggtatatcagagtcctgagtgactgcagtgttgggaccccgaaggaggagaatccaggtgtgaagttatgctactgcggggccctgctcaggctggcagttgagatttttgttctctggtgtctttctgtgtcccttgtaacaagatttgtgctagaagatgycacttttggcaagcaccatgtcactaacagttctctagggaatcagttgattactttatgcaagtttgtatattgcacatataatgttttatataacaaacacaagtggccattgtatgttaagttgaagacaggttagacttgccattagaggcgtatcaaaggataatggaaggcttattaaacaaact

SEQ ID NO: 411371 - DNA, 488 bp, Homo sapiens
ttaaatccaacataaaagttgatcatctaaaaaaagttctttagattttcttagtaactgtaaatactggtaaggccacaattaaccaggcaggtggcgtcaagtcactgtgcaatgtaagaccccccaacacgggtccaatgacggtgactttcctacgtgtgaaagatctmtgtgcacctgctacccagcgtttctcaacattcagcatgcattcccatctcactgggagggcttgtgcaaacacagatggctggaccccacacccagagtttccacttcagtgtgactgaaaatttacatttctagcactgtcccaggcaatgctcatactgccagtccaggaaccactctttgagaaccacactcagtatctccttatccacatccaagtccacgcagataatagactcgtcttaaaattggatgctcatcaccctaaaccttgctcagaattcttcaccaccctctactgtagttaacaaagt

SEQ ID NO: 411372 - DNA, 488 bp, Homo sapiens
ttaaatccaacataaaagttgatcatctaaaaaaagttctttagattttcttagtaactgtaaatactggtaaggccacaattaaccaggcaggtggcgtcaagtcactgtgcaatgtaagaccccccaacacgggtccaatgacggtgactttcctacgtgtgaaagatctctgtgcacctgctacccagcgtttctcaacattcagcatgcattcccatctcactgggagggcttgtgcaaacacagatggctggaccccacacccagagtttccacttcagtgtgactgaaaatttacatttctagcactgtcccaggcaatgctcatactgccagtccaggaaccactctttgagaaccacactcagtatctccttatccacatccaagtccacgcagataatagactcgtcttaaaattggatgctsatcaccctaaaccttgctcagaattcttcaccaccctctactgtagttaacaaagt

SEQ ID NO: 411373 - DNA, 576 bp, Homo sapiens
ttccaaaactgagaagagatataacatctcaggttcaagaaatcctaaaggataagctttacaaaaatcaacaacatacccacttccacatagacacatcattgaaaagctgctggggctggtgcagcagtggctcaygcctataatccctgcaccttgggagactgaggtgggaaggtcacttgaacccaggagtttgggaccagcctgggcaacacagcgagaccccatctctaaaaaaaaaaaaaattagccaggtgtgatggtgccacctgggaggctgaggtgggaaaatcacttgagcctaagaggtcaaggctgcaatgagcagtgactgtgccactgcacttcagcctaggtgatggagtgagaccctgtctcaaaaacagaacaaaacaaaacaaaacaaaaaccctgctgaaaaccaagggaaaaatctgtaaaatcagctgggggccaaggagagagacacacaacattcaaaatagggatcgacagctgacttttcaacagaaatggtagaaaccagaagacaacagaatcacatccttgaagatatgaactgctgaaagaaaa

SEQ ID NO: 411374 - DNA, 591 bp, Homo sapiens
tttcgtctcctaccatcgccctggggtcttctctcctccaccagcacagggcccccaaaccctggcccagtttcccaaaaagaggcccaccattttgttttccctttagccatcttctggtcacctcacctccactggcctgccttgctgaaacaccagaaaaagagaacaggaggcagcctgccccaaatgagagggaggccacagctttttccggggktgggggaagcatcaggggacagtgggtgggtcgggggggtaattttaggggtcactagggctgaggagaaacccacccaaggctcatggggccaaatgatctgccaaacacttcggcttccctctgggtaaaatacagggtgccctgttaaatttgcatttcagataaattagataatgttttagtataagtgtgtcccaaatattgcatgagacatactcaaaaacatttatttttaaaaaaatctttcattgtttatctgaaattcaaatttaactgggtgtgctgtatttttatctggttaaacctggcaaccccacccccccaccagtggtgaaatgcatggttggtgaccacacaattaataaaca

SEQ ID NO: 411375 - DNA, 554 bp, Homo sapiens
gtattaagctatactcatcactttcttatttttttattttttttatttttttgagacggactcctgctctgtggcccaggctggagtgcagtggcacaatctcggctcactgcaacctccgcctcccgggttcaagygattctcctgcctcagcctcctgagtagctgggactacaagcacatgccaccacgcccggctaatttttgtatttttagtagagacgggtttcaccatgttggccaggctgacatcaaactcttgacctcaggtgacccacccgccttggcctcccaaagtgctggaattacaggtataagccactgtgcccagcctatttgttatttttttgagataaggtctccctctgttgcccaggctggagtgcggtggtgcgatcactgctcactgcagcctcgacctcctgggctcaagtgatcttcctgccttggcctcccaaaatgctgggattacaggtgtgagccaccacacatgggccccactttatatttaggatggcaaacaaccagtcaacaggcgtgttttgtttggcctg

SEQ ID NO: 411376 - DNA, 554 bp, Homo sapiens
gtattaagctatactcatcactttcttatttttttattttttttatttttttgagacggactcctgctctgtggcccaggctggagtgcagtggcacaatctcggctcactgcaacctccgcctcccgggttcaagcgattctcctgcctcagcctcctgagtagctgggactacaagcayatgccaccacgcccggctaatttttgtatttttagtagagacgggtttcaccatgttggccaggctgacatcaaactcttgacctcaggtgacccacccgccttggcctcccaaagtgctggaattacaggtataagccactgtgcccagcctatttgttatttttttgagataaggtctccctctgttgcccaggctggagtgcggtggtgcgatcactgctcactgcagcctcgacctcctgggctcaagtgatcttcctgccttggcctcccaaaatgctgggattacaggtgtgagccaccacacatgggccccactttatatttaggatggcaaacaaccagtcaacaggcgtgttttgtttggcctg

SEQ ID NO: 411377 - DNA, 554 bp, Homo sapiens
gtattaagctatactcatcactttcttatttttttattttttttatttttttgagacggactcctgctctgtggcccaggctggagtgcagtggcacaatctcggctcactgcaacctccgcctcccgggttcaagcgattctcctgcctcagcctcctgagtagctgggactacaagcacrtgccaccacgcccggctaatttttgtatttttagtagagacgggtttcaccatgttggccaggctgacatcaaactcttgacctcaggtgacccacccgccttggcctcccaaagtgctggaattacaggtataagccactgtgcccagcctatttgttatttttttgagataaggtctccctctgttgcccaggctggagtgcggtggtgcgatcactgctcactgcagcctcgacctcctgggctcaagtgatcttcctgccttggcctcccaaaatgctgggattacaggtgtgagccaccacacatgggccccactttatatttaggatggcaaacaaccagtcaacaggcgtgttttgtttggcctg

SEQ ID NO: 411378 - DNA, 554 bp, Homo sapiens
gtattaagctatactcatcactttcttatttttttattttttttatttttttgagacggactcctgctctgtggcccaggctggagtgcagtggcacaatctcggctcactgcaacctccgcctcccgggttcaagcgattctcctgcctcagcctcctgagtagctgggactacaagcacatgccaccacgcccggctaatttttgtatttttagtagagacgggtttcaccatgttggccaggctgacatcaaactcytgacctcaggtgacccacccgccttggcctcccaaagtgctggaattacaggtataagccactgtgcccagcctatttgttatttttttgagataaggtctccctctgttgcccaggctggagtgcggtggtgcgatcactgctcactgcagcctcgacctcctgggctcaagtgatcttcctgccttggcctcccaaaatgctgggattacaggtgtgagccaccacacatgggccccactttatatttaggatggcaaacaaccagtcaacaggcgtgttttgtttggcctg

SEQ ID NO: 411379 - DNA, 578 bp, Homo sapiens
  misc_feature (1)...(578): n = A,T,C or G
gagcatgtttgtcttccacaatgaaataaggcaatggtaatgtactggtctcctgagttcacttgtttaaataatttcccctcaccttcccatgcaaggcatcaaagagcacaacaggcagctgccactttggggacctttttagtattgctgccatttctcttcagtatgcacagccatctttccctcgacctcctgaaggrgcactcaatgttattacagtcctgccacaatagtagtcaaagtgtttgctgtggttcagtgaaatttggggacatttcatcatccatgtaaatatcagggagactggcaaaaacatgccatagatttcttggctgtaaaagattaaataaaagtagactccggtgatacagctggctttccaaaataatgtggactatgttctctgccaaacagtctgatttcaaggtccataaagaaatgtatccgaatttgcattatagccctgtggaaacagcttgnggtgctagaaggagagtgtgttaggtcagagaataagtaagcaacaattggcttaccaaaatactagtctttccccatggtcaggataatgtaga

SEQ ID NO: 411380 - DNA, 578 bp, Homo sapiens
  misc_feature (1)...(578): n = A,T,C or G
gagcatgtttgtcttccacaatgaaataaggcaatggtaatgtactggtctcctgagttcacttgtttaaataatttcccctcaccttcccatgcaaggcatcaaagagcacaacaggcagctgccactttggggacctttttagtattgctgccatttctcttcagtatgcacagccatctttccctcgacctcctgaaggggcactcaatgttattacagtcctgccacaatagtagtcaaagtgtttgctgtggttcagtgaaatttggggacatttcatcatccatgtaaatatcagggagactggcaaaaacatgccatagatttcttggctgtaaaagattaaataaaagtagactccrgtgatacagctggctttccaaaataatgtggactatgttctctgccaaacagtctgatttcaaggtccataaagaaatgtatccgaatttgcattatagccctgtggaaacagcttgnggtgctagaaggagagtgtgttaggtcagagaataagtaagcaacaattggcttaccaaaatactagtctttccccatggtcaggataatgtaga

SEQ ID NO: 411381 - DNA, 494 bp, Homo sapiens
tggggtggacagaggcagagagtaattcagaatcttatcagtccagtaatcaaaactgtgggtgaaagtggattaaagctctaaaacagccttgtccttcctgtggcccgtgctctgcatgcagtcctggacggctttgaatgtggcccaatgcaaattcgtaaacttgcttaaaacattatgagacttttttgaggttttgttttgttttgtttgtttgttttttgcttatcagctattgttagtgttagtgtattttatgtgtggcccaagacaattgtttttcttctaatgtggccccgggaagccaaaagactggacacccatgaaaaacatgaggttctctaaactcacmcacctgagggccatattggtcaaacattttagggctatgcttttcttataacattaaaaagcgatcctcaacagctgagaaaggggcctctgaggagacattctagaatcctccctcccccaaatctgggtttacatct

SEQ ID NO: 411382 - DNA, 502 bp, Homo sapiens
acccaaacacaaatgcaacaaaaacaaaaaataaataaataggacctaagtaaactaaaaagcttctgcacagcaaaagaaatgatcagcagagtaaacagacaacacacagagtgggagaaaatattcacaaactatgcatttgacaaagggctaatctctagaatctacaaggaactcaaacaaatcagcaagataaagaaacaaacaatctcccgaaaaatagacaattctcaaaagaagatatacaaatggccaagaaacgtatgaaaaaaggttcaacatcactaaaaatcagggaaatgcaaatcaaaaccacagtgccataccaccttactcctgcaagaatggccataatcaataaatcaaaaaataatagatgytggcgtggaattgctgaaaaggaaacacttttacactgctggtgggaatgtaaactagtacaactactatggaaaacagtgtggagattccttaaagaactaaaagtagatctactgtt

SEQ ID NO: 411383 - DNA, 502 bp, Homo sapiens
acccaaacacaaatgcaacaaaaacaaaaaataaataaataggacctaagtaaactaaaaagcttctgcacagcaaaagaaatgatcagcagagtaaacagacaacacacagagtgggagaaaatattcacaaactatgcatttgacaaagggctaatctctagaatctacaaggaactcaaacaaatcagcaagataaagaaacaaacaatctcccgaaaaatagacaattctcaaaagaagatatacaaatggccaagaaacgtatgaaaaaaggttcaacatcactaaaaatcagggaaatgcaaatcaaaaccacagtgccataccaccttactcctgcaagaatggccataatcaataaatcaaaaaataatagatgctggcgtggaattgctgaaaaggraacacttttacactgctggtgggaatgtaaactagtacaactactatggaaaacagtgtggagattccttaaagaactaaaagtagatctactgtt

SEQ ID NO: 411384 - DNA, 557 bp, Homo sapiens
  misc_feature (1)...(557): n = A,T,C or G
ctcctgagtaaagaaatgtaaatcaaaacaatggtgaaatatcattttcacttttctgattaggaaaaatttgctaaagcccagtactgatgaggctgtgagaaagcaggaattctcatataatgttgttacatgtktgtgtcagaaaaatgtttttgaaggaaaatttttaacaggcatcaaaattttaattatataaacatatctaagaaagtatgctatgtggatattaaaataaaaacaaggatatatttagaaagctgttttgtaatatttttaaacagcgaagaaactgtaaataaccaaatttccataaataggcagtggttaaatacattntgtgacatccataaaatggaaatattaagtagctgtttaaaaagaggaaaaggtaaaatataatataccaaactataaacactactaaccgtttctagaatatataaaatctctaagacatggcattaagaaaaaagtacaaatgtatttgaacagtatgattccctttctgtttttaaattaaaggtaataggcactttctctacgcaagtacagtt

SEQ ID NO: 411385 - DNA, 517 bp, Homo sapiens
tcctcctgttacttgtcctaccttttccttcaaaactaaaatctaattattcttaacaaacatatcctgtaggcctttttcccaccaagttttctgaagaattgtttttattataattatttagtgctttattaaagtgggcaattaaagcattttaaatgcctccatcatcaatctatatgtttatcttatgaggcattaacaccactttacttttatacagcactttgcagtttacagcttgaaacatgtataccccaaaaatagcacattgccttttcatcagaatagggatatctaatttaacaatagtcaccacatacagtgaagcagtgagaagactggccttcaaaccagtaatcttyattttctacggaagtgcccaagcctggctttcctctttgcctttatgcagttggaccattgagttcaccagattgcaccccaaactccattattttgctttgagcaaggactgagagttagtgtagactagttagtaactttgccacaacag

SEQ ID NO: 411386 - DNA, 664 bp, Homo sapiens
agctgggcatggtggtgtgcacctgtaatcctaggtgctccagaggctgaggcaggagaatcactttaacctggaaggcagaggctgcagtgagctgagatcatgacactgcactccagcctgggcaacagagcaagactccatctcaaaaaaacaagaatgatgcaatggactttggggtcttggaggaaagagtgggaarggggcgagggatagaagactgcaaatatggtgcagtgtatgctgcttgggtgatgggtacaccaaaactcacaaatcgccactaaagaacttactcgtatagatcacctgaggtcaggagttcaagaccagcctggccaacatggtgaaaccctgtctgtagtaaaaatacaaaaaattagctgggtttggtggtgggtgcctgtaatcccacctactcaggaggctgaggcaggagaatcacttgaacccaggaggcagtagctgcagtgagctcagtgagctgagattatgccattgcactccagcctgggcaacaagagcaaaactccatcttaaaaaaaaaaaaaggaacttattcatgtaaccaaataccacctgtaccccaataacttatggaaaaaaaaaagaatccacttcatgtagtaatatatgataagcacttagtaaatgccaattgtta

SEQ ID NO: 411387 - DNA, 664 bp, Homo sapiens
agctgggcatggtggtgtgcacctgtaatcctaggtgctccagaggctgaggcaggagaatcactttaacctggaaggcagaggctgcagtgagctgagatcatgacactgcactccagcctgggcaacagagcaagactccatctcaaaaaaacaagaatgatgcaatggactttggggtcttggaggaaagagtgggaaaggggcgagggatagaagactgcaaatatggtgcagtgtatgctgcttgggtgatgggtacaccaaaactcacaaatygccactaaagaacttactcgtatagatcacctgaggtcaggagttcaagaccagcctggccaacatggtgaaaccctgtctgtagtaaaaatacaaaaaattagctgggtttggtggtgggtgcctgtaatcccacctactcaggaggctgaggcaggagaatcacttgaacccaggaggcagtagctgcagtgagctcagtgagctgagattatgccattgcactccagcctgggcaacaagagcaaaactccatcttaaaaaaaaaaaaaggaacttattcatgtaaccaaataccacctgtaccccaataacttatggaaaaaaaaaagaatccacttcatgtagtaatatatgataagcacttagtaaatgccaattgtta

SEQ ID NO: 411388 - DNA, 570 bp, Homo sapiens
catcacacagaaggatcaagaattgagtcaacacttctagggcttctacccctcaactatgcatttccatggtacccatttccatggtttttagacttttaaacaaacacatttgtctaaaaacaaatacatatgtaggaaacatttctccagggctctcgccttttcagctgcttttggttgacagatgagaacccacatacagtattctgaaattctgcgtcttcttgtcttaagtactagagaaagaaatatttggtcctaggtggcagatcttacttatatcacttctattaaacgggcaagatagagtcacaaaaagaggacttatgattttcaccttataatggattccttcttggcttccttccacctcctatmcatggatttgaacttcattttgaagacacttacaattattctgaatgaaaactatcattttcattctccctctcaaaaaggttctgaagaaatttgttgcaaagccatgctatctgtaacattacgaatatgttagcatatttttagtgcttcactagatttcataaatcttacttacccatatcaata

SEQ ID NO: 411389 - DNA, 568 bp, Homo sapiens
ggcctggactgtctatgtacaatacggaattttaggctcctggaggaaacaaaccaaaacaaaaataaaaacaaagtccttttccttcaggagctttagctttagaagaataaatgattcacatataccaaaacccacaagatacggtatccccaaaaagttaaattgtctcttacctaatagaggatcagaaaaagaaaagatagttatttcctaaaaattgtttgaaccaaatttgtggttttcaaactatgcttcatggtccccagacttacaaagagatgattacaaaaagattatcaaatagatataaataaataaaaaaataaatacatatataatatgtagtaaatacatatatatcaatttgcaattgtgataaaaatgacatgcaaatttaaatgtattatataaatttaaaaaacactggagaccaatgtgttattacaagttaattatgtacaataagaataagcagctttcatgcaggcctctaattaaggctctcagattggaatacaagctgttgaaaaaaactgttacaatatrcaactacttatcagtctca

SEQ ID NO: 411390 - DNA, 613 bp, Homo sapiens
tctattcttaataagtataaatgcaagggaagcatttttagggaaaataacacaaatcatgtttttayaatgatggtatttgatacatcaggtttaactcaaaaaagaatttaagaaccactttcaattgtttcctaattatattagcttaaatatgagactgtaaccaaaaagactaataaaattttggaactcatcaagtgtactgaaaataggctagaaagctttccatatatttatgtaaagttttgacatcttcgaatggacataatgatgcatttgcaatctccacaatcatgagggcctaaagggagagagatgtgtagagccctggaattgaagatccatggtgtgactggggggggaaagtctctgaaaagttaaaagaagacagggcactgaaccctgatctaatatgtaatggggttatgaaatttaggcagagggtagtcatagaattattcatgaaatcctagaatagtaatactagaggtcaaacttcatattcagaaaagtacaaatagggtcaggtaataaagcactattccatatttttttttaatgcctgccttggaaggtagcaaaacttaagtaagaagttggagaaattcat

SEQ ID NO: 411391 - DNA, 582 bp, Homo sapiens
tttgcaagctgtacatagttcttagctttgcatacttttatttctccctcacctcctctgtctcctcttcattctgagatagagccatcatttcttacagatatcattgtactttcttccgaaagtgttttcttcccatgtaatatgaatggagggtccagattactggtgttactgtgtattaaagaagaataaattggttccaaattaaagtctccttggtaagtaatgatgtatttgggcaacagcgtgtaccttatggcatttcttttcatttcccaagggctctattttccctcttctgggtttttgactatgttaacttgagataaccctataaatgaatataagattgctggatactaaggtaccaatatattatyttctccttacagaaaactaaagaaatatatctcatagaaatactagaaattggtgatcttgtttactaattgctcaagattttgctcactgatataggaaaatcacagttcccttttgggtactataagatgtgaaattggatttttacagtgtctgttagacttccgtcattcaataaacataatactagagcagaat

SEQ ID NO: 411392 - DNA, 567 bp, Homo sapiens
tctttaaatggctagatgttactgaactatggtaaatagtattctggctgttgccttacactgttaaatataatataaagcaaaatgttaaataacaccaagaattctgtatagtttctaggagtatttactatctatgaaagagctttttgggggtttaggagtattatttcctttctcatttaacatttgcactcttagtcccatatagcatgtgctatctgactagaagtagatgtgtgaccacaaaatggacacagatttttccccttcctttaacagtcatgcaaatatgatttatcttatggtacagtgaaaacagaagcagtrgaagcctgcccatagtaaaagaagataaataggcaagaaaacacagaaaggcagtgtgtgtcaagcatgtttcatgtttgcctcagagaactgaaacacacaaagtgagaaagacatgtatgttactatgtgccagtgctagagatgctgcatgcttttttgatgatatcaagacattatagttttggggaacatttgtttcttaataagtttatttttaaatcctgcaatatttac

SEQ ID NO: 411393 - DNA, 690 bp, Homo sapiens
gtagatgctcaataaatatgtatccaataaattaataaatttgcagtctcaaacacaggcatatattcttatataagattaaggacattaataaaatttttttatttgcatgttcctaaagtgattgtgaatctttggaaattgtttatgaacatattaatatgtttcttagtgctctagtcactttgagggaaattttttaatctttgaaaaacatattttttaatctctgtatattcttttttaccccgagcattacttttgcataatggactcaagtgtgttgtcaattactgattatttggttgagccacacagaaactgttagaaatccttatttttatttgcacactatctgtttggtggctttgttcaagcccatggattgtcagttaaatggaaaagtcttactttcaagcaaaattctcagcatttaatacagtgtgtagcatatatttgggagtcaataaatgttcatagaatgcatgaacaaatcagtcattgttgcaaactgatttgaggatgaggtatgagatttttttttaaggctaaatgaaatgcccagtatcacatascaggataagagaaaatctgacactcataactcatacttctgtgtttccagactgttacccaagctcactgagaagtgcagtatatgtctgatttctcaacttcaccctgcagtaa

SEQ ID NO: 411394 - DNA, 588 bp, Homo sapiens
gtggtgttatatccatgcagtggaatagtattcatcagtaaaagggaatagactactgctacatgccacaacataaaagaatcttaaaaatgaattatgataagtgaaaaagctacatgaaagagatcacatattatttgattgcattaataaaaatatccaaaaagggcaaatttatagagagagaaaatatttgttgtctgggtctagggattgactccctaagggtatgaaggatctttgtagggtgacaaaaatattctaaaaatgaattgaggtgatggttatacaactctaaatttacttaatgtcattgagttatacacataacaagagtggattgtatgttatataagttatatctcaataaactgttatgyttattaaaactaagtatagagaaacctggcagacattctcctaagcaagcgaccaaggttaacataccccgagatatcatatacctttgatgttataagaagggcacatcacctcttttgtattcttctctaaaacctataatccgaatctagttacgggattggacaaatcaaagttgtaaaaggtttcacaaaatatctgaccact

SEQ ID NO: 411395 - DNA, 588 bp, Homo sapiens
agatacaggtagagataaataagaatctgtcataatagttttaagtgtgtttgtcaaatatttagatagtccctagaagaatgaaaacagaatatgaatctttcaaaaattaaaataaaaaaggagcactgtatcactctgacagaaagctaaaaaggaaaatataagamaggaaagaaaatatggcaattcataggtgtttttcccatatccaattttaaattttaagataatcaaatatatcaatcctttatgtgttttggttttgtgcctgtctgggaagatttttatttttttctactggggaactatgataaatgtctctacaatttcttgtcaaaatttagttttttttactattactatgcgggtattagttccatctggaatttgttttggaatactaaattaagtagaaatctgttttttcactataaaatcattttttgaatagtccacacttctcccactggtttaaaatgccaacgcacaagcctctttttctgattttgttgttgtgttttattgatctacttgtttttttcttgtaaaagtattatactgttttagttactataattttaaagt

SEQ ID NO: 411396 - DNA, 607 bp, Homo sapiens
tttgtgaactataaagcactgtgcaaacttaagtggctttgttcctcacaaaggtggaagagtgaaagacagctgctggaaacccattattgtttctgtaatgatgatgatcaaaactactccataaggatgtgatggaactcattcactcattatcttaaagtatcaataactgacacaaccttaagtgtggcctgttcctggacaatgttcatattgagaccaggcttataagtaaaggcttgcagctctaatgtggagtctcagacattagcatgatgggtgaggtgcaaagatcattgccagtcaatttgacttgaattctccttaaattaagcagatgcatcagaattctcactctgtttctacagaatttaaatatctgaaggtaaggccaaggccagcrgaagtttgaaaggcaataaagtatcttggtgctcctgaaaataactaaaggaaaacttggattgtgaatcataccaagtagatatcacctctgtgtgagctcatccttatctgaatgccattgttcttcaaacctttcctcctcttgtttaacactttctatatttgcccagatcaagagaaaacttcactttgtccccat

SEQ ID NO: 411397 - DNA, 547 bp, Homo sapiens
tcacttttatttttttatgagattagaacagttttccagagtcaacataatttgcaatattgcagcaaattaaattcagaagccagtatgagcatccagctgctttcttttaagccagacataaaagagatttgcraaaatgtataacaacatcactcttctcacaattttttattttataaaaagataattacttttcggccaggcacggtggctcatgcctgtaatcccagcattctgggaggccaaggcaggtgcatcacatgaggtcaggagttacaaatcagcttgaccgacatggtgaaaccctgtctttactaaaaatacaaaaaattagccggtcgcggtatgcccctgtaattccagtcactcaggaggctgaggcaggagaatcgcttgaatccgggaggcagagtttgcagtgagctgaaatcgcaccaccacactccagcctgggcaacagaatgagacttgatctcaaaaaaaaaaaaagttattgtttataattatgtgatttatgttaacatataatgggtttattaaataa

SEQ ID NO: 411398 - DNA, 547 bp, Homo sapiens
tcacttttatttttttatgagattagaacagttttccagagtcaacataatttgcaatattgcagcaaattaaattcagaagccagtatgagcatccagctgctttcttttaagccagacataaaagagatttgcgaaaatgtataacaacatcactcttctcacaattttttattttataaaaakataattacttttcggccaggcacggtggctcatgcctgtaatcccagcattctgggaggccaaggcaggtgcatcacatgaggtcaggagttacaaatcagcttgaccgacatggtgaaaccctgtctttactaaaaatacaaaaaattagccggtcgcggtatgcccctgtaattccagtcactcaggaggctgaggcaggagaatcgcttgaatccgggaggcagagtttgcagtgagctgaaatcgcaccaccacactccagcctgggcaacagaatgagacttgatctcaaaaaaaaaaaaagttattgtttataattatgtgatttatgttaacatataatgggtttattaaataa

SEQ ID NO: 411399 - DNA, 547 bp, Homo sapiens
tcacttttatttttttatgagattagaacagttttccagagtcaacataatttgcaatattgcagcaaattaaattcagaagccagtatgagcatccagctgctttcttttaagccagacataaaagagatttgcgaaaatgtataacaacatcactcttctcacaattttttattttataaaaagataattacttttcggccaggcacggtggctcatgcctgtaatcccagcattctgggaggccaaggcaggtgcatcacatgaggtcaggagttacaaatcagcttgaccgacatggtgaaaccctgtctttactaaaaatacaaaaaattagccggtcgcggtatgcccctgtaattccagtcactcaggaggctgaggcaggagaatcgcttgaatccgggaggcagagtttgcagtgagctgaaatcgcaccaccacactccagcctgggcaacagaatgagacttgatctcaaaaaaaaaaaaagttattgtttataawtatgtgatttatgttaacatataatgggtttattaaataa

SEQ ID NO: 411400 - DNA, 554 bp, Homo sapiens
aaaacaaaaaccccaaaatatatttattacataatgtatgtttctaccaagtagctgtttaagatgtgcatgttttttcctctggatttgagaataatgagatcactgatccacactttgcagattgctaaatctattttccttacccctcctccctcacatacaaagttagtaaaactacgtcagtagtgtatacctcatctcttcctctttctaatatagaatttcctcgtggaccatcccagcacttgtccacacatgcttctttttctaaccacaccatactctcatgggatacctgatgcgccatttctcaattttctgtgatttttcttctttggttgcaaatatgcttggaagaaacacactggcytctgcttgctattaacgtgataaagtgaattatgttaattcaaagataaattgctttcttctttctgagcaggccagattaatcccagaccagactagaacgcacagtaattctgaagtgtgggccactgtgggcagaagggacacttgactgaggctttgatgtcatgaattgatacaga

SEQ ID NO: 411401 - DNA, 615 bp, Homo sapiens
accagactagaacgcacagtaattctgaagtgtgggccactgtgggcagaagggacacttgactgaggctttgatgtcatgaattgatacagagaaatgtggcaaaataaaaacccagggtatgggggggtggtctgggcaagggaagtggaggcatcaccaggaagcaagcaggatttctggcaaagaattatgagtactttaaattctcmtttcatttctaattttgcaaagaatggggctcacctaggccttatatcatcagcaggtgagatcagaagagtcagttatgaaaattagtaatttcaacctacatatattaccttttatgtgttatatttaaaaacataagaataaaaaatatttggaacatacagtagcacaagacaaaccaactaaatagttgtttctggagcggtatatcaagtgtccaagttaatgttttgactgagtcattgctatgctcaaggcttttcaggccaaatgttcaagatattttcttggccagaatttaatctacacaaacaatgtgataatttgtgctcctaagcatgactattgtggtacaatttctttctcctattctttcttaggctctttaaatcaggcctctgt

SEQ ID NO: 411402 - DNA, 615 bp, Homo sapiens
accagactagaacgcacagtaattctgaagtgtgggccactgtgggcagaagggacacttgactgaggctttgatgtcatgaattgatacagagaaatgtggcaaaataaaaacccagggtatgggggggtggtctgggcaagggaagtggaggcatcaccaggaagcaagcaggatttctggcaaagaattatgagtactttaaattctcctttcatttctaattttgcaaagaatggggctcacctaggccttatatcatcagcaggtgagatcagaagagtcagttatgaaaattagtaatttcaacctacatatattaccttttatgtgttatatttaaaaacataagaataaaaaatatttggaacatacagtagcacaagacaaaccaactaaatwgttgtttctggagcggtatatcaagtgtccaagttaatgttttgactgagtcattgctatgctcaaggcttttcaggccaaatgttcaagatattttcttggccagaatttaatctacacaaacaatgtgataatttgtgctcctaagcatgactattgtggtacaatttctttctcctattctttcttaggctctttaaatcaggcctctgt

SEQ ID NO: 411403 - DNA, 602 bp, Homo sapiens
ttcatctataaaatgcatatgggtaatacctgcctttcaggcttatcctaagacatttaatacaagggataaaacttctgttattactaaccatttgttttgaaagttaatgttgtcattttcctattattttacagtgtggcatgaggccyaaaattatgtactgtcttgacatctgaaactgggagggcctcaaatggcttaactgtaagttcttcacatcaatctacttccatgaagaaattgaagtcattgtagaaaataaacagaaggatggaaaactggcatctactgaacaccaaacagatgccatgtactaccctagtgagctcaatgttactgacagataaacaaagaattagagaagaaaggtagggtgtgaaagaatatgggtgtgtgatattggcagaatgaagatccaaactcagtatgtttgacaccgtatttatcttagtcagtttagggtactataatagaatactatagactaggtggctggaacaacaaacacttatttctcacacctctagaggctgggaagtccaagatcaaggtgccatgggatcctgtgtctgctgagggtcctcttcctggtttgcagg

SEQ ID NO: 411404 - DNA, 424 bp, Homo sapiens
tggcctccttgctattcctcaacctacaaggcaggccctacccttcactctgcctgcagccccctttctcccaatagacacggctactgcattcactaaagtctcctttatcattctgtcaaaaatagcaaccrcctctctcctccctctcatggccactctctacttccatcccctgctgcattattcttcctagcacttatgtacttagctatatattattttctggattaacaatatatttattttctctctttcttaacctgagtgtaaacttcaaaagacagatattttatttattttgcttgctagtatatccccactaccaagaacagtgcctggaacataataggtgctcaattaaaaatatgttgaatgaattatttttcagttcctagagattattccatggacattcaaagta

SEQ ID NO: 411405 - DNA, 649 bp, Homo sapiens
atgcataggcattatagtttgcattcatcttttcacaaataattaaaaattattgtgaaaagctcctggcaatgttgtcctgattcacttttgtaaatagacagagaaaattcccttaatgcctagaaagaacttttaagaatgccagacactttcttattgagctttcttgagatataattcatatactatacaactcacctacttaaagtatcagtttcacggttttagtatattatcagagttgtacaaacatcatcacaatctagttttagaacattttcttcacactccccaacctcacccctcactccatccccagcgaaaagaaacccttacttattggcagtcaagaggggtaaaytttagcagtgtcctctctttccttaaaaaaaaaaaaaaatcattgaaaggattaagaattacttagctgtttagacacaggagctgaatgtacttttgagggagtagcttgagattgccatctggtgcccaaagcagtcccctgtacagtgtgtttgtccataagggtctctgaaccatcaatcagtgctcacagtcatgaacacgaacatatttactacgtgcctggcactgtaagtggttcatgtatataactcacttaattcacctgacaaccctatgaggt

SEQ ID NO: 411406 - DNA, 608 bp, Homo sapiens
ttactttttaatgaacttctacttgacatataatcaaactaagttgccctggagaccttaccctggagtttttcttgcctatacttattgccctgttaaatataaagcttatagtcatcttctgtgctctgactttccctctaagttattggttattaaatcaattcatatgtaattagcaagatcatgtctttactacaaatcctccagtaactcctagattatctctgagaagayggaatgtgttaatgagtataaaaagataaatgagatcaaattcctttaaggaagatgcttgtatttctgtgtggcactaaagccctcctaaagtaggctccctctacctttcaaaggtattctctacttaactttctgctttagacaaactggtctacccaccatggttagagcaaggcttcagcttacttgatttcttagacttcaccagagttcccaaccctatcgtcaaagtcaaataaaatacagagacaaagctctgaaattaaaatgttttatttgtgaagaaagaattgcagtttggggcatacaacacacactgcctggtctttgatacgtacaaagaacaaaggctagaggttttataaaaa

SEQ ID NO: 411407 - DNA, 552 bp, Homo sapiens
aaaactggtttcagtttatagcagacagttttagctgccaggctttcagataattacatttttggagcaatgttttggaccctgagggtttttttcctctgactttttgattctgttttaggtgggtatggcaagaatgacccaatttgtataatcaactttcacactatcatctttactcaacgtttactcatcttttaagctgtggcttatgtccctcacaccttgtttatgacatctacctctgggcaattgtagctaatctctgaagagtcagttctatgccccaaactaaacactggggcttctaagatggtgakgccttgttcctgttctcagaggtttacagtccagtgggagagaccttggtcacagtgtgctttggctctttgacagtatttaatgcctgtgcactcaaagaggggacatgaaccccagtgacaagaaaagcagaggtgaagctgggatgatcagaggccacaagaggaagaggcgcatgacaattatcactgtagagagtgaagagggagtgaatggctcatagagaaatga

SEQ ID NO: 411408 - DNA, 580 bp, Homo sapiens
atttaaatctctttcaccaggaaaagcccagatgatttaagagatcacctgatttggttatgctctacttagataatttgtcattaaacaacagcattagttgctggcataaacatttgctacaaacttgaaaaccccaaatgttcatcaataatagattaaataagttgcatattttaatgcagtgaaataataaatgtcaatgaaagtggcataattatatagctaccaggaagcaaaacagatgaatgtcaaacacagcttastgaaaggagacttataaaaagagtacatactatatgattgctttcacaaaatgttcaaaaacaggcagaggtgtaaggactgggagacagtggaagagaggcttctggggtggctggtagtgttacattctttaatctggtggtgttcacattgttcgcattgtgataattcgctgacctgttcctgcaggatttatgtagttgtctgtagctatttctttctccaaacaagatttttaaaaattactggttatatcagccattattcttcctctttatcaccttggccttcaagacttccccacaaggggagc

SEQ ID NO: 411409 - DNA, 603 bp, Homo sapiens
cctttcccttaaattcccctcaaatttaaatctctttcaccaggaaaagcccagatgatttaagagatcacctgatttggttatgctctacttagataatttgtcattaaacaacagcattagttgctggcataaacatttgctacaaacttgaaaaccccaaatgttcatcaataatagattaaataagttgcatattttaatgcagtgaaataataaatgtcaatgaaagtggcataattatatagctaccaggaagcaaaacagatgaatgtcaaacacagcttactgaaaggagacttataaaaagagtacatactatatgattsctttcacaaaatgttcaaaaacaggcagaggtgtaaggactgggagacagtggaagagaggcttctggggtggctggtagtgttacattctttaatctggtggtgttcacattgttcgcattgtgataattcgctgacctgttcctgcaggatttatgtagttgtctgtagctatttctttctccaaacaagatttttaaaaattactggttatatcagccattattcttcctctttatcaccttggccttcaagacttccccacaaggggagc

SEQ ID NO: 411410 - DNA, 605 bp, Homo sapiens
cctggtatgaaacccacttgattgtaggtagtggattatctttttgatatattgttggatttggtaagctagtattttcttaaggattttagcatctatattcatcaaggatattggtctgtacttttcttttttggttatgtcctttcctggttttggtttagsgtgatgctggcttcacagaatgaattatggaaggttccttccttctctgtcttgtggaatagtgtcaaaaggattggtaccaattcttctttgaatgtctgatagaattctgctgtgaatctttctggtcctggacattttttggttggtaatttttaaattaccctttcaatctcactgcttgttattgctgtatttggggtgtctaattcttcctgatttaagctaggagggttgtatttttccaggaatttatccgtctcgtctaggttttctagtttatgtgcataaaggtgttcattgtagccttgaatggtcttttgtatttcagtggtatcagttgtaatatcttctatttcatttgttagtgaggttatttggattatctctcttcttttcttggttaatcttactaatggtctatcaattttatttatctt

SEQ ID NO: 411411 - DNA, 593 bp, Homo sapiens
aatcttagaaaagttctctaaataacattttctgatatattcagttagcatttatctaaatagaattttagaagttagtttttaaatttaatgtcatctttaaaacattaaacattctcactgcaaataaacttaaaaatattatctccatatataactctctgtttactcataaaacaaagtgagaaatatgtatgttgcaatgctgatttctgtattttttgttcttttgatgagtctctaaaatggcaaataaaatctatcaaatttatgactgcagttcttttttgtttggataaaatgaagctggcttaaaacaattaagctttttggaacacccagaagggattttttttctgttgtgtgctggttgttggagtctatccaggtatattcaaaaatgcagtttataattttagtagayatttcttcatgaacttattgtgaacttatttttaacaaaaattgtttataatctctgcttttgtaaagagggggttgagtattgccactagccaaatccatggctataagactgaggtcatagatatgtggtgacgtattgtagattttttttaaattaaaggtaaaat

SEQ ID NO: 411412 - DNA, 633 bp, Homo sapiens
caataatttaattgtacattttgaaataactaaaaaagtataactggattgtttgtaacacaaaggataaacattggaggtgatggatatcccatttaccttgatgtgattattaaatattgtatgcctgtatcaaaatatcccatatactccataaatatgtacctawtatgtacccacaaaaattagaagttcagatgataagtttgttcacagagaatactcaataaaatctatagatacattattagaacatttaatgttgattataagataaatatagaaaaatcaatcacatttctatgtacttacagtctacaaatggcagcttaaaatgtcctttcatagagaatgtgtaagcacacacatttatacatacaagtaccatatctgtacacagtccctaataaatagtctaatgtcatcatctacaaaaaaaattgaggtgtaaagacttgccctaccagatacgtaattgattcagtgtgatatttgtagaatggagcgatatacagacaaatggcacagaacagagaacccagaaacaaacccactcagaatgaaagcctgagaggtgacagagtgatcttgcaggtcagttgagatattggctattcagtaaatagtgctgtc

SEQ ID NO: 411413 - DNA, 585 bp, Homo sapiens
tatatatgaaactttaattctcacaattatgcagtaaagaagctattatcattatctctattttacagatgaggaaactgaggcatggagcagtccacgtgaatgagtctcgtagtaagtgatggaactaggatgcaactctctggtgtgagtgccccactctgagaggtaaggaaaggagtacacggttagtacaacaggagccatgcagggtcttaagtggctgcagtaaattctagttaatattttcataaatatraagatgccaatgcacaggatgcatttccatccttccagtgttgtgctctgttccttttctttattagattgatttgaggaattgttgggatggcatgtaagcagtgcttactatatcattatcagcacaccgggtcagccgtatcatagaagaaaagatactctggtttcagaagtagggtcatttaaaattgtaaactattcctttgtaccttgtggaccatgttgcaaaatagaacacagttattaagtcacttatctctcttaacctctgcatcatcaaatttattagacagtcaaagcttttattgctttttgggaaaaaat

SEQ ID NO: 411414 - DNA, 585 bp, Homo sapiens
tatatatgaaactttaattctcacaattatgcagtaaagaagctattatcattatctctattttacagatgaggaaactgaggcatggagcagtccacgtgaatgagtctcgtagtaagtgatggaactaggatgcaactctctggtgtgagtgccccactctgagaggtaaggaaaggagtacacggttagtacaacaggagccatgcagggtcttaagtggctgcagtaaattctagttaatattttcataaatataaagatgccaatgcacaggatgcatttccatccttccagtgttgtgctcygttccttttctttattagattgatttgaggaattgttgggatggcatgtaagcagtgcttactatatcattatcagcacaccgggtcagccgtatcatagaagaaaagatactctggtttcagaagtagggtcatttaaaattgtaaactattcctttgtaccttgtggaccatgttgcaaaatagaacacagttattaagtcacttatctctcttaacctctgcatcatcaaatttattagacagtcaaagcttttattgctttttgggaaaaaat

SEQ ID NO: 411415 - DNA, 578 bp, Homo sapiens
atgtgttattacctgtcttttgcatgaaaaccatttgaggcccagcgcagtggctcactcctacaatcccagcactttgggaggccaggtggatcacctgaggttgggagtttgagaccagcctgaccaacatggagaaaccctgtctctactaaaaatacaaaattagccaggcatggtggcacatgcctgtaatcccagctactcaggaggccggggcaggagaatcacttgaacccgggaggcggaggttacaatgagccaagatcacgctattgcactccagcctgggcaacaagagtgaaactccatctcaaaaaaaaaaaaaagaaaaaagaaaaagaaaaccatttcaactgaggtgaagtgatatctcattgcaattttgatttgcagttccaggagccttttggcagagtctttagggttttctaggtatagaagcatatcattagcagagatagtttaacttcattttctataygaatgccttttctttctcttgcctgattgctctgcctaggactgccagtcctatgttgaataggagtgatgagaataggcatccttgtcttgtt

SEQ ID NO: 411416 - DNA, 565 bp, Homo sapiens
ctctctgcagcagagagggagcctgagtgggttgccgcttttacagttgaatttaaaagcttttataagaaactcctctaatctctgtagctgtttgagtaacttctcttaactgtaaagctgtctgcataactccctcttatctatgtagttgtgggtatgtctctaggtaagcacagagtgcagcttctcttgtttataattgtgggtttgttttatgtaagccccccttcccctccccatgaagctcccatggagcccaccatgtrcatgtctgaaaagtgggggaaacttttcctgtgagtcagctagtcacacaaagaacaaaatgcttctatgctacaccctatctgtgcatctgtagtctgagttttcccctgcttgctttatttttgcctatagctgtgattattcaggcaggctgcttctctgaggactagccctagctgtctacctagctgatttttccttttcttatccctcaatagcattatattaaacacattgaatatatttttggttgattttggtatctgaagtatctttgggtctgattctttgtttc

SEQ ID NO: 411417 - DNA, 466 bp, Homo sapiens
aattagccagtctcaaatatttcttcatagcagtatgaaaatgggctaatatactgtctacattcaaacctagactttacctatttctagctctttgaggtaaactttccctatctgagcctctgtttctcagcattatgttattacaaaactggttcaattgtatattggatggctggcagtattaaatgaatgaatgcatgtaaagctcccaccttagagtctagtacgtagtaacagctcaataaatattccttatcattgactctggtgttcttcctgaaagcttcagcactgagtctttcacakacttggtatcaacaggatgtggattgattgatggtgcagtatgtctgactgtggactactgatacaagtaacctactccagaaggtaaagagaaggtatggtgggtaaaaggctcattacacacagtacaggcaaaggagagctacacttagccagc

SEQ ID NO: 411418 - DNA, 466 bp, Homo sapiens
aattagccagtctcaaatatttcttcatagcagtatgaaaatgggctaatatactgtctacattcaaacctagactttacctatttctagctctttgaggtaaactttccctatctgagcctctgtttctcagcattatgttattacaaaactggttcaattgtatattggatggctggcagtattaaatgaatgaatgcatgtaaagctcccaccttagagtctagtacgtagtaacagctcaataaatattccttatcattgactctggtgttcttcctgaaagcttcagcactgagtctttcacagacttggtatcaacaggatgtggattsattgatggtgcagtatgtctgactgtggactactgatacaagtaacctactccagaaggtaaagagaaggtatggtgggtaaaaggctcattacacacagtacaggcaaaggagagctacacttagccagc

SEQ ID NO: 411419 - DNA, 466 bp, Homo sapiens
aattagccagtctcaaatatttcttcatagcagtatgaaaatgggctaatatactgtctacattcaaacctagactttacctatttctagctctttgaggtaaactttccctatctgagcctctgtttctcagcattatgttattacaaaactggttcaattgtatattggatggctggcagtattaaatgaatgaatgcatgtaaagctcccaccttagagtctagtacgtagtaacagctcaataaatattccttatcattgactctggtgttcttcctgaaagcttcagcactgagtctttcacagacttggtatcaacaggatgtggattgattgayggtgcagtatgtctgactgtggactactgatacaagtaacctactccagaaggtaaagagaaggtatggtgggtaaaaggctcattacacacagtacaggcaaaggagagctacacttagccagc

SEQ ID NO: 411420 - DNA, 550 bp, Homo sapiens
atcttttgttcttgacttgtgaccaaagcttctttagaagtttataaagatatttgaaacaaatgctccctcccatatctctctgtcttttctctctttctgtctctccccccacctctctctctctcttctttacctccctttctcttccacacacacagtagttatctatgtatagtcaaaggcatctataacttctgaattctgaacagcatcatgtggctttaatctttttaaaaaaactttaggttcaggggtacatgtgtaggtttgttatcctggtaaactcgcatcacaggagtttgttgtrcagattattttgtcacccaggtactaagcctagtacccaatagttattttctctgctcctctccctcctcccaccctctaccctcaagtaggctgcagtgcctgttgttcccttctttgtgttcatgagttctcatcatttagctcccacctgtaagtgagaacatgcagtattagattttctgttcctacgttagtttgctaaagataatgacatccaactccatccatgttcctgaaa

SEQ ID NO: 411421 - DNA, 640 bp, Homo sapiens
tttgttgttttggaaggaaaatttttaattaataacaaatatatgttgaatccagctggactccctacctagaatatcccacattggccatattttctcataccttggtgtccaggtagttagtcagacagttattttgtgatttaattgatattcctaagcccctaccaaataccaggctatgtgctaggtgttggaatcaaggactctaaaatatggttaaaggaacccacagttaagtagaaaacacaatgatgttagttactggtaataatgtaaaaagtgctgcagttgatgaataaatatattttataaatttagagagaaaaatgattacatttgatctggaaagcgaaagataccaagaaatttttgagctagattgtgaagtttagtgggtttcattacataagaaagtcagcagagggaagaatgtgaacaaaagattaagtgtgagcgtccatgttgtgtttggggagggcaaatgtgccagtgggtttggggatggargtatattggatgagcactgttgtggaagagcgacctgtcttccattctcctccctccctgttataatcttgtacatccctcaagactgagctcaaattccattgttttcttgatatcatttctgattgtt

SEQ ID NO: 411422 - DNA, 478 bp, Homo sapiens
agggaacactggggacttgagagttcttaatataggtggtaacaccctttcaatggctgttttatgtgttatgctttactgggccatgggatggccagatagctggttaaacattattcttgggagtgtggagagwctattggaagagattagcattcaaactggtggactgagtaaagcaaatagtcctccccaatgggaataggcattactcaatctattgacagcctgaatagaacaaaaaggtagaagaagttttaatttgctcttggcctgactgcttaaactggaacatacatcttcttatgaacaaggagctcctggttctcaagcctttagacctggactggaatctacaccactggctctctggccttctaactgcaccaccagattacctgagtctccagcttgcagatggtaagttgtgggatttctcaatcttcacaattacgtgagccaatatcttacaatagat

SEQ ID NO: 411423 - DNA, 584 bp, Homo sapiens
ttttgtaatcttttgaggcatgtttggcatcatcaggctaggcatctgaatcaattttgtttgaggagtgttgatcccatactccttggagtaaccaccaaagaatgtttttttgcatttaaatgtatctatacacactcatacacacacacatacatacaaaaacatgaacatgtaaattatatattgcatattatatataatatatctagctgtctatatcttctaaattcatagattcagttttattctggggaatttttatggtcttttgagaacataatcataccttaagaaacaaaatgtttaaccactttttttttttttttttgagaaggcgtttcactctgtcgcccaggctggattgcagtggggccatcttggctcactgcaagatctgcctcccaggttcagaccattctcctgcctcagcctcctgagtaactggractacaggtgcccgccaccatgcccggctaattttttgtagttttagtagagatggggtttcactgtgttagcaaggatggtctcaatctcctgatctcgtgatccacccgcctcagaatcccaaagtggtttaa

SEQ ID NO: 411424 - DNA, 601 bp, Homo sapiens
tggtggcattttgcccctgccctagagatttgtggaacttttaacttgagggagatgattcagggtatctggtggaagaaatttctaagcagcaaagcagtgaagatgtgacttgggtgctttcaaaagcattcagttttaaatgaaaacagagcatgaaattttgaaaaatgttcagcctgactatgcaatagaaaataaaaaaccattttctaagaagaaattcaagcttgctgcagaaatttgcataagtaacaagaagccaaatgttaatcaccaagacaatggggaaaatgtctccaggatatgtcagagaactttgtggcaatctctcccatctcaggcccagaagcstaggagaaaaagattgcttgtaggccaggcccgggggccccttgctgtgtgcaatctaaggacttggtgccctgcgtcccagctgctcttgctgtggctaaaagggaccaaggtacagctcaggccatggcttcagagggtgcaggccccaagccttggcaacttccacttagtgttgagcctgcaggtacataaaagtcaagaactgaggtttgagaacctccaactagatttcagaggatttatg

SEQ ID NO: 411425 - DNA, 558 bp, Homo sapiens
cctacacttagcccatgtcatcatattgcaagtgggtgggtaaagacgtaggtggtatccaaatcttaaaattaacctcaattgaccttcaaaaactgggccatcttagttttcatgaagcttaagctgggcgcggtggctcacacccgtaatcccagcactttgggacgctgaggtgggtggatcatgaggtcaagagattgagaccttcctggccaacatgktgaaacctcgtctctactacaaatacaaaaattatctcggcatgatgtcacatgcctgtagtcccagctactcaggaggctgaggcaggagaatcacttgaacccaggaggtgtatgttgcagtgaggtgagatcgcatcattgcactccagcctggcaacagagtgagattctgtctcaaaataaatacataaataaataacttctatatgtgcatccaatttctgagcatttaaatctataaggcaatattgacagatatgaaagcagaaattgacaaaaaaaagagactttaataacctacacaatgactagaacatccagacagaaaatc

SEQ ID NO: 411426 - DNA, 558 bp, Homo sapiens
cctacacttagcccatgtcatcatattgcaagtgggtgggtaaagacgtaggtggtatccaaatcttaaaattaacctcaattgaccttcaaaaactgggccatcttagttttcatgaagcttaagctgggcgcggtggctcacacccgtaatcccagcactttgggacgctgaggtgggtggatcatgaggtcaagagattgagaccttcctggccaacatggtgaaacctcgtctctactacaaatacaaaaattatctyggcatgatgtcacatgcctgtagtcccagctactcaggaggctgaggcaggagaatcacttgaacccaggaggtgtatgttgcagtgaggtgagatcgcatcattgcactccagcctggcaacagagtgagattctgtctcaaaataaatacataaataaataacttctatatgtgcatccaatttctgagcatttaaatctataaggcaatattgacagatatgaaagcagaaattgacaaaaaaaagagactttaataacctacacaatgactagaacatccagacagaaaatc

SEQ ID NO: 411427 - DNA, 608 bp, Homo sapiens
ttcttgtaacttttgtctttgtagttgaatttaaattatctgaccaatgagtttctgtgcagagcatttaagagtttttgagaacagagcaaacaattatgcagatatcaaatagtaatatcataattatcagaatgtctcagacaatgcattttagtcaagagtcttgattaagccaagagaataggtttcattcttattttgaatctgtagagaagagaaatttgatataaatttgcataacacttactttttcctctaatttcttattagttttcctaacctttttgtttatattgaaaaatatccaatacgtctcttgttagatgtgtgtattcttctttccctaagtcaacacgtgtacttccctggaagctgagtatatttaaagtctttattgcatcacagcttgtccagtttttaccaagtcttacagccttacttagcttgcctaggttattaatgtttttttcatcatggcataataaattatgtttctgagctttcgcatggctgtcaaagctacatactaggagacaaatctttttatccaccattcrctggtagacatagtttgttatatctttattcaggcttaaacttcctca

SEQ ID NO: 411428 - DNA, 544 bp, Homo sapiens
tctattctatttgcttgtgtttttttttttttactggcatcttgtagatacagaactttatttcataaagacttaacattctgacagactgatctccagtgaacaaaatatactccatttatattgtaattacatttaagtagaaaattcagaatttgaattaaaaacaaacggcacagaaagatttatgtttctcatttgtacttttaaaagacaagtacaaattttggaactcaattatttggcattttacagtttatttatatgctataactgagctctaaagtaatttcatgaagttataatatccaaccatatatataactttcaraaatttttgtacattattctaaatattggcatataaaaattatgtaatatgctattgataccatgtaaaacagacgacagtgaagattttacaaaataaataaaatgtatttcctatatatacatattggatgagcagtttttagaattttttttttctaatagctcttcagtagaaacagaaatagcagatggtgaacgagctccatatgta

SEQ ID NO: 411429 - DNA, 424 bp, Homo sapiens
aaaaacccatgtgaactctttgtccagaaatgcatatttattagctattagccctcctttcactccaatgaaattgaaaaagggagcttttatcaatcaaaactctgaaagcaatcaaaactctgtaagccattggaacattgggcaatactatagggagaccccctgaaactattgctayagaataaaatatgaaaggggttgtccctccaaagccaaggctcgttgttccccacttcggacctgaacattcagaattatggagattaaccatagctatgactggtatgagggtttgggctgttttatatgtgttataagtaaatccaccttgtcacctcgaaaactaagacaacagactgatttacactactatttccacacggcgaaaaatatcactatggcagttgtcaaaaggtcaatt

SEQ ID NO: 411430 - DNA, 605 bp, Homo sapiens
aacttatgtctatacagaatataaactactattttccagcatactttgtagcaagatacggtaatgttacaaagttctaaccaattggatgtgaacagaaaatatatatgctgccttatgagtatatgctatgctaaaatttgaagatggcaaggagtagaaatatttatgacccagttcttgcattaaaggagctcagggtttttagagttatataaaatggaatttgttatactacagggcttcatayctgaaataaaacagattcagataaagttggcaagtaaaattggttaatatattctaccttcaggatctggtagcaatgaatgatttgcattcaggtccaacatttacatggaactaaattaagctttgtccacattctggcatttgtcatatacaggaatatctatgaaaggcattgtttaaactttgatggaaggcataatgggaaatacgaaaaaactaaaattttggaatcaatatgatttctgggaataaatccactgtggttaacagaatctgaattcaggaaaagcaacatggccaggggtagaagtagcttctgggagaacatggcgactatacttgactttaccgtt

SEQ ID NO: 411431 - DNA, 533 bp, Homo sapiens
aaatctaggcagaggtaatcaaaccccaattcttgacttctgtgcatttgcaggctcaacmccatgtggaagctgccaggtcttgaggcttgcatgctctgaagccatggcccaagctctgtgttggcccctttcagccactgctagagcagctgggaaacagggcaccaagttcctaggctgcacacagcacagggagggacattgagcccagcccatgaaaccattttttcttccttggcctctgggcctgtgatgctagggctgtcatgaagacctctaaaataccctggagacattatccccattgtcttgggaattaacatttggttcctcattacttatgcaaatctctgcagctggcttgaatttcttttcagacagtgggattttcttttctattgcattttaagctgcaaatttcccaaacttttatgctctgtttcttttttaaaactgaatgcttttaacagcacccaggtcatgtcttaaatgctttactgcttagaaatttcttctgccagataccttaa

SEQ ID NO: 411432 - DNA, 533 bp, Homo sapiens
aaatctaggcagaggtaatcaaaccccaattcttgacttctgtgcatttgcaggctcaaccccatgtggaagctgccaggtcttgaggcttgcatgctctgaagccatggcccaagctctgtgttggcccctttcagccactgctagagcagctgggaaacagggcaccaagttcctaggctgcacacagcacagggagggacattgagcccagcccatgaaaccattttttcttccttggcctctgggcctgtgatgctagggctgtcatgaagacctctaaaataccctggagacattatccccattgtcttgggaattaacatttggttcctcattacttatgcaaatctctgcagctggcttgaatttcttytcagacagtgggattttcttttctattgcattttaagctgcaaatttcccaaacttttatgctctgtttcttttttaaaactgaatgcttttaacagcacccaggtcatgtcttaaatgctttactgcttagaaatttcttctgccagataccttaa

SEQ ID NO: 411433 - DNA, 533 bp, Homo sapiens
aaatctaggcagaggtaatcaaaccccaattcttgacttctgtgcatttgcaggctcaaccccatgtggaagctgccaggtcttgaggcttgcatgctctgaagccatggcccaagctctgtgttggcccctttcagccactgctagagcagctgggaaacagggcaccaagttcctaggctgcacacagcacagggagggacattgagcccagcccatgaaaccattttttcttccttggcctctgggcctgtgatgctagggctgtcatgaagacctctaaaataccctggagacattatccccattgtcttgggaattaacatttggttcctcattacttatgcaaatctctgcagctggcttgaatttcttttcagacagtgggattttcttttctattgcattttaagctgcaaatttcccaaayttttatgctctgtttcttttttaaaactgaatgcttttaacagcacccaggtcatgtcttaaatgctttactgcttagaaatttcttctgccagataccttaa

SEQ ID NO: 411434 - DNA, 590 bp, Homo sapiens
tcacatggatggcagcaggcaaaaagagagcctgtgcagagaaactcctgtttttaaaactatcatctcacgagatttagtcaccatcatgagaacaacatgggaagacctgcgcccaagattcaaccacctcccaccagctccctcccacaacacataggaattcaagatgacatttgggtggggacacaaccaaaccacatcaatagatgaatatcaccactaaaatattatcattaaaatgagaaatattaccattaatatattaccattatcataaatattaacattataatgagacattatgtggctttcttggatataatatattccatcagtacccatttttgtgtgtatgtgtgtgcccacttgccaacattgctgtggacactaaaacctatctcttaagtcaattcccatttagatattccaattaattcagatttctctttcctgtgtcatatgtatattctctacttattgcatactgtcaccttgtcattttgtattttgagctttaaaaattattcctgcatttttactrcctagggatattatactaattttccagctctgtaccctccacttct

SEQ ID NO: 411435 - DNA, 590 bp, Homo sapiens
tcacatggatggcagcaggcaaaaagagagcctgtgcagagaaactcctgtttttaaaactatcatctcacgagatttagtcaccatcatgagaacaacatgggaagacctgcgcccaagattcaaccacctcccaccagctccctcccacaacacataggaattcaagatgacatttgggtggggacacaaccaaaccacatcaatagatgaatatcaccactaaaatattatcattaaaatgagaaatattaccattaatatattaccattatcataaatattaacattataatgagacattatgtggctttcttggatataatatattccatcagtacccatttttgtgtgtatgtgtgtgcccacttgccaacattgctgtggacactaaaacctatctcttaagtcaattcccatttagatattccaattaattcagatttctctttcctgtgtcatatgtatattctctacttattgcatactgtcaccttgtcattttgtattttgagctttaaaaattattcctgcatttttactgcctagggayattatactaattttccagctctgtaccctccacttct

SEQ ID NO: 411436 - DNA, 594 bp, Homo sapiens
gttacagatctgaggctcgcctttatctggccataacgacagaatgctttcggcatattctgcatgtccgtgtgctgtctgctgcagtctcatctccttgcttctctgtgacgctaaaaatggtccagaaaagctcctaycagctatcctaccattctggagatttattccgaagttacaattttatccctcaggatggcaaactaccttaaagaattctccatgccagcgttattttatggtacagctgtagatttcttttctcagcatttccttgcatcatattattttcgctagtcttagcaggcctcatttgtctattttttagagctacaggtagtttttagtttcaccaaagatagagctgtgctttcatctcttcttttacaattctctcattgttttggaatgatttcagagagaagaggcaaagaccacagaaatgttattattatgccattgtaaaccagaagttaattcttaaaatttattttgttatcaacttctgtgtcttctgtcaactttggacttactcattaaccaattgagggttaatgtggggagatatctgaataatagtaacattaataggac

SEQ ID NO: 411437 - DNA, 538 bp, Homo sapiens
agtcacggtgttgaaggctaatctgtgggaagttacaggcctataatcaaagttttatgatggacatcaatataattgctttgaagataagtgcttctctgatctaaactcatggatatatgtaagtgtgtaaggtagattgacattatttatttaaataatrtaagattactagttttaattctcctaacaatactaatagtttaggttttgtgttttgtattttggtcttagggccttttttgctctgcattttgattgatgaaaatcacattgtgaaacttctgcttctggtcaagtatacacacacacacacgcgcatgcacacacacatacacagtagtacataatatatactacatatacatgaatataatagttatatatacatatatacgtatacacacacaatggtgttcagggcactagacatgggatattaaaggactataaagatattggaaacaaacaagatgagcccaataattgccccagtttactcctccagacattttatagactgtatgcaggaaaagat

SEQ ID NO: 411438 - DNA, 538 bp, Homo sapiens
agtcacggtgttgaaggctaatctgtgggaagttacaggcctataatcaaagttttatgatggacatcaatataattgctttgaagataagtgcttctctgatctaaactcatggatatatgtaagtgtgtaaggtagattgacattatttatttaaataatgtaagattactagttttaattctcctaacaatactaatagtttaggttttgtgttttgtattttggtcttagggccttttttgctctgcattttgattgatgaaaatcacattgtgaaacttctgcttctggtcaagtatacacacacacacacgcgcatgcacacacacatacacagtagtacataatatatactacatatacatgaatataatagttatatatacatatatacrtatacacacacaatggtgttcagggcactagacatgggatattaaaggactataaagatattggaaacaaacaagatgagcccaataattgccccagtttactcctccagacattttatagactgtatgcaggaaaagat

SEQ ID NO: 411439 - DNA, 631 bp, Homo sapiens
atgataaggtgaccaagagataaaatataatgtagttgtaattttggagcacaatattctatagcacaaaatgcaktttgttgttgaaacaccgcagttagaacgctgatctctaaaacaatgtctaaaattataaattgtgattaatactatctctcttccttacttagctagttattatgactaatcatattcattatcttgataattagacatcataatgaatgtgaactcttatgtaatgtgcaaagtgctgggcaaatagtgtgttgcccaactacattgtgtacttaaaatcttacataatggcaagcataatgcagcacatcagagctgcctaatgtgtggtaaattgaattgaaccaatatttgaaaatgccagatatctttacccttccttaaatgcagtgtgattagggaaaaaagaggtagctggcctcagatcatacagtattgatcaatgttctccttagataaacaagtataatttgaggtaagttactatctgtctttgtctaggaaatacaattgaatagtcagcaggaaaaccaaactgcaactccatttaagtaataagacacagcaggaaatgatattgttacattaaacaccctgaagtgagttaatgtga

SEQ ID NO: 411440 - DNA, 530 bp, Homo sapiens
tcaatattgtctcctgttggtcgattctgttttttttarttgtactcccaagatattgcatttttaaaaatttttgtgggtaaatagttaatgtatatatttgtagagtacataaactattttgatacaagcatacgatatgtaagaatcacatcatggtaaatgtgggatccatcatcttaagcattatcctttttatgttacaaacattccagttatattgtcattatttttagtatgtcaataccagtttttcagctccaggatttctgcttgattcttttaaattattttaatctctttgttatatttatctcatagggagctaaacaactaaaacaattgaacttatgaagatagaagaatgatggttaccaaaggctgagaaggatagaggggtaggggagtggggatggtttatgggtacaaattataattagaataaataagatctagtatttgatagcacaacagggtgattacagtcaacaataagttattgcacattttaaagtaactgaaagtataat

SEQ ID NO: 411441 - DNA, 583 bp, Homo sapiens
gccctgtgttggagaggagaactgagaccagctctggtttccaaaaggaggtccacttttctccctttgattttcagaattacccagggctcctggatggtaatggtggtctggaccaccgggaagttgaagagatgagctctgggactcatcagccctgctgctggaccatatgggagattggtctggaactggtgacgagcatctctggggacagtccaccctcctccagtggtccccatttcagattggacaaggtcaaggtggctacttcatgcttcctggacaatccttcctaaaatgccctggcttgccacatctgtaccagttaaagggtgtatcctgggaattctgggatttgttggcttgcctggtggycattaaagctcctgtatctttcctgtgtttcctctctgtctctctcgggcctccttttcacttataaaaaaccaaagtatccactttcaggaggttctctaaagtactatctagtcccagggcctatttctgcagcttcttcatgatatcaggagctgcctgagtaataaatttatctttcaggattagttgtccctcaactgaa

SEQ ID NO: 411442 - DNA, 592 bp, Homo sapiens
  misc_feature (1)...(592): n = A,T,C or G
ggttcagggtacactccagagaagtacaacctggggatggtgaagatagctggtttccaattctaaaagacagggaaatagaggcatccttcattttctttcttctttcagtgataaccagaggtgtaatggagagaaagtgggcatcctttatttctcttccatcttgtcacctagtcctggcgaccttggcaggtgccacccacgggtgccaaagtgattttcacctgtgctaacagaggaagtgcttattgnggtgggagtatcttctcttacccattacgccctattttccctttgagttccctgggcctcatctatgtcatggagcatggcctcyttccatgaaacagagatttagttagcaggaattggtcctacccatttacattgtgcctgttgcctagcttcggatccctcagatcaggtttttcattctagggcctcaatctgaagcctagaattgattttgggacaaatttcaggggctgcatggatctgtttagattaagtctcagatgtgccctggtgaatttgcagttatcagccagcagggggtcggccatccactgtttttcctgttataagcaga

SEQ ID NO: 411443 - DNA, 597 bp, Homo sapiens
atcaaatctcaaaaattcagaggttctccttcattactaggtattttatatattagtcttgcttcttcaaatagaggaaagctctttgaaggaaagaatcacgtctctagttttcgaaatgtaattaagaaagttttagcaagtgtgttcatacaaaaaaaattttgataaacatgttaattgaagagaagagattaacaagccacatttatttcagcatccattttgtctaatgaccattaagctttaattaactttgagtcaacatgcttcaaccacctttttccctgctagttgtgcccgattagaaaataaaatatttatcatcatattgccccaaatttactaaaaatactaaggctagatactttgtgttcctatgaattattcttaaaattatattacattgttattgctatttgactaaatgtacaaaatatatatagcttgaagaatatgaatataaataaaagtgactcacaactacaagaataaacattactcagtagataaccaagtggtaccctactacccasaggtaatactaatggtctcagagcaacatttatataatcacacttcaatggaaatcattgc

SEQ ID NO: 411444 - DNA, 590 bp, Homo sapiens
ccttgcatatctatatgaatttgaagactagcttgtcatttttttgtgtaaaaagtcaggtgggattgtgctgggaattgcattgaattcatagatcaatttagggagtatctgaacctaatttttatagttgcacaaattgaggtttccccaactgtggcgtaatcacatttaaggtatctgggaattatttactataatrgatatttacattctgcccattaatgctcattggatggttattcatagtttgtcatgaatttagaaagtttacaatatattaattccttcctaatatgaaaactattctagagaccttgctgaaagcatatgaggcaagaaattgagtatcacatgtcttcatatttccatctttcttctacacaatccagtttccttattacttctcacttgtaaagtattttgagcattcgctctaagggtctgtctactgtctagagataaatattttgtaggtaactaaatatttttttttatttttcagttcatcatttatctcattgattgtcctaaaataacaatactcatttgatgtgcatttttagaagtcaaataattataatctattt

SEQ ID NO: 411445 - DNA, 584 bp, Homo sapiens
ttatgaatgttaaatttttataacgattgattctgttccaagatggccaaataggaacagctctggtctgcagctcccagatgtacaagatgggtgatttctgcatttccaactgaggtrcctgggactggttggacagtgggtgcagcccacggagggcgatccaaaacagggtggggcattgcctcacccaggaagggcaaggggtcgggggattttcctttcctaaccaagggaagccgtgacagactgtacctggaaaattgggacactcttgcccaaatactgggcttttctaatggtcttagcaaatggcacaccaggagattatatctcgcgcctagcttgtcaggtcccacacccacggagccttgctcactggtagtacagcagtctgagatcaaactgcgaggtggcagcctggctgggggaggggcatccatcattgctgaggcttgagtaggtaaacaaagcatccagggaagctctaactagacagagcccactgcagctcagcaaggcctattgcctatgtacattccacctctgggggcagggcatagctgaacaaaaggcagcagaaa

SEQ ID NO: 411446 - DNA, 584 bp, Homo sapiens
ttatgaatgttaaatttttataacgattgattctgttccaagatggccaaataggaacagctctggtctgcagctcccagatgtacaagatgggtgatttctgcatttccaactgaggtgcctgggactggttggacagtgggtgcagcccacrgagggcgatccaaaacagggtggggcattgcctcacccaggaagggcaaggggtcgggggattttcctttcctaaccaagggaagccgtgacagactgtacctggaaaattgggacactcttgcccaaatactgggcttttctaatggtcttagcaaatggcacaccaggagattatatctcgcgcctagcttgtcaggtcccacacccacggagccttgctcactggtagtacagcagtctgagatcaaactgcgaggtggcagcctggctgggggaggggcatccatcattgctgaggcttgagtaggtaaacaaagcatccagggaagctctaactagacagagcccactgcagctcagcaaggcctattgcctatgtacattccacctctgggggcagggcatagctgaacaaaaggcagcagaaa

SEQ ID NO: 411447 - DNA, 492 bp, Homo sapiens
gaaaccacggtctttttataacctaattttggaaatgacattttatcatctctatcgtattctattcaatagaagttaatcaataagtgtagcccacacaagaggggaaggaaatctatgagggcatggaacagggatcactgggggccgtatgacagtctgtgtaccctagtgctttccatgtctcctcaggcaagacttggaataacattttactaagtcatattgggaaattgtggatgtaaaatacgaatacaaaaattataaattcttttaaatattatattcaagttcactggaaagtttatagaggtgagtaaagattactactggtggccgggcacrgtgcctgtaatcacagaactttgggaggccgatgtgggcagatctcgaggtcaggagttcgagaccagcctgcccaatatggtaaaaccccatctctactaaaaatacaaaagttaacagggcatggtggcgggtgcctgtagtccc

SEQ ID NO: 411448 - DNA, 539 bp, Homo sapiens
cttttttgttataattatttacttgtgtatattctgcactttaggctcttgtagggtagagattataagtgttttgtcattgtacccttcaaggctagtgcagagcctgttccatagtaaaaattcaatcagaatttacagattgattgaaggaatgtgggaggaagatatccttgaagccagtctaactgaaaaaaaaagtgttcttctctagcttttttttttttttggagatagagtctcgctctgtcacccatgctggagtgctgtaggatggtctcggctcactgcaacctctgcctcctgggttcaagtgattctcctacctcagcctcctgggtagctgggattacaggcatgtgccaccacgcccagctaatttttgtatttttaatagagacgagatctcaccatgttggccaagctggtctcgaactcctgacctcaaatgatctacccgcctccgcctcccaaagtgctggaattacaggcatgagctaccawgcccagctggtcatctctagctattcttaattcaa

SEQ ID NO: 411449 - DNA, 519 bp, Homo sapiens
atttacaaaaaataggccaggcatggtggctcacacctgtaatcccagcactttgggaggctgaggctggtggatcacctgagatcaggaattcgagaccagcctggccaacatggtgaaaccccatctctactaaaaaaaaaaaaaaaaaaaaaaaaaatacaaattagccgagagtgctgacaggtgcctgtaatcccagctactcagcaggctgaggcaggaaaatcacttgaacctgggaggcagagactgcagtgagctgagatcgtgatgtggcagtgcgcacctgtaatcccagctactcagaaagctgaggcagcagaatcacttgaacccgggaggcggaggttgcgatgagccgagatcgtgccattgcactcaagcctgggcaatagagtaagactcggtctcaaamaaaaaaaaaaattacaaaacaatacacttttttcatctttgaatcacctgtttgctgcccggcttatatttatacttgctgtttttaaacatcatgaatat

SEQ ID NO: 411450 - DNA, 533 bp, Homo sapiens
ctttcattattaaaaggaaggccctgagtaaatatgaaattacttacattagggctacagacaccaatgaaggctgaacgcccaattataataaatgaaaattgttagttgaatttccccccaaaaccacagaggcataaatacttcaggaattgattttcttttactcagataccttataatgattcagcaaaacaaaattataaatacttcagctctgagtaatattaaattgggagcagattggatcctactccccacagtccacttacctcagacaggtcggcagtaccaggatgtgcttcagtggaaaagtttatcytaaattgattggagcagaaaaaacaaaatctgatatatgtatttttaaactcccacccctcatcatgtgctcagtgcattttttccccctcatcgcaattttgtaaaggtctgattcaaaatatttaattagaaaattagcttaatcagatttgagggaactaaaaatagaacaaccctaaggtgagtgtatatatacatacacacacaca

SEQ ID NO: 411451 - DNA, 535 bp, Homo sapiens
ggaagtctttcctagtatcagcaatgggcaaaaaataactaaaccaatacttgcaatgatttttttgggtatgacaccaaaagcacaggcaacaaaagaaaaaataaacaagtgggactacatgaaacccaaaagcttctacacagcaaagcaatcaatcaacaaaatgaagaggcagcctacaaagtgagcgataatatttgcaaaccacatatcagataaggggttaatatccaaaatatatccaggaacttacacaactcaatagcaaaaaaaaaaaaaaaaaaaaaaaaaccacccawttaaacagtgggcaactgaataggtacttttccaaggaagacatacaaatggactaatagatatatgaaaaaaaaatgttcaacatcactaataatcagggaaaggcaaatcaaaaccacaatgaaatatcacatcatacctgttagggtgactgttgtcaaacaaaaataagaaataagtattggcaaaggcgtggagaaaagagaactctgtacactgttgatgggaatgt

SEQ ID NO: 411452 - DNA, 549 bp, Homo sapiens
ctcaccccctctgctccccagcccactaactcgaggttttgatttaactgccctgagacgtagacatctagatttttttaagctccctaggtcattctactatgagtgagagccaccgcttaaacatttgcctagcactttgctgcttgctgcacctaccccaggtagagaaacagaagatgacaagagaggagagaaaataaactctgctgctgtcctcaacagctcccrtaagaggaatgaacagatacatatacgagggttttctgtaagcttcaactggtttataggagggtgagccatgatggatatctgcaagtaagatccatttttatgggatgtaaatagacccctctccagtctccaataccaggcggcctccagggttcagtgtagacagcagcaatgcccctcagagcacagcagcaaaagcaggcttgccttgcccacaaccccaaaggtgctcagtacaaagctgtcagagatagcaagagtgtctaacactcagtgcacgttcagtatataccagacactatactgaggacacat

SEQ ID NO: 411453 - DNA, 565 bp, Homo sapiens
atgaaataattgaagatctattcttcccgaaaagatcagataaggcttaacgtgtttactccatttttcatatgggacaaataaatgaatattttaaaatggaatcctagccataaaactgacactgagatacagagtttgggggtatgctttggtagcgggtgacagtggtggggattatatctcttagctgtgtgctaacctttaagttctgcaaagcatagcttactgcctccttatatattgtcttgcactcttctccagctctcatttcttagaagccatcactgttaagcagtgctgcttacaaaatcaagttagctaagtccctgccatcagagagtttataatctgatggtattgttgactgctaggtccccaggatctagaacagtgcctgacaaatagcaggcattcaatacatattactgaacgaatacatgatcaaatgaatgaacggttttctgtatgcaaacctcattttccagtcaaggctataagcagctcacaggaagcaggccmcagagccacagactattggaagacaaagggatttcgtgtcttt

SEQ ID NO: 411454 - DNA, 594 bp, Homo sapiens
tgctgttgctggtctgttggtctgctggtctgcaggtctgctctggagcgtagagtttgggatttatatgtgggcaggatagggggtgtggggggccaaaaggtagctttttgggcacaaaaccagaaatgcctgttctcatttagggctatggatattcaggcttgagggtggggcctttgccagggaaccaccctcttgtacccagtatttccctgcctsttgtccatatcccaacttaatctgcccagggctctgcctacaatggagaatacttaatattgtcatcacagagtaggattgatttgaggcccaacccatttctatccttacctccacctccgttcttgctcaacctcaggtttgagcttgcataggaaaaaatcccaccccacacccttagagtatctacccactcaatgatagacagttaccgtttatcagtgccttaggctaggtcaggttgccagaccagatggtcccacacctgtcttcctggaccagtatttctcaatgtgtgacttccacacctcctggcagatttctgtgtcccactccagatttactgaatctagatacctagaggtgggacca

SEQ ID NO: 411455 - DNA, 594 bp, Homo sapiens
tgctgttgctggtctgttggtctgctggtctgcaggtctgctctggagcgtagagtttgggatttatatgtgggcaggatagggggtgtggggggccaaaaggtagctttttgggcacaaaaccagaaatgcctgttctcatttagggctatggatattcaggcttgagggtggggcctttgccagggaaccaccctcttgtacccagtatttccctgcctgttgtccatatcccaacttaatctgcccagggctctgcctacaatggagartacttaatattgtcatcacagagtaggattgatttgaggcccaacccatttctatccttacctccacctccgttcttgctcaacctcaggtttgagcttgcataggaaaaaatcccaccccacacccttagagtatctacccactcaatgatagacagttaccgtttatcagtgccttaggctaggtcaggttgccagaccagatggtcccacacctgtcttcctggaccagtatttctcaatgtgtgacttccacacctcctggcagatttctgtgtcccactccagatttactgaatctagatacctagaggtgggacca

SEQ ID NO: 411456 - DNA, 588 bp, Homo sapiens
ccttagagtatctacccactcaatgatagacagttaccgtttatcagtgccttaggctaggtcaggttgccagaccagatggtcccacacctgtcttcctggaccagtatttctcaatgtgtgacttccacacctcctggcagatttctgtgtcccactccagatttactgaatctagatayctagaggtgggaccaggcatccacatttaatgtgcccagtgagtgttctgctcaataatagcaatagcagctgcacttactatgtgctttacatgtattgcatcttcacaaaatccttgagttgggtagtagcagcgccactttgcaggtgaggaaaactgcagcacagagaagttgaataacttgcccaagttcacaccgctgtaagtagcagagctgagatgaggctcatctgttctagttggtaaacctctgctctaagcaatagggtggcaagtgatgaattcgtgagcccccaggccaagtcgttcaaggaagatggggtagagtttgtcaattacaatgataaaacataggccttgctttctgttactagaaattattttgaggtagagactagacaaaa

SEQ ID NO: 411457 - DNA, 588 bp, Homo sapiens
ccttagagtatctacccactcaatgatagacagttaccgtttatcagtgccttaggctaggtcaggttgccagaccagatggtcccacacctgtcttcctggaccagtatttctcaatgtgtgacttccacacctcctggcagatttctgtgtcccactccagatttactgaatctagatacctagaggtgggaccaggcatccacawttaatgtgcccagtgagtgttctgctcaataatagcaatagcagctgcacttactatgtgctttacatgtattgcatcttcacaaaatccttgagttgggtagtagcagcgccactttgcaggtgaggaaaactgcagcacagagaagttgaataacttgcccaagttcacaccgctgtaagtagcagagctgagatgaggctcatctgttctagttggtaaacctctgctctaagcaatagggtggcaagtgatgaattcgtgagcccccaggccaagtcgttcaaggaagatggggtagagtttgtcaattacaatgataaaacataggccttgctttctgttactagaaattattttgaggtagagactagacaaaa

SEQ ID NO: 411458 - DNA, 632 bp, Homo sapiens
cctcaggccccaaaaatgaaccgattatcattatccattctgtttcttctattcacactgcatttacattcactatttaaaagttttatttttcttatatcaggcctagaagcaacttccacatcagacgcactgtttacaaaaaaaaaaaaaaaaaaaaaaaaggtcccataaagccacaggtcctctgctatctcaaacccacagcctgaagttgtttgaactagctgcagtaaatccagttcatgggtttataaactagctcaaagcattttctagacamcgtgggcttagagcgtgtaaacttggtgaaactacaagatatttcattatatcatatacagacactttctcccctaaagtcttgctgaatcttagccaggaatacaaaccatataaatactcttatggaaattccagaataagactcacggagactaatgatttaaattcagaagtctgaagtctagaaaaaaagaacacatttgcttgatttgtccttaatcagaaataagaaaacttcacaaatatttttcaaaggatagccattttgcactgcatactgtgttgctacatactaaccagaaatcatgctgctcatatcttaaaatcgaatcagtcaacaccataat

SEQ ID NO: 411459 - DNA, 622 bp, Homo sapiens
cctctctgttgagacaccaagttacgtcaaagtctcaggagcagctccggtctccatagaggctgggtcagcagtgggcaaaacaacttcctttgctgggagctctgcttcctcctacagcccctcggaagccgccctcaagaacttcaccccttcagagacaccgaccatggacatcgcaaccaaggggcccttccccaccagcagggaccctcttccttctgtccctccgactacaaccaacagcagccgagggacgaacagcaccttagccaagatcacaacctcagcgaagaccacgatgaagcccccaacagccacgcccacgactgcccggacgaggccgaccacagacgtgagtgcaggtaagtggctcctgctggtgatcttcggggatttgggatgcggagtttccaggacgtctccgcacttgaggagtggagaggagggaaggatctggagcctactcagagcctgctcctgmtgttgcctcttcgtgatcttctagtggttcttggcgaaatcaggaaaaggcagatggagggttgtgtatggaaaggggtggggatggaagtccggagaaatggtttgcggtctcggctctgcctgtaacaacccgagt

SEQ ID NO: 411460 - DNA, 596 bp, Homo sapiens
actgtacttccaagaggcataggagattaactggctaatagttcaggtaatgtggtcacacaaaagtggctgaagctgataaacaaggkgtttgcaattacagactttcctcccttccctctcccagttcttagcaactaacaaggaaaactcaaatttatgatatatattttttgggggggttgacagagcttaagatctgtaacttccgccatggcagcagccctgaggaattgccaaatgaattatggtggccataacctgtccatcttatttgtcaccgagcgcagttggaaacttttggctggaacccttctcacctcgggatggtttctgggttttaagttttgcagtggaggatcgcatcatcaggccggtctgcgtgctgtacacactccctgccagcaaatttcaacaatgacagatgttttttgcacatagcagacctagggtgttataattagggtttcaggggatgaatcataggtccctgaactggaatgaaagcaagcctggggcctgagcagtttttaggaatgtgaggtaaactcatagatcacacagatggagaatccttctggatctggactctctct

SEQ ID NO: 411461 - DNA, 596 bp, Homo sapiens
actgtacttccaagaggcataggagattaactggctaatagttcaggtaatgtggtcacacaaaagtggctgaagctgataaacaaggtgtttgcaattacagactttcctcccttccctctcccagttcttagcaactaacaaggaaaactcaaatttatgatatatattttttgggggggttgacagagcttaagatctgtaacttccgccatggcagcagccctgaggaattgccaaatgaattatggtggccataacctgtccatcttatttgtcaccgagcgcagttggaaacttttggctggaacccttctcacctcgggatggtttctgggttttaagttttgcagtggaggatcgcatcatcaggccggtctgcgtgctgtacacactccctgccagcaaatttcaacaatgacagatgttttttgcacatagcagacctagggtgttataattagggtttcaggggatgaatcataggtccctgaactggaatgaaagcaagcctggggcctgagcagttttkaggaatgtgaggtaaactcatagatcacacagatggagaatccttctggatctggactctctct

SEQ ID NO: 411462 - DNA, 542 bp, Homo sapiens
tatttttggaccgaggttgaccactggcacctaaaccgcagaaagcaaaaccacggataaggggggactactatgaatggaaacatacagtatgtattctttcatgcccatttattttgctcagcatactgtctgggatctttatccatgcttttgtggtatcagtagtttgttgtttttattgttgagtattctgttgtgtaaatataccataatttattgcccattcttctgtttatgaacattttcattatttccagyttggggatgttattaattaaggcgctgtgaacattgttgtatataccttttggtgaacatatgaactcttttctagtgggtatatacctagcagtgaaatatctgggtcataaggtagaactatatttagcttaatggatattgccaaacaattttccaaatcggtcacactgttttatactaccatccgcaatatataaaggttccaatttctccacatcactgccaatgcttactcttgtgtagttttgattttagccattctgatgagtgtatggcgg

SEQ ID NO: 411463 - DNA, 530 bp, Homo sapiens
caaaattgttaggtaaagtggttggcaggaaactctcaatccacccttaggaaaaaatgcttcctcttgttgagtctttgaaccataatccccttaaaccctctacactgagcacatataagcgctattgggatgattgtttttctagaacattttatgtcctcagaacttttgacaggtgccttttttcatcggcagtttgcagatgcmgtgtgggtggaagaaggatactcctcattttaagtgaggaaactgaagaatacagaggtaaatttaaggcaaagctcaacagtcttaaaaacatagaagtgaatttgtagttgggactatgtcccatgacaaagatgtgactctctttcctattccctctgagttttgtacagatgattttgcttgtccttagataaaagcccttcaatcaagattatattcaagaggaaagaagctgagatgtaagagagtggtcgaattatacgcaattatttttttttataaattttcgaatttcatgaagtgagcattttagagtt

SEQ ID NO: 411464 - DNA, 593 bp, Homo sapiens
tattttgattttgtcatgtgccttgttgaactcaacgtgtatcctcttatacagccttatgctggtggcatttccctcatcagtcttacaacactaaaaaagaagtaaagttaatctgctgtgacttttcattctttatttgctgtaataaattggtctaatgttttcctgggastgtcaagttttataatctacattctaaacaatcttcaggcatttttacatcattaaagtcagaaatgtatttgtctttttccattctctgagcaatttttacatttgctgctatttcttaaaaatcaccaacagggatgggtgatttttgctacaggtttctcagtacattgaagtaaaattcatctgtacctgtgatgagtaaactcatctgtggtattaggggtcttttactaggatactcactcaaccttttatttcatatttactatgtttgttttattctttttgacagaaaatataaaagcaaaattatgtcaataatagtcttttcctggttttgcactaaccttttctacctgccacaagagatggacttattccttcctttttttacctgtctgctcccaaagatagcc

SEQ ID NO: 411465 - DNA, 565 bp, Homo sapiens
atatcttaattacagtgccctgaacatatttttcctagcctgctacatcaggaagtcattgctttctactgcccactggagtggacttttccctcacctacccacttgtgacactcttcttgcagatggaggtctatattttgcctccagccaatatggcaaaaatgacctctgtagacttagatggtgaaacaatgaatattctgacctattccacagtggcccttaagggacgaagggtacagggaacaaaggcaggatattttgcctccttccatccgtgtctgagtacctctaaggtatactcctcttggttgtatgagaccccaaccacaaacaccaaagctgtctctcaaaaacatctaagcaaattgcaacaagatccttataattgcaccccctgcctttattcatttcttgtgttttttgtttgtttgttgttgttgtttgtctttttttttgagacagggtctcactttgttgttcaggctgsagtgcagtgaggcaaacacagcctcctgggttcaagtcatcctcctgcctctgcctcccaagtagctgggac

SEQ ID NO: 411466 - DNA, 565 bp, Homo sapiens
acctgaggtagctactttctttacttaatgcttatagaggcaatggaatgaataacaaaactaagatcagcacgaagtgggagatgctatgtatctacatatttattttggtgatttattttgtggattgttcactttagtaaacatttaactrtatattagatactctgctgggtctggtgttattaatgcaaagagaaccatgacctagcccttgccctcagctcctgaattttttatagatcatggcaggagcagacacacagttttttacaatatggcatgaggtacacagtggacaccttgggcaccttcttggtatgacagggcaagggtgctttcttctaaaagataatggccaatagttagaaggttgcctggctcatagttcttccagtaccttacatattgtacaaactcctttaacccacctagcaatcttatgagatatggtatctccattttagagatttaaaaaaaaaactgaactgaggcacaaaattgttaggtgacttgcccaagttccctctgccagcaagtagcagaataaggatttgagcccagg

SEQ ID NO: 411467 - DNA, 559 bp, Homo sapiens
gttacaatctaccaatacaaaggaattataaatttgtccttgtaggttttcttatatttctaacagttttgactaaaatgatcctgtgtatatattaatttcctttttgttgtgaattttagttttctcctcattgtatcacctccccaggttttgtttggtttgcatttactgagcaatggtttttgcttaatagtgatataaatcactattgggtgtrtttcttataagcctctcgtcagattttgtattttaaaggagcagttaaacctactcatgattaacgagaacacagatatatttgtgtttacttctaccatctgatcatattttatatgcttcctggcttttctatcttgggattttccttgttctttcttcttgctacattaatgttacacacaacatctcttgctcactctctttgttcttttagaaatgtggataaattctatttttattctattactagttacctttaaatttttaaataaattttaaatttctctgtcagaggaaagatttcacggtagctattaattctcttcaacaaaagatg

SEQ ID NO: 411468 - DNA, 599 bp, Homo sapiens
tgtgctttactaaagccatctccaacaagtgagggcggagtaactgttctcatttgagggcctttaaaggtgtttgtcttagatcctcccagactcagcaaagaacaccccaaataccagggcagggtcagcccaggcagacaaggctattcctatgaraggcactttggtgaaggtaggggagggcagggacagggatgtcacttattgagtgcttgctaagtgctgggggctttccttacatcatccgccaagtcgaggcagggtaggcggcctgctttaacctaagtagtctccattttttagataagaaaactaaactgaagcttagacaaccttgtcaatgggcaagggtttgctcagtaacttagagtaccatctcctccttggggggcaaaactgcctccagttattttataaaaatgagcattacaaggaaccccccaaattcctggtatctttcctaagaatgattctctcagcctctctctcagagtctgcctctttcttttcttcctgcttttctctctctccccctatttttttctctatctcccttcactctccctttcccactctattgttttttctggaaattc

SEQ ID NO: 411469 - DNA, 599 bp, Homo sapiens
tgtgctttactaaagccatctccaacaagtgagggcggagtaactgttctcatttgagggcctttaaaggtgtttgtcttagatcctcccagactcagcaaagaacaccccaaataccagggcagggtcagcccaggcagacaaggctattcctatgagaggcactttggtgaaggtaggggagggcagggacagggatgtcacttattgagtgcttgctaagtgctgggggctttccttacatcatcygccaagtcgaggcagggtaggcggcctgctttaacctaagtagtctccattttttagataagaaaactaaactgaagcttagacaaccttgtcaatgggcaagggtttgctcagtaacttagagtaccatctcctccttggggggcaaaactgcctccagttattttataaaaatgagcattacaaggaaccccccaaattcctggtatctttcctaagaatgattctctcagcctctctctcagagtctgcctctttcttttcttcctgcttttctctctctccccctatttttttctctatctcccttcactctccctttcccactctattgttttttctggaaattc

SEQ ID NO: 411470 - DNA, 599 bp, Homo sapiens
tgtgctttactaaagccatctccaacaagtgagggcggagtaactgttctcatttgagggcctttaaaggtgtttgtcttagatcctcccagactcagcaaagaacaccccaaataccagggcagggtcagcccaggcagacaaggctattcctatgagaggcactttggtgaaggtaggggagggcagggacagggatgtcacttattgagtgcttgctaagtgctgggggctttccttacatcatccgccaagtcgaggcagggtaggcggcctgctttaacctaagtagtctccattttttagataagaaaactaaactgaagcttagacaaccttgtcaatgggcaagggtttgctcagtaacttagagtaccatctcctccttggggggcaaaactgcctccagttattttataaaaatgagcattacaaggaaccccccaaattcctggtatctttcctaagaatgattctctcagcctctctctcagagtctgcctctttcttttcttcctgcttttctctctctccccctatttttttctctayctcccttcactctccctttcccactctattgttttttctggaaattc

SEQ ID NO: 411471 - DNA, 508 bp, Homo sapiens
tcaggaaaagcatttcacctccttttgcagctatgttacttctctgttaacatagctgcaaagggttatgtaacaactaggttacttctgtggtgtcagttctgggcacttgttagtggcattgactctaaagagttcaaagcagtttgccaatattctcatttgtctcttgaagtagggaaagatagtaaccagctctcytaaatcagtaatggtgggaaatgaggtctgggctgagagaaggagggacaggagatactagtccatgtgagtgacctgatcttatacccagcccagtgctggtgggtattaggaggtgcaggcagggagctctgcctgccagagtggtcagggggcatcgtggaggacttggggattgagctcgacctggaaggctggtagaaatgacgtcaggcagtaaggaggcttttctacgcagaagagaaggagttagtgtttgtaagagacccggactaggtagaaacatttgggtggaagaaagggctgt

SEQ ID NO: 411472 - DNA, 578 bp, Homo sapiens
caaaaggtgttacagttatttacttgaggtactcttgcattgttctgccttgaaaattgttagatacaagaggaaaaataactaaaaacagcttattccagcattaactcttagctctgccaatggaagaaagccaatgtggtatttttataaccaaagaaaactgactgttggtacaatttccagtttacataacagtagcattccaagagcttgtttgtaaatcatttggtgagatctcagaatccacaggaaacagaatattacaaaaagtgggtgaaagagctggagcagctcataaaagctggtcttacctattgcatacctcacctcttaaacagagtgctgctraatctgccattcttaacaataccaccagggacaatgttgggcacaaattttctgagaatatggattccttatgctgttcaaaccatcagccagcaggcttggggctcccccagggccctgcctttcctggcatgggactagggtggcaggtgggaaataggctgcaggaagaggaggagatgaggttgcagaggaccagaggtttgaggcaccagtttcagattaac

SEQ ID NO: 411473 - DNA, 604 bp, Homo sapiens
agtgttggttctttggcctagtgagagaaccaggtttgttattagaaacaaaatactaacagaaggcttttcagacttttgatcctatgtgcgccaactgatgatcatatcagaaatgtgtcttctgcagagctaatgatatctaaagtaagaatgtattagaaaagaccaaatgaaatagacatgataccaaagcaaaagatggagagaaaagaatttttcgccagagaggagaccaatgggtgaaaacattgttggtgctgtttagccttttccactcacttttcccatcaaacttggctaatgttactcaggaagctcagtgattcaattactattcattaaggcttagtgctctcaagctgtttaagtatggctgagaacaactacctccaactggccttaacttacccagtatactcaractgaaagcaggtttacattccaagaaattgtgcaggactttcagctcatcttctcagcttttcagtaacctggtacttaactgccatttattgtaaacccttagtgctttgtctttatttatagcattctttagatgtggacgtatcacataactgctacttaacaattacagaaacac

SEQ ID NO: 411474 - DNA, 575 bp, Homo sapiens
cctttgtttttactgttttgtgtttttacttaaacattcattttatttatttcagaatagtgtggttttgagcacaaaacagtcagaaaaaaagacctaaaatataccaacttaaaataaaactttggtatctgcgctcccatcaagatctgaagaaatattttcagatgccataaagctaattaaaaacaaaccaagcaactaaaaataccatcaccacatctttttatagctgcctttaatcttgttttaaggctaatgtgaatcaatgaataaatttggagaaattttgtttttccccttaaaaaattatgttcctaaaacaagcatttcctacccagaatgtcygtatgagcaggcatagaaacacatgaaaaataaactaaagcatgtctatttaaaattaattatgatctgaaaaacaaaacaaaacaaaacaaaaacttcatcccagaaaacctttgttaacgttccattcaaaggctattgaacacgtttaatttccttgagggagagtattttgtcatgcggggagaattcttagaagggaaagcctgcaggtagcaatacagaca

SEQ ID NO: 411475 - DNA, 538 bp, Homo sapiens
ctggtgtactcttttcccactcctttgccccaaccacatacacactaggttttagagcagcagcttctagcccattttcacagtctctggtcctggcagaacacctgttgaatctttggtctttatatcacaacctttcgttcattcatctaatccaaagaatattttatatgccagacattttgctagatagcgaagatgtgtcataaataaaagagaagagccctgttcaacctctccacccaattgtgggagaaattgacattaaataaataatagctgattattttgttaaaattataatagtgttacataggagaagtcactgtgtctcaggagtgtagaacggggaaactaattagtcagtgattgtgtgagaggagtgttagggaagacccctcagaggaaatgatattttcttagactttaaaagaggatgaagagttgtctagttgaagataaagtggggtgatgcctaatatattgctcaataaatatttttttaatgratttgtaaacaaaacttccagaaagaatt

SEQ ID NO: 411476 - DNA, 618 bp, Homo sapiens
ttctcatgaggttgaaccttgataactcttcattgcctctcttatctttctgcccactctcatggaggagatgaggcatctcctcccagaaaggctgcagagctccaagtcagactcacatgggaaccatattccacataattttttttttttttttgagacagagtttccctcttgtcatccaagctggagcgcaatggcatgatctyggctcactgcaaccgcggcttcccgggctcaagtgattcttctacctcagcctcctgagtagctgggattacaggcacccaccaccacgcctggttaatttttgtatttttagtagagatgggtttcaccatgctggccaggctggactcgaactcctgacctcagatgatccacccgccttggcctctcaaagtgctggattacaggtgtgagccaccatgcccagacttaccacagaatttttattaacatataacacactcagacaaatataaaactcataaatgtgtacaaattgatgaatttttaaaaaccagaaatgtgtatccttcataaaatcaagaaatagaacataaaaatcattccagaatttcccctgtgtctctctcagtcacttcccactcccct

SEQ ID NO: 411477 - DNA, 551 bp, Homo sapiens
cccctcatagggtgtgggatgctcaaccctgtcccaacttccctccctccctcctgtggggctaaaaggcagcctcagctccattcttcaagcttctttccttgcattcctcccctgaccctcagccccatgactctgtcccataatatttacctgcagtaggcagatgttcagatcacctcacccaggaaacctccctcagaaaactttgcttcttctattaccctctgaaaattttatttctataattatttatcttaattttggtgagccttgttgcatatttaatcattagcatcctacyggttttttgtactacactatttcttcgtgttcctgttcaagctaccctacaaaaaccaactatcctgccagcttggcagagtgcctttatatttcatagatgctgcctgattcatgaattgctaacaaaagccagttagattattgaactacatctattgaaattttgttttttgacattgtaagtatgaaaaagagccccaagaatatttgacatagaacacaaaggtagcccaggagtggggtgt

SEQ ID NO: 411478 - DNA, 534 bp, Homo sapiens
cgtggcctgctcttgacatcagaaggccatggagaggatgtaactattaaacaacataaacaaatgttaccccagagagcctgggttctgggaatatgaacagggactcctgaccaaaattccaggtctccaagttccccttgaggagtcatgaggattagacagggtgaatcaccacacccagtgtctgtcttggagacctaaacccagatatgarcttcagcaaaggaaggggctgattcaaatagcatgggggttgtagccagagcaatataagatgttcccctgggtccttatgggaccaagaaacagttttgcccaagactttggatgctgttctagttctgaggtcagtggcaggtcaaagccatagctggcctccatggagtcagcacagtagcctctggtctggaagactatgtggaaaaagaagttcagaagagtgtgggctcagaaatagagtcagtattctccctagagcctgtattatttctcagtctaaccctacataagtggaaggcagagagatagcca

SEQ ID NO: 411479 - DNA, 506 bp, Homo sapiens
cagcccaagcctgtgggcaccactcgccctgggctgcctggcacctggactccttcccatccttggccgaggtctgcgtggcccttcagggcgaatctgacactgtcttcctcctgagtctgccccccgggcttcctgcccacccccaggctgtttcatggcctctgcagggagcttcgtagaggtgaggctggtgccatctgtctgcttcagaccacctcaggctctgcgtgccctcacagtcccctctgcacttytctgtggggcagggaagcccttcccatcaggtctgctccagcctggctaccttgttcctgctgtcccctccccttcaggcccccggacaagacttcagtgtacttgctggtgccgggcagaatgggggaccttgcctctcacacacacctgctagtatctccgcaacctccaggcatcatctcagctgacagtgacgccatcctggggaagctcccctgactcctggctctcctggaagcctgtggtgc

SEQ ID NO: 411480 - DNA, 595 bp, Homo sapiens
aactagtctctgtgtcaatagcaccaaaattccttagcaggctgtattttctgatttttggtttagaaggcatggtcattcttcctaggctcttgtaggacctaaaagcagcatccctctaaggccccagcgccccctgcccagtgctgtcgyactgtgccttctgggccctgtatcccctggagccacacagatccccttagggagacccatgtctagggacttcatttccaagccctctcttttcttagatagcaggatcatggggcactagcacctttccatctcaccagccattctcaggcctctgtcagactggatacggccccaccacagcactgaacaagagagttttgtgatggtgggtatttgcatagcaaagtgaggtaatgcagaaaggtccaggcacctcttcagcaattgtgtggaatgttgccagtccctgctttagggaatataactgaaagaaaggaagaaataaaaagacatacttgaagggagcatatttcaaagtgaagctatattagctaaagatcaaatgacaacccagacactcctagtgttgcaaggaaagcaaaatgagacgtagaaggaa

SEQ ID NO: 411481 - DNA, 435 bp, Homo sapiens
ctccccaggctcaagcgattcttgtgcctcagcttcctgagtagcccaggattacaggtgcatgccaccaagcctatctaatttttttgtattttgacagagttttgccatattggccaggctggtcttgaactcatgacctcaggtgatccactcacttcagcctcccaaaatgctgggattgcagttgtgagccactgtgcccagccctgttttgtttttttgacttcagttttgttttttgacttctgaggcccaattctgtgcatctttggtaattgttctttttttttttttctgggtctcattctgtcacccaggctggagtgcagtggcttgatcatggatcactgcagcttctacmtccctgagctcaggagatcctcctacctcagccttctgagtagctgagactacagaagcacaccaccatgc

SEQ ID NO: 411482 - DNA, 625 bp, Homo sapiens
attcttggcaccaaaatttgtcaatttgccttttctctaactccaaatcaaaattagaatatcagcaggatggtggccatggaagttggaattcactaaggagtgtgtaacaactcacctrccaaatcgactagcccttaaaaaaaaattagaatatcatttagcatcagaaacgttttcaaattagttagcaaaccccagtctccaaaaatatataaagtcagggaaaaaataaacagactaaactagaatgtgtcttgagggcagtgacttcttgtcattgtaattccagtgcctagtagagtgccacacacgtaggaggtgtccggaaaatgtccagtgaatgaacagaacttgttgagacaagtaaaggagatgctcatgtttccataggcttgctgtaaacatgagaagcgaataggctaaaacctcagagagatgccgaaccatggtaataaagtttgatcttccagaattgagatcaggatgatggtatgatagtacttacagtaggtcaggcagcatatcacaaaaattccatttactgagattaaggtaatggcccaggatgggagcaggttatcaggaaaatgctcttgcttggctatggagggaaaagaataat

SEQ ID NO: 411483 - DNA, 624 bp, Homo sapiens
tgatggttttataaaagggcattcccctgcacatcccctcttgcctgccaccatgtaagatgtgactttgctcctcatttgccttccacccytattgtgaggcctccccagccacatggaactgtgagtcaattaaacctctttataaattacctagtcttgggcatgtctttattagcagcgtgagaacagactaatacagaagtgaagtggcagtgaaattgagagaaaggaataacaggtaaattaaatgagcacccagaatgaaggaaaaactgctaagtttaagaggaagtgagtggtgaatatgcagagtggtgagaaatgaggctggagaacacaagagcaggaggcctttgtggcattgttgcatgttaaaaatggtgccctgaaatagcgcccaaggagacatggctcatggagaaacagggctttaattatgttgtgcttatttataaaagaaactgttgtcattcattcattcattcattcattcattcaacaaatatttattaaattcctagaactttgcttagtcctagaaatttagcagagatggctattggcactgtctttgctctcacagatttacagactactcagggaaactaacatcaaacccat

SEQ ID NO: 411484 - DNA, 403 bp, Homo sapiens
cttacttagctctggtctcttcctttctacttttatctgttaagagtgtatatgtcataatatcttaaaccccagttggatctctgtcaacaaaagtatctcttttgaaytaactagagtttcttagaattgcaaacagatttagaaatatgggctttatgctccatgggttgttgttgtatttgtactcatttaatacctcaaacactgcattatgattaagctgaataattacgtctcaaactgaatatgtgcaaaattattcaaatatatgaacatgcatatatgtagatctataaagacagttggattaaactgtgaacgcaactctaggattcttagcagataaacacatgtcaaaggacatgtcttattctcttgaatgtaatatatttttgagtta

SEQ ID NO: 411485 - DNA, 603 bp, Homo sapiens
tttcaataagttggtctcatatttcttggagtctcatgtttcaattggggatcatggaattcatatttgatctgccatgtattttccatatttgaaagcgataagaaaatcagtacttctgtaaaagggagttttgttctagctcagttaacactttaaaggaggtagtgttagtatatctgctttagggcctggcactagctgacgttcaacagggtaaagggtcagcacactagtagaactcaagtggagcttagtatgattataattagctcaaacatttgatttaaaatataatcttgctaagcagggtaaaatttgtttattaataagttgtgatgaattgcctcatccttttcttccttccctttcatacagttaaaagattctttgtcataccattccatcaaaaaatggcactcaaatgggaaaaaatgtaaaggcatggatcctagcaaatgttcgcttactgataaagatattttccttgatcgtgttttcatcaccagaatgtgaaattagatccacctgtgtattccaccattgcctcaaaatactcctggtttaggttattttcttyctttcctagggtctaatggattg

SEQ ID NO: 411486 - DNA, 463 bp, Homo sapiens
gggtgtttagaggagctaagtggttgagtggcttctgtttgtgagaggagccatcaaggagggtttctaggcaacccaccccctgtccacatggaagtactcctgatatcaccttgactcatggtcatggaagttgacacatggtcttagtcttctctggctgctacaacaaaataccatatactggatgcttcaaacaacagaaacatattttctcacaattctagaggctggaagtccaaaatcagggtgccagcatggttgagttcatgcctcttccyggcatgaaatagctgtcttttcactttatcctcacatagcagagagaatgagagagtgagtgagcttctaagaacctaatcccatcatgagggccacaccctcctgacatcatctaaaccagattatctcccaaaggcatcatatccagataccatcacaacaggggtgactacaccaacat

SEQ ID NO: 411487 - DNA, 548 bp, Homo sapiens
ttaatttttttcagaaaacaacttagggctttgttgatttttctctatttgtttttctattttattgttttctggatttcttttcttctactttcattaagtttaatttactatgttctctctagcatctcacatttgatacttaattcagttactttttgtcttcttttctaatacatgcataacttatctctaagcatggctttgcataatacaaattttgatatattgcatttttattatcatttagttcaaaataatttcctatattgtaatttcttctttgatccaagggctacttttagaaatagaactcttaatttccaaatttatgggaattttcctttctgcagtttatttgtagtgtatgtgtcctagaataagataatatactctgtgtgattttgacactatgtaatttattaatgtatctcaatgtcagcaagatgttagaataggcytttcaagggcctgtccctcctcagaaatagaacatctctccataaataaaaatgtcttcataagagctaaggaaaccagatgagaga

SEQ ID NO: 411488 - DNA, 599 bp, Homo sapiens
atggtgtgaggtaggggatctgagatattttgagctatacatcagctaaaagacagaaatgttaatgtgaatgaaaaatttaacctaaaatctgaaatgcagaagttttcagacttcctcagaggaaaaacaaatgtttccctttacattaaatttccatctccacaaacttccaacgaaaggcccacaaatctgggatgcatcaatgttttcattcttttagcataaggaagatatttcagtacaaccaattgtattctgtcaattacatatgatacctctccacaatttctctattagatgtttcatcaaaactctgcaggcaatgactacttagaaacaaggtagaatcactcaagcaggattatttgatggccccrgtccgaatcttacattctggcttgagatgaagtattaatgtgcatcaagattgtcctttcataaaatggacagaaatattcacttctctaccttttttctgataaagatactatcaggaaatctgagttctaattcatgttttttccagagtcagtctccttggatacctaagatgtatcctgagtaaaaagttaataatgaagacaatagtaacagtt

SEQ ID NO: 411489 - DNA, 625 bp, Homo sapiens
acacatgctggcaagaatgcagagaaaggggaaagcttatacactgtttgtgaaaatgtaaaagtagcacagccagtatggaaaaaagtaaggagtttcctcaaaaaactacaaatagaattaccatatgatccagcaatgtcactgctaggtgtatatccaaaagaaagaaaatcagtatatggaagagatatctgcactgccgtgcttactgcagcactattcataatagccaagatatggaattactctttgtgtccatcaagaaatgaatggatagataaaatgtggtatagctacacacaatggaatattatttggccataaaacagaatgaaattctgtcatttgctcaactggaggtcattatgttaagtaaaataagccaggcacaaaaagacaacacatattytcacttatatacaaaaactaaaaaagtagatttcagggagatagagagtaggatgatggttaccagaggcttggaaaggaagggagaggcagatgaagagaagttggttaaagggcacaaaaatatagtcagatagaagaaataagttctaatatttgactctacaatagggaaattataattaacaataatttattgtctatttgaaaatcg

SEQ ID NO: 411490 - DNA, 350 bp, Homo sapiens
agaggcagatgaagagaagttggttaaagggcacaaaaatatagtcaratagaagaaataagttctaatatttgactctacaatagggaaattataattaacaataatttattgtctatttgaaaatcgctagaagagaagatttgcagtattcccaacacaaagaaaaaataaatgtttgaggtaatagatatcccagttactctaatttgatcattactacattaaatacagatatcaaaatatcatatgcactccaagaatatgtaaaactattatatatcaatttaagatttttaattaaagaaagaaaaatgatactttaatgaatcggtatatacgctcagtga

SEQ ID NO: 411491 - DNA, 587 bp, Homo sapiens
ggtgactattcacaggtgcgctcacagcacaccacatccttgaactcccaggctcgagggatcctcttccttcagcctcccgagtagctgggactacaggtacatgccaccatgcctagctagacttatgctttaaaagaaagtggtaaaatagtatatacatgtttgcaatttcataaaaaataaaaatatatcctattattttattctaaagtacatctttttaatttttaattcatctgttactasttgtacattaaaattacattgcacattttaacagtgtatacattcttagctccctttgactccaccataaaaagccgttattgtctcttcctaaatttaggcaataaaacctctctcatgcctgtatacattcttcacatgcatttccctttccctgaagcactctcccccttgatcttcacgtgcctgtttttctcatcctgtgaaactcagaggaaatgattttttgtcagaaataccagccttccaatttttcacaaatttcgttatttatctgttacttgactccctctgatagactttaaactccctaagtggtagatctacgtttgatttat

SEQ ID NO: 411492 - DNA, 454 bp, Homo sapiens
ggataaaaacatcaacagactgtatcttatgcctcagtcttgcaggattctcttaagaaaaagactgcccgaatattctttataaaccttaatttattgatctatttaaattagttcaataaattaactaattgagactaataaaagtttcaaattggcaacttactatttgggactttttctgcagtcatttagtgtaatttgagctttcaaaaattttaagtacaatagawcagtggggggaaatgcctcaaatacatcttgataaagcatgtctttaaaaacacattttattgtcagacagatgaattaatatatagagatcaaataaaataaaagactctatctgctagagtacttaatatctattaacaatccaccaaatattctactgttatttccatttattaatttgttcatttcaccataatcatcatgagattatgatataaaa

SEQ ID NO: 411493 - DNA, 585 bp, Homo sapiens
aaactaagacttaaagttcaaacagtattccataccatcagcatcatctaggtgtataatggtaacactgagtctccctagtaacraaaaagttccctgttttttaagcactgtggtctccttcaaccctgtgctgggtagtttgccacttactatgatttaccctggaaacaaatggtatcttcccattgaaaaggctagctggggagatgcacagctgagattttgactttatgttttattcagggtccaacgcttgattttgtagtagctctattgataaagctaaaatttaataacagaagtaataagtacaacttctggggaaaattttaagaatcagttggcaattcctgtgctccttctttcctcctattatgaaacaggcagtgttctaaataaagctattctgtcaaactgggtccgtattgactttgataagcaagtgctctctgtgggcccatattggatgtgtaatatgagtaaaaaactttccataagtccccgagagctttatttttattttattttgtactggtattattatcaaagcatagcctagcctttcctggctgatacacactt

SEQ ID NO: 411494 - DNA, 585 bp, Homo sapiens
aaactaagacttaaagttcaaacagtattccataccatcagcatcatctaggtgtataatggtaacactgagtctccctagtaacaaaaaagktccctgttttttaagcactgtggtctccttcaaccctgtgctgggtagtttgccacttactatgatttaccctggaaacaaatggtatcttcccattgaaaaggctagctggggagatgcacagctgagattttgactttatgttttattcagggtccaacgcttgattttgtagtagctctattgataaagctaaaatttaataacagaagtaataagtacaacttctggggaaaattttaagaatcagttggcaattcctgtgctccttctttcctcctattatgaaacaggcagtgttctaaataaagctattctgtcaaactgggtccgtattgactttgataagcaagtgctctctgtgggcccatattggatgtgtaatatgagtaaaaaactttccataagtccccgagagctttatttttattttattttgtactggtattattatcaaagcatagcctagcctttcctggctgatacacactt

SEQ ID NO: 411495 - DNA, 400 bp, Homo sapiens
ccaacatggtgaaacctcgtctctacttaaaaaatgcaaaaatttagccaagcgtggcggtgggcacctgtaatcccagctactcaggaggctgatgcaggagaatcactgggaactgggaggcagaggttacagtgagccgagatcacaccactgcactccagcctggatgacagagagcgagactcttgtctcaaaaaaaaaataaataaataaaataaaaakaaaagaaaagaaaagaaaacttaaatctgtaatgggaagttctattagcaggcaacattgtattaaatatttgcttggaaaaatacaaaagcaagaaatttatagcaggaatctgtatgagtgagctttcacaagactataataggagacagccaactctagtccttaatgtcta

SEQ ID NO: 411496 - DNA, 699 bp, Homo sapiens
gactccctgttagctttgaaggttgagctacaagatcatgcccatcaagttaaaattaaggttttgacctgmcaattgaaggtgcaagcctagagagattaccttccacataagcttaatacctggcctaagtggcttgctcacgttatctaagtagaaacaaactgaaacaaacaaaactaataatcaaaactaataaaaacatccaaataaataaaattattgattcaggcaaggaataaggattaataaatttgataatgaggggctggataattgtataatgtcaaggtggaatcacatgtgtaactttctaatcaaagaaaaaaaacacacactggagagatcctactatttccatcctattccagtagtcagtcagttgttatatgccctgggatataatgcaagatataatgagcaactttcacaatgtagtctagtcaaaaaagttttaccaacatcagatcattaggagatacaggagatagaagaacaagggagacatcatcacatggatgcaatcagacaaatgacacgtgcgagacattctgtgaaacagcagacctggtctcttcaacaagtcactgtctggaaaaaggactgaactatattaagaatgactgaagaaacagaatcagatgcaatgattggtcttgaattagatacttattttgtcaaaccagatgaaaaggcatt

SEQ ID NO: 411497 - DNA, 699 bp, Homo sapiens
gactccctgttagctttgaaggttgagctacaagatcatgcccatcaagttaaaattaaggttttgacctgccaattgaaggtgcaagcctagagagattaccttccrcataagcttaatacctggcctaagtggcttgctcacgttatctaagtagaaacaaactgaaacaaacaaaactaataatcaaaactaataaaaacatccaaataaataaaattattgattcaggcaaggaataaggattaataaatttgataatgaggggctggataattgtataatgtcaaggtggaatcacatgtgtaactttctaatcaaagaaaaaaaacacacactggagagatcctactatttccatcctattccagtagtcagtcagttgttatatgccctgggatataatgcaagatataatgagcaactttcacaatgtagtctagtcaaaaaagttttaccaacatcagatcattaggagatacaggagatagaagaacaagggagacatcatcacatggatgcaatcagacaaatgacacgtgcgagacattctgtgaaacagcagacctggtctcttcaacaagtcactgtctggaaaaaggactgaactatattaagaatgactgaagaaacagaatcagatgcaatgattggtcttgaattagatacttattttgtcaaaccagatgaaaaggcatt

SEQ ID NO: 411498 - DNA, 699 bp, Homo sapiens
gactccctgttagctttgaaggttgagctacaagatcatgcccatcaagttaaaattaaggttttgacctgccaattgaaggtgcaagcctagagagattaccttccacataagcttaatacctggcctaagtggcttgctcacgttatctaagtagaaacaaactgaaacaaacaaaactaataatcaaaactaataaaaacatccaaataaataaaattattgattcaggcaaggaataaggattaataaatttgataatgaggggctggataattgtataatgtcaaggtggaatcacaygtgtaactttctaatcaaagaaaaaaaacacacactggagagatcctactatttccatcctattccagtagtcagtcagttgttatatgccctgggatataatgcaagatataatgagcaactttcacaatgtagtctagtcaaaaaagttttaccaacatcagatcattaggagatacaggagatagaagaacaagggagacatcatcacatggatgcaatcagacaaatgacacgtgcgagacattctgtgaaacagcagacctggtctcttcaacaagtcactgtctggaaaaaggactgaactatattaagaatgactgaagaaacagaatcagatgcaatgattggtcttgaattagatacttattttgtcaaaccagatgaaaaggcatt

SEQ ID NO: 411499 - DNA, 580 bp, Homo sapiens
gtgtgacaaaatgcaaattccttcatgagcaagggttccaaaacagtttggttatttcccacatagtgatgtttccatacatgtaatgtgatcasatcagggtaattatcatatgcatcgtcctgaacatttatcatttcattgtgttgggaatattcaatatcctccctctagctatatattatcaactacagtcatcctacaatgctatagaaatgctattattaacttcattttatagattaaaaaataagaggcttacagcataaataacttgctaatagggttgatagctgaaattttaatctaattttgtttaactacaagtactctatctgctcttcgtaggagaaacaacactgagtccatgattcagaaaatctgggttctagtcacatttcgctattaattagttatgccatttaagggaaaatgtagaatctcttcttctctagtctattaattgaaggagcagtaattctcatgaaattaaatctttatatttgtaattgatcacacagaagtgaatatgattttacatagaaaagttaaattataaagggcaattatatgaaatgtt

SEQ ID NO: 411500 - DNA, 580 bp, Homo sapiens
gtgtgacaaaatgcaaattccttcatgagcaagggttccaaaacagtttggttatttcccacatagtgatgtttccatacatgtaatgtgatcagatcagggtaattatcatatgcatcgtcctgaacatttatcatttcattgtgttgggaatattcaatatcctccctctagctatatattatcaactacagtcatcctacaatgctatagaaatgctattattaacttcattttatagattaaaaaataagaggcttacagcataaataacttgctaatagggttgatagctgaaattttaatctaattttgtttaactacaagtactctatctgctcttcgtaggagaaayaacactgagtccatgattcagaaaatctgggttctagtcacatttcgctattaattagttatgccatttaagggaaaatgtagaatctcttcttctctagtctattaattgaaggagcagtaattctcatgaaattaaatctttatatttgtaattgatcacacagaagtgaatatgattttacatagaaaagttaaattataaagggcaattatatgaaatgtt

SEQ ID NO: 411501 - DNA, 645 bp, Homo sapiens
agacgcctgtaatcccagctattcacgaggctggggcaggagaactgcttgaacccaggaaggaggtagaggttgcagtgagccgagatcacaycactgcactccagcctgggcaacagagctagatgccatctaaaaaaaaaaaaaaaaaatttgacctggcctttggccttggcagtcaggtcagacaggactctcaggaaggcagtgtgtgtggatttgaatgacaatctgcttattttgttatatcactgatatagtttggatgtttgtccactccaaatgtcgtgtcgaaatctgacccctagatgggaggtggggcctagtgcgaggtgtttgggccatggggggaagactgttcatgaatgacttggtgccattccttgggtaatgagtaaattcctgctgtattagttcatgcaagagctgtttgtttttaaaagagattcgcctctctcttgctccctctctgaccttgtggcatgcctgctgcccctttgccctctgtcataattgtaagtttcctgaggctgtcaccacacacagatgctggtgccatgcttcttgtacagctggaagaaccatgagccaagtaaacctctttccttgtaaataacccagcctcaagtattccttttcagcaat

SEQ ID NO: 411502 - DNA, 523 bp, Homo sapiens
agaaggttatattaaataagttagagaaggtgcacaacaattataaagcttttaaatggcataagcacaatccaagatttagaaatccctctctctttttactctcaaagattttacactaaacctttctcccttttcgcttttccttttgtttttgtttttgagacagtgtcttgctctgtcgctgagtctggagtgcagtggtgggttatagctcactgcagcttcaactcttggcctcaagcgatcctactgcttcagcctctggagtttctgggactacaaacaggagtaaccacacccagcttacagtaaacctttctaaatttaaattcaatgtgatattctgcctccctctcatccctcctatatagccaatccaccactaagtcaagaccattttacttcattcacatctcttcatcttsaccaccacctccccacaacctaccactactgactccacaaactttagtagctagtatgatcgtccctcttacctcaaccctcttaagatgcttca

SEQ ID NO: 411503 - DNA, 522 bp, Homo sapiens
aaactatctttccatctacaaaagtcaatgaactactgagtttcatttcatcgttttttataaataagggtagagactctgtaatccatcaggtctcttttctccaaaatgatagttttaatgtaatcgattacatcacggacatagttatacttaatcaatttcagaaccctgacaaagaaaggtgtaattctttgcgggacctcattgtatcatggtctcccaaaccattcctaagkgatttcttaaagcaacttgaaaaggtgacatcaaaatcctgaagtatttacagccaccgaaatgattcctctgatgttcttctgagagattaaaatggtgccatttcctgtctgtcattcttagtctggtaaactaatcagtacccagcacccagcatgtcttaggctctgggacagtgaacaaaacagccatttagagatgctgaaatgcatgctgtggaattaccaaactgtggaaattcatccaggagaacatatgttatttcaagaatataaatgaatt

SEQ ID NO: 411504 - DNA, 535 bp, Homo sapiens
tgtgagtgagaaaatactgaaaatacaatcacatgttcctctggcaaakaaattggtgctacttcttaaacaagagaaaaagagaagagaaaaaagtaaaagagaaatatgctctttgtgacgatcacactcataaaatgatcaagcttattttggagtcgctgataaagattcaaataaaatttctttatgacaaaggcaatcaacaatgcatctgcctcatgctaaagaaaattatttgactttttcctaatgttaggtattgtacccaatcctgctagtttcataaaagggcatttaatgaattttcttaatagaatcagcagcataaatccccatcaacaatttcttggtccagtgtcaggaataaagtcaaatcagataagtagctctgtatataaatgagatgagcagagactaactccacaagctgatgaagtttgtaagtcttagccagacgcaatgaaaacttcctctttttttttttttttttttttgagatggacttgttgccccggctggagtgcaatggtgc

SEQ ID NO: 411505 - DNA, 430 bp, Homo sapiens
aaacgttgctgttaatatatgagaagggctgaagacatctgctttaagtcagcatttattgaacacagttcaggggaggaagattggattacataagatggtcttcctgtcccttcaaatcaacttgggatttttttttactttgggcagctacctttcaaccttcagtgcttcccgcttccccgtataaatataagagaaaataagataatgaagaatgaactataaaacaatttagaggcttcttgcaactatatctggttttgatcyctttctaattttattccacttactgcatttctaagaatagtcattgatgtgtaagttattacgatagtggctgaataacattaaaaatattttatcatgaagtagtctttatagacatttgatgattgaaaatttcatactacctctcggaaacttggag

SEQ ID NO: 411506 - DNA, 552 bp, Homo sapiens
atagaaggaacattcctcaacgtgattaaggtcatatatgacaaactcacagctaacatcatactgaayggggtaaaattgaaagccttcccagtaagatctagaacaagacaaagatgcccatattcaccacttccattcaccatagtactggcaatcctagtcagagctattaggaaagaaaaagaaagaaaaggcatacaaattgaaaagcaagtgaaattattcttgttttcagatgatacgattttttattttaggaaatctaaagactccacgaaaaactcttaaatctgatacacaaattcaataaagttgcagaatacaaaatcaacatacaaaaatcagtagtgtttcagtacactagcagagatcaacctgaaaaagaaatcaagaaagcaatcctatttacaatagctacaaaaaaaattctaggaatccatttaaccaaagacatggaagatctccacaaaaaaaaatatatatatataaaacactgatgaaggaaatggaaaagaacattaaaaatgaagaaatatcccatgttcatga

SEQ ID NO: 411507 - DNA, 552 bp, Homo sapiens
atagaaggaacattcctcaacgtgattaaggtcatatatgacaaactcacagctaacatcatactgaatggggtaaaattgaaagccttcccagtaagatctagaacaagacaaagatgcccatattcaccacttccattcascatagtactggcaatcctagtcagagctattaggaaagaaaaagaaagaaaaggcatacaaattgaaaagcaagtgaaattattcttgttttcagatgatacgattttttattttaggaaatctaaagactccacgaaaaactcttaaatctgatacacaaattcaataaagttgcagaatacaaaatcaacatacaaaaatcagtagtgtttcagtacactagcagagatcaacctgaaaaagaaatcaagaaagcaatcctatttacaatagctacaaaaaaaattctaggaatccatttaaccaaagacatggaagatctccacaaaaaaaaatatatatatataaaacactgatgaaggaaatggaaaagaacattaaaaatgaagaaatatcccatgttcatga

SEQ ID NO: 411508 - DNA, 552 bp, Homo sapiens
atagaaggaacattcctcaacgtgattaaggtcatatatgacaaactcacagctaacatcatactgaatggggtaaaattgaaagccttcccagtaagatctagaacaagacaaagatgcccatattcaccacttccattcaccatagtactggcaatcctagtcagagctattaggaaagaaaaagaaagaaaaggcatacaaattgaaaagcaagtgaaattattcttgttttcagatgatacgattttttattttaggaaatctaaagactccacgaaaaactcttaaatctgatacacaaattcaataaagttgcagaatacaaaatcaacatacaaaaatcagtagtgtttcagtacactagcagagatcaacctgaaaaagaaatcaagaaagcaatcctatttacaatagctacaaaaaaaattctaggaatmcatttaaccaaagacatggaagatctccacaaaaaaaaatatatatatataaaacactgatgaaggaaatggaaaagaacattaaaaatgaagaaatatcccatgttcatga

SEQ ID NO: 411509 - DNA, 542 bp, Homo sapiens
ctattatggaagacggacagtatttctcaatttatttgacgttagaatgatttttaattaaaatattacagtaggttgattaagccttctcatagttattgaacattaaatatcatgaattttttaagtttatatgttatataagcacttattttcatttactagctctaaaagtattttcatagaccattacagcattttcagattcagagcacaagcccttgagcaatcrccacatgtttccatgcttggctgacttaccctgttccctctccttgtttgtctctctcctgacgggtcatactttatttaacctttccttttatttaatgactttattctctggataatcataatttcctttccaggactgtccaatggaaatataatgcaagacacatatgcagtttgaaattttctagcagtaacagttaaaaagtaaagagatagggataaaattaagtttaataatatattttatgtaacctaatatactcaaaatatcatttcaacagagaaacaatagtgaaatagttcatatt

SEQ ID NO: 411510 - DNA, 623 bp, Homo sapiens
aatgaatccaacccaatagtcccatgaacagtttttgggttttttttttctttggataaacgtagaaatagacttttctgatcttacagtgtgaaacttacctttgttttatctgagttccttcctcgggaaaggacccccaggcctctcaaacagtatcaaagaactgagactcaccacatcatggcatcaggacaatgagactccaggcccctcattcattatgattgctttcttacccctttccagttcctgctttctcacacatagttacatttcttccctgctatataaacccctaattttagtcactcagggagatggatttgagactgatccccaatgtcctcagctgtagcacctgattaaagttttctttcttggcaataattgyctcagtgattggctttctgtgcggccagcagcaggacctacactgaatccctggtgcttcagtaacattaagaaacagaactttatcgtatctttttgtttcttatttgatttaccttttattttttaaaattcttttatttttaattattatggatacaaaatatttgcacatacttatggggtacatgtgatgtactgatgcaaacatacaatgtgtaatgatcaaa

SEQ ID NO: 411511 - DNA, 587 bp, Homo sapiens
gctacccactttggacactagtaacaagggagcaacagaagaaacagagaaggtactggccagataagattgaaaatgacactggtggctcaaggatagccttgtttttttagttcaatagtaacaactcagcctttcataactcaggaggaaaacagatccaagcacaggccctctgatcttgatgtggcttacatttcaattcaggcagaatttgtaacttcactgggtggtgttaatgaaacacagggcacattgactcatttctgcttgacatttaatttgcttcatgattcctagcatattctgctgtctgctgatacaggtgttttcaagatggatagagcatccaaaaggtgttgtattgttaaaagaggtgataatactgagaggaaagcactgggaggaaaaaatgtaagatctatgttctgtggaaagcaatttgtgttttttcaaagaacttagaactrccattcaaccaagcaatcccattactgggtatattcccaaaggaatataatttattctaccaaaaagtcacatgtatgcatgtgttcctcacagcactattcacaatatcaaagaca

SEQ ID NO: 411512 - DNA, 446 bp, Homo sapiens
catttaacactctttagcagtgtagcctctttgggaatcctgctcatcaatttggagaccttggggaaattattgaacacttttaagtaacagctttcttatctataaattggggacagtgacttttttctgcaattacaaagaagattacctaactaagataagggatgtaagaagcactttccaatttttaatattttatactccacagtaaaatcaggagaggattcaaggcagccaaaagcactagcaaattttcaagtgttaatttttggagtcattatcctgatgacttctttgagagtgtcacgccatcccaacagtgctggcacagggacaggtcttcactgcggctgcactattacaccacctcactttacaacatgagtaacwtgctgatcccacttcctccaagtaatggccaaggactcagcaacagctgaaag

SEQ ID NO: 411513 - DNA, 585 bp, Homo sapiens
atgcttggtgccagggacccttggggcctacaaatacaggacttgcagaaatcaacggaaggggagccccatgatgctggcttggtgtccagacatggccacggacacttacaacccacagtacttaggaactaatgatgtcacaaaaatcaccatgtcgccaggcctgccatacagctgtgcctcccccaggactgtgcagctctgcgcatcagggcagcaggccacgctttgtgtccctttgttttcattcattttgacaaaggcacccttatgggcttttcctcttgactcaatccaatttaaacggcayggctccatttgagattttttttattgaagtaaccaatcataatattgtaataagtatagaaacattattatttttacaaagactatttctgttcttgatttgatgaatgatatattttaaagtaatcttgacatgtttattccaaatgagaggatttaaagtaatacccagacaactgaaagcaagaatccataacccttaattcaaaataacatgctgcatagttgaaatcctgtaaataacagggagctttttgggaagggtggcgagaa

SEQ ID NO: 411514 - DNA, 638 bp, Homo sapiens
catcctgtttttcagtttgctgagacccatttccctgttttccttatgataaatttccctttatgtttaagttaattggwcttgagtttctaagaccaaaccccaaaatttcccacctaggacagaaagcatttaacacctgatttcctattgcaaaggaggcttatttaaagtagggtgtactgtgtgcaaaaggcacagcctcaaagttttttttgtgctgggaatttattcaaatttggcctctgtgtttttgttttatttttcacccttcaagcaatatagactgaatctaggaaagctttaatttttaaaattaaaaccaaaataaaattgtgctgaattagagcacttatttgtgagctcatgctaagcacttgacatacattatctcatttatgcctcatatcaacagtttgaggtgagtatatccatgctcttgaaggataagtgcttaagtaacctgggcaaagcatctaagtaaagtgttgatggaagattcaaccccagctctcgttaatttctgaggctggtgtaccttacccctatgctgtgctacctgtcaaaaagcccttcagaatttattgttattgtattttaactgatgtgaacaacaacggtatcagcattagacttta

SEQ ID NO: 411515 - DNA, 578 bp, Homo sapiens
aatgttcatcatgtgatgaatgaataaccaaaatgtamtagatccatacaatgaaagattatttgaccataaaaaggaacaaagtactgatacatgcaataacatggaagaaccttgaaaacatgctaagtaaaaattcagacacaaaagtccatatattttataattccatttatatgaaatgcctagaatgaggtaatctatacagacaaaaaagttagtagttgccagtaacgggaggaaagacaattcgagagtgactggtaatagacacagggtttctatttcggatgataaacatgttctggaattagataaggtagatggttgcacacctcgtgaatatactaaaaactgctgagttataaactttaaaagagtaaataaatttcatgttatgtcaattatatctcaataaaaatgggaaaatgaattaaaccatctttactcacctggaaatatatccctgacttactacaatatgaaagaaataccagcacagaaaagtatggaaggattatcaagccattaatattgattacctcagtaagatcaagtacaaaaggaaagtaagaaat

SEQ ID NO: 411516 - DNA, 447 bp, Homo sapiens
ctttataaattacccagtctcgggaagttctttatagtagtgtgaaaatggactaatacaatgggaaaacgcatctctacaaaaatattttaaaaattagcatkgtggcatgcacctgtggtcatagctacttaggaggctcaagagcaaagattgcctgagccctggaggtcaaggctacagtgagacatgattgcaccactgcactccagcctgggtggcagagtgagaccctgtctcaaaaaaaaaaaaagttttcttatagacttcaatattgctcagcttgctatgaacaggcatttaatggtttacaagaacaagtaaaagcacacacacacactattaaaaagtgagtataaaatcgtggcatttagcaagtttgaaacattaagcaaatcacttggctactccaggcttcagttttcttctgcaaaaaaatgattggtt

SEQ ID NO: 411517 - DNA, 581 bp, Homo sapiens
cctctggcagtaccggccctggaacttcggcgacctcctctgcaaactcttccaattcgtcagtgagagctgcacctacgccacggtgctcaccatcacagcgctgagcgtcgagcgctacttcgccatctgcttcccactccgggccaaggtggtggtcaccaaggggcgrgtgaagctggtcatcttcgtcatctgggccgtggccttctgcagcgccgggcccatcttcgtgctagtcggggtggagcacgagaacggcaccgacccttgggacaccaacgagtgccgccccaccgagtttgcggtgcgctctggactgctcacggtcatggtgtgggtgtccagcatcttcttcttccttcctgtcttctgtctcacggtcctctacagtctcatcggcaggaagctgtggcggaggaggcgcggcgatgctgtcgtgggtgcctcgctcagggaccagaaccacaagcaaaccgtgaaaatgctgggtgggtctcagcgcgcgctcaggctttctctcgcgggtcctatcctctccctgtgccttctcccttctctctgagtctccatctctattt

SEQ ID NO: 411518 - DNA, 550 bp, Homo sapiens
attcatgtcccaggcaggccaaagcagatagtgtgagatttcaccatgctaatcagaactgcatgcaatttaaaacttaagcattgtttatttcaggcattttccacttaatatttttgaaccacagttgaccctggtaactgaaactgcagaaagcaaaaccacagttaagggaggactattataatactagtcagcaatgaaaatatattaactactacttcacccaacaatgtggatgactcctaaacatatgctgagcmaaataagccagacataaaaagaaaatacatactgaatgatttcatttataaaaaattcaaaaataggcaaaactaattatggtgataaaagtcagtatactgattatctttaaggaggagttagcatctgtaaaggggatttggggtgttgctggtaatgtcatggttcttattctggaggctgcttacatgagtatgttcacattataaaaattcataagggacttctggtttcagctttgatgtttagtgcttggaagctgtcacttccatcctcacaacaacaa

SEQ ID NO: 411519 - DNA, 563 bp, Homo sapiens
tttgtcaaaacccatagaactgcacaacaaagagtgaaccctaatgtaaaaaataaacttcagttaataatctatcaataatggttcatcaattgtaacaagtgtaccacattaaagcaagatgttcataacaggggaaactctgaagggagggtagacacaggaactctgtactatctgcataatcattctataaacctataatrttcctaaaaaattaattaagtcaactaatatcaaaaaattacttatatatgtaaaagtaaaatcaaaacagatgtcagattataatttaaaatttttcaactaaagttgggaagaagaggggtaaaaaaaatggccagtagtagaagtacattaatttccttttctttaatagctggtgaaaaaaagcagttaaagtaaacaaatcaataaataaagttataaatatatctaaaagcactaagataaatgtcaattatgacaatacaacctgctagaaatcacacctatataataggagaggaagaagaggatgtggggaggaaaaaagaataatttcatcattgctcatagtggaa

SEQ ID NO: 411520 - DNA, 605 bp, Homo sapiens
gcctcttggctgtgcatcctcccttaagtmccttcctctttctgggccccagtttttgcacccatataatgaggggatggggctagaatcgagcactgagcaacacttcattctgtagaattcactttggagcccactttccttctctggccttttccctcttctcttcctctctgtcctcatatctctccccaccccaccatggtgcctggggcccaaattctttccaggagctctacagcagggggcagttgagccacccacactcctcctttggaggcagcctaatctgctgagacagcattttcagaacaagcacacctttcctgctgtgttgatcacttctcatggcacaagtttggtgtttgtggagagaccctcttcctcagagactcagagatgagatgctcttccatcccctgtcatgagggacaagggtggcatagaggaatcaactgccacctatgcttttctctacctttttctctagtttcatttcttgtttgatagtttctagtttgtgggatctggagctggactgatttgcattctgatccctgctcttcatagctttatgatctctccagcaccatttgctgaaaagt

SEQ ID NO: 411521 - DNA, 584 bp, Homo sapiens
tttcagaacaagcacacctttcctgctgtgttgatcacttctcatggcacaagtttggtgtttgtggagagaccctcttcctcagagactcagagatgagatgctcttccatcccctgtcatgagggacaagggtggcatagaggaatcaactgccacctatgcttttctctacctttttctctagtttcatttcttgtttgatagtttctagtttgtgggatctggagctggactgatttgcattctgatccctgctcttcatagctttatgatctctccagcaccatttgctgaaaagttatttttctccrtccaattatcttggcatctttgtcagaaatcaattgcccatatgcgtatgcatcagtctcttgactttccattctgttctgttgatttgtatttctctatgccaatgccattctaccttgattactgtagcttcctagaagtcctgaaatcagggagtgtaaggcctccaactttgttctttttcagaatgtttggctattctaggtcatttggttttccatataaattttagaatcaacttggcaaatcctttaaagaaaggtgttggga

SEQ ID NO: 411522 - DNA, 575 bp, Homo sapiens
tacagcagggggcagttgagccacccacactcctcctttggaggcagcctaatctgctgagacagcattttcagaacaagcacacctttcctgctgtgttgatcacttctcatggcacaagtttggtgtttgtggagagaccctcttcctcagagactcagagatgagatgctcttccatcccctgtcatgagggacaagggtggcatagaggaatcaactgccacctatgcttttctctacctttttctctagtttcatttcttgtttgatagtttctagtttgtgggatctggagctggactgatttgcattctgatccctgctcttcatagctttatgatctctccagcaccatttgctgaaaagttatttttctccgtccaattatcttggcatctttgtcagaaatcaattgcccatatgygtatgcatcagtctcttgactttccattctgttctgttgatttgtatttctctatgccaatgccattctaccttgattactgtagcttcctagaagtcctgaaatcagggagtgtaaggcctccaactttgttctttttcagaatgttt

SEQ ID NO: 411523 - DNA, 593 bp, Homo sapiens
gctttttgttttaaggttttcactgtctgatgttggtatagctacactgcttctttgggttattgattgcagaatatatcttttactatccttttacttatataacctttctattctattatattttacatgtttctctttttaaacatatttgtttaagttaaaaatacttttgacaatcttttagctagagtcttttaattggagcatttagtccatttacacttaatgtatttaaatctaccatttaattatatgctttctatttgtcatatatgactttggtttctcttttctctccttttttgcctttcttaactttctcttttggattttaaaaattattccattttgcyggttagtttagaaaccacgtacttttctactattctcttaatggttatcatatagattgccatgagcactgtgcatttcttttgtccccagtgcttgctgtggctgagttcttaatcagcaatctgtgttttgcttgcggtgtgtgtatgtgtacttactgcagtcactgtggagctttctttatgtcaatctgatggccattaccccagtcgtttcacccctgacagcactaccca

SEQ ID NO: 411524 - DNA, 628 bp, Homo sapiens
tatcttgtagaaactgacaagctgatcctaaaattcacatggaaatgcagaacacccagaattactataataatttttaaaaagaatgacaaagttggctgggtgcagtggctcacacctgtaatcccagcactttgggaggccgaggcgggtggatcacctgaggtcagtagttcgagaccagcctggctaacatggtgaaaccctgtctctaaaaactacaaaatttagctgggtgtggtcatgggtgcctgtaatcccagctawttgggaggctgaggcaggagaattgcttgaacccgggaggcggaagttgcagtgagccgagattgcgccacggtactccagcctaggtgacagagcgagactccatctcaaaaattaaaaaaaaaaaaaaaagaattacaaagttgactttcattactaaatttcaactcttgctctaaagacacagtaatcaatacagggtggtactgtcccaagaatatagatgaaagaaactgaactgtgagtccaaaaataaatcttggcatttatggtcaatttacttttcacaaaagagctaagtgccaactcaacctgacatatgtagaacagtcagtccaatgactgatgaatacacatgctt

SEQ ID NO: 411525 - DNA, 430 bp, Homo sapiens
gcagcaaaccatcacggcacatgtttacctatgtaacaaacctgcatatcctgcacatataccyctgaacttaaaagttggggggggtaaagaaaataaatgcaatatttatagaaaatatttaagaaaaaaattttaatccacaaattaggaggaaatacacagaaaccaggtatctgataaaggacttgtgtccagaatacatgaagaactcctataattcaataataagacaaacaattgaattttaaaatggacaaaaatttgaatagacatttaagcatggaagattagcatggctaataaactcagaagatatttaacatcattagtcctcagaaaaatccaattaaaaccacagtgacataccacagcacacccactagaatgactacaatcaaaaagccagacaatacaagtgttggtaaga

SEQ ID NO: 411526 - DNA, 610 bp, Homo sapiens
  misc_feature (1)...(610): n = A,T,C or G
cttggtatttgggccagcaattctactccatggaatatatctaagagtcatgaaaacatgtctacacaaagacatgtatgtaaatgctcatagcagcatcattcataatagacaaaaattggaaataattcaccagctggtaaacagataaacaaaatgtaatgtatccatgcaaaagatactattcagcaattwaaacgacttaaatactgataccacataccacaacaagggtacaacttagataactgctacaactggtttaagtctcaaaaacagtacactaagtgaaagaagcaagacacaaaaaccacaaaaactgtatacgccatcattccatttatgtgaaccatctagtggaaggcaaatttatagagatagatagagggattcagcaattacccaggtctggagagttgagcagggattatatgcaaacaggcatgaaggaacattttgagtgatggaagtgttctaaaactggattgtggtgatggctgcacaactccatanatttactggtaatcattaaatagaaaaaataaaattaacatcacctgtaaaaaacaaatgactatagtgtaccccagaaaagaacacaagattactt

SEQ ID NO: 411527 - DNA, 610 bp, Homo sapiens
  misc_feature (1)...(610): n = A,T,C or G
cttggtatttgggccagcaattctactccatggaatatatctaagagtcatgaaaacatgtctacacaaagacatgtatgtaaatgctcatagcagcatcattcataatagacaaaaattggaaataattcaccagctggtaaacagataaacaaaatgtaatgtatccatgcaaaagatactattcagcaattaaaacgacttaaatactgataccacataccacaacaagggtacaacttagataactgctacaactggtttaagtctcaaaaacagtacactaagtgaaagaagcaagacacaaaaaccacaaaaactgtataygccatcattccatttatgtgaaccatctagtggaaggcaaatttatagagatagatagagggattcagcaattacccaggtctggagagttgagcagggattatatgcaaacaggcatgaaggaacattttgagtgatggaagtgttctaaaactggattgtggtgatggctgcacaactccatanatttactggtaatcattaaatagaaaaaataaaattaacatcacctgtaaaaaacaaatgactatagtgtaccccagaaaagaacacaagattactt

SEQ ID NO: 411528 - DNA, 590 bp, Homo sapiens
tatgtataaaaataaacaaacttttaaagccacttacttctgcactatagaagataactgagccaccctcattacagccattaccaagggcastgtctggtccaagccctcagcctgagcctcagggtctcagatgaagcagcaaagaatcagagttcccaccatcagatgcccccttcagaaagaagaaacaaaattatgactagacaattataactcaaccctcaaccagattcctctggagaacacatgggaaacacctgaggcatataagataaaggaagcaaacatccagcttggccaagatctgcctgagcatgaaggggttcaatattgcagggaaaagggtaagtgagagagttcagctgtccagcaagcctgtggactgctacaatctgaaccacaggagagctcttctacccgcacaaatctgacactggcatagacagtgagttacaggccccatgagggcactgcagcagacaagcgacttgcactgggtcactcaccctcccataagacctgagtggttgtggcagggcatcatttcaagagcacagccttcatggaactgcattctgccctgggaa

SEQ ID NO: 411529 - DNA, 590 bp, Homo sapiens
aaatggcagcattccagaaatccaccagaccacaatgacaaataataagagaaaaagggaaaaagaatacataaaacaaccagaaaacaattaacaatatgacaggaacaaagcctcaataacaaccttgaatgtaaaacagattaaattctctacttaaaagatatagaatggctgcttacaataratgcaccttacagtaaagacacatatagactgaaagtaaagagactgaaaaaagatattccatgcaaacagaaaccaaaagtgagcaagagtagctatatttatatctgataaaacagacttcaagtcaagagcagtaaaaagaaaaaaaaagatgatgaaggtcattatatagttacaaagggatcaatccagcaagaagatataacaattctaaatatctatgcacccaacactggagcacccagaattataaagcaaatattactgaatctaaacagaaagctagactgcaatacaataatagtggacttcaacaccccattctcagcattacacagatcatctagacagaaaatcaacaaagaaacattggatttaaactggactttaagacaaatgga

SEQ ID NO: 411530 - DNA, 535 bp, Homo sapiens
cccaacacacacacgcacaccacacccacgctctctgtccagctcaggtattcacgcgtgcacacacacacacacccggagaagagctcckgggtgaaaacgtcctgcaacagtgccatctagtgggagccggggtctgtcctgccctcacaggtttcctccgcgagccccagggagatggtcttaagatccagagatgtgaaagttgtggctgcttcttgtgaagaaaaatacaaaataagcaataacgggagactctgtctaccttgggatgtctcactgcccccctcaattcgcacctgtacacaaggctaactggcccaaccaccaccatccctctatctacaacacatccccaaatccctgctctctgccttcagccctgtgaaattctggccccctggggtcctgctacagccccttctaccccagcatatggtctctgactcagtcacacatttccaggaaacatggggaggactctagccagattctagctcagctattccccagttttgtagtttcctacatccga

SEQ ID NO: 411531 - DNA, 581 bp, Homo sapiens
gggtcagggcagggctgctgaatgtctgaggggctgttgaaacctcaacaagtctgaggccagactgggaatataaagcatcttcaggacacaggccagagctcagtatcattcaatccacgggaaaaacatgacctggccagttccaggccccatgctaagatgacgacaacttggcctgtgcccyaaggagcccacagtctgaaggaagaagtgaaggttagtctgatgatggcagcacagcgaccagggctgggagacaaggaagtcccagaggctggggttgggatctggaagctcatggcaggtaggcaggtcagcctgctttccacagggaacttcatctccaagtccaaagctaccttgacaatggggtagtcctagatatagaccaggttcactaggtaataaatggctctgcttgcacggcagagcccagggatgcactcaaacgactggttcattcaggcccccagcaacctcaaaaggctggtttgtccactgccctttcctgtccaaaaagactctgcttgcatacccattcatctggcagtggccaaggcagctcctcaaaccagcct

SEQ ID NO: 411532 - DNA, 581 bp, Homo sapiens
gggtcagggcagggctgctgaatgtctgaggggctgttgaaacctcaacaagtctgaggccagactgggaatataaagcatcttcaggacacaggccagagctcagtatcattcaatccacgggaaaaacatgacctggccagttccaggccccatgctaagatgacgacaacttggcctgtgccctaaggagcccacagtctgaaggaagaagtgaaggttagtctgatgatggcagcacagcgaccagggctgggagacaaggaagycccagaggctggggttgggatctggaagctcatggcaggtaggcaggtcagcctgctttccacagggaacttcatctccaagtccaaagctaccttgacaatggggtagtcctagatatagaccaggttcactaggtaataaatggctctgcttgcacggcagagcccagggatgcactcaaacgactggttcattcaggcccccagcaacctcaaaaggctggtttgtccactgccctttcctgtccaaaaagactctgcttgcatacccattcatctggcagtggccaaggcagctcctcaaaccagcct

SEQ ID NO: 411533 - DNA, 599 bp, Homo sapiens
ccaactctgtacaggagccagacaaatcttttaagaacagctctgatcacatactccctgctttaaatccttcaatagttttccacataccctgaaaaaatccatactcacttcctttgctaacacgtttgcacatgattgggctcctgcccatctctatccattcrtcttgcataccccttttcatgccccacaaaacaccaagttctttctgtcttcaggacttttggaccactcctactcaaggaacctcaactgaatcctgctcatctttctcaccttagctggaagatctgtccccagcatctaaagtatatcccccccgtctgtttcattcacagctctcatcagcatttgtagtgatgctatttatgtttgtttactcattggttaatggtctccctcataagaaggtaagcttcatgaggacaggagctgtttctcgtcctcaccaccacttccttgcacagacacagtgcctcccacacaacaaatggtgttgaggaaatggagacagaggctctcccaccatcctgtcagaaattcccagagggctggacctcccccccgccagaaccttggagctccagggaagccct

SEQ ID NO: 411534 - DNA, 599 bp, Homo sapiens
ccaactctgtacaggagccagacaaatcttttaagaacagctctgatcacatactccctgctttaaatccttcaatagttttccacataccctgaaaaaatccatactcacttcctttgctaacacgtttgcacatgattgggctcctgcccatctctatccattcgtcttgcataccccttttcatgccccacaaaacaccaagttctttctgtcttcaggacttttggaccactcctactcaaggaacctcaactgaatcctgctcatctttctcaccttagctggaagatctgtccccagcatctaaagtatatcccccccrtctgtttcattcacagctctcatcagcatttgtagtgatgctatttatgtttgtttactcattggttaatggtctccctcataagaaggtaagcttcatgaggacaggagctgtttctcgtcctcaccaccacttccttgcacagacacagtgcctcccacacaacaaatggtgttgaggaaatggagacagaggctctcccaccatcctgtcagaaattcccagagggctggacctcccccccgccagaaccttggagctccagggaagccct

SEQ ID NO: 411535 - DNA, 438 bp, Homo sapiens
gtcttcaggacttttggaccactcctactcaaggaacctcaactgaatcctgctcatctttctcaccttagctggaagatctgtccccagcatctaaagtatatcccccccgtctgtttcattcacagctctcatcagcatttgtagtgatgctatttatgtttgtttactcattggttaatggtctccctcataagaaggtaagctycatgaggacaggagctgtttctcgtcctcaccaccacttccttgcacagacacagtgcctcccacacaacaaatggtgttgaggaaatggagacagaggctctcccaccatcctgtcagaaattcccagagggctggacctcccccccgccagaaccttggagctccagggaagccctagctccagggaagccatagagagatacagacactgtgggctacaaggcaggt

SEQ ID NO: 411536 - DNA, 438 bp, Homo sapiens
gtcttcaggacttttggaccactcctactcaaggaacctcaactgaatcctgctcatctttctcaccttagctggaagatctgtccccagcatctaaagtatatcccccccgtctgtttcattcacagctctcatcagcatttgtagtgatgctatttatgtttgtttactcattggttaatggtctccctcataagaaggtaagcttcatgaggacaggagctgtttctcgtcctcaccaccacttccttgcacagacacagtgcctcccacacaayaaatggtgttgaggaaatggagacagaggctctcccaccatcctgtcagaaattcccagagggctggacctcccccccgccagaaccttggagctccagggaagccctagctccagggaagccatagagagatacagacactgtgggctacaaggcaggt

SEQ ID NO: 411537 - DNA, 557 bp, Homo sapiens
cttaaccagcatccagtagatgcccttaattcccttctcccattcccccacctcccaaggagaacaactgggggtgtatgctgcataattcctctccttgcctcctccatgtctaccctgaactgtggtatctgggtgggaaacagcttcaggctgcagatgctatgacagcgctggttaaattgaattacactgaaaccagagaagccttcagctctcccagggagttcagaagtgttcaccctgagagtaactgcacactgcacaggaaaaggcattcaagttgataagaagtcattcagatcaccatctaatgcagcttttgcctttgaaataaattcattccttattagcacatacttgggatttccaggattgaatwttatttctattacagaaagcccatttttaagacatttttatcatgttgtcatggtcctatgtaatttcatctctccacaatgttactttcattcacatgcatagagctataagccctagtgagaaaggtaaagagaaagagagaacaggaacaatagtcattgatccaactaggg

SEQ ID NO: 411538 - DNA, 532 bp, Homo sapiens
acaatagtcattgatccaactagggtagaagccagtaccactacataacacagatgtgtccacatcactgagggtctgcagtcacaaaacagtatttagacttctcctgaaagcaaagtgaagtcactgaaggccaactaaggatttggaataggtaacaaatgataaaattttctttttaaaatacttactttggttataatggaaaagacagatgcaacagaagggaagtagttaagaaactgttcaaacattcattcaatttagatgtgacaccaaaaaagctaagtgaaaaaagaaaaaataggtaaattgaacataatgaaaatgtaaaacttttgtgcttcagagggcagcctcaagaatgtgaaaagacaaaccacagaatsaaagaaaatattcataaattatatatctgatgagacttgcatcaagaatacaaaaacaactcttacaactcaacaataaaaagagaatccaatttaaaagttggcaaaggactcgaatagacatttattttaagaagatatac

SEQ ID NO: 411539 - DNA, 595 bp, Homo sapiens
ggcaaaggactcgaatagacatttattttaagaagatatacaaataatcaataaacacatgaaaagatgttcaatattattagtcattaggagaatgtaaatcgaaaccacaatgagattctactccacatccactaakatgtctataatcataaagacagacaataagtattagtgcagatatggagaaattgctggtgggaacgtaaaatgatgcagccactttgaaaaatagtttggcaggtcctcatcgagttaagcatagagtcaccacataacccagcaattccactccattccacctaagagaactgaaaacatgccgatacaaaaacctgtccatgaatgttcagagcagcattattcatgatagccaaaaagtggcaacaacccaaatgtgcaacagctgatgaggagagaaacaaaatgtggtatatccatacaagggaatattattcagccataaaaaggaagaattctgacacatgctacaacatggatgaaccttgaaaataccacgtcaaacaaaagaggctactcacaaaagatcacatattgtatgattccatttatatgaaatgtccaaaataggcac

SEQ ID NO: 411540 - DNA, 583 bp, Homo sapiens
gcatcaagaatacaaaaacaactcttacaactcaacaataaaaagagaatccaatttaaaagttggcaaaggactcgaatagacatttattttaagaagatatacaaataatcaataaacacatgaaaagatgttcaatattattagtcattaggagaatgtaaatcgaaaccacaatgagattctactccacatccactaatatgtctataatcataaagacagacaataagtattagtgcagatatggagaaattgctggtgggaacgtaaaatgatgcagccactttgaaaaatagtttggcaggtcctcatcgagttaagcatagagtcaccacataacccagcaattccactccattccacctaagagaactgaaaacatgccgatacaaaaacctgtccatgaatgttcagagcagcattattcatgatagccaaaaagtggcaacaacccaaatgtgcaacagctgatgaggagagaaacaaaatgtggtatatccatacaakggaatattattcagccataaaaaggaagaattctgacacatgctacaacatggatgaaccttgaaaataccac

SEQ ID NO: 411541 - DNA, 482 bp, Homo sapiens
tgcccaccaagtcctaaatcttggtttctagatactattttccactcaaatcaactgggcttgttttgagaatggttgatcccaggattttggtagggaaaggtgtaagataagctttgtacaacttgtggaaactcaaggaggtgctcaagtaatgatgctgacatggcaaaaggataaaggaaggaacttgaaagggttctccccaacaaaattaaggatattattacttcctgaataaaattggacacggtaagttcatacagatattcttataagtaaataaattaattaaaggtttgatgaagaccatgatatacacagtttcaatttattttccctcaaattattttaatttcagagggaaaatgagtaacattttagagaatgtctagcagccaactccattaaagaaaatttaaagtaaaataattaaaataaacatcatsagtaatgggataaaagaaaatcaagtaccacct

SEQ ID NO: 411542 - DNA, 465 bp, Homo sapiens
tgtatttctccttcatgttcaaaagataattttgttggatatactattctatgatcaacgttttttttccttcagcactttaaatatgccaagccactctcttctgacctgagaagtctgctgccagatgtattggatcttgcttttatgttatttttttttctcttgctgcttttaggatcctttctttatcattaacatttgggagtttgaatacaaaatgccttcaggtagttttctttgggttaaatatgcttggagttctataaccttcttgtatttgaatatttatatctttctccaggtttgaaaagttctctgttattatccccttgaataaactttctacccttgtctctttctctacctcctctttaggacaaataactcttagatttgccsttttgaggctgttttctggatcttgcaggcaagcttcattgttttttattttttatttttgtc

SEQ ID NO: 411543 - DNA, 576 bp, Homo sapiens
tctctggtgactcttcttatgaagacactaaccctttgggatcagggccccatccttctgacctcatttaatcttaattacttccttataggctccatctccaaatacagtcacattgcgggtttgggcttcaacatatgaattttkgggggacaccaacatttagtccatcacaccaagtaagattcattttagacttttgacctcagaaattataagacaataaatttgttttatttaaagccatgaagtttgtggtagatggttatgccagcaataaaatcctaatataaatcttggtacgggaatcacagcttttctgctgttttgctttttatagtttcagttaccagcatggtcaactgaggtccaaatatattaaatgaaaaattccagacataaacaattcataagttttaaattgtatggcagtctgagtagtgtgcgaaaatcttgagctgtccctgtgggatgtaaattatctctttgtccagcagatccacactgtctccaccaccctcccgtaggacattttcattatcagtttgagtgcacagtggttgtgttcaaataacc

SEQ ID NO: 411544 - DNA, 583 bp, Homo sapiens
tccttctgacctcatttaatcttaattacttccttataggctccatctccaaatacagtcacattgcgggtttgggcttcaacatatgaatttttgggggacaccaacatttagtccatcacaccaagtaagattcattttagacttttgacctcagaaattataagacaataaatttgttttatttaaagccatgaagtttgtggtagatggttatgccagcaataaaatcctaatataaatcttggtacrggaatcacagcttttctgctgttttgctttttatagtttcagttaccagcatggtcaactgaggtccaaatatattaaatgaaaaattccagacataaacaattcataagttttaaattgtatggcagtctgagtagtgtgcgaaaatcttgagctgtccctgtgggatgtaaattatctctttgtccagcagatccacactgtctccaccaccctcccgtaggacattttcattatcagtttgagtgcacagtggttgtgttcaaataaccctattttacttaataagggccctaaagtgcaagagtagtgatgctggcaatacagatat

SEQ ID NO: 411545 - DNA, 583 bp, Homo sapiens
tccttctgacctcatttaatcttaattacttccttataggctccatctccaaatacagtcacattgcgggtttgggcttcaacatatgaatttttgggggacaccaacatttagtccatcacaccaagtaagattcattttagacttttgacctcagaaattataagacaataaatttgttttatttaaagccatgaagtttgtggtagatggttatgccagcaataaaatcctaatataaatcttggtacgggaatcacagcttttctgctgttttgctttttatagtttcagttaccagcatggtcaactgaggtccaaatatattaaatgaaaaattccagacataaacaattcataagttttaaattgtatggcagtctgagtagtgtgcgaaaatcttgagctgtccctgtgggatgtaaattatctctttgtccagcagatccacactgtctccaccaccctcccrtaggacattttcattatcagtttgagtgcacagtggttgtgttcaaataaccctattttacttaataagggccctaaagtgcaagagtagtgatgctggcaatacagatat

SEQ ID NO: 411546 - DNA, 581 bp, Homo sapiens
tatctttccaaaaaaccaatttttacttgttgatctttttgtgtttttttatttcaattttatttatttatttttgctctgaactttattatttcttttcttcaactaattttgagttyaatttgctcttgtttttctaacactttaagattcattgttaggttatttatttgaactttttctacttttttgatatgggggcttattgctataaactttcttcttagtactgcttttgctgtatcccatggcttttggtatgttctgtttccattaccatttgtttcaattaacctgttaatttccttcttggtttcttcatttacccactggtaatttaggagcatattgtttaatttccatgtgtttttatagtttccaaagttcctcttgttattgatttctagttttattccattgtggtcagaggagatatttaatataatttcatatttttaaagaatctttaaggctttttttgtggcctaacatatagtttatccttgagaatgagccatatgctaatgagatgaatgtgtattctataaacgttggattaactgttctgaaaatatctattg

SEQ ID NO: 411547 - DNA, 595 bp, Homo sapiens
ctctttactctctcctcatgaagatggaaggagtctctactggagctgcaagctgtgctgcctggagttggggaaggggtgatgcaagcactccttgggctgccctggctggtgtctcactaggttatatatacccataagtccagaggctccatgtccagcacagcaccgggagttgccctggaattgtggtccttgtggcttagagtgcctttcaagtttatttagaaccccagagcactttagctcatggtagcgaggtttgtcagaactcaggttctgaatgctgggatgggcaatgcccctctggctaaggctggtttatatgctgtctccatgagtgccatgmcacttgttactttctgttatgacagggaagcacagagttccaatgcaaagtcccacaatcactgtgttctccctcccccaaccacacagattttctctctccaccagaaagccactgccgggtatgggggaggagtgatttaggtgattcaagactgtctttcctaccctcctcagtgcctctttttttaatgtgatctttaaactaggtacaatgatcatttgactgattttcagttcttatgaa

SEQ ID NO: 411548 - DNA, 585 bp, Homo sapiens
ttcaaaataacattatgacacagttcagctaagcattctatcattatataaaaagaatacagtttcttcatgtttcctataacttccttctgagctctcacatacagtactgttaataacaatatttccactaacagtcttgtaaagtaatccaggaattttctattatgctcctcaaagttcttccagcttaaacccattacacaattccaaagccacttatgtatttttaggtacttgctacagcaaacaatgtcccacttccasgtaccaaaacctgtattaatttcctgttgctgctataacacatcactacatacttagtggcttaaaacaacacatgtatgatattacagttatgaagttaagaaatcaaacttgaatcggcaggactctattctttctaggggctctaaggaaacaaaaaatatgttttgtttcaggttttgttttgttttgttttctggccttatccatgttccagaggctgcctgtatcccttggtttgtggcctccttcctccatcttcacaatcagcagtatagcgtctccttccctcttttactttctgcctttgtcctataa

SEQ ID NO: 411549 - DNA, 585 bp, Homo sapiens
ttcaaaataacattatgacacagttcagctaagcattctatcattatataaaaagaatacagtttcttcatgtttcctataacttccttctgagctctcacatacagtactgttaataacaatatttccactaacagtcttgtaaagtaatccaggaattttctattatgctcctcaaagttcttccagcttaaacccattacacaattccaaagccacttatgtatttttaggtacttgctacagcaaacaatgtcccacttccacgtaccaaaacctgtattaatttcctrttgctgctataacacatcactacatacttagtggcttaaaacaacacatgtatgatattacagttatgaagttaagaaatcaaacttgaatcggcaggactctattctttctaggggctctaaggaaacaaaaaatatgttttgtttcaggttttgttttgttttgttttctggccttatccatgttccagaggctgcctgtatcccttggtttgtggcctccttcctccatcttcacaatcagcagtatagcgtctccttccctcttttactttctgcctttgtcctataa

SEQ ID NO: 411550 - DNA, 603 bp, Homo sapiens
ctccagtttagtgctgtgccaggtgacaaagatataatagtaaacataaaaatcggaattgaccttaatggagtcttctatccakctgagaactttttgaaacaataatgctataataaaatttattgctaactagtagtgacagatctggtgctaattactctatatgtatgttttccactaatgctcactataaactttcaagaaaaccctgggaggcaggtgtatttgataaaggaagatttcatatgtgatagaattagttagaacttggaagaacccaagattataatagataccattgataaattataaagaggaaaattaatttaaacttaaagcaaaaaaaaattatttgaactgtaaaagagaagcattgcataggctcaatattgtgacctatacagaaggaaatataatgctagtgtactgctttatgtttcagggaaaaaagtcattatagtcatattaatgaaaacagtttactggtactcaccttttaagtagactaacgtaaattatattttttaaaattaaaaagattatgggctgggcgcagtggctcacacctgtaatcccagcactttgcagggcagaggcagg

SEQ ID NO: 411551 - DNA, 572 bp, Homo sapiens
ggctgggcgcagtggctcacacctgyaatcccagcactttgcagggcagaggcaggcagatcacgaggtaaggagatccagaccatcctggctaacatggtgaaaccctgtctctaataatttaaaaaaaaattagctgggtgtagtgttgcacacctgtaatcccacctactcaggaggctgaggcaggagaatcgcttgaacccaggaggcagagattgcagtgagctgagatcgcaccactgcactccagcctggtgacagagcgagactccgtctaaaaaaaaatgattatgagagaaaatataaagaacagcacagagttacacttgctagaggctgtgaggtaacagggagttaggaaagatacagagaaggaacatcaagatggaactctgatggttgatggaaaaaggaatggaatttaaggatatttgagattgaagagaccacttccaccaaggtagatcatatactttatgtaaggatggattctaaaagaaaataagattttgaagcagatagttcatgttggatatattgagcaaaatcagatttctagtccaaaaatt

SEQ ID NO: 411552 - DNA, 554 bp, Homo sapiens
aggaaggccaaactgagtaactgtgtctgacagaagggaagaaatgaccgtggtggccttcttagaccctgtgggaaaggcctctacctatccagtgaaagtgtctacctagaccaagaggtatttcagtttcctgactcggggcatgttgagtaaagctaatttgccagtcctgggtgggggcaaatccctgagcttgatgtgtagggaagggagggggcctgaataatccctgagaagtagtagaatagcaaatggaacactgagaagttatttccttgaggatagatttccatgatggaaaggaaatgagaggttctaagaggcgggctagtggcttgtactatagcatagcctgcctttgctggtgtgtggmgattaggcctggtggaactgccatcagtaaaccaagtgtgatcaggctgagaaacagggaagaaggaaatgtggggaaatgggctgaacgtcaggtggatcagagagatgcagtcatgagggtcaggtgtggtatcaggaataatgtgggaggtcggattgaagtccaggccaggaac

SEQ ID NO: 411553 - DNA, 530 bp, Homo sapiens
aggagcattaagatatattaagtaaaatagtaggacatgaattaattcccatatttttagatgaactcatttgtaaaaaaaaaaaagtaaacgatacaatatatgcaacagatatactcactgaaaacaaaatacattcacacacatgtatatacgtatacttacacaaagataagacatttgtggagaaaatttttagtcattaaaatgggtgctagaaaatgggctgggagttagcctagagctaagaagagagaatttccatcacataattattagttctgtttgttatcatttatattattttataacaaaacaacaaattcagtataattagtacaaatatataagcataatattagaaagttctcattaataaaatttcagctaaccagcatttgctaaatatattttaaatatacataagggtttgagcaattctgattatatatatgtatatatatatatatatatayatatatatatgtaatagcatttatttttcagatcttcattatgtatatatatgt

SEQ ID NO: 411554 - DNA, 594 bp, Homo sapiens
gaaataaaatgtttttccattttatttattccattatttaattccacttattaaaagagcatcaaaaacatttgtgatataattaaacagtctaacatatgtgtaattgctattccataacagaagagagcaggaatgagaataaaacataatttgaaaaaagataatggctgagaagtattcaaaattgaaaaaagatgcatttgataaatttctatgaactccaagtagcataaatacacacacaaaaaaaacagtacttagactcatcacagtaaaacatytgaaaaccaaggctaaagagaagtattttaaaagcagccagaataagatgcatcaataacattaagagcaggattttaaacaggaactatggatgcagggaaataagttaactttaaaaatttgaaaaaaaaaaaaaaaaaaaaagcaacaaaacaaccctgacatctagagcttcaaatccaatgaaaaatcctttcagagtcaaaatgaaataaatgcatttttcagacatgtaaaagctgggaaaattattcacaagcaggcccatattttaagaaattctgtagaaaattcttcagactgaaggaa

SEQ ID NO: 411555 - DNA, 612 bp, Homo sapiens
ccttccaccaagcagataccaacattatggttcctgtacagcctgcagaactgtgagccaattaaacctttttctttttaaataaattatacagtttctggcatttttttatagcaatgcaagagtggtccaatacactgactaagaccttacactttttccgctagtattctgtggagccttggacaggtgacttaatgtcctgtacctcacttttctcctttgttaaatggggttcacagaacattacattcatgkttattaaggaataggaacattcctgacacacagagtagacatttgtattcacactaatctgttaaataatattataaaaatacattaacaacagtgactacttactgaatgatttttttataacttcaccataataaggtttttgtgtttctttcatgcaggtacttctttccttatattttatatctaaatttatatcttctgatggtctgacactggaagaaaatatttcatgatgaaatacattattaaccacagggatggagaaactctttctggctatgtgtatctttgaccaaaaaaaacaaaaacaaaaacaaaaaatctattcctgtgaaccgaagtagtgatatt

SEQ ID NO: 411556 - DNA, 472 bp, Homo sapiens
aatgaacattaaacagctgatgagattcaaatagaaatcagcccaagttaatactaaatgtcaagtaaatactagaataataaagaagcaatatttctacctgaccaaagatccaaacaggagcattgcagacaccagtcacacaaatactgcagtctgcagaggaggagataatcagtaactgaccacctggctcacacatctctaaggaacttattcggtcctcatgaggttggaatgatcttatcagagttggggccttggtgattttgttcttactggagttaagacagtactcctgaatgaaaagaaataccagaactctaaaaaattcaaatatgaaatgattacaatgacataacacttttaaaaaaaggccgattttcaaacttgggaacaataacytatgatccaaatgcaaaagaaaagttcatgataaaagaggctagaaaacgaaattacattaaaaaaa

SEQ ID NO: 411557 - DNA, 534 bp, Homo sapiens
ccgtctcaaaaaaaaagaaaaaaagaaaaatggacaaaaattctgaataggtatttctcaaatgaagacatacaaatggcaaacaattatatttaaaggtactcaayatcactgatcatcagagaaatgcaaatcaaaactatgatgagatactttttcacctcagttagagtggcttttatccaaaaatcaggcaattacaaatgctggcatggatatggagaaaagggaaccctcatacactgttgctgtcaaggttctccactgtggagaaaggtgtagaggttcctcaagaaactaaaaatagaactaggtatatactctaaggaaaaacaatcagcatatccaacagatatctgcattcccatgtttattgcagcactattcacaatagccaagatttagaagcaacctaagtgtccattaggagatgaatggataaagaaagtgtggtacatatacacaatggaatacaattcagccataaaaacgaatgagatcctgacatttgcaacagtatagatggaagtggaa

SEQ ID NO: 411558 - DNA, 655 bp, Homo sapiens
aaccttttgtcatactgctgaataaaggattgtttgtgctctccagttgataaattatctttgtgccttgtcgttataaaaagaaactcatcttgttcactagtctgacaggagatgagaaggccctagagagagcacagagagtttttcctttcacaaatcacatgtaggatgtatgctgtgggtcctgtctggaaatgaatgtggaaagaatccaggatgaagcatacaattttcattgttactacttggtatatgatagattattacaaattcgcgagattaaggttttccttttactcatactgacttatcttaaatctaggaaccaattctagcacggacaaatgttcttttgtgcatagttgagaaagaaaaggatagtttaaatttcagtgcagctaagataatatcagtaattttatggttattctatgagtttatgacagggatttatggaagcatttgatatgaaggcktctcatttagtattgaagagaaaaagcccagctattcctttagaccagtgtttctgctaaacaaaatgcactgaaacttgcaaacgacaagttgtttttgtttttgttagtaataaactttattttatatagcctgttttaggttcacagcaaaactgaggagaaagtaaaaaagg

SEQ ID NO: 411559 - DNA, 655 bp, Homo sapiens
aaccttttgtcatactgctgaataaaggattgtttgtgctctccagttgataaattatctttgtgccttgtcgttataaaaagaaactcatcttgttcactagtctgacaggagatgagaaggccctagagagagcacagagagtttttcctttcacaaatcacatgtaggatgtatgctgtgggtcctgtctggaaatgaatgtggaaagaatccaggatgaagcatacaattttcattgttactacttggtatatgatagattattacaaattcgcgagattaaggttttccttttactcatactgacttatcttaaatctaggaaccaattctagcacggacaaatgttcttttgtgcatagttgagaaagaaaaggatagtttaaatttcagtgcagctaagataatatcagtaattttatggttattctatgagtttatgacagggatttatggaagcatttgatatgaaggcgtmtcatttagtattgaagagaaaaagcccagctattcctttagaccagtgtttctgctaaacaaaatgcactgaaacttgcaaacgacaagttgtttttgtttttgttagtaataaactttattttatatagcctgttttaggttcacagcaaaactgaggagaaagtaaaaaagg

SEQ ID NO: 411560 - DNA, 480 bp, Homo sapiens
tgtttctgctaaacaaaatgcactgaaacttgcaaacgacaagttgtttttgtttttgttagtaataaactttattttatatagcctgttttaggttcacagcaaaactgaggagaaagtaaaaaaggttcccatatgtccccagtccccacacactcaccacctcccccattattgacagacaccctgaactcagttggtacctgcattgatacatcattatcacccaaagtccattgttaacattagggtacattctaagtgttaacacrttctgtcgatttagacaaaggtataatgatttttatcctgttgggtgttccctgagcttccttgatctgaagtttggacattaatgtggggaaattatcagtcattattgcttcaaatattgcttctgtttctttcttttccttctggtgttccatcacatgcttgttagaccttttttggttattctacaattcttgaatattctgc

SEQ ID NO: 411561 - DNA, 580 bp, Homo sapiens
cattatccatctgtatttttcaagttgcctacttttttcattaaagttctttgcatattaatcatagcttaaaaaattccttaccttataattatattgcagggtattttcttgaycccttcctaagattcatgacaggggtgcatcacttaccaagcccacccactcaacccctcatgggtggaagcatgcaaacaaacaagggcaggaaccagcctctttggtgctggaagaagtgaactccaggcaggcccatgggagtgtccaggtcagggtgcctgtgacctcaagaccccagaggctgagctctcttagctctgccatctgtagacagcagtgtgttatcagctcagtgggccctttgtcttgtagcatggggcagctgccttccgccagcaagggcaaagtgtcagtgtgacagcctttttgggtattcacacccagtgcatcttgaattctagtctggtgcccaagaggattgaggtcacatggacgaattgaaagatggtgaatgtggagaattttgttgagtgatgaaagtggctctcagtagagaggggagctggaaaggggacaggaa

SEQ ID NO: 411562 - DNA, 613 bp, Homo sapiens
attagggtacattctaagtgttaacacgttctgtcgatttagacaaaggtataatgatttttatcctgttgggtgttccctgagcttccttgatctgaagtttggacattaatgtggggaaattatcagtcattattgcttcaaatattgcttctgtttctttcttttccttctggtgttccatcacatgcttgttagaccttttttggttattctacaattcttgaatattctgctttgttgtgggttttttcagtctttttttctctttgcttttcaggtttggaagtttttattgtcatatcctcaagctcagagatttttttcctcagctgtgtccactctactatgagtttactgaaggcactttttatcttaattctttcttagaattttcatctctctgcttacattatccatctgtatttttcaagttgcctacttttttcattaaagttctttgcatattaatcatagcttaaaaaattccttaccttataattatattgcagggtattttcttgaccccttcctaagattcatgacaggggtgcatcacttaccaagcccacycactcaacccctcatgggtggaagcatgcaaacaaacaag

SEQ ID NO: 411563 - DNA, 580 bp, Homo sapiens
cattatccatctgtatttttcaagttgcctacttttttcattaaagttctttgcatattaatcatagcttaaaaaattccttaccttataattatattgcagggtattttcttgaccccttcctaagattcatgacaggggtgcatcacttaccaagcccacccactcaacccctcatgggtggaagcatgcaaacaaacaagggcaggaaccagcctctttggtgctggaagaagtgaactccaggcaggcccatgggagtgtccaggtcagggtgcctgtgacctcaagaccccagaggctgagctctcttagctctgccatctgtagacagcagtgtgttatcagctcagtgggccctttgtcttgtagcatggggcagctgccttccgccagcaagggcaaagtgtcagtgtgacagcctttttgggtattcacacccagtgcatcttgaattctwgtctggtgcccaagaggattgaggtcacatggacgaattgaaagatggtgaatgtggagaattttgttgagtgatgaaagtggctctcagtagagaggggagctggaaaggggacaggaa

SEQ ID NO: 411564 - DNA, 641 bp, Homo sapiens
tttttatcataaaagggtcttgaattttatcaatttttttctacatttaatgagagaccatatgatttttatcctttgtgaactccattttacaaatttatttttttgactgctaccttcaatttagttttcttagattgtcattgaccttgtatatatagaatgtaccatcttgggtgcttctaaaaatatgctgatgaggaaatcatccctgatgatagtgacagattttttaatggagcacataatattaaaatagaaggaataatacaagggtaagagtttggatattctaasttactattatgtattgcattctctaattcctttttattgaatatactgaaatcaatatgtctaatccatacaactctcttgagttctagctccaccttttcatatactgtcttcatatctccatctagatagccagagatttatcaaattccaggtgataaaaacagaattcatgcttctcctacaatatactcctcttcctgaactttttgtatcagctaatggtatatcactcctcttgaactctcacccaaactgttgaaatcaccttccaacttttccttccacctccagtctcttctatctttgacatagatgccaataattatctttctatattgtaa

SEQ ID NO: 411565 - DNA, 641 bp, Homo sapiens
tttttatcataaaagggtcttgaattttatcaatttttttctacatttaatgagagaccatatgatttttatcctttgtgaactccattttacaaatttatttttttgactgctaccttcaatttagttttcttagattgtcattgaccttgtatatatagaatgtaccatcttgggtgcttctaaaaatatgctgatgaggaaatcatccctgatgatagtgacagattttttaatggagcacataatattaaaatagaaggaataatacaagggtaagagtttggatattctaacttactattatgtattgcattctctaattcctttttattgaatatactgaaatcaatrtgtctaatccatacaactctcttgagttctagctccaccttttcatatactgtcttcatatctccatctagatagccagagatttatcaaattccaggtgataaaaacagaattcatgcttctcctacaatatactcctcttcctgaactttttgtatcagctaatggtatatcactcctcttgaactctcacccaaactgttgaaatcaccttccaacttttccttccacctccagtctcttctatctttgacatagatgccaataattatctttctatattgtaa

SEQ ID NO: 411566 - DNA, 594 bp, Homo sapiens
catggccaaagcaggagaagagagagaggaggaaggtgctacacacttttaaacaaccaatcctcacaagaactcagtatcacgagaacagcaccaagaggatgacgctaaaccattcatgataactccgtcccatgattctaccaggtcccacctccaacacttcagactacaatttggcatgagatttggtggggatacagatacaaatcatatcatcccacccttgcccctccaaatatcatgtcctcacactgcaaaatacaatcatcccttctcaacagtccccaaaagtcttgactcattccaacatttactcaaaagtccaaagtccaaactctcatctgagataaggaaagtcacttaaawgggtgtaaaataaaaaaaaaaaaaatagttacctccaatatacaatggggatataggcattcagtaaataatccattccaaaagagagaaattggcaaaaagaaaaggcctacaggccccacacaagttcaaaacccagcaggacagtcattaaatattaaatagaaagctccaaaataatctttgtctccatgtcccacatccagggcacacttgtgcaagggg

SEQ ID NO: 411567 - DNA, 190 bp, Homo sapiens
aatatcccaggattaaaactagaaggaagctatctgagaaaccacctagtgacgtgtgcattcatctagcagagttaaacctttcttttctttcagcagtttggaaacactgtctttgaagaaactgtgaaatgatattyggcagcgcattgaggccttagctgaaaagggaaatatcttcagataaaaa

SEQ ID NO: 411568 - DNA, 492 bp, Homo sapiens
tacattgtgatatgtgcattcatctcacagagttaaacctttcttttgactcagcagtttggaaacactgcttttgtccattctacaaatattcattcaggagattattgaggccattggcaaaaaaccgaatatccaggaataaaaactagaaggaaggtatctgaaaaactgctttgtgatgtgcacattcatctcacagaattaaacctcacttttccttcagcaggttctaagcactgattttgtagaatctgcgaacgaatatttrggggtgcattctcgccaatggtgaaaaataaattttagataaaaaagaaagaatttttctgagaatcttctttgtgatgtgtgtattcatctcacagagttaaaccattcttttattcagcagtttggaaacacagtttttgtccattttgcgaatgcacatgttggagccccttaggcaaatggtgataaagcgaatatcccaggataaaaagtagaaag

SEQ ID NO: 411569 - DNA, 492 bp, Homo sapiens
tacattgtgatatgtgcattcatctcacagagttaaacctttcttttgactcagcagtttggaaacactgcttttgtccattctacaaatattcattcaggagattattgaggccattggcaaaaaaccgaatatccaggaataaaaactagaaggaaggtatctgaaaaactgctttgtgatgtgcacattcatctcacagaattaaacctcacttttccttcagcaggttctaagcactgattttgtagaatctgcgaacgaatatttgggggtgcattctcgccaatggtgaaaaataaattttagataaaaaagaaagaatttttctgagaatcttctttgtgatgtgtgtattcatctcacagagttaaaccattcttttattcagcagtttggaaacacagtttttgtccattttgcraatgcacatgttggagccccttaggcaaatggtgataaagcgaatatcccaggataaaaagtagaaag

SEQ ID NO: 411570 - DNA, 623 bp, Homo sapiens
cagtttggaatcactgtttacgtataatctgtgaacggatatctgggagcacattgtggtctatggtgaaaaaaataccttcaggtaaaaactagaaagaagttttctgaaagaatgctttgtgatgtgtgcattcatctcacagattgatagcttctgtggattcagcaatttgcaaacactgtttttgtccattctgcccrtggacatttgggagccctttgtggccaatggaaaaaaagcaaatatcccaggatgaaaactagaaggaagctatatgagaaatcgctttgtgatgtgggaattcacctggcagagataaatttttcctttcattcagcagtatggaaacgctgttttggcagaatcagctaagggatatttgggagtgcaaagaggtcaattgtgaaaaagggaataacttcacataaaaactataaagaagctttctgagaaactgctttgtgatgtgtgcattcatcacacagagttaaatatttctttggattcagcagtttgccaacattgttttggcccattctgtgaatagacatttgggagctcattgaggccaatggcaaaaaaccgaatatcccaggataaaaactaataaaaactacctg

SEQ ID NO: 411571 - DNA, 512 bp, Homo sapiens
atttggcagctcattgaggccaatggtgaaaaagtgaatatctcaggataaaaacttgaaagaacctgtctgagtaaccacattgtgatttgtgcattcatctcacagagttaaaccttcgttttcattcagcagttttgaaacactgtttttgtagaatctgcaaagggatattggggcacgcattcatgcctatgttgaaaaagaaattattttcagtaaaaaactagaaagaatctttctgagaaactgytttgtgatgtggacattcatcacacagagttaaacatttctttggattcagcagtatggaaacactgtttttgtagaatttgcaaaggggtatttaggagctcattgaagccaaaggcaaaaaaggaaatatcccaggataaaaactagaaggaaactatctgagaagccacttggttatatgtgcattcacttcacagagttaagctttcttttaattcagcagtttggaaacactactttgtaaaatctgcgaagcg

SEQ ID NO: 411572 - DNA, 512 bp, Homo sapiens
atttggcagctcattgaggccaatggtgaaaaagtgaatatctcaggataaaaacttgaaagaacctgtctgagtaaccacattgtgatttgtgcattcatctcacagagttaaaccttcgttttcattcagcagttttgaaacactgtttttgtagaatctgcaaagggatattggggcacgcattcatgcctatgttgaaaaagaaattattttcagtaaaaaactagaaagaatctttctgagaaactgctttgygatgtggacattcatcacacagagttaaacatttctttggattcagcagtatggaaacactgtttttgtagaatttgcaaaggggtatttaggagctcattgaagccaaaggcaaaaaaggaaatatcccaggataaaaactagaaggaaactatctgagaagccacttggttatatgtgcattcacttcacagagttaagctttcttttaattcagcagtttggaaacactactttgtaaaatctgcgaagcg

SEQ ID NO: 411573 - DNA, 512 bp, Homo sapiens
atttggcagctcattgaggccaatggtgaaaaagtgaatatctcaggataaaaacttgaaagaacctgtctgagtaaccacattgtgatttgtgcattcatctcacagagttaaaccttcgttttcattcagcagttttgaaacactgtttttgtagaatctgcaaagggatattggggcacgcattcatgcctatgttgaaaaagaaattattttcagtaaaaaactagaaagaatctttctgagaaactgctttgtgatgtggacattcatcacacagagttaaacatttctttggattcagcagtatggaaacactgtttttgtagaatttgcaaaggggtatttaggagctcattgaagccaaaggcaaaaaaggaaatatcccaggataaaaactagaaggaaactatctgagaagccacttggttatatgtgcattcamttcacagagttaagctttcttttaattcagcagtttggaaacactactttgtaaaatctgcgaagcg

SEQ ID NO: 411574 - DNA, 643 bp, Homo sapiens
aagctatttcctttttcaccgtaggcctcaaagcactccaagttatccttttgcagattctacgataacagtgtttccaacctgctgaaaaaaagaaatgtttaactctgtgaaatgaatgcacacatcacaaagtggtttttcagattgctttcttctatttttttctagtatattttctttttcgtcattggcctaaatgagctcctgaatatccgtttgtatattctaaattaacagtgttttcaaactgctgaatcaaaagtttactctatgagatgaatgcacacatcacagagcagtttctgagaaagcttctttctaattttcatttgaacatatttcctttttgaacataggcctcaatgagctcccaaatataacttcacagaaactgccaacacagtgtttccagactgctgagtgaaaagaactttttatctcagcgaggtgaatgcacacttaagaaagcgatttctcaaatarcattcttctagtttttatctggggatattcactttttcatcattggcctcaatgagctccccaatgtacatttgcagaatggacaaaaacagtatttgcaatctgctgaatccacagacagttttaacacagtgagatgaatgcacaaatcacaaag

SEQ ID NO: 411575 - DNA, 643 bp, Homo sapiens
aagctatttcctttttcaccgtaggcctcaaagcactccaagttatccttttgcagattctacgataacagtgtttccaacctgctgaaaaaaagaaatgtttaactctgtgaaatgaatgcacacatcacaaagtggtttttcagattgctttcttctatttttttctagtatattttctttttcgtcattggcctaaatgagctcctgaatatccgtttgtatattctaaattaacagtgttttcaaactgctgaatcaaaagtttactctatgagatgaatgcacacatcacagagcagtttctgagaaagcttctttctaattttcatttgaacatatttcctttttgaacataggcctcaatgagctcccaaatataacttcacagaaactgccaacacagtgtttccagactgctgagtgaaaagaactttttatctcagcgaggtgaatgcacacttaagaaagcgatttctcaaatagcattcttctagtttttatctggggatattcactttttcatcattggcctcaatgagctccccaatgtacatttgyagaatggacaaaaacagtatttgcaatctgctgaatccacagacagttttaacacagtgagatgaatgcacaaatcacaaag

SEQ ID NO: 411576 - DNA, 479 bp, Homo sapiens
ttttgcttaatttagctcccaaatttcccttcacagattctacaatgacaatgtttccaaaccgctgaatccaaagaaaggtttaactctgtgaggtgaatgcacacatctcaaagctgtttctcagaaacttcctttaatttttatctgaagactttttacsacagaccccaaatatcccttcgtgaattcttccaaaacagtgtttacagattgcagaatgaaaagacagttttaactctttgaggtgaatgcacacatcacaaagtagtagctcagatagctttcttcccatttttatcctgggatattggcttccttgtcattggtctcaaggagctcccaaatatccgtttgcagattctacaacaacggggttttcaaactgctgaatctaaagaaaggtttcattctgtgagatgaatgcgcacatcacaaagcagtttctgtgaaagcttcttttgtggttttatgtgaag

SEQ ID NO: 411577 - DNA, 479 bp, Homo sapiens
ttttgcttaatttagctcccaaatttcccttcacagattctacaatgacaatgtttccaaaccgctgaatccaaagaaaggtttaactctgtgaggtgaatgcacacatctcaaagctgtttctcagaaacttcctttaatttttatctgaagactttttaccacagaccccaaatatcccttcgtgaattcttccaaaacagtgtttacagattgcagaakgaaaagacagttttaactctttgaggtgaatgcacacatcacaaagtagtagctcagatagctttcttcccatttttatcctgggatattggcttccttgtcattggtctcaaggagctcccaaatatccgtttgcagattctacaacaacggggttttcaaactgctgaatctaaagaaaggtttcattctgtgagatgaatgcgcacatcacaaagcagtttctgtgaaagcttcttttgtggttttatgtgaag

SEQ ID NO: 411578 - DNA, 550 bp, Homo sapiens
atttgggagcaaattgaggcctttggtgaaaagggaaatatcttcagataaaaactagacagaatttttccaagaaactgctgtatgactagtacatttctctcacagagttgaagtttctttggattcagacgtttggaaacactgttttagtccattctatgaaaggacatgtcagacctcattgaggccaaattgaaaaagrcaatatccccagaaaaatactagaagaaatctatgtaagaatccgctttgtgctgttgctttcaactcaaagtgttaaacctttcttttcattctacagtttggaaacactgttttggtagaatctgcgaaggtatatttgggagctcattgaggcctatggtgaaagtggaaatatcttcagataaaaactagttagaagctttctgaaaaactgctttgtgacgtgcgcattcatctcacagagttaaacctttctttggctttggcagtttggaaacactgtttttgtccattctatgaatggacatttgagagctcactgaggccaaaggcaaaaaagtga

SEQ ID NO: 411579 - DNA, 596 bp, Homo sapiens
gctcccaaatgtcccttcgtaggttctacaacagtgtttctaaactgctgagtccaaagaaacgttttactctgtgaaatgaatgccaacatcagaaagcagtttctcagaaagcttctttcgagtttttatctgaagatatttcctgtttcaccaygggcctcaatgcactccctaatatagctgcacagattctataaaaacagtctttccaaacggctggaagaagagaatggtttaattctgtgaaatgaatgtacacatcacaaagtggtttctcagaaagtttctttctatttttttagaagatactttctttttcaccagagtcctcaatgctctcccaaatacaccttcacagattctacaaaaaaagatttccaaactactgaataaaaaaatgatttaactctgtgatatgaatgcacacatgacaaagaaggttctcagatagcttcattctagttttatccagggatatttgctttttgccctttgccctcaatgacctctcaaatatcctttgatagaatggataaaaactttggattccaaagtgtggaatccaaagaaaggttgaaatttgtgagatgaat

SEQ ID NO: 411580 - DNA, 577 bp, Homo sapiens
aggtcccaaatgtccattcacagaatcgacagaaacagggtttccaaactgctgaatctaaagaaaggtttaactttgtcagatgaatgaacatatcacaaagcagtttctcagaaagcttctttcaagtttttatctgaagctatatcctttttcaccataggcctcaatgcgctaaaaaatgtctctttgcagattatatgaaaacagtgttaccaaactgctgaatgaaaagaaaggtttaactctgtgagatgaatgcacacattatgaattggtktctcagataacttccttctagttttcatcctacaatattcgctttttctccattggcctcaatgaggtctcaaatgtcccttccaagaatgtacaaaaactgtgtttccaaactgctgaaacaaaagacaggttgaactctctgagatgaatgcacacgtgtgaaacgagtttatcattaagcccctcaagtatttatcggaagatatttcctttttcaccattgatctccatagtcttccagatgtctcttggcagattctaagaaaacagtgtttctaaactgctgaatgaaaag

SEQ ID NO: 411581 - DNA, 577 bp, Homo sapiens
aggtcccaaatgtccattcacagaatcgacagaaacagggtttccaaactgctgaatctaaagaaaggtttaactttgtcagatgaatgaacatatcacaaagcagtttctcagaaagcttctttcaagtttttatctgaagctatatcctttttcaccataggcctcaatgcgctaaaaaatgtctctttgcagattatatgaaaacagtgttaccaaactgctgaatgaaaagaaaggtttaactctgtgagatgaatgcacacattatgaattggtgtctcagataacttccttctagttttcatcctacaatattcgctttttctccattggcctcaatgaggtcycaaatgtcccttccaagaatgtacaaaaactgtgtttccaaactgctgaaacaaaagacaggttgaactctctgagatgaatgcacacgtgtgaaacgagtttatcattaagcccctcaagtatttatcggaagatatttcctttttcaccattgatctccatagtcttccagatgtctcttggcagattctaagaaaacagtgtttctaaactgctgaatgaaaag

SEQ ID NO: 411582 - DNA, 577 bp, Homo sapiens
aggtcccaaatgtccattcacagaatcgacagaaacagggtttccaaactgctgaatctaaagaaaggtttaactttgtcagatgaatgaacatatcacaaagcagtttctcagaaagcttctttcaagtttttatctgaagctatatcctttttcaccataggcctcaatgcgctaaaaaatgtctctttgcagattatatgaaaacagtgttaccaaactgctgaatgaaaagaaaggtttaactctgtgagatgaatgcacacattatgaattggtgtctcagataacttccttctagttttcatcctacaatattcgctttttctccattggcctcaatgaggtctcaaatgtcccttccaagaatgtacaaaaactgtgtttccaaactgctgaaacaaaagacaggttgaactctctgagatgaatgcacacgtgtgaaacgagtttatcattaagcccctcaagtrtttatcggaagatatttcctttttcaccattgatctccatagtcttccagatgtctcttggcagattctaagaaaacagtgtttctaaactgctgaatgaaaag

SEQ ID NO: 411583 - DNA, 526 bp, Homo sapiens
aatgagctcccaagtatcccttcacagattgtaaaacaacagtgtttcctaataggtgaatccaaagaatggtttaactctgggagatgaatgcacacatcacaaagcagtttatcaggatgcttatttctagtttttatctgaagatattttctttttcacggtagggcttaaagcacttccagatagcacttcgcagattcaatgaaaacagtgtttccaaactttgctgaatgaaaagaaagctttaactctgtgtgatgaatgtactcatcacaaagcagtttctcggattgcttccttctagtgtttttcctctgagatttgcttgttcaccattcctcttaatgagytcccagatatgccttctcagattctataaatacagtgtttccaaactgctgagtccaaaaattgtttaactgtgtgggatgaatgcacacatcacaaagcagtttctgagaaacattttttgtaatttttatgtgaaggtattttctttttcaccataggtcataatgcgctc

SEQ ID NO: 411584 - DNA, 526 bp, Homo sapiens
aatgagctcccaagtatcccttcacagattgtaaaacaacagtgtttcctaataggtgaatccaaagaatggtttaactctgggagatgaatgcacacatcacaaagcagtttatcaggatgcttatttctagtttttatctgaagatattttctttttcacggtagggcttaaagcacttccagatagcacttcgcagattcaatgaaaacagtgtttccaaactttgctgaatgaaaagaaagctttaactctgtgtgatgaatgtactcatcacaaagcagtttctcggattgcttccttctagtgtttttcctctgagatttgcttgttcaccattcctcttaatgagttcccagatatgccttctcagattctataaatacagtgtttccaaactgctgagtccaaaaattgtttaactgtgtgrgatgaatgcacacatcacaaagcagtttctgagaaacattttttgtaatttttatgtgaaggtattttctttttcaccataggtcataatgcgctc

SEQ ID NO: 411585 - DNA, 589 bp, Homo sapiens
gaatagacatttcagagctcattgatttaaatggcaaaaaagtgaatatcaaatgataaaaactacaaagaatctacctgaaaaaccactttgtgatgtgtgcattcatctcacagatttcaaagtttcttttgattcagcagtttggaaacactgtttttgtccattctaccaatgaatatttgggagctcattgaagtcactgcccaaaaaagtgaatatcctaggataaaaactagatggaagctacccgagaaaccactttgtgatgtgtgcattcatcttgcagaattaaacctttgttttcattcagcagttcgtaaacagtgtatttgtggaatctgcaaagggatatttgtgaaccactaaggtttatggtgaaaaatgaaatatcttcaagtaaaaattagaaagaagtcttstgataaactgctttgtgatgagtgcattcatctcacagagataaaactttctttgatttggtagtttggaaacactgtttttgtgctttctgtgaatggacaattgggaactcattgaggacaatggggaaaaagggaatatcccaagataaaaactagaaggaagg

SEQ ID NO: 411586 - DNA, 506 bp, Homo sapiens
gctgtgtgatgtgtgcattcatctctcacayttataacaacattcagcagtttgtaaacactgtttttatagaatctgagaagtgatatctgagagtgcattgaggcctacggtgaaaatggatatatcttcaggtaaaaagtacaaagaagctttttgtaaaatgctttttgaagtgggcattcaactcacagagttcaaattttctgtgtattcggtagtttgcaaacactgtttttgtccattctgtgaatggatatttgagaggtcaatggtgaaaagaaaacatccctggacaaaaactagaaggaagttatctcagaaaccactttgtgatatgtgtattgaactctcagaattaaaccttttttttctttcagcagtttggaaacactgttttcatagaatctatgaagttatatctgggagtgcattgaggcctatggtgaaaaaggaaataacttcagataaaaattagaaagaagctttctgtgaaactgctctgt

SEQ ID NO: 411587 - DNA, 516 bp, Homo sapiens
tcaaattttctgtgtattcggtagtttgcaaacactgtttttgtccattctgtgaatggatatttgagaggtcaatggtgaaaagaaaacatccctggacaaaaactagaaggaagttatctcagaaaccactttgtgatatgtgyattgaactctcagaattaaaccttttttttctttcagcagtttggaaacactgttttcatagaatctatgaagttatatctgggagtgcattgaggcctatggtgaaaaaggaaataacttcagataaaaattagaaagaagctttctgtgaaactgctctgtgatgtgtgtcttcaccttacggaggtaatcatttctgtggattcagccacttgcaaacactgtttttgtccattctgcaaatggacatttgggagctctttgatgccaatgctgaaaaaatgaatatcccaggatacaaattagaaggaagctattgcagaaactgctttatgatgtgtgcattcacttcatagtgttaaactttct

SEQ ID NO: 411588 - DNA, 506 bp, Homo sapiens
gctgtgtgatgtgtgcattcatctctcacatttataacaacattcagcagtttgtaaacactgtttttatagaatctgagaagtgatatctgagagtgcattgaggcctacggtgaaaatggatatatcttcaggtaaaaagtacaaagaagctttttgtaaaatgctttttgaagtgggcattcaactcacagagttcaaattttctgtgtattcggtagtttgcaaacactgtttttgtccattctgtgaatggatatttgagaggtcaatggtgaaaagaaaacatccctggacaaaaactagaaggaagttatctcagaaaccactttgtgatatgtgtattgaactctcagaattaaaccttttttttctttcarcagtttggaaacactgttttcatagaatctatgaagttatatctgggagtgcattgaggcctatggtgaaaaaggaaataacttcagataaaaattagaaagaagctttctgtgaaactgctctgt

SEQ ID NO: 411589 - DNA, 516 bp, Homo sapiens
tcaaattttctgtgtattcggtagtttgcaaacactgtttttgtccattctgtgaatggatatttgagaggtcaatggtgaaaagaaaacatccctggacaaaaactagaaggaagttatctcagaaaccactttgtgatatgtgtattgaactctcagaattaaaccttttttttctttcagcagtttggaaacactgttttcatagaatctatgaagttatatctgggagtgcattgaggcctatggtgaaaaaggaaataacttcagataaaaattagaaagaagctttctgtgaaactgctctgtgatgtgtgtcttcaccttayggaggtaatcatttctgtggattcagccacttgcaaacactgtttttgtccattctgcaaatggacatttgggagctctttgatgccaatgctgaaaaaatgaatatcccaggatacaaattagaaggaagctattgcagaaactgctttatgatgtgtgcattcacttcatagtgttaaactttct

SEQ ID NO: 411590 - DNA, 582 bp, Homo sapiens
aagcactcttttaataggggctgcatagggatatttcagagtgcattgaggcctatggtgaaaaacaaaatatcttcggatgaaaactagaaagaaattatctgagaaaatactttctgttgtgtgcattcatctaacagagttaaacctttctttggattcagtagtttggaaacactgcttttgtataatctgtgaaagcatatttgatagctcattcagtccttaaaggaaaaaatgattatctcatgataaaaactagaaggaaagtacctgagaaatggccttgtgatgtctacattcacctcacagagttgaatctatttttcattcagcagtttggaaacactgttctgttagaatctgtgaggcaatattcrgcagagcattcaggcctatggtgacaaaggaaatatcttcagatgaaaactagaaagaacttttccaataaactgctttgtgatgtgtgcattcatctcacctatttaaacttttatttggattcagcaacttggaaacattgtttttgtccattctgcaaatggacatttgggagcttattgaagccaatggcaacaaagc

SEQ ID NO: 411591 - DNA, 582 bp, Homo sapiens
aagcactcttttaataggggctgcatagggatatttcagagtgcattgaggcctatggtgaaaaacaaaatatcttcggatgaaaactagaaagaaattatctgagaaaatactttctgttgtgtgcattcatctaacagagttaaacctttctttggattcagtagtttggaaacactgcttttgtataatctgtgaaagcatatttgatagctcattcagtccttaaaggaaaaaatgattatctcatgataaaaactagaaggaaagtacctgagaaatggccttgtgatgtctacattcacctcacagagttgaatctatttttcattcagcagtttggaaacactgttctgttagaatctgtgaggcaatattcagcagagcattcaggcctatggtgacaaaggaaatatcttcagatgaaaactagaaagaacttttccaataaactgctttgtgatgtgtgcattcatctcacctatttaaacttttatttggattcagcaacttggaaacattgtttttgtccattctgcaaatggacatttgggagcttaytgaagccaatggcaacaaagc

SEQ ID NO: 411592 - DNA, 580 bp, Homo sapiens
atatttcctttttcaccataggcttcaaagcgctcccagatattcgttcaaagattctatgaaaacagtgtttccaaactgctgaatgaaaggaaaggtttaactatgcaagatgaatgtacacatcacaaagtgatttctcaaatagctcccttctagtttttatcctgggatactcactttttcaccattggcctcaatgagctcccaaacatccctttgcagattctacaataacagtgttcccaaactgctgaatccaaagaaatatttaactctrtgagaggaatgcacacagcacaaagcagtttctcagaaagcttctttatagtttttatctgaagatatttcctttatcaccacaggcctcattgtgctccaaaatatccattcacagattctatgaaaactgtttccaaaccgctgaaagaaaagaaaggtgagatgaatgcatacatcacaaagcagtttctcaaatcacttccttgtaattttttcctgatataatcactttttcaccattggccttaatgagctccaaaatgtccattcacagaatggacaacaacagtgtttgcaa

SEQ ID NO: 411593 - DNA, 562 bp, Homo sapiens
gttattgccctcatcacaaagcggtttctcagcttccttctagtttttgtcctgggatatttaccttttcaccattggcctcaatgaattcccaaatgtccattcacagagtagacaaaaacagtgttcgcgaatggctgaatcaaaagaaaggttaaattctgtgagataagtaaagacatcacaaagcagtttctcagaaagcttccttctaatctttatatgatgatatttcttttcaccataagccacaatgtgctgccaaatatcccttcgtggagtctacaaaaactgtgtttccaaactgctgaacgaaaatagaggttttgaatctgtgagttgaataaacacatcaaaaagcagtttctcagatagtttaattgtagtttttatcctgggccatttgctttttcacctttgccctcagcaacatcccaaatgtccatttgcagagtggacaaagacagagttrccaaactgctgaatccaaagaaaggtttaattttgtgaggtgaatgcaaacatcccaaatcagtttctcattaagcttctttctagtttt

SEQ ID NO: 411594 - DNA, 506 bp, Homo sapiens
gtttctcagaaaggttctttctagtttttatctcaagatatttcctttttcaccataagcctcaatgtgctgccaaatatcctttcccagattctacaaaaacagtgttcccaaactgctgaatgaaaagaaagttttaactgtcctagatgaatgcacacataaaaagccgtttctcagagagcttccttcttgtttttatgttgggatatttactttttgtcctttggcctcaatsagctctgaaaggtacattcacagaatgggcaaaaacagtgttacaaaactgctgaatcaaaagagaatttaactctgtgagatgaatgcacacatcccaaaccagtttctcattaagcttctttctaatttttatctgaagatacttcctttttcaccagaggccccaatgcactaccaaatatctcttcgcagattccaagaaatcagtgtttccaaactgctgaatgaaaagaaatgtttagctctgtgagatgaattcacacatc

SEQ ID NO: 411595 - DNA, 506 bp, Homo sapiens
gtttctcagaaaggttctttctagtttttatctcaagatatttcctttttcaccataagcctcaatgtgctgccaaatatcctttcccagattctacaaaaacagtgttcccaaactgctgaatgaaaagaaagttttaactgtcctagatgaatgcacacataaaaagccgtttctcagagagcttccttcttgtttttatgttgggatatttactttttgtcctttggcctcaatcagctctgaaaggtacattcacagaatgggcaaaaacagtgttacaaaactgctgaatcaaaagagaatttaactctgtgagatgaatgcacacatcccaaaccagtttctcattaagcttctttctaatttttatcygaagatacttcctttttcaccagaggccccaatgcactaccaaatatctcttcgcagattccaagaaatcagtgtttccaaactgctgaatgaaaagaaatgtttagctctgtgagatgaattcacacatc

SEQ ID NO: 411596 - DNA, 553 bp, Homo sapiens
aatcacagaatggacagaaacaatgtttccaaactgctgaatgaaaagaacagtttaactctgctaggtgaatgcacacatcacaaagtggtttctcagatagcttccttctagttttaatcctgggatattcattttttcacctttggcctcaatgggctcccaaacctccayttacataatggacaaaaaaagtgttaccaaactgcagaatccgaacaaaggtttaagtctgtgaaatgaatgcacacaacccaaactattttctcattaagattgtttccagtttttatttgaaaatatttctgttttcaccatgggcctcaatgcattacaaaatatcctttcacagattctaagaaatcattgtttccaaactgctgaatgaaaagaaagatttaactgtgtgagataaatgcacacatcacaaatcagtttctcagaaaacttgcttctagtttttatcctggtgtattcactttttgccattgccctcagtgagttccccagtgctgaatccaaagaaagttttaactctgtgaagtgaatgaat

SEQ ID NO: 411597 - DNA, 553 bp, Homo sapiens
aatcacagaatggacagaaacaatgtttccaaactgctgaatgaaaagaacagtttaactctgctaggtgaatgcacacatcacaaagtggtttctcagatagcttccttctagttttaatcctgggatattcattttttcacctttggcctcaatgggctcccaaacctccacttacataatggacaaaaaaagtgttaccaaactgcagaatccgaacaaaggtttaagtctgtgaaatgaatgcacacaacccaaactattttctcattaagattgtttccagtttttatttgaaaatatttctgttttcaccatgggcctcaatgcattacaaaatatcctttcacagattctaagaaatcattgtttccaaactgctgaatgaaaagaaagatttaactgtgtgagataaatgcacacatcacaaatcagtttctcagaaaacttgyttctagtttttatcctggtgtattcactttttgccattgccctcagtgagttccccagtgctgaatccaaagaaagttttaactctgtgaagtgaatgaat

SEQ ID NO: 411598 - DNA, 623 bp, Homo sapiens
atcacagaatggacagaaacaatgtttccaaactgctgaatgaaaagaacagtttaactctgctaggtgaatgcacacatcacaaagtggtttctcagatagcttccttctagttttaatcctgggatattcattttttcacctttggcctcaatgggctcccaaacctccacttacataatggacaaaaaaagtgttaccaaactgcagaatccgaacaaaggtttaagtctgtgaaatgaatgcacacaacccaaactattttctcattaagattgtttccagtttttatttgaaaatatttctgttttcaccatgggcctcaatgcattacaaaatatcctttcacagattctaagaaatcattgtttccaaactgctgaatgaaaagaaagatttaactgtgtgagataaatgcacacatcacaaatcagtttctcagaaaacttgcttctagtttttatcctggtgtattcactttttgccattgccctcagtgagttccccagtgctgaatccaaagaaagttttaactctgtgaagtgaatgaattcttcacaaagcagtttstaagaaagcttctttctagttcttatctgaagatatttcctttttcaccatag

SEQ ID NO: 411599 - DNA, 537 bp, Homo sapiens
  misc_feature (1)...(537): n = A,T,C or G
ttaactccgtgagatgaaagcacagatcaaaaagcagtttctcattaaacttctttgtggttttaatgtggagatatttcctattcaccatagtcctcaatgcactacamaatatctcttcacagattctaagacaactgttttgaaactgttcaattaaaagaaaggcttaactctttgagatgaatgcacatgtaacaaatcagtttctcagacaaattccttccagtttttagcctgggtactcaatttttcaccattgcctcaaagagctccaaaatgtccattcgcagaattgacaaaaacagttttaccaaaattctgaatccaaagaaaggtgtaactctgtgaaatgaatgcacacatctgaaaccagtttctcattaatgctttttctagttttcatctgaagatatttcctttttcactatagggctcaatgcgcttctaaatatctcttcacagattctaagaaaacagtgttcccaaactgatgaatgaaaagaanaggtttaacgctctggagatgaatgcaca

SEQ ID NO: 411600 - DNA, 605 bp, Homo sapiens
ccaaactgctgaatgaaaagaaaattttaaccctgtgagatgaatgtacacatcagaaatcagtttctcatataactactttctagtttttatcctaggatattcacttttgcatcactggcctcgatgaactcaaaaatttccattcgcagaaaggataaaaacagtgtttccaaactgctgaattaaaagaaaggtttaactatgtgagatgaaagaatgcatcacaaagcactttctcagaaagcttctttctagtttttatctgaagatatttcctttttcgccataggcctcaatgagctgccaaatatccctttgcagattccacaaaaaaagtgtttccataccggcgaatgaaaagaaaggtttaactctgctaaatgaatgtccccatcacaatgcagtttmtcagatagcttccttctagtttttatcctgggatattcgctttttcaccatttgcctcaatgagatcccaaatgtccattccaagaatggacaaaaacagtgttcccaaactgctgaatccaaagaagggtttaactctctgagatgaatgcacacataccaaaccagtttctcattaagtttctttctagttt

SEQ ID NO: 411601 - DNA, 605 bp, Homo sapiens
ccaaactgctgaatgaaaagaaaattttaaccctgtgagatgaatgtacacatcagaaatcagtttctcatataactactttctagtttttatcctaggatattcacttttgcatcactggcctcgatgaactcaaaaatttccattcgcagaaaggataaaaacagtgtttccaaactgctgaattaaaagaaaggtttaactatgtgagatgaaagaatgcatcacaaagcactttctcagaaagcttctttctagtttttatctgaagatatttcctttttcgccataggcctcaatgagctgccaaatatccctttgcagattccacaaaaaaagtgtttccataccggcgaatgaaaagaaaggtttaactctgctaaatgaatgtccccatcacaatgcagtttctcagatagcttccttctagtttttatcctgggatattcgctttttcaccatttgcctcaatgagatcccaaatgtccattccaagaatggacaaaaacagtgttcccaaactgctgaatccaaagaagggtttaactctctgagatgaatgyacacataccaaaccagtttctcattaagtttctttctagttt

SEQ ID NO: 411602 - DNA, 509 bp, Homo sapiens
ttctttctactttttatctgaagatatttcctttttcaccatttgcctcaatgaacacccaaatatccctttgcrgattctgccaaacagtgcttcctgactgctgtcagaaaagagtgttttaactctgcgaggtgaatgcacacatcacaaagccgtttctcagatagcttccttctagtttttatcctagatattctctttttcaccattggccctgataagctccaaaatgtccatccacagaatgaaagaaaacagtgtttgcaaactgctgaatccacagaaatgtttacctctgtgagataaatgcccacatcacaaagcagtttctgagacagcttctttctaatttttatctgagaatatttcctttttcaccttagacctctatgctgtcccaattatcacttcgtggattctatgaaaagagtgtttccagactgctattgggaaagaatgttttaactcttcgagatgaatgcacacatcacaaagcagtttctcaa

SEQ ID NO: 411603 - DNA, 634 bp, Homo sapiens
aagaatgttttaactcttcgagatgaatgcacacatcacaaagcagtttctcaaatatcttcctggaactgcaggtgactgctgccatgcccagctaatttattccatttttagtagagacgggatttcactgtgttacccaagatgatctcaatcttctgacctcgtgatcctccagctttggcctcccaaagtgctgggattccaggcttgagccaccacgcctggactccttcttcaccgtaggtctcaattcactcccagatatcccttcacagattctacgaaaacacggtttccaaattgctgaaggaaaataaaggtttaactctgcaagatrattgcacacaccagaaagtggtttctcagatagcttccttctagttttcatcctggaatattcactttttcaccaatggtctcaatgagctctgaaatatcccttcacatattctacaacaatgttgtttccaaattgctgattcaaaacaaagttttaaatctgtcaaatgaaggcacacatcataaagcagtatcttggaaagcttctttatggaaaaagatatttcctttttcaccatagacctcaatgctgtcaaaatatccctttgcagattctgccaagacaacattt

SEQ ID NO: 411604 - DNA, 634 bp, Homo sapiens
aagaatgttttaactcttcgagatgaatgcacacatcacaaagcagtttctcaaatatcttcctggaactgcaggtgactgctgccatgcccagctaatttattccatttttagtagagacgggatttcactgtgttacccaagatgatctcaatcttctgacctcgtgatcctccagctttggcctcccaaagtgctgggattccaggcttgagccaccacgcctggactccttcttcaccgtaggtctcaattcactcccagatatcccttcacagattctacgaaaacacggtttccaaattgctgaaggaaaataaaggtttaactctgcaagataawtgcacacaccagaaagtggtttctcagatagcttccttctagttttcatcctggaatattcactttttcaccaatggtctcaatgagctctgaaatatcccttcacatattctacaacaatgttgtttccaaattgctgattcaaaacaaagttttaaatctgtcaaatgaaggcacacatcataaagcagtatcttggaaagcttctttatggaaaaagatatttcctttttcaccatagacctcaatgctgtcaaaatatccctttgcagattctgccaagacaacattt

SEQ ID NO: 411605 - DNA, 644 bp, Homo sapiens
cctttttcaccataggcctgtttgtgctcccaaatatcctttggtggattctgccaaaacagtgtttccagactgctgtagcaaaataatgttttatctctgtttgttaggtgaatacacatatcacaaagtgttttctaagatagttttttctagtttttttttcctgggatatttcttttttcattataggtctcaatgtgctcctagttatcactttatagattctatgaaaacagcttttccaaactgctgagtgaaaagaaaagtttaattctgtgacatgaatgcacacatcactaagaggtttctcaaagagcttccatctagtttttatccaaggatattcacttttttgtcattggcctcaatgagttcccaaatgtccatttgcagaatggacacaaaaagtgtttgcaaactgctgaatccatcagaaatatttaactctctgagatgaacgyacacatcgcaaagaactttctcagaatacttctttctagaatttttctgaagatatttccttttaaccatagtcctcaatacactccaaaatataacttcacagattctacaaaaacagtgtttccaaactgcttaatgaaaagaaagatttatctctgcaagacgaatgcacatatcaa

SEQ ID NO: 411606 - DNA, 644 bp, Homo sapiens
cctttttcaccataggcctgtttgtgctcccaaatatcctttggtggattctgccaaaacagtgtttccagactgctgtagcaaaataatgttttatctctgtttgttaggtgaatacacatatcacaaagtgttttctaagatagttttttctagtttttttttcctgggatatttcttttttcattataggtctcaatgtgctcctagttatcactttatagattctatgaaaacagcttttccaaactgctgagtgaaaagaaaagtttaattctgtgacatgaatgcacacatcactaagaggtttctcaaagagcttccatctagtttttatccaaggatattcacttttttgtcattggcctcaatgagttcccaaatgtccatttgcagaatggacacaaaaagtgtttgcaaactgctgaatccatcagaaatatttaactctctgagatgaacgcacacatcgcaaagaactttctcagaatacttctttctagaatttttctgaagatatttccttttaaccatagtcctcaatacactccmaaatataacttcacagattctacaaaaacagtgtttccaaactgcttaatgaaaagaaagatttatctctgcaagacgaatgcacatatcaa

SEQ ID NO: 411607 - DNA, 541 bp, Homo sapiens
gcatgcatcacaaagttgtttctcagatagtttccttctagtttttatgctgggatattcgttttttcaccactggcctcaaagagctcccaaatataccttcacagattgtaaaacaacagtgtttccaaaatgctgaacccaaagaaaagtttaactctgtgagaataatgcatatatctcaaagcagtttctcagaamgcttctttctagtttttatcctgagatattctcttatttgtcgttggcctcaatgagctctgaaatatctctccatagattctacaacaacagtgtttccaaactgctgaacccaaagaaaggattaactctgtgagatcaatgcacacatcacaaagcagtttctcagaaagcttctttctagtttttatctgaagatatttacttcttcaccataggcttctatgtgctcccaaatgtcactttgcagattatggcaaaacagtgcttccagactgctgaatgaaaagacggtttcaactcagtgagataaatgcacacatcaccacgtggtttctca

SEQ ID NO: 411608 - DNA, 541 bp, Homo sapiens
gcatgcatcacaaagttgtttctcagatagtttccttctagtttttatgctgggatattcgttttttcaccactggcctcaaagagctcccaaatataccttcacagattgtaaaacaacagtgtttccaaaatgctgaacccaaagaaaagtttaactctgtgagaataatgcatatatctcaaagcagtttctcagaaagcttctttctagtttttatcctgagatattctcttatttgtcgttggcctcaatgagctctgaaatatctctycatagattctacaacaacagtgtttccaaactgctgaacccaaagaaaggattaactctgtgagatcaatgcacacatcacaaagcagtttctcagaaagcttctttctagtttttatctgaagatatttacttcttcaccataggcttctatgtgctcccaaatgtcactttgcagattatggcaaaacagtgcttccagactgctgaatgaaaagacggtttcaactcagtgagataaatgcacacatcaccacgtggtttctca

SEQ ID NO: 411609 - DNA, 577 bp, Homo sapiens
tttaatttttatctgaaaatatttcctttttcatcataggcctataggtgctcccaaatatcccttcatggataccgccaaaacagtgtttccagactgctaaatgaaaagcaacgtttatctctgcgaggtgaatgtcacatcacaaaactgtttctcagatagtttctttctagtttttatcctgggatattcccttttttgccattggcctcaatgagctcccaaatgtccatacgcagaatggacaacaacagagttttcaaactgctgtatccaaagtaaggtttaactctgtgagatgaatgcacacatgtgaaagtagtttctcagaaagcttctttgtagtttttatctgaggttatttcgtttttcaccataggcctcaatgcactccyagatatcactttgcagattctacaaaaatattgtttccaaactgctgaatgaaaataaaggtttaactctgcgagttgaatcctcacttcacaaagcagtttctcagaaagtttctttcttgtttttgtttgaaaatatgtcctttatctccatcagcctctatgcgttcccaaataac

SEQ ID NO: 411610 - DNA, 535 bp, Homo sapiens
ttaactctgtgacatgtaagcactcatcacaaagctgtttctcagaaagcttctctctagtttttatctgaagatttctttttcaccctggcctcaatgcgctcccaaatatcccttcatggattctgccaaaaacagtttttccagactgctggatgmaaagaaagttttaactcttccaacggaattcacacttcacaaagcagtatcttagattgcttccttgaactttttatcaagatatggcctttttcaccacaggcctcaaggtgctcccaaatatccctttgctgattctgccaaaacagtgtttccagattgctgaatctaaggaaatatttatctctgtgagatgaatgcacacatcacaaagctgtttctcaaatagctttccttgagattttatgatgggatattccctttttttgccatttatctgaaagaattcccaaatgtccatttgcagaatggacaaaaacagtgtttgcaaactactgaatccacagaaaatttgaaatctttgagatgagtgcac

SEQ ID NO: 411611 - DNA, 535 bp, Homo sapiens
ttaactctgtgacatgtaagcactcatcacaaagctgtttctcagaaagcttctctctagtttttatctgaagatttctttttcaccctggcctcaatgcgctcccaaatatcccttcatggattctgccaaaaacagtttttccagactgctggatgcaaagaaagttttaactcttccaacggaattcacacttcacaaagcagtatcttagattgcttccttgaactttttatcaagatatgkcctttttcaccacaggcctcaaggtgctcccaaatatccctttgctgattctgccaaaacagtgtttccagattgctgaatctaaggaaatatttatctctgtgagatgaatgcacacatcacaaagctgtttctcaaatagctttccttgagattttatgatgggatattccctttttttgccatttatctgaaagaattcccaaatgtccatttgcagaatggacaaaaacagtgtttgcaaactactgaatccacagaaaatttgaaatctttgagatgagtgcac

SEQ ID NO: 411612 - DNA, 535 bp, Homo sapiens
ttaactctgtgacatgtaagcactcatcacaaagctgtttctcagaaagcttctctctagtttttatctgaagatttctttttcaccctggcctcaatgcgctcccaaatatcccttcatggattctgccaaaaacagtttttccagactgctggatgcaaagaaagttttaactcttccaacggaattcacacttcacaaagcagtatcttagattgcttccttgaactttttatcaagatatggcctttttcaccacaggcctcaaggtgctcccaaatatccctttgctgattctgccaaaacagtgtttccagattgctgaatctaaggaaatatttatctctgtgagatgaatgcacacatcacaaagctgtttctcaaatagctttccttgagattttatsatgggatattccctttttttgccatttatctgaaagaattcccaaatgtccatttgcagaatggacaaaaacagtgtttgcaaactactgaatccacagaaaatttgaaatctttgagatgagtgcac

SEQ ID NO: 411613 - DNA, 600 bp, Homo sapiens
tttctaaactgctgaatccaaagaaaggtttaactctgtgagatgaatgcccgaatctcaaggtagtttctgagaaagctgttttctagttttcatctgaggttatttcctttttaccataggcctctaagggctccaatatatatctttgcagattctacaaaaacaatgtttccaaactgctgaatgaaaaggacttttcaccactgagaggtgaatgcacacatcacaaagctgtttctcagatagcttctttctagtttttattctgggatagtccatttttccctttggcctacttatgctcccaaattttccttcatrgatactaaggcaacagtgtttacaaactgctgtatccaaagaaaggttgaactctgtgagatgaatgcacacatctcaaggcagtttctcagaaagattctttctaggttttatctgatgttatttcctttttcaccataagcctcaatgcactcccagatatcacttcacagattctctgaaaacagtgtttcaaaactgctgaatgaaaagaaagctttaactctgcgaggtgaatgcacacatcacaaggcagtttctcagaaatcttctttg

SEQ ID NO: 411614 - DNA, 587 bp, Homo sapiens
tacaacaacagtgtttctaaactgctgaatccaaagaaaggtttaactctgtgagatgaatgcccgaatctcaaggtagtttctgagaaagctgttttctagttttcatctgaggttatttcctttttaccataggcctctaagggctccaatatatatctttgcagattctacaaaaacaatgtttccaaactgctgaatgaaaaggacttttcaccactgagaggtgaatgcacacatcacaaagctgtttctcagatagcttctttctagtttttattctgggatagtccatttttccctttggcctacttatgctcccaaattttccttcatggatactaaggcaacagtgtttwcaaactgctgtatccaaagaaaggttgaactctgtgagatgaatgcacacatctcaaggcagtttctcagaaagattctttctaggttttatctgatgttatttcctttttcaccataagcctcaatgcactcccagatatcacttcacagattctctgaaaacagtgtttcaaaactgctgaatgaaaagaaagctttaactctgcgaggtgaatgcacacatcaca

SEQ ID NO: 411615 - DNA, 600 bp, Homo sapiens
tttctaaactgctgaatccaaagaaaggtttaactctgtgagatgaatgcccgaatctcaaggtagtttctgagaaagctgttttctagttttcatctgaggttatttcctttttaccataggcctctaagggctccaatatatatctttgcagattctacaaaaacaatgtttccaaactgctgaatgaaaaggacttttcaccactgagaggtgaatgcacacatcacaaagctgtttctcagatagcttctttctagtttttattctgggatagtccatttttccctttggcctacttatgctcccaaattttccttcatggatactaaggcaacagtgtttacaaactgctgtatccaaagaaaggttgaactctgtgagatgaatgcacacatctcaaggcagtttctcagaaagattctttctaggttttatctgatgttatttcctttttcaccatargcctcaatgcactcccagatatcacttcacagattctctgaaaacagtgtttcaaaactgctgaatgaaaagaaagctttaactctgcgaggtgaatgcacacatcacaaggcagtttctcagaaatcttctttg

SEQ ID NO: 411616 - DNA, 587 bp, Homo sapiens
tacaacaacagtgtttctaaactgctgaatccaaagaaaggtttaactctgtgagatgaatgcccgaatctcaaggtagtttctgagaaagctgttttctagttttcatctgaggttatttcctttttaccataggcctctaagggctccaatatatatctttgcagattctacaaaaacaatgtttccaaactgctgaatgaaaaggacttttcaccactgagaggtgaatgcacacatcacaaagctgtttctcagatagcttctttctagtttttattctgggatagtccatttttccctttggcctacttatgctcccaaattttccttcatggatactaaggcaacagtgtttacaaactgctgtatccaaagaaaggttgaactctgtgagatgaatgcacacatctcaaggcagtttctcagaaagattctttctaggttttatctgatgttatttcctttttcaccataarcctcaatgcactcccagatatcacttcacagattctctgaaaacagtgtttcaaaactgctgaatgaaaagaaagctttaactctgcgaggtgaatgcacacatcaca

SEQ ID NO: 411617 - DNA, 314 bp, Homo sapiens
  misc_feature (1)...(314): n = A,T,C or G
atctanaggatatttctttttacaccataggcctcaatgtgctgccaaatatcctttcacagtttctacaaaagcagtgtttcccaactgctgaatgaaaagaagggtttaactctgtgagwtgaatgcacacatcacaaagtggtttctcagagagcttccttctagtttttatcctggcatattcccttttttgccattggcctcattgagctcccaaatgtccattcacagaattgtcaaaagcattgttatcaaactactgaatccaaagaaaggtttagctctgtgagatgagcacacacatcccaaac

SEQ ID NO: 411618 - DNA, 569 bp, Homo sapiens
tactgaatccaaagaaaggtttagctctgtgagatgagcacacacatcccaaacaagtttctcattaaacttctttccagtttttwtctgaagatatttcctttttcagcataggcttccatactcttccaaatatcttgtcagagattataagaaaagagtgtttgcaaactgctgaatgaaaagaaagttttacctctgtgagatgaatacacacatcagaaatcagtttctccaataagttccttccaatttttatcctgggatattcactttttcaccattggcctctatgagctcccaaatgtccattcgcaaaatggacaaagagtgattttccaaactgctgaatccaaatgaaggtttaactctgtgagatacatgcacacatcccaaaagcagtttctcattaagcttctttgtagtttttatttgaagatatttcctaatcaccataatcctcaatgtgctatcaagtattccttcaaagattctaagaaaatagtgtttccaagctgctgtatgaaaagaaaggtttaactctgtgagatgaatgcacacatcacaaa

SEQ ID NO: 411619 - DNA, 569 bp, Homo sapiens
tactgaatccaaagaaaggtttagctctgtgagatgagcacacacatcccaaacaagtttctcattaaacttctttccagtttttttctgaagatatttcctttttcagcataggcttccatactcttccaaatatcttgtcagagattataagaaaagagtgtttgcaaactgctgaatgaaaagaaagtyttacctctgtgagatgaatacacacatcagaaatcagtttctccaataagttccttccaatttttatcctgggatattcactttttcaccattggcctctatgagctcccaaatgtccattcgcaaaatggacaaagagtgattttccaaactgctgaatccaaatgaaggtttaactctgtgagatacatgcacacatcccaaaagcagtttctcattaagcttctttgtagtttttatttgaagatatttcctaatcaccataatcctcaatgtgctatcaagtattccttcaaagattctaagaaaatagtgtttccaagctgctgtatgaaaagaaaggtttaactctgtgagatgaatgcacacatcacaaa

SEQ ID NO: 411620 - DNA, 569 bp, Homo sapiens
tactgaatccaaagaaaggtttagctctgtgagatgagcacacacatcccaaacaagtttctcattaaacttctttccagtttttttctgaagatatttcctttttcagcataggcttccatactcttccaaatatcttgtcagagattataagaaaagagtgtttgcaaactgctgaatgaaaagaaagttttacctctgtgagatgaatacacacatcagaaatcagtttctccrataagttccttccaatttttatcctgggatattcactttttcaccattggcctctatgagctcccaaatgtccattcgcaaaatggacaaagagtgattttccaaactgctgaatccaaatgaaggtttaactctgtgagatacatgcacacatcccaaaagcagtttctcattaagcttctttgtagtttttatttgaagatatttcctaatcaccataatcctcaatgtgctatcaagtattccttcaaagattctaagaaaatagtgtttccaagctgctgtatgaaaagaaaggtttaactctgtgagatgaatgcacacatcacaaa

SEQ ID NO: 411621 - DNA, 569 bp, Homo sapiens
tactgaatccaaagaaaggtttagctctgtgagatgagcacacacatcccaaacaagtttctcattaaacttctttccagtttttttctgaagatatttcctttttcagcataggcttccatactcttccaaatatcttgtcagagattataagaaaagagtgtttgcaaactgctgaatgaaaagaaagttttacctctgtgagatgaatacacacatcagaaatcagtttctccaataagttccttccaatttttatcctgggatattcactttttcaccattggcctctatgagctcccaaatgtccattcgcaaaatggacaaagagtgattttccaaactgctgaatccaaatgaaggtttaactctgtgagatacatgcacacatcccaaaagcagtttctcattaagcttctttgtagtttttatttgaagatatttcctaatcaccataatcctcaatgtgctaycaagtattccttcaaagattctaagaaaatagtgtttccaagctgctgtatgaaaagaaaggtttaactctgtgagatgaatgcacacatcacaaa

SEQ ID NO: 411622 - DNA, 548 bp, Homo sapiens
aactgcattttgatgtatgcattcatctcacagagttaaaccatcctgtggattcagcagttttaaaacactgtttttgtccattctgtgaatggacatttgggagctctttgacttcgatggcaaaaaagcaaatatccaagaataaaaatgagaatgatgctatttgagaaactgttttktgatgtatgcattcatctcacagagataaacctctcttttcaatcagcagtttggaaacactgttttcatagaatttgtgaaggggtatctgcgaatgcattcaggtctatgatgaaaaaggaaatatcttcagataaaaactaggaaggtttctgagaaactcctttgtattgtgtgctttcatctcacagagttaaaacttactttggattcagcagtttggaaacacggttgttgtagaatctgtgaagggatatttgggatctcattgaggccaatggtgaaaaagtgaatatccctggataataagtagaaggaagctatttgagaaactgctttgtgatgtgtgcattcatctcacagac

SEQ ID NO: 411623 - DNA, 523 bp, Homo sapiens
agcagtttctcagaaagcttctttctaatttttatctgaaaatatttcctttattcccatagacctgaaagtgctcccaaatattcctttgcagattctcaaaacagtgtttccaaactgctgaatgaaaagacaagtaagtctgtgagatgaatgcacacatcacaaagtggtttctcagatagcttccttctagtatttaccctgggatattcactttttttcctttggcctcaaagagctcccaaatagtgcttcacagatactacaaacaaagtgtctccaaactactaaattcaaagagagttttaaccctgtgtgttgagtggaaacgttacaaagctgtttctcaaatgcttctttctrgtttttctgacgtttttatctgaagatatttccctatgcacaattggcctcaaagccctctgaaatattccttcatacattctaaaaaacagagtttccaaagggctgaatgaaacgacaagtttaactctgtgagatgaaggcacacaacacaaac

SEQ ID NO: 411624 - DNA, 547 bp, Homo sapiens
agtggaaacgttacaaagctgtttctcaaatgcttctttctggtttttctgacgtttttatctgaagatatttccctatgcacaattggcctcaaagccctctgaaatattccttcatacattctaaaaaacagagtttccaaagggctgaatgaaacgacaagtttaactctgtgagatgaaggcacacaacacaaaccgatttctcaaatagcttccttgtagtttttatcatgggatattcacttyttcgcaattaacctcaatgagcttcaaaatgttcattcgcagaagagacaaaaactgtgtttccaaactgttgaatccatagaaagtttaactctgtgagatgagtgcaaacatccgaatgcagtttctcagaaaactcctttctagtttttatctcaagatatttcctttttcgccataggcttcaatgcacttctaaacataccttctcagattctgcaaaaacattgtttccaaactgctgaaagaaaactaaggtttaactctttgagtagaatacacacatcagaaagcattt

SEQ ID NO: 411625 - DNA, 522 bp, Homo sapiens
ataaaccacatcggaaggttaccaacatcaaagaccaaaggtagataaatccatgaaaataagaaaaaaacagcgcaacaaagttgaaaattccaaacaccagaatgcctcttctcctccaaaggatcacaactccttgccagcaagggaacaaaactggacagagaatgagtttgatgaattgacagaagtaggtttcagaaggtgggtaataacaaactcctccaagctaaaggaacatgttctaacccaatgcaaggaagctaagaaacttgaaaaaagttagaggaattgctaactagaataaccagtttagagaagaacataaatgccctgatggagctgaaaaacacascacaagaactttgtgaagcatacacaagtatcaatagccgaatcgatcaagcagaagaaaagatatcacagattgaagataaacttaatgaaataaagcatgaagacaagattagagaaaaaagaatgaaaaggaacaaagaaagcctccaagaaatatggaactat

SEQ ID NO: 411626 - DNA, 522 bp, Homo sapiens
ataaaccacatcggaaggttaccaacatcaaagaccaaaggtagataaatccatgaaaataagaaaaaaacagcgcaacaaagttgaaaattccaaacaccagaatgcctcttctcctccaaaggatcacaactccttgccagcaagggaacaaaactggacagagaatgagtttgatgaattgacagaagtaggtttcagaaggtgggtaataacaaactcctccaagctaaaggaacatgttctaacccaatgcaaggaagctaagaaacttgaaaaaagttagaggaattgctaactagaataaccagtttagagaagaacataaatgccctgatggagctgaaaaacacaccacaagaactttgtgaagcatacacaagtatcaatagccgaatcgatcaagcagaagaaaagatatcacagattgaagataaacttaatgaaataaagcatgaagacaagattagagaaaaaakaatgaaaaggaacaaagaaagcctccaagaaatatggaactat

SEQ ID NO: 411627 - DNA, 567 bp, Homo sapiens
cattaactataatgattaattgtaaaaatgatagctaatatttatggatttttattctgtttagttatacaagatcccagtcaacaaaaagaagaaaaagtatataaaatgataaaatgagtaatgaaaatgtacaaacatcccttttatactcagaagcaataaccttagaatttgtaaaaataaatatatatgtatatatcaacatataaatatacacatgcatatatacatatatgcagttaagtatacatattataaatttaagagtaattatgaatagaaataagatatacagctcccaaaccagtggagagttttaaacatatagaaataaagaaaatgcttttaatcaaaggcagaaaagtaaggcaaaataagattcagcagaaakagaagaatgtaaccagaaggcacaaaaatgtaaaaaatatcaattattaaaaaatataaagtggctggctgcagtggctcatgcctgtaatcccagcactttgggaggccgaggtgggcagatcacaaggtcaagacatcgagaccatcctggccaacatggtgaaatcccat

SEQ ID NO: 411628 - DNA, 672 bp, Homo sapiens
cctatcaatagctaccggatgaagctaatgtgatatttcaagaaaaattattcacattttgacaattttttcttgctcacagaccacaggcaggaccaacttggtcaatcagagttccaagaacatcaaaactcaaaaggaaggagatggaacttcagtctctttcccccttgtaacatcctcaatggagtctcatccactctgagtctactttmtttgctttagtctccatccccagcagccataagaattttccttcttcatattgaaagagaacttcctttacatcatgtcttggatactatttacacttataatttataagactcttttcatgcctgtagtcccagcactttggcagacaaggcagaaggattgcttgggcccaggagttcaagaccagcctgggctggtgagaccctatctctacaaagaaaaaaaatatataattagctgggcatggtagcacatgcctgtaatccaagctactcaagaggttgaagcagtaggatcccttgggcccaggagtttgaggttacagtaagctataatcacgccacggcactccagcctggatgacagagcaagaccgtgtctcaaaaaataaaataatcttttcaaaatcatccaaggctttttctttacagtaattagaaaattaaataatttttc

SEQ ID NO: 411629 - DNA, 536 bp, Homo sapiens
ttggaatttttttccctaagatatactcataactttctctttcccttaattccgatgttcaaatgttacctcatcaaagaaatattccctgaccacactactattgccgttcctctctctacttttacttatcactgctcttcattgaagctatcactacctgccacgttatacatttatttctttctttttctgtcttctagaatgtaasctccataatagtgtgaacttttgttaaccactctatgcccagtgcctgaattgtaactaacatatagtaggtactcaatatgtatttgttggttgaatgaatgactagaaaattatgtaaaagcatcatggagaagaacatgaaagacattggattctgaattaaggaattttggctttatttgatagctgtatcagtctactactcccacaaaaatacattgtcataatacaataataatcatttatttctcatgcatctgcagatcagtggctaatggttggctaattgaggctgtgctcaacaggatggttatactggtttt

SEQ ID NO: 411630 - DNA, 504 bp, Homo sapiens
cagaaaaccaaataccacatgtcctccttacaaatgggaggtaaatgatgaaaacacatggacacatagaaggaaacaacacatgatggagcctatcagaggatggaggttgagaggaggaaggggatcaggaaaaataattaatgggaactaggcttaagacctggatgatgaaataatctgtataacaaacccccatgacatgagtgtacctacataacaaacctgcatgtgtagccctgaacttaaaagttaaaaaaaaaatgacaattttttaaaaatagggagttccaatgctaatgctatgtagaagacacttgggctatcaaatgaaatagctggtattcaactccagttattggtgacctaaaggaatataaacctgacattataggatcatccactttttaacaggacgaatcaaaatttatgtgggaaatcttcaagttattaaatacaggaagccrtctaaaataatttttttttaattctgtgagaaccaaa

SEQ ID NO: 411631 - DNA, 564 bp, Homo sapiens
actgttcaagtggtttagacaaattttcacttttctgtaggagcatccagtgagcaagcagatacaggattctcagtgtctagwtcagtgctctgcagaggattttgattatatacttttaccaattaaaaaaaaaattgaacatgccctctcccatattttatatatgaattactctatttaataatccaaattacaatataggacagaatgtattattattaatgatgggtgtatataagtagttcaaatagcctttgtgattggttgaatttttggcatcttttcagaatattgttttactctctaagggactgctgaacgcctcattcaactcatagaaaagatgcagtgaggcctcttcagaatttccatatctgctcgcattattgggacactctcttcacattttctctgaagaaatctttttaagctatgtgtccatcattgaggattacttcaagttgaaactagacaatattatttcatgcattattccatctagccagtcacaagtaaacagcatgtgtcacaaaatactgaaaataaacagaatgtggcact

SEQ ID NO: 411632 - DNA, 474 bp, Homo sapiens
agataataattgtttccataggatgaattactgtataatttatatatggtcctgaaaattccaatgcaaattcatttttccctaatacaaataatgtaacacaatttaaaacttactaaataatttaacaaaactttgttatagtacttgaaacctggatccttaattattagaatattgataatatattacttatgcaaaatttaaagttcttctgtaatatgactaccctgtcctttggctctgtttacagtaggaaatactgtattaaaaattttctggtcctctgccaccctytgccacaaagataaataagaagtgccccttacaaatctttgttattttaaaacccactcacttaaaatggcagtgctttttcaagagttatacaccaatcagtggcaaaactaacattcctttttctgaaataattattttccttcctgattagtggcatttcaaataaattgcttg

SEQ ID NO: 411633 - DNA, 655 bp, Homo sapiens
aaactggtgatgagcccaaatagttaacttacatttttgtaccatttcaaaaatatttggatattcttttttatccactgttaagttcagtgatctttagagtaagatgtgggtactttgacaggttggcaagacatttaattgtggcatcaagcaaaattttgaaaatttctatttctattcagttttcatctcgttcttttatttttttgtctttgtgaatttgtgcatgaatacactggtggatgcctattcaaaaaagtttggaaatgactgacacactttttatagtgctataaaagactgtcacatgctccctaaatactataaacatctagagagacactaaatcttttaatgcaattttttataccctggatatattaggaatatatgtttttataaaaagaaaaggtaaacttagaaatggtttatattgcataatcagcaacactctgctgtttcatattattgtrtgtgtttaatttatttgctggtctgagtattttagaagtacatgcaataatggaagaatgtaaatatatacatcatccagaaaaattacaataaattttgctgtgtcaaataccaatccaaaagtagtagcataaagcagcaatcaattttctatgctcatgaattttggggtcaagaa

SEQ ID NO: 411634 - DNA, 622 bp, Homo sapiens
tttttttttaattcaagtctttgaaaccccagagacatttaatatagcactttatcatgaaaatacatatattgctgcaggactagaaatagaccargtcaaagaaacattgggagagtcagtaaaagggacagagccatgtaatcttcctgtggatatttggttgagtacatggggatccaaattagtgggcattgagatggaggacatttcatttccgttactaccaagtgacatactccttggtttagacacaaaaacatgaatgtttaagacctaaagtatgctttgcaaaacactctgataacaatgaactttttttacacattcatattgaaataaaagatcttttgaatcaaaacaattgaaatggacatagagagtagaaggatagttatcagaggctgggaagggttgtggaggggttgggggtggtgagcactgttaatgggtacaaaaaatagaaagaataaataagacctactatttgatagctgaacagggtaactatagtcagtaataactgtccattttaaaataactaaaatagtgtaattggattgtttataacacaaaagataaatgcttgaggggatggataccccattctctaggatgtgat

SEQ ID NO: 411635 - DNA, 622 bp, Homo sapiens
tttttttttaattcaagtctttgaaaccccagagacatttaatatagcactttatcatgaaaatacatatattgctgcaggactagaaatagaccaggtcaaagaaacattgggagagtcagtaaaagggacagagccatgtaatcttcctgtggatatttggttgagtacatggggatccaaattagtgggcattgagatggaggacatttcatttccgttactaccaagtgacatactccttggtttagacacaaaaacatgaatgtttaagacctaaagtatgctttgcaaaacactctgataacaatgaactttttttacacattcatattgaaataaaagatcttttgaatcaaaacaattgaaatgracatagagagtagaaggatagttatcagaggctgggaagggttgtggaggggttgggggtggtgagcactgttaatgggtacaaaaaatagaaagaataaataagacctactatttgatagctgaacagggtaactatagtcagtaataactgtccattttaaaataactaaaatagtgtaattggattgtttataacacaaaagataaatgcttgaggggatggataccccattctctaggatgtgat

SEQ ID NO: 411636 - DNA, 622 bp, Homo sapiens
tttttttttaattcaagtctttgaaaccccagagacatttaatatagcactttatcatgaaaatacatatattgctgcaggactagaaatagaccaggtcaaagaaacattgggagagtcagtaaaagggacagagccatgtaatcttcctgtggatatttggttgagtacatggggatccaaattagtgggcattgagatggaggacatttcatttccgttactaccaagtgacatactccttggtttagacacaaaaacatgaatgtttaagacctaaagtatgctttgcaaaacactctgataacaatgaactttttttacacattcatattgaaataaaagatcttttgaatcaaaacaattgaaatggacatagagagtagaaggatagttatcagaggctgggaagggttgtggaggggttgggggtggtgagcactgttaatgggtacaaaaaatagaaagaataaataagacctactatttgatagctgaacagggtaactatagtcartaataactgtccattttaaaataactaaaatagtgtaattggattgtttataacacaaaagataaatgcttgaggggatggataccccattctctaggatgtgat

SEQ ID NO: 411637 - DNA, 546 bp, Homo sapiens
attactgggctcattctatcaggtggcccagcaggccacggtgaagaagaaccaatgtgttgaaaactctgacaacaatcttatgacatgggaattacttttattcccattttataaacagaaagattaaattactgaaaccaaattgttgttgccctaataaaatatatacgcttttctctgattgcaaatttaacacttgtttatgatagaaaacaaaactaaggacaaaaaaaaagtcatctgtgatcgtatggctaacactgtgtgtgtatactatcttctttttctgtatgtatctacataatatgtttaacaaatggaattgccctaagaataacatctgtaacttgtttttttccattaagcaatatttttccatgccattaaagagtcttataaacatcagctttaatagctgtaaagtctcacattacatggaagaatcattatataatggtttctttagtctcttaaaatagatatttatgtcatttcaattttttattcttataaasgatgctgtgataaaccacctggtaataa

SEQ ID NO: 411638 - DNA, 605 bp, Homo sapiens
gttccaccaatctgtctgaaaaatatctggttggaaaccagggatgcatttgtaaaaacagtgcttagggcacagggcagttcaaacaaatatttttaacccataatgtagctgaagaaacatactaataatactagggaccctcatcattttttttatattgttttaatgcttctatctagcaastgtatttcaaattgataaactgaaacaccaagaacatgtcttccatattcatggcagtttaggaacctacacttaatgtcctttatggtagagcctggctggtggaagagagacaatctcgtagagactctagcaatagacgtaagcatttataggaagagcttgagattgaaactcttaggtcaaaagaaaaaaagggcaggagcagaggttacattgaacgagttgcagctgccactgtaagcgtcatgatagcaggtggtttcatctgtttcgctcgctattgtattcccagaacttagaatggtgcctggggtattgtagatgtttgatatgtagttatgaatgaatgaatgaatgaatgcagtagtgataagaggtgatgtgacaccaagacagaaaaaactaggtataataaa

SEQ ID NO: 411639 - DNA, 598 bp, Homo sapiens
agaaattttatggataactctttactacatcttgagataaaagggctctctggataaataagttaacaagacattccaccacacaaaggaactaaacatgttacattagtttagaaatatgagcgtagaatgatgaatcttttttgacattgtagaagtaagtgacttttgaaaaagatgtgagtccctgttgattcaggaagtcttttatawattgcatttcataatgcacattgatgaatgacacttaggaataaacaattagatgaatgtcaggttgcatactgttaggttctacatatattcaacaattttctgttctctgattggaaaattttttaaatgtgcttcaccatctatttttcaattgctctatttgtgcaaataatatattttacttttgttacgcattattccataacctagttttatatcttatacaaatattttgaatacctgtacatgttcacatataatttgcacatcttaatagctataaagagtccacatatttatatctgtgtctgcatttgttcataaaaggatctgtctttgtacaatccctccctgggctatgtgcacatgctgttttctctgc

SEQ ID NO: 411640 - DNA, 510 bp, Homo sapiens
caatgtattgcccatagtttcctgaattactgtacaatgtgactgtacaagaaaaagtaatttaacattccaacaagggtctttaaagcaacaataatttttaaatataaaaaaatgaacaaaaacaagtaatacacatctgatcagctcattacactttggaaaaggcttaacttaattcagtgtgacgctgagattttcatacagcaacctaaagtatttgttatgatgccagaccactaggctaactatccaaatggaaagtattacctgtgaaaaattaagaaggttmcataggccaccaagtcaatgcctctttcttgttctatttgatttctgctcattgattattcagggagaaaaataataaaagacattctttacacataaggacacatttaaaggcaactatttcaacttcatagtagttgttgtctcagtggatggagatacagaattaattatctcaatgagatgactctgattcacaagaggctaaggtagctttat

SEQ ID NO: 411641 - DNA, 589 bp, Homo sapiens
gcagtagttaaagtccagtatttgagaaggggttacgtcattcatagtgcaagttttgtttgtttgttttttaaatgttaacttgatttgcatgaaaatgttttaaattgacagtgtcacagagctgtgttggggaaggaagattttgcctattcctcagaagaagagatgtggggaagaggtagagttttttcttgctttctggaacccccacatctgtatrtgttcagatcttcctgttatacatatgcaaagcaactttggtaacttactttgagaatgccttggaagggtccctttttaagcagagagctgaccccatcgacatttccagagagttcaggaaatgcttttgaggactaatttttggctctggtgtttaaacatatgattcattttcattgcaaatcttttcttttccccacctcttctccaagcctagatggaggctttaattgataacgtgttgtgtttcttactgctgactcaacacttcaggttgtatctctaattagccctatgaggttcagataataactttaactttagtgagttttcccagcttcccaaagtcatttattagggcctg

SEQ ID NO: 411642 - DNA, 586 bp, Homo sapiens
ggttgtgccattttcatctgtcttttcagtttctggctcaccttgaaaaaaattcttgaaaaagaaatagctaggttgctgttatccccaggatttcatatcctgttgggccctgtttttggtacaaagccagatgtgtaatcttatatgcttaaaggcacataagagggaaaactctggaaatacatttctgtgttactaagagactgaattaaaacaacaacaacagcaacaacgacaaagattatatagattgtattcaaatgtgccaatttttacattcaaatgctacttctgaaatttaggactactgagaagtaacattgtgatttcataggtaatgtagctgcaacattttctacatatcaataattgattataggaccattacagttactgttattgtgctcagtgttcagaatataaaggattagagacagttccaaaacaataaattaataatttactayttcaaggagtagtcagaactcattttctgttgttactcatgtacgtacatgtatatgtttgtatacatattacttacatacatatctatgtttgtatatatatgcaaatgagttct

SEQ ID NO: 411643 - DNA, 576 bp, Homo sapiens
aaatacaagtttcaaaaattaaaacatgaaaatattctatgggtttttatttactgccctttgtcattatatattaggcatgtattctgagattattggtaagtttaaaagccttacagaaatattttcctttttgaatcagctaaaatggattttaagaggaaattgaaaaatgtctcaartcaattcaatttaaaagccaaattcacttatacattttccacatgaattttgttacagtactacactggaaaatcttaagacttgcaagataaaatgtccatttctttaaaaaagataagcccgtttcctatacagacataaaaaaatgcacacacacacatacacatctcacacacacacacaaagcacattcacatttacccagcttaaagaataaaaggacatgtgagattcagggtaagaagaagggcaaaagaatttcaaacaatcagaaaccagaaagatctcttcttgacaacaaataataaaccacttaaattacaggtaatttccctcttccttatggtaaagatcagatggctatgtgaggtatagtgtatcaaaccaaacaca

SEQ ID NO: 411644 - DNA, 634 bp, Homo sapiens
agtttatgaaacaaaagaaatgtaaggctcattttacttcatttaaattatgaaggcagtatacagtcatataaacataatgtattttgatacaaatccttgtagatgggattccaaagccaatagcactgtcttccaatgtgaagatactaagtcaaatatgaagatattaagtaagtgaatgcataccactcacagggctgaagggattgaaatgccttaaaagaagcatccattccagcaaaatcccaaaacttaacatcagagtcatatcctcctgtcaccaaacgggcacctgagggatccagacccaaagcagacacctggttttaaaaaaataaaataaaatgactggagcaaaatgacatatggtcaattataacccccatttctgttctttaatcccacmccctatgttataggccttggaagcacaaaccaccaactattgttacttctgaaaagcgggaatggatggtgccttctatattcttagactttgttactatattaattcttttgcaataaagaaaaatactttaaatctatttgacaattttgtcccaaatcatcaactatgtactcagaatagctatcactgcaattccgtaagataaactaaggtgctttagtg

SEQ ID NO: 411645 - DNA, 583 bp, Homo sapiens
ctgggcaacaaggcgaaaccctgtctcaaaaaaaaaaaaaaaaaaaaaaattgctttccctgtgaactttcctaggtccaattcacacgtcaatatccaatgtgtaactccttgttcctaagatatatgtagctttctctcgaagcagaaagtgcctagatctactgccctctaagaagaaaagaactgcagtaggaatatttaatgcgattaccatacattggacacagtaaaagaatcaaaggttttttttgttttgttttttttgagacagagtctcactctgtcatccaggctggagtgcagtggtgcaatctcgrctcactgcaacttctgcctgctgggatcaagcgattctcctgcctcagcctcctaagtagctgggatgacaggcacgtagcaccacgcccagctaatatttgtattttttagtagagaaggggtttcacttgttgaccaggctggtctcaaactcctgatctcgggtgatttgcctgcctcagactcgcaaagctgggattagaagtgtgagccacggcgcctggccagagtcaacgttttacataaaggaagtttctataaa

SEQ ID NO: 411646 - DNA, 288 bp, Homo sapiens
ttttaataaatgagggcaatatataatttcgtttaattcaatttctttcattttgctactgtgcagcagcttcaaatagcaataaaatgaacattttaargcatatcttagacttttattttggtgttttaaagtgcaatgaggtttatattaaaattaaaacattgatatgataaaataacactggatcccaattgtaataaaaattgcattttctcttttaaatacgaagtaaagttactctgaaattatgtttaagaaagaactagccactttttttcttgctat

SEQ ID NO: 411647 - DNA, 630 bp, Homo sapiens
ctctctctcactctgtgtgtgtgtgtgtgtgtgtgtgtgtgtgtgtgtgtgtgtgtgtgtactatgagatggagacagagagaaggaagagaggaaagagagggagagactgaatgtctttagacaagcatcctcttttcagtttcaattctctaccwttctctaattcaacaaatcatctgaccacttcacatctttatgttacctgacttaccccagaaagcaagcatttgaatttgaagccttttcttctaactacttggaactaataatggtctattaggaaagggaaattaaaaagaaatatttgctttaccccggcaatttttttagcacaaggattggccattatattattttgaaaattctgatcttctagtacatttacttctcctttttttaaattagttactcactttaaatataaacttttcagaaaaacaaccacatctacacaatccctataaaaattttaaaatcaaaaatttctgaagataaacagtctgtcattgatctgactacaaaacctgactagaactcatgtaaatttaatgttggtatttatttattccacttagagtatttatacattttgcagcagaaatatgaatgtagttgactatgagttgt

SEQ ID NO: 411648 - DNA, 583 bp, Homo sapiens
gtagacttggaataaataaaaaagaaagttcaaatgcagatgcacagattctacagttttatatcattacaaagttgattcaaactgtactttagctggtgcagtgactcttggtataatcccagcaccttgggagactgaggtgggagtatgacttgagcccaggagttcaagaccgacctgggcaacatagtgagactctctctctcccccaaaatttttaaaaattagccttgcatgattgcatgcacctctagtcccagctcctctggaggctgagacaggatgatcccttggccaaggaggtggaggatgcagtgaaatctgatcactccactgcactccrgcctgtgcgacagagcaagacccctgtcaccaaaaaataaataaataaataaaaatgtagtttaattttctcaacagctaaaccaaaggattagaaaaaaattactctgttccactacaagtcaaagaaaaattatgttagagtgcaatgaaaaaaacatcaaacaataattcataattcatcatatatctctcaattctgatgctattttgcctgataacttgacaatattttata

SEQ ID NO: 411649 - DNA, 622 bp, Homo sapiens
ctgataacttgacaatattttatacatttctgaatagaaagtttctccacttataggatatagtaattgcacttaaaatttcttgagtatcttccagttttatagtatcaccaattgggtcataaagtaaaaaaataagaaataatagttaatataatcacctcaaatataattgtagttagcatagttatttagaccattaacttattaccagcaaaatgtagttatcaataactctgacaaaaaagtaaaaataataagcattagcaagaaaattggtagcttattgagaaaaaaaaaaattttcctctaggtgatgggcctttgtgcagactacatatactggctccaaaaagaagtaaaaagtaacacctcccacagctggcatggaaaggatgctttgtttagtgatattacacagacattcaattttttctatgagaaagctgttttttacttcaatctaagtatgaacatgattaatatatctggttactayaatttcttttccaggatagaaattcccataattaggcattttaaacaactcattgatcaagttgtgtttaataatataatcagctagactgtttatttttatgtcttaaaatatattactata

SEQ ID NO: 411650 - DNA, 485 bp, Homo sapiens
aagacaatataattacctgtccctacataaaaaatgaaaccatgcacatttttctattcctagttaaacaattctgacaccaaacaaaaaataacctagcagttggccctaggaaattatttcctcacagaaaatgagtttgyaacccaaataaatgattctacatgtcaaaactaagaacactatcaagactcattttaagaccatcgatttgaggaacccaccaatccaaagctattatatcataattctgtttaatttcaagtttcttatcttgtaaaatcacctaaaataccaaaataaaagtcttatttcttttaacaaccctttctcctttcgaaacacaaataaggctctgctaagtagttcatgttctctcttgctgcggtaagtttaataagcttaatttttgttgattaacaaattttcccagtgatcttggtgtggagtggagaccttggaaaattccagagactccaccaaga

SEQ ID NO: 411651 - DNA, 485 bp, Homo sapiens
aagacaatataattacctgtccctacataaaaaatgaaaccatgcacatttttctattcctagttaaacaattctgacaccaaacaaaaaataacctagcagttggccctaggaaattatttcctcacagaaaatgagtttgtaacccaaataaatgattctacatgtcaaaactaagaacactatcaagactcattttaagaccatcgatttgaggaacccaccaatccaaagctattatatcataattctgtttaatttcaagtttcttatcttgtaaaatcacctaaaataccaaaataaaagtcttatttcttttaayaaccctttctcctttcgaaacacaaataaggctctgctaagtagttcatgttctctcttgctgcggtaagtttaataagcttaatttttgttgattaacaaattttcccagtgatcttggtgtggagtggagaccttggaaaattccagagactccaccaaga

SEQ ID NO: 411652 - DNA, 485 bp, Homo sapiens
aagacaatataattacctgtccctacataaaaaatgaaaccatgcacatttttctattcctagttaaacaattctgacaccaaacaaaaaataacctagcagttggccctaggaaattatttcctcacagaaaatgagtttgtaacccaaataaatgattctacatgtcaaaactaagaacactatcaagactcattttaagaccatcgatttgaggaacccaccaatccaaagctattatatcataattctgtttaatttcaagtttcttatcttgtaaaatcacctaaaataccaaaataaaagtcttatttcttttaacaaccctttctcctttcgaaacacaaataaggctctgctaagtagttcatgttctctcttgctgyggtaagtttaataagcttaatttttgttgattaacaaattttcccagtgatcttggtgtggagtggagaccttggaaaattccagagactccaccaaga

SEQ ID NO: 411653 - DNA, 561 bp, Homo sapiens
tgcattgagcacttggacagagtggtgaaccagatagatgtgacaactcactgtgttcacggagcttacattctagtaaaagatacagacatgtcactatcatttgagaaatgttacactggagaartacaatgttctacaagtgagttattaaattctatgctcagcaccacctcccagattattctttcagccatgtctaattaattattcaaacaactagttgtcccaattgcctaaagtctggctctccttaggcctttccccaccctcaatgcagaatgtcatccaggatctcaagttgcatttagttgtctatccactcagttgatgggcatttatgctggttccatatttttgcaattgtgaattgtgctgctataaacatgcatgtgcaagtgtctttatcatagaatgacttcttttcctctgggtagataaccagtagtgggattgctggatcaaatggtaggtctacttttagttctttaaggaatctccatactgttcttcagagtggttgtactagattatattcccatcagcagtgtaaaagtgttc

SEQ ID NO: 411654 - DNA, 561 bp, Homo sapiens
tgcattgagcacttggacagagtggtgaaccagatagatgtgacaactcactgtgttcacggagcttacattctagtaaaagatacagacatgtcactatcatttgagaaatgttacactggagaagtacaatgttctacaagkgagttattaaattctatgctcagcaccacctcccagattattctttcagccatgtctaattaattattcaaacaactagttgtcccaattgcctaaagtctggctctccttaggcctttccccaccctcaatgcagaatgtcatccaggatctcaagttgcatttagttgtctatccactcagttgatgggcatttatgctggttccatatttttgcaattgtgaattgtgctgctataaacatgcatgtgcaagtgtctttatcatagaatgacttcttttcctctgggtagataaccagtagtgggattgctggatcaaatggtaggtctacttttagttctttaaggaatctccatactgttcttcagagtggttgtactagattatattcccatcagcagtgtaaaagtgttc

SEQ ID NO: 411655 - DNA, 561 bp, Homo sapiens
tgcattgagcacttggacagagtggtgaaccagatagatgtgacaactcactgtgttcacggagcttacattctagtaaaagatacagacatgtcactatcatttgagaaatgttacactggagaagtacaatgttctacaagtgagttattaaattctatgctcagcaccacctccsagattattctttcagccatgtctaattaattattcaaacaactagttgtcccaattgcctaaagtctggctctccttaggcctttccccaccctcaatgcagaatgtcatccaggatctcaagttgcatttagttgtctatccactcagttgatgggcatttatgctggttccatatttttgcaattgtgaattgtgctgctataaacatgcatgtgcaagtgtctttatcatagaatgacttcttttcctctgggtagataaccagtagtgggattgctggatcaaatggtaggtctacttttagttctttaaggaatctccatactgttcttcagagtggttgtactagattatattcccatcagcagtgtaaaagtgttc

SEQ ID NO: 411656 - DNA, 561 bp, Homo sapiens
tgcattgagcacttggacagagtggtgaaccagatagatgtgacaactcactgtgttcacggagcttacattctagtaaaagatacagacatgtcactatcatttgagaaatgttacactggagaagtacaatgttctacaagtgagttattaaattctatgctcagcaccacctcccagattattctttcagccatgtctaattaattattcaaacaactagttgtcccaattgcctaaagtctggctctccttaggcctttccccaccctcaatgcagaatgtcatccaggatctcaagttgcatttagttgtctatccactcagttgatgggcatttatgctggttccatatttttgcaattgygaattgtgctgctataaacatgcatgtgcaagtgtctttatcatagaatgacttcttttcctctgggtagataaccagtagtgggattgctggatcaaatggtaggtctacttttagttctttaaggaatctccatactgttcttcagagtggttgtactagattatattcccatcagcagtgtaaaagtgttc

SEQ ID NO: 411657 - DNA, 580 bp, Homo sapiens
ttgcaattgtgaattgtgctgctataaacatgcatgtgcaagtgtctttatcatagaatgacttcttttcctctgggtagataaccagtagtgggattgctggatcaaatggtaggtctacttttagttctttaaggaatctccatactgttcttcagagtggttgtactagattatattcccatcagcagtgtaaaagtgttccctttttaccacatccatcccaacatctattattttttatttttaattatggctattcttgcaggagtaagktggtgtcgcattgtggttttgatttgtatttccctgattattagcaatgttgaacattttttcatatgtttgttggccacttgtatgtcttcttttgagaattctctattcgcgtccttaactcactttttgatgggattattattattattattgctgattttgttttgcttagccttagctttggctatgcagggtcttttattgttcatatgaattttagaatattttctctagttctgtgaagaattatggtggtattttgatgggaattgcgttaaatttgcacattgcttttggcatt

SEQ ID NO: 411658 - DNA, 580 bp, Homo sapiens
ttgcaattgtgaattgtgctgctataaacatgcatgtgcaagtgtctttatcatagaatgacttcttttcctctgggtagataaccagtagtgggattgctggatcaaatggtaggtctacttttagttctttaaggaatctccatactgttcttcagagtggttgtactagattatattcccatcagcagtgtaaaagtgttccctttttaccacatccatcccaacatctattattttttatttttaattatggctattcttgcaggagtaagttggtgtcgcattgtggttttgatttgtatttccctgattattagcaatgttgaayattttttcatatgtttgttggccacttgtatgtcttcttttgagaattctctattcgcgtccttaactcactttttgatgggattattattattattattgctgattttgttttgcttagccttagctttggctatgcagggtcttttattgttcatatgaattttagaatattttctctagttctgtgaagaattatggtggtattttgatgggaattgcgttaaatttgcacattgcttttggcatt

SEQ ID NO: 411659 - DNA, 627 bp, Homo sapiens
tggcattgttatgtcttttcctggctttggtattagggtaatactgggttcatagaatcatttagggaggattccttctttctctgttttttttgaatagtttccataggatttgtaccaattcttctttgaacgtctgatagaattcagctgggaactcagtcatgmaaaggaatgaaataatggcattgcagcaacctggatggaggtggagaccattattctaagtgaagcaatgcgcgaatggaaaaccaaacatagtatgttctcacttataagtgggagctaagatatgagcaagcaaaggcattaaaaatgatataatggactctggggaattgaggggaagggtgggaggagggtgagggattaaagactgcatattgggtacagcatacactgctcaggtgatgtgtgcaccaaaatctcagaaatcacatctaaagaacttatccatgtaaccaaacaccacctgttctacaaaagctattgaaataataaataaataaaattttaaaaagcacaaacaacaaaaggaaaatatagataaattggacttcattaatattaaaacatttttattcaaagggcatcatcaagaaagtaaaaatacaggaaatattcata

SEQ ID NO: 411660 - DNA, 627 bp, Homo sapiens
tggcattgttatgtcttttcctggctttggtattagggtaatactgggttcatagaatcatttagggaggattccttctttctctgttttttttgaatagtttccataggatttgtaccaattcttctttgaacgtctgatagaattcagctgggaactcagtcatgaaaaggaatgaaataatggcattgcagcaaccyggatggaggtggagaccattattctaagtgaagcaatgcgcgaatggaaaaccaaacatagtatgttctcacttataagtgggagctaagatatgagcaagcaaaggcattaaaaatgatataatggactctggggaattgaggggaagggtgggaggagggtgagggattaaagactgcatattgggtacagcatacactgctcaggtgatgtgtgcaccaaaatctcagaaatcacatctaaagaacttatccatgtaaccaaacaccacctgttctacaaaagctattgaaataataaataaataaaattttaaaaagcacaaacaacaaaaggaaaatatagataaattggacttcattaatattaaaacatttttattcaaagggcatcatcaagaaagtaaaaatacaggaaatattcata

SEQ ID NO: 411661 - DNA, 435 bp, Homo sapiens
atagaacacttcataggccactttacaccataaattaggcaataataacatacatatttctgtaaacataaaygggtatactaatgacagtttcaagagtaaaacagcaataaacagataagccatattcataaataaataggtcaaaaagggaaatgtataaaaacctactaccattattggtcattgtgtgcaccagctttctaactgtggtcatctgaagtatcatgatgaaccatcaaaaccttttgaggaaatagatcaaaaactgagacaggtcaccaccgcatatgcagtcacccagagagctgagatgtcaataaattttatctttcacaaatacagatgtacaaaaaataaaaatatatctcttcatttattgaggaagtttcaatatttctacatacatgtacaatgcttatacacaaagtcagt

SEQ ID NO: 411662 - DNA, 435 bp, Homo sapiens
atagaacacttcataggccactttacaccataaattaggcaataataacatacatatttctgtaaacataaacgggtatactaatgacagtttcaagagtaaaacagcaataaacagataagccatattcataaataaataggtcaaaaagggaaatgtataaaaacctactaccattattggtcattgtgtgcaccagcyttctaactgtggtcatctgaagtatcatgatgaaccatcaaaaccttttgaggaaatagatcaaaaactgagacaggtcaccaccgcatatgcagtcacccagagagctgagatgtcaataaattttatctttcacaaatacagatgtacaaaaaataaaaatatatctcttcatttattgaggaagtttcaatatttctacatacatgtacaatgcttatacacaaagtcagt

SEQ ID NO: 411663 - DNA, 435 bp, Homo sapiens
atagaacacttcataggccactttacaccataaattaggcaataataacatacatatttctgtaaacataaacgggtatactaatgacagtttcaagagtaaaacagcaataaacagataagccatattcataaataaataggtcaaaaagggaaatgtataaaaacctactaccattattggtcattgtgtgcaccagctttctaactgtggtcatctgaagtatcatgatgaaccatcaaaaccttttgaggaaatagatcaaaaactgagacaggtcaccaccrcatatgcagtcacccagagagctgagatgtcaataaattttatctttcacaaatacagatgtacaaaaaataaaaatatatctcttcatttattgaggaagtttcaatatttctacatacatgtacaatgcttatacacaaagtcagt

SEQ ID NO: 411664 - DNA, 596 bp, Homo sapiens
cagtgcaaggcagccagcttcccagtgtctagggagggacgtatgtatggaatgagcaagcaggcatcatcaatggctccactggagcaacagcttccagccacaccagtgggccctggacccaggggttacacacctgttcttgcattggagttgttactgagtgatggatataaatacagtatatttgaaaggargaagtggggaaaaaagaaaaatggagcaaagaagtcatacaagctacaatatgaataaaccttgagaacatcatgctaagtgaaagaaacaagtgacaaaaacaccatatattgtatgactccatttacatgaaatgttcacagtaggaaaatctatagatagaaagtagattaattattgcctgggaagaatagggaggaatagagaaggactactaattggtatggggcttattttaaaagtaacgaaaattttccaaaatgatattgtggtgatggctgaacaactctgtgaatataataaaaaccattgaactatatattttaaatgggtaaattgtatggtatgtgattatttctcagggaagatatatactggttcaagatatgggacatacc

SEQ ID NO: 411665 - DNA, 596 bp, Homo sapiens
cagtgcaaggcagccagcttcccagtgtctagggagggacgtatgtatggaatgagcaagcaggcatcatcaatggctccactggagcaacagcttccagccacaccagtgggccctggacccaggggttacacacctgttcttgcattggagttgttactgagtgatggatataaatacagtatatttgaaaggaggaagtggggaaaaaagaaaaatggagcaaagaagtcatacaagctacaatatgaataaaccttgagaacatcatgctaagtgaaagaaacaagtgacaaaaacaccatatattgtatgaytccatttacatgaaatgttcacagtaggaaaatctatagatagaaagtagattaattattgcctgggaagaatagggaggaatagagaaggactactaattggtatggggcttattttaaaagtaacgaaaattttccaaaatgatattgtggtgatggctgaacaactctgtgaatataataaaaaccattgaactatatattttaaatgggtaaattgtatggtatgtgattatttctcagggaagatatatactggttcaagatatgggacatacc

SEQ ID NO: 411666 - DNA, 596 bp, Homo sapiens
cagtgcaaggcagccagcttcccagtgtctagggagggacgtatgtatggaatgagcaagcaggcatcatcaatggctccactggagcaacagcttccagccacaccagtgggccctggacccaggggttacacacctgttcttgcattggagttgttactgagtgatggatataaatacagtatatttgaaaggaggaagtggggaaaaaagaaaaatggagcaaagaagtcatacaagctacaatatgaataaaccttgagaacatcatgctaagtgaaagaaacaagtgacaaaaacaccatatattgtatgactccatttacatgaaatgttcacagtaggaaaatctatasatagaaagtagattaattattgcctgggaagaatagggaggaatagagaaggactactaattggtatggggcttattttaaaagtaacgaaaattttccaaaatgatattgtggtgatggctgaacaactctgtgaatataataaaaaccattgaactatatattttaaatgggtaaattgtatggtatgtgattatttctcagggaagatatatactggttcaagatatgggacatacc

SEQ ID NO: 411667 - DNA, 560 bp, Homo sapiens
acaccagtgggccctggacccaggggttacacacctgttcttgcattggagttgttactgagtgatggatataaatacagtatatttgaaaggaggaagtggggaaaaaagaaaaatggagcaaagaagtcatacaagctacaatatgaataaaccttgagaacatcatgctaagtgaaagaaacaagtgacaaaaacaccatatattgtatgactccatttacatgaaatgttcacagtaggaaaatctatagatagaaagtagattaattattgcctgggaagaatarggaggaatagagaaggactactaattggtatggggcttattttaaaagtaacgaaaattttccaaaatgatattgtggtgatggctgaacaactctgtgaatataataaaaaccattgaactatatattttaaatgggtaaattgtatggtatgtgattatttctcagggaagatatatactggttcaagatatgggacatacccaatagacaacttgcacagcactctaggttgacttttccagttctgtgttactggaatagtgctat

SEQ ID NO: 411668 - DNA, 596 bp, Homo sapiens
cagtgcaaggcagccagcttcccagtgtctagggagggacgtatgtatggaatgagcaagcaggcatcatcaatggctccactggagcaacagcttccagccacaccagtgggccctggacccaggggttacacacctgttcttgcattggagttgttactgagtgatggatataaatacagtatatttgaaaggaggaagtggggaaaaaagaaaaatggagcaaagaagtcatacaagctacaatatgaataaaccttgagaacatcatgctaagtgaaagaaacaagtgacaaaaacaccatatattgtatgactccatttacatgaaatgttcacagtaggaaaatctatagatagaaagtagattaattattgcctgggaagaatagggaggaayagagaaggactactaattggtatggggcttattttaaaagtaacgaaaattttccaaaatgatattgtggtgatggctgaacaactctgtgaatataataaaaaccattgaactatatattttaaatgggtaaattgtatggtatgtgattatttctcagggaagatatatactggttcaagatatgggacatacc

SEQ ID NO: 411669 - DNA, 592 bp, Homo sapiens
tttcactggtattaggaagattgaagaaaagcattcaaattcaaaaattgcctgctkaagaattcctttaacaagtcaaataaaaatatatagaaaacttagtattatgttgaaattggattaccctaaactacaacttgaacctatctttatcctatatttcctttctgatatcttacaaatctttattgctccctgcttctactctttctttggctctctttcttccactgtggtcaaatagacattctcaaagctcagccgtccctttaaaatgaggctccttcaaaggaagtctcttgtggttaatattaagccatgatctctattagatttaaaagccattgtaaaagatttccccaagcttagacaaaatagatgaaaaataatggaggaatttaggatagtcctggggatggggtggacgccatgctatcccttcaggaatgaaagtattaactgtctcaaggtcacccctgctttcctggggccagagtacacgcaatgtaatacattgttccttttttgaattttttagttcaaaacccagatcacattttcaggctttcttccttttaaaaatgagcattta

SEQ ID NO: 411670 - DNA, 609 bp, Homo sapiens
ctatatttcctttctgatatcttacaaatctttattgctccctgcttctactctttctttggctctctttcttccactgtggtcaaatagacattctcaaagctcagccgtccctttaaaatgaggctccttcaaaggaagtctcttgtggttaatattaagccatgatctctattagatttaaaagccattgtaaaagatttccccaagcttagacaaaatagatgaaaaataatggaggaatttaggrtagtcctggggatggggtggacgccatgctatcccttcaggaatgaaagtattaactgtctcaaggtcacccctgctttcctggggccagagtacacgcaatgtaatacattgttccttttttgaattttttagttcaaaacccagatcacattttcaggctttcttccttttaaaaatgagcatttaaatatacagttttccctctctaaaattatttagctatatcttatttatttaaatatgggtttcttaaatagtttaattgtatgttccttattgttgttataatttcttctttcatccttgagctattaagaaataaagtcacttatctccatcttaattaccttactatac

SEQ ID NO: 411671 - DNA, 580 bp, Homo sapiens
ggaccgtccagggtctataagtattaaaactttaatactttcacattatatcattgaagccatgcccacaatccagcctctgagagggagaccacctgtggatccacgaaggtgaatctcttgctggtgctcctttgtccaggtgtctggtggctgctggagatggtagctgccagctaagtttagatgtttcgttcamaacagcaagcaacactaaaaaggaattaagatatggcatgaagaaagaatgtactggcctcaatttctgataaggtatggatgaaccttcctcatgccagacaagaaagcaggatagattagcacactatggtaaaatgtatttcttcaaattaataaacctacatgagataattcacattagccaataaggcagaatacagtaaaattatataacaataattatttttctaagaagtgaggaaacagatgaataaaaagtgaatctctcccaggaaaggtaaacagcaactgtggcccaatgtctctgcatctctggaaataaggagctgaagaggctggaaaggtatattgacagaaagctgatataagagaagagatg

SEQ ID NO: 411672 - DNA, 580 bp, Homo sapiens
ggaccgtccagggtctataagtattaaaactttaatactttcacattatatcattgaagccatgcccacaatccagcctctgagagggagaccacctgtggatccacgaaggtgaatctcttgctggtgctcctttgtccaggtgtctggtggctgctggagatggtagctgccagctaagtttagatgtttcgttcaaaacagcaagyaacactaaaaaggaattaagatatggcatgaagaaagaatgtactggcctcaatttctgataaggtatggatgaaccttcctcatgccagacaagaaagcaggatagattagcacactatggtaaaatgtatttcttcaaattaataaacctacatgagataattcacattagccaataaggcagaatacagtaaaattatataacaataattatttttctaagaagtgaggaaacagatgaataaaaagtgaatctctcccaggaaaggtaaacagcaactgtggcccaatgtctctgcatctctggaaataaggagctgaagaggctggaaaggtatattgacagaaagctgatataagagaagagatg

SEQ ID NO: 411673 - DNA, 580 bp, Homo sapiens
ggaccgtccagggtctataagtattaaaactttaatactttcacattatatcattgaagccatgcccacaatccagcctctgagagggagaccacctgtggatccacgaaggtgaatctcttgctggtgctcctttgtccaggtgtctggtggctgctggagatggtagctgccagctaagtttagatgtttcgttcaaaacagcaagcaacactaaaaaggaattaagatatggcatgaagaaagaatgyactggcctcaatttctgataaggtatggatgaaccttcctcatgccagacaagaaagcaggatagattagcacactatggtaaaatgtatttcttcaaattaataaacctacatgagataattcacattagccaataaggcagaatacagtaaaattatataacaataattatttttctaagaagtgaggaaacagatgaataaaaagtgaatctctcccaggaaaggtaaacagcaactgtggcccaatgtctctgcatctctggaaataaggagctgaagaggctggaaaggtatattgacagaaagctgatataagagaagagatg

SEQ ID NO: 411674 - DNA, 580 bp, Homo sapiens
ggaccgtccagggtctataagtattaaaactttaatactttcacattatatcattgaagccatgcccacaatccagcctctgagagggagaccacctgtggatccacgaaggtgaatctcttgctggtgctcctttgtccaggtgtctggtggctgctggagatggtagctgccagctaagtttagatgtttcgttcaaaacagcaagcaacactaaaaaggaattaagatatggcatgaagaaagaatgtactggcctcaatttctgataaggtatggatgaaccttcctcatgccagacaagaaagcakgatagattagcacactatggtaaaatgtatttcttcaaattaataaacctacatgagataattcacattagccaataaggcagaatacagtaaaattatataacaataattatttttctaagaagtgaggaaacagatgaataaaaagtgaatctctcccaggaaaggtaaacagcaactgtggcccaatgtctctgcatctctggaaataaggagctgaagaggctggaaaggtatattgacagaaagctgatataagagaagagatg

SEQ ID NO: 411675 - DNA, 521 bp, Homo sapiens
ttccacgtaactaatgtggaagccaaggcttaaaatcattaatatatccaaagattatacraatagtaaatagtgaagatgaaatttgaatgaagataccttgcactgcataacctatgttagtaggggcagataacctgaaatacggatgttggcaaaggaaaaagcctgactcagattgggaattttcagacaaatctcagactctaagctaccaaaaaccatcaagaagaacattccagacctaataactcttatcttgtatattttagaccagagctgagcttggaacgttgctttcatgtagattttgtcattctaatcttggccatactgtattacttcacatggcataaacaagttttaagttttctctctctgttcaaaattcacaaactgccaacttccacttttgaattcataatatataatgagccagagcagtccagataagagattggaggggcaaagaggaaggagaagatggggaaaatatataataacaatataatttcatgctg

SEQ ID NO: 411676 - DNA, 521 bp, Homo sapiens
ttccacgtaactaatgtggaagccaaggcttaaaatcattaatatatccaaagattatacgaatagtaaatagtgaagatgaaatttgaatgaagataccttgcactgcataacctatgttagtaggggyagataacctgaaatacggatgttggcaaaggaaaaagcctgactcagattgggaattttcagacaaatctcagactctaagctaccaaaaaccatcaagaagaacattccagacctaataactcttatcttgtatattttagaccagagctgagcttggaacgttgctttcatgtagattttgtcattctaatcttggccatactgtattacttcacatggcataaacaagttttaagttttctctctctgttcaaaattcacaaactgccaacttccacttttgaattcataatatataatgagccagagcagtccagataagagattggaggggcaaagaggaaggagaagatggggaaaatatataataacaatataatttcatgctg

SEQ ID NO: 411677 - DNA, 521 bp, Homo sapiens
ttccacgtaactaatgtggaagccaaggcttaaaatcattaatatatccaaagattatacgaatagtaaatagtgaagatgaaatttgaatgaagataccttgcactgcataacctatgttagtaggggcagataacctgaaatamggatgttggcaaaggaaaaagcctgactcagattgggaattttcagacaaatctcagactctaagctaccaaaaaccatcaagaagaacattccagacctaataactcttatcttgtatattttagaccagagctgagcttggaacgttgctttcatgtagattttgtcattctaatcttggccatactgtattacttcacatggcataaacaagttttaagttttctctctctgttcaaaattcacaaactgccaacttccacttttgaattcataatatataatgagccagagcagtccagataagagattggaggggcaaagaggaaggagaagatggggaaaatatataataacaatataatttcatgctg

SEQ ID NO: 411678 - DNA, 521 bp, Homo sapiens
ttccacgtaactaatgtggaagccaaggcttaaaatcattaatatatccaaagattatacgaatagtaaatagtgaagatgaaatttgaatgaagataccttgcactgcataacctatgttagtaggggcagataacctgaaatacggatgttggcaaaggaaaaagcctgactcagattgggaattttcagacaaatctcagactctaagctaccaaaaaccatcaagaagaacattccagacctaataactcttatcttgtatattttagaccagagctgagcttggaacgttgctttcatgtagattttgtcwttctaatcttggccatactgtattacttcacatggcataaacaagttttaagttttctctctctgttcaaaattcacaaactgccaacttccacttttgaattcataatatataatgagccagagcagtccagataagagattggaggggcaaagaggaaggagaagatggggaaaatatataataacaatataatttcatgctg

SEQ ID NO: 411679 - DNA, 512 bp, Homo sapiens
tgagcacaggaagcattttaagatggcagaagcaacagcagaacagtaatttggataaaccctaagacagattcctgtactaacttccctccttcacctcctagctctgtgtgcttgttcaagttacatgacccactgaacttgtttctttaactgaagaataagactatcaacaccaaacttaaataatttttatacatatttggctaggaaaacagagccacttaatgtgttctaagtatgaagggtttaatatgaaaaagtaaagaattcaaccattagaagagttgggaagtaagtgatgagttggggagtgaacaagagttgagggtsgtcagggaagccccatgcccatgatcacagcccgaagcactggtatggggtttctcatgagcttatagggaagttgctgcaatgcctttgaaatatatgagtatatgaaagttcccattgatcttctctgtctgcatcagtaaaagcaatggttttcagtagctggctggaaagccaat

SEQ ID NO: 411680 - DNA, 606 bp, Homo sapiens
aaaaactggagaaacttctccagtgcagtggctcactcctgtcatcacagcactttgggaggttgggagcccgaggcaggcggatcacaaggtcaggagtttgaaaccagcctggccagcatggtgaaaccctgtctctactaaaaatacaaaaattagctgggcatggtggtgcgtacctgtagtcccagctactcaggaggctgagacaggagaattgcttgaacccaggaggtggaggttgtggtgagcccagattgcgatactgcactctagcctgggcgacaaagcaagactctgtctcaaaaaaaaaaaaaactgagaaactgctactggtagctaaacagtcattgtgaaarttaattacaagccatttcaatgtgctctgtctgctttctgctcatagaaatgcggaatctgtgtccttaaaaacagatacatctaaacttattttaaaacattatatcatttaaatgcattgtttcctttcctaatttggggtttgtccaccaaacgaaattgcagtataagaaaatctataaatcaccttcatataagatatgtaatttaaaataaaccttcaaaaaagtgagaaactgacttata

SEQ ID NO: 411681 - DNA, 606 bp, Homo sapiens
aaaaactggagaaacttctccagtgcagtggctcactcctgtcatcacagcactttgggaggttgggagcccgaggcaggcggatcacaaggtcaggagtttgaaaccagcctggccagcatggtgaaaccctgtctctactaaaaatacaaaaattagctgggcatggtggtgcgtacctgtagtcccagctactcaggaggctgagacaggagaattgcttgaacccaggaggtggaggttgtggtgagcccagattgcgatactgcactctagcctgggcgacaaagcaagactctgtctcaaaaaaaaaaaaaactgagaaactgctactggtagctaaacagtcattgtgaaagttaattacaagccatttcaatgtgctctgtctgctttctgctcatagaaatgcggaatctgtgtccttaaaaacagatacatctaaacttattttaaaacattatatcatttaaatgcattgtttcctttcctaatttggggtttstccaccaaacgaaattgcagtataagaaaatctataaatcaccttcatataagatatgtaatttaaaataaaccttcaaaaaagtgagaaactgacttata

SEQ ID NO: 411682 - DNA, 233 bp, Homo sapiens
aggcgacaccacaatgcctatgtcatttacttcactttatatcatcatgtaggcattttatcatctcatgtcattacaagaagaagggtgagtacagtgagatagactgagagagagagaacacattcaygtattacagcataacatgataattattctattttattattagttattgttaataccttactgtgtctaatttataaattaaactttatcataagtatgtgtgt

SEQ ID NO: 411683 - DNA, 233 bp, Homo sapiens
aggcgacaccacaatgcctatgtcatttacttcactttatatcatcatgtaggcattttatcatctcatgtcattacaagaagaagggtgagtacagtgagatagactgagagagagagaacacattcacgtattacagcataacatgataattattctattttattattagttattrttaataccttactgtgtctaatttataaattaaactttatcataagtatgtgtgt

SEQ ID NO: 411684 - DNA, 626 bp, Homo sapiens
aacatagttccacatgcactgtagaaacagtatttgttgaactgaagttcatggaattaatgtgtcatacttggttacatattgaatagtagaaattaaagtcattcactgaccccttgataatataaaaacatattcatctgcaaaaacttctcacaaaactcaggcagaacctgagatgttttgaaaagctaggcttatttttatttcttctaaaaatgaaaccacttaaatttaaamggtttacatggctgccactgtgtttggtttctacaccccatttcataaacattttcatgaacctttgcttttgtttgctttctattgaagggagtctggggtttctttgaatggaaaaagagaagagcagtcattgttgcatgcacagttcaaaacagcttttttttcctgactgattctgtagtcacaagaagcatatcactgcaggtggttgtgagtctgagattcagcttgagggagaacaaatcaatgtttcactttaaggaaaaataactagctttaggcaaaaaataaaattcaggacaataaatgaaggcagtatatatcatgttcagaaattatattagtgactcaacaaggagctgaggaattcaacactgtgatac

SEQ ID NO: 411685 - DNA, 576 bp, Homo sapiens
ctggtagcccaacacccaggcttctgaccatccctgacttgaaggtagggcttcacaggggacatgcccatttctacccaggagcctgtctgctcytgccaccatcaacctgctgtccacagtgcccacagcacccaggttcatgctgaggggtgcctgcaggcccgcaccaagctgccttcaacaccccctcagcctccctctcatgcttgtttttacccaaagtctggaggggcctgaggtggtaggcggctggcatgtcagagctgccccaagcaaacttaaacttggctgggttgtgacagcacctggctcagcctcaactttgctccaaaatcagagtaggaactgggaatggggagatcccatgtatcaggagcagacacttttgagcccgtgggggaacagcactttctggatctcctagtgcaaggatgcccaggtctgcagtcatgactgagcagctgcaggtgcacctgggagggtggggctcccactcctctaacttggaagggagcagggaccccatttgttcccaactccaactggcttcttggagcactcagccctggcttt

SEQ ID NO: 411686 - DNA, 637 bp, Homo sapiens
aacactgtgatacagtcatcaaactttcatctaagctttctttgtctgaaacagagtttggaaatttagcagaaaatgaaataccccaaaaagcaatgtgatcaaaactctgtcatactgatcagaacagatcatctacacaggaactaaataagcatgatttaactgtattacttacacaccacagaaagagattgagctgattagagattatcctgggaatgcttttggaataatttaattaacgtattcaggtacagttttaaaatacataaagagaagcagtagaatgaaaatatttactatattatagaatgcagtaytatctgggaataaatagagaagcatacatttgtttttgtagcataaagaagttattagaattacatttatgatactagaaaaaatataaattaggtgtaagagaaggcaatatagcataatagaaaagtatctgcttttcatttggatgaagtatcataggctgcaattggtaaaaatccaaaagttacattttttatcaagttgaggtaaaagggacctttatatgttgctaatgggaatgcaaaatgatacagctcttgtagaagagaatttcaccatatctagcaaaatcataaatgctctaattttgacc

SEQ ID NO: 411687 - DNA, 578 bp, Homo sapiens
ctgttattttttactttttctaatagccagtctgactggtgtgagattgtatctcactgtggtttttggtctgtatgtctctaatgattactgatgtgagcttcttttcatatgtttattgaccacttgtcatcttcttttgagaagggtctgttcatgtccattgcttactttttactgaacttattattttcttgttgatttgtttacattcctaattctggatattagaccttcatcaaatgcagaacttactaataatttctcccactctgtagattgtttgttactctgttgatagtttcttttgttgcrcagaagtatttcatttagttaggtctcacttgtcaatttttggttttgttgcaattgcgtttgagaacttagtcataaattcttttattattatcattattattattattatactttactagggcacatgtgcacaacatgcaggtttgttatataggtatacatgtgccatgttggtttgctgcacacatcaactcgtcatttacattaggtatttctcctaacactatccctcccccagccccccaacccccaacaggccc

SEQ ID NO: 411688 - DNA, 578 bp, Homo sapiens
ctgttattttttactttttctaatagccagtctgactggtgtgagattgtatctcactgtggtttttggtctgtatgtctctaatgattactgatgtgagcttcttttcatatgtttattgaccacttgtcatcttcttttgagaagggtctgttcatgtccattgcttactttttactgaacttattattttcttgttgatttgtttacattcctaattctggatattagaccttcatcaaatgcagaacttactaataatttctcccactctgtagattgtttgttactctgttgatagtttcttttgttgcgcagaagtatttcatttagttaggtctcacttgtcaatttttggttttgttgcaattgcgtttgagaacttagtcataaattcttttattattatcattattattattattatactttactagggcacatgtgcacaacatgcaggtttgttatataggtatacrtgtgccatgttggtttgctgcacacatcaactcgtcatttacattaggtatttctcctaacactatccctcccccagccccccaacccccaacaggccc

SEQ ID NO: 411689 - DNA, 576 bp, Homo sapiens
ctggtagcccaacacccaggcttctgaccatccctgacttgaaggtagggcttcacaggggacatgcccatttctacccaggagcctgtctgctcctgccaccatcaacctgctgtccacagtgcccacagcacccaggttcatgctgaggggtgcctgcaggcccgcaccaagctgccttcaacaccccctcagcctccctctcatgcttgtttttacccaaagtctggaggggcctgaggtggtaggcggctggcatgtcagagctgccccaagcaaacttaaacttggctgggttgtgacagcacctggctcagcctcaactttgctccaaaatcagagtaggaactgggaatggggagakcccatgtatcaggagcagacacttttgagcccgtgggggaacagcactttctggatctcctagtgcaaggatgcccaggtctgcagtcatgactgagcagctgcaggtgcacctgggagggtggggctcccactcctctaacttggaagggagcagggaccccatttgttcccaactccaactggcttcttggagcactcagccctggcttt

SEQ ID NO: 411690 - DNA, 576 bp, Homo sapiens
ctggtagcccaacacccaggcttctgaccatccctgacttgaaggtagggcttcacaggggacatgcccatttctacccaggagcctgtctgctcctgccaccatcaacctgctgtccacagtgcccacagcacccaggttcatgctgaggggtgcctgcaggcccgcaccaagctgccttcaacaccccctcagcctccctctcatgcttgtttttacccaaagtctggaggggcctgaggtggtaggcggctggcatgtcagagctgccccaagcaaacttaaacttggctgggttgtgacagcacctggctcagcctcaactttgctccaaaatcagagtaggaactgggaatggggagatcccatgtatcaggagcagacacttttgagcccgtgggggaacagcrctttctggatctcctagtgcaaggatgcccaggtctgcagtcatgactgagcagctgcaggtgcacctgggagggtggggctcccactcctctaacttggaagggagcagggaccccatttgttcccaactccaactggcttcttggagcactcagccctggcttt

SEQ ID NO: 411691 - DNA, 627 bp, Homo sapiens
tttaaataaaatatgtattttgaagctaacattataccaaccctagagacattgcaggaacttgtttagaaagattggaagtgacagagacagtttttatgggcatggagacaacatcaaagcaagctgtggttcaccctgtgacattttcacagcagctcatcataattatggatataataggtgactggtcagttaactccataaattgttggcaggaatgccaaaaaataatcctcctatccctccctcatataacctgaggcagcatgatattccatattttctatcattttaatcaacagtcacaaattttgctctaaactaaaatctttctaatttcctgcgatgtcatgactctctctcctttcaaaaaactacccttccaagattatttttaaaatagcagaaatagtaatagctaaaaattggtgtttacccaatttgtacttccaaaaccatgtgggaaatggaccatgtagagggtaacagcattttggtttgctacttttaagagaataggaattttcargaactctttggttttcccctttttgcactattctcatagatctttactgtagttccttgtaagttttcccaatttaggagagaaatgggacgtga

SEQ ID NO: 411692 - DNA, 589 bp, Homo sapiens
ttatgtaagaagaaacagtgtccatggtggagttgtgagatattaaacctactcttcttcatcaagatgtttgatttctaaatactcacttacaacatattggaggtaagccagcaaggatttttatggtatctggcaactgtaaagtttatatctcagaataggttggtttattcaacatttacataaaactcatgatagcaaattgtacatatttaggttaaaatgtcacctcagcataaaagaccacctgctttaatatagaaagcctaagtctttgtaaagaaaagcatattcctgtgtacccttctcagaagcatgtaagccaagatgtcataatggctctataaattgggcaccagcaacccrgacagcaagtcccaaagtagcttggaagaggcttcagcaaagttatatgtgagcctctgtatcacaggcaacttctcaccctttcctcggccctggcttcctgctttatgagcagcaacctcctctgggtgtcctggctctcattaattttccaggggtaggaacatttgaaaacctggaagtactgaaagaagatttgtttaagaacacagactaatcc

SEQ ID NO: 411693 - DNA, 602 bp, Homo sapiens
cctccaattccataatcttaagcctggaatttaggtgaaaccctaagaagcagggataggggaaaaccttctactggttgattttgaatatgagaattagaacacacagagagaagctgaattatattaaactgagaaatgtaaaatggtgcagccactttggaaaacagtttggcaattcctcaaaatgttaagtgtagggttaccctataatccagcaattccagtcttagatatgtcctcaagaaaaataaaaacatatgccccctcaaaaacttgtacaggaatgctcatagcagtgttactcatactagccccaaaagtcgaaacaacccaaatgtctattaatggatgagtgaataaagaggtggtattcatacaatgtaatattattcagctatataaggaataaagtattgatacatgctcagtttggataaaccttgagatcattatattaaggaaaaggaagcagacacaaaggttcacatagtgtactattccatttatatgaaatgtccagaatagacatttgttaaaattatagatttrggcagtacaggtgaagttttgttagatcaatatattgcatagcagtgaaa

SEQ ID NO: 411694 - DNA, 576 bp, Homo sapiens
gcaatatggcatctctgatctctgcgtatttttccaggagtcagagtccttccggcaggagtctctcaagaaagtatactttctacttttagagtgtggaagtgtaattacctgaacacaggtggttagagagaaaattgatgtctccttatatagactttctgccagtttttctgttttcaagacaccttgtacctttactttcactggtattttgtgcccccaacttctaagcctatttctctaacacacycttaatggacatgacttagctactctagaatttctaatgacatccttttccacattcataaacaccaaaagaataaatatgcaaattcttcgtataaatcactcttacttgaggtattgctcctcacaagagggcattagctgtgggtgtctgcctgcagaccctgacccaaaggacggatgaataaacgtacactgacacacattctgttttgccagtcctactgagtgtctgaccgcctacacaccaacagaggtttgtcactgtggcccgtcttgatcagctagggagactcgcatttattcattaagattagttaacaa

SEQ ID NO: 411695 - DNA, 576 bp, Homo sapiens
gcaatatggcatctctgatctctgcgtatttttccaggagtcagagtccttccggcaggagtctctcaagaaagtatactttctacttttagagtgtggaagtgtaattacctgaacacaggtggttagagagaaaattgatgtctccttatatagactttctgccagtttttctgttttcaagacaccttgtacctttactttcactggtattttgtgcccccaacttctaagcctatttctctaacacactcttaatggacatgacttagctactctagaatttctaatgacatccttttccacattcataaacaccaaaagaataaatatgcaaattcttcgtataaatcactcttacttgaggtattgctcctcacaagagggcattagctgtgggtgtctgcctgcagaccctgacccaaaggacggatgaataaacgtacactgacacacattctgttttgccagtcctactgagtgtctgaccgcctacacaccaacagaggtytgtcactgtggcccgtcttgatcagctagggagactcgcatttattcattaagattagttaacaa

SEQ ID NO: 411696 - DNA, 497 bp, Homo sapiens
cctttcttgctggaggacattctaacagccatgatgasttgtggcttttactctgagtgaattgagagatattttagggctcttttcctagatattcacagttcctatcattccattcttagccctgatttcatctcttctgaaagctctcccctgaccaccttatgtagttgccttttcatcctattttttattcacttcccttgatgtttctttcatatatatttgttactaaaattattttatgtattcattgacttttgtctgcctattttgtttatagattttcttcactagaaggcaaagtccaggaggatattaattatgtcttgttatttctatatccccagatcttagaacatatgcctgacatatagtaggctctcagtaaatatttgctaaatgaatagttgtattgaaatggcaataatcaccttatatgtgtgttttatccaggaacattcaactgttcagaactagccttagaaaagtaagaa

SEQ ID NO: 411697 - DNA, 548 bp, Homo sapiens
tgctacatccaagttttcactcttaatttagaatggttcattgacatgctgcttctttaagatgtatattttcctaaatgctagagataaaaatgcattttaaaatcattttcatggtcaatatgtaaacataataayatactgtgatagaagattttgccttgtttgttgtcgtggttgttgaatttaagtcacaagtaatggttttataatagtgtaataatattttacagctcaaggctgttacattgtagtctgaagcacatgcaatcatgcaaataaaataaaatattgttttaaaaccatccaagagtttattattaagcaaatattgtgtagctaaggcatttggcaagaagcagcatattatatttacacaggaagccattaaatattatttatgagagagtaaacatgactattcacctaattaaatatcaaacccaagtataaattagagtgtgtgcttctctggaatgcttattggtaaggatcagatatttgtttctactcttggatgttaagcacatactatgcatttataaata

SEQ ID NO: 411698 - DNA, 548 bp, Homo sapiens
tgctacatccaagttttcactcttaatttagaatggttcattgacatgctgcttctttaagatgtatattttcctaaatgctagagataaaaatgcattttaaaatcattttcatggtcaatatgtaaacataataatatactgtgatagaagattttgccttgtttgttgtcgtggttgttgaatttaagtcacaagtaatggttttataatagtgtaataatattttacagctcaargctgttacattgtagtctgaagcacatgcaatcatgcaaataaaataaaatattgttttaaaaccatccaagagtttattattaagcaaatattgtgtagctaaggcatttggcaagaagcagcatattatatttacacaggaagccattaaatattatttatgagagagtaaacatgactattcacctaattaaatatcaaacccaagtataaattagagtgtgtgcttctctggaatgcttattggtaaggatcagatatttgtttctactcttggatgttaagcacatactatgcatttataaata

SEQ ID NO: 411699 - DNA, 515 bp, Homo sapiens
tttaaaatcattttcatggtcaatatgtaaacataataatatactgtgatagaagattttgccttgtttgttgtcgtggttgttgaatttaagtcacaagtaatggttttataatagtgtaataatattttacagctcaaggctgttacattgtagtctgaagcacatgcaatcatgcaaataaaataaaatattgttttaaaaccatccaagagtttattattaagcaaatattgtgtagctaaggcatttggyaagaagcagcatattatatttacacaggaagccattaaatattatttatgagagagtaaacatgactattcacctaattaaatatcaaacccaagtataaattagagtgtgtgcttctctggaatgcttattggtaaggatcagatatttgtttctactcttggatgttaagcacatactatgcatttataaatatatctctgctagaaaggcattaaccaaagggagagcagcagggggaaaaaagtagctttgaatac

SEQ ID NO: 411700 - DNA, 548 bp, Homo sapiens
tgctacatccaagttttcactcttaatttagaatggttcattgacatgctgcttctttaagatgtatattttcctaaatgctagagataaaaatgcattttaaaatcattttcatggtcaatatgtaaacataataatatactgtgatagaagattttgccttgtttgttgtcgtggttgttgaatttaagtcacaagtaatggttttataatagtgtaataatattttacagctcaaggctgttacattgtagtctgaagcacatgcaatcatgcaaataaaataaaatattgttttaaaaccatccaagagtttattattaagcaaatattgtgtagctaaggcatttggcaagaagcagcatattatatttacacaggaagccattaaatattatttatgagagagtaaacatgactattcacctaattaaatatcaaacycaagtataaattagagtgtgtgcttctctggaatgcttattggtaaggatcagatatttgtttctactcttggatgttaagcacatactatgcatttataaata

SEQ ID NO: 411701 - DNA, 551 bp, Homo sapiens
tgcacttcttcaatcttttctcactgtttctaattatcaagttggcttaaaatttgttgtcttacactgcaatacttttccttccttaacctttcttgtcayatttctatttttaatatcgtttcaaaagtgataattttgatgtaccaatataaacatattcctctaactgatcaaaaattttcagtgaccacctcccttccatagtccgaatgtgacaggtgggcttttataatttggactcaacctatgtatctggtttcatggctatgtagtaattgcttgtattttgaatccatccatataaaccacttttgaatatgcaaattcaccctaaaattgcctatctttttcccttgcatgtaattctcttcttcttagatattattctacacttagctggctggaatgtttctattcaaactttaaagctcagttcaacagaccctttaaattctttcctgatttttccaggtagggctttataaattgtgcctgacatttatgaaacacattgtttaaataaacattcacaatattactggtgtagt

SEQ ID NO: 411702 - DNA, 551 bp, Homo sapiens
tgcacttcttcaatcttttctcactgtttctaattatcaagttggcttaaaatttgttgtcttacactgcaatacttttccttccttaacctttcttgtcatatttctatttttaatatcgtttcaaaagtgataattttgatgtaccaatataaacatattcctctaactgatcaaaaattttcagtgaccacctcccttccatagtccgaatgtgacaggtgggcttttataatttggacycaacctatgtatctggtttcatggctatgtagtaattgcttgtattttgaatccatccatataaaccacttttgaatatgcaaattcaccctaaaattgcctatctttttcccttgcatgtaattctcttcttcttagatattattctacacttagctggctggaatgtttctattcaaactttaaagctcagttcaacagaccctttaaattctttcctgatttttccaggtagggctttataaattgtgcctgacatttatgaaacacattgtttaaataaacattcacaatattactggtgtagt

SEQ ID NO: 411703 - DNA, 555 bp, Homo sapiens
gatgtttttatttagagtttaaagcatgtgttggtgttaataagttcttagaagtaaagttataatgaaacaaaaatataaaaaatgggggcaagtgggcctctaactttattttttatcatcatcatcattattattattattttacagacagggtcttgctgtatggagacaatgcagctctagcctcactgtaacctcaaactcctaggctcgagtgatcctccaccttagcctcctgaatagctaggattacaggcgagcacttccatgattggctaacctttttatttttatttttatttttgtagatatgatgccctggctggtcttgaactcctggactcaagcaaccckcccgcctatgcctcccagagtgctgtgattatagacttgggccaccaccaccatgcctgactgggcccctaactttaatagagcccctaacttagctaacgggccactaagtttaaccattaaaatgacatagaaattatttaattcaatgaaaagtatgaattagataactggaataaattatttattgcctatacc

SEQ ID NO: 411704 - DNA, 548 bp, Homo sapiens
ctcattgggactggttggacagtgggtgtagcccatgaagggtgagccaaagcagggtggggcattgcctcacacaggaagcacaaggggtcaggaaattttctcccctacccaagggaagctgtgagggactgagctggaggaaccatgcacactctggcccagatactgtgcttgaaccactgtcttcacgacctgcggaccaggagattccctctggtgcctaccccaccagggccctgggtttcaagcagaaaactgggcagccatttgggcagacattgatctagctgcaggagttttttgtttgtttgtttgtttgtttgtttgtttgtttgtttgttttccataccccagtagcrcctggaacaccagcaagacagaaccacttactctggaaatgcggctgaagccaaggagccaagtgttctggcttggcaggtcccacacccatggaacccagcaaactaagatctactggcttgaaattcttgctgtcagcacagtagcagtcagattgacctgggacactcaggcttggtgggggg

SEQ ID NO: 411705 - DNA, 582 bp, Homo sapiens
gtgcctcatatggatgtcttataggatgggatacctaaggagagaagaattatgagattaaatactagacctgtgtgtgttttgttttgttttaaggaattagcaggtattccatgcaaacattgtttcttacagggctgagaaccgggttttatagttaccctaaagagcaaaacccaaagactccacataagtattatgcaatgcccctttatctgcaggtggtcttcctcaatgtgaccttactttattcaaacatattaaactgttttagaattgtttttgtccataacttatataatatatcctctcagaaaaaaaaaatcctacrttgagtagacaaaaaatagcatctcactttcattccaagaaaataggagtagacaaatccgggttagtaattaacaaaaataaaagcttccctcaacagctgttcacacccctgccccattctagagagcacaggcagaacaggcccaagaggaaagataaaacagcttaagctggatttaaaatagtgtgcagcaatgtttaaggctttttctctctccagccagaaagcagttggcagaaaagggaaac

SEQ ID NO: 411706 - DNA, 562 bp, Homo sapiens
agttagttcacttttccaggctcaagccttaggccacatgctcccagacccagactttcagagttatcaccgtcatgatgaatacctttaaatagacaatgtgtcaccatacatgagttcaattcatgcacaatgctgatmttgcatagtgattttgaaaaaaattggtatttattttctccattttcttcatgtttgattttaattatctcagctttttagttaaattaaatcccaccctacccctcctttcaaaagacaacttgttgcctagattgtcaaatttagtatagaggttccttctataagcgattgttttcatttattttattcattcacacaacacatttttgctaacttctgtgttgataaactttgtgtgacaaggtgaacataaaaagataaatatgcaatggattttgctttcaagtaggtcatgatctagaaaaaaccataacatattgataatgaacgccaatagaatgtataaaatgatatattaatggtacaaataaagtgctatcaggacacagaggtgattcattttgccagggcactggga

SEQ ID NO: 411707 - DNA, 559 bp, Homo sapiens
gaaacacaattctaaacatataagcacacaacactttaacatcaaatatataaagcaaatattattagatctataggtagagatakaccccaatatgataatagttagggacttcaacatccaactctcagcattagacaaatcatctagacagaagatcaacaaagaaacattggatttaaacttcactttagaccaaatggaccttacagaacatttcaccccacagctgcagaatatatatctcctcagcagcacatggaacatcctccagaatagaccatatgttagaccacgaaacaaatctcaacaagttttaaaaactgaactcatatcaagcattttttcagaccacaatggaataaaactagaaatcaatagcaagaggaaccttgaatgctgtatatatacatggaaactacacaacttgctcctgaatgactaatggcccaatgaagaaattaagaaggaagtcaaaaaatttattgaaatgaatgaaagtggaaacacagcataccaaaacctatggtattggtacaacaaaagcagtgctgacagg

SEQ ID NO: 411708 - DNA, 559 bp, Homo sapiens
gaaacacaattctaaacatataagcacacaacactttaacatcaaatatataaagcaaatattattagatctataggtagagatataccccaatatgataatagttagggacttcaacatccaactctcagcattagacaaatcatctagacagaagatcaacaaagaaacattggatttaaacttcactttagaccaaatggaccttacagaacatttcaccccacagctgcagaatatatatctcctcagcagcacatggaacatcctccagaatagaccatatgttagaccacraaacaaatctcaacaagttttaaaaactgaactcatatcaagcattttttcagaccacaatggaataaaactagaaatcaatagcaagaggaaccttgaatgctgtatatatacatggaaactacacaacttgctcctgaatgactaatggcccaatgaagaaattaagaaggaagtcaaaaaatttattgaaatgaatgaaagtggaaacacagcataccaaaacctatggtattggtacaacaaaagcagtgctgacagg

SEQ ID NO: 411709 - DNA, 559 bp, Homo sapiens
gaaacacaattctaaacatataagcacacaacactttaacatcaaatatataaagcaaatattattagatctataggtagagatataccccaatatgataatagttagggacttcaacatccaactctcagcattagacaaatcatctagacagaagatcaacaaagaaacattggatttaaacttcactttagaccaaatggaccttacagaacatttcaccccacagctgcagaatatatatctcctcagcagcacatggaacatcctccagaatagaccatatgttagaccacgaaacaaatctcaacaagttttaaaaactgaactcatatcaagcattttttcagaccacaatggaataaaactagaaatcaatagcaagaggaaccttgaatgctgtatatatacatggaaactacacaacttgctcctgaatgactaatggcccaatgaagaaattaagaaggaagtcaaaaaatttattgaaatgaatgaaagtggaaacacagcataccaaaacytatggtattggtacaacaaaagcagtgctgacagg

SEQ ID NO: 411710 - DNA, 576 bp, Homo sapiens
tccagaaaactcactgagttgcttctttgtgagtctttggagacaatggagctgcactgctcaatggtgccctttctgtgccctctgggattcctggaatccagtacaggagaacattgtaaaatggcaggaggcatgcatcttactccttgaaaaggacccaacactagttgaccgtctraaaaaacagaccgggtggaggatttccaaggtgtcaaatctaggtgaaacttacttcttgcaagggtaaaattgtgaaccctggtgatatctttccagagttgctggagcttttgggggagaaaaataatatttatcctttcaaagtcactctctatcacaggagaaccaatgggaaatctatcattggcgtggggctttttaaaatggatctgctagggatgcacataaatggagttctaaagtcttggtcagttttggagaccactccacttcctacttttgcctctccaaagtacagaagattctgataaattaacatgttgccccttgtgagtcatatgtttgcattttaacatggttatcctggagatagtatcttcacccaaacaagtg

SEQ ID NO: 411711 - DNA, 576 bp, Homo sapiens
tccagaaaactcactgagttgcttctttgtgagtctttggagacaatggagctgcactgctcaatggtgccctttctgtgccctctgggattcctggaatccagtacaggagaacattgtaaaatggcaggaggcatgcatcttactccttgaaaaggacccaacactagttgaccgtctaaaaaaacagaccgggtggaggatttccaaggtgtcaaatctaggtgaaacttacttcttgcaagggtaaaattgtgaaccctggtgatatctttccagagttgctggagcttttgggggagaaaaataatatttatcctttcaaagtcactctctatcacaggagaaccaatgggaaatctatcattggcgtggggctttttaaaatggatctgctagggatgcacataaatggagttctaaagtcttggtcagttttggagaccactccacttcctacttttgcctctccaaagtacagaagattctgataaattaacatgttkccccttgtgagtcatatgtttgcattttaacatggttatcctggagatagtatcttcacccaaacaagtg

SEQ ID NO: 411712 - DNA, 520 bp, Homo sapiens
tcctatacctcttttaattcagttgggaagaagcatggtgcttagccacagtggctatgtgggttaaattatattctttattcctggtacaacttgtcacttcattaaaattttcctctacagtgttctctactcttatctgtaaaatgtctcaattctttgtggaaaaggataaggtataaaggctrggttccaccttttgtttttctttctttggttttagggtaaatgtttccctttcctgtatggctgaataaaaattatatttacttttttccctcttcctaaaaacttgggaaaaatcattaaacaaaatctgttctcttttcttctgcttgtatgtgaaaatattatatgctgctatagtaatggcttcctactgagtcatacccagcaaggcctactcttggcttacaccctgggaatggccatcggaccaggcttttgaagttggctagacctcgtaggtggataaacctagagactggaaagcagaatattgggtaggcttaattgactc

SEQ ID NO: 411713 - DNA, 595 bp, Homo sapiens
ctatctatctatctatctatctatcatctctgtctatagatatatatctccaagatctagccatgttgctttatgtacatctagataattaattcagaatggtacataggtatatatacatatatataataaatgtttcatcttgcaggcacttgagatgaaagaaatctatgaatggtgcatagatttctatatatctacatagtatatatatataatatataaatatatataaaatctttrtaccattcagaattaattatctagatgtgcctaaagtgacatggatagatcttccttagtccactgattcaaatatcaatctcttacggaaaaccctcacagacatgtctagaaataatgctttactacctgtctgaatatcccttaatccagtcaagctgatacctaaaatgaacaatcactatacctaaatacacttatgtttataaacattagagtggatgcctggcagtggttaaggggaggggagatgtgagcagagggaggggagatgtgagtgggaagtgggagttaggaagagaaagggggaaagcaataaagataataaaacatgacatataccttatgaaat

SEQ ID NO: 411714 - DNA, 550 bp, Homo sapiens
aatcatgcagtgaatatttctgagtagcttgtatatatgcaagaaactgccttacatattttaatgaggaaaaacatagtattagttaatatagcaataatttkttctattactaacttctcagctataatatagaaagatcaaatataaggaaaaaaagttaagcctctatatagagatgcaagtttctaatacttgcttataaacttcaaaattcaataatgtgtcacacccacaacttaaagacatgtgcagagcattagtcatttcagtgaacagaaaagcgacctgcttcttctgcataaaatgtgatatgatgccaccttatggttgaaaattaaaccttatgttttaggatgataaacaattattttcagatgtactttcttagatgcctgaaggaaaagatgctgagtaccactaaacctgtaaaatttacaaatcgaagtgcacagaatcaacttacccctgtgaagaaaacataaaacagttatgatgcaagtgtgcaatgtctggcacgtaggaagagtgcctatttgggttgcattta

SEQ ID NO: 411715 - DNA, 611 bp, Homo sapiens
aatgatgtgtcataagtaaccttaatccccaattagtaatgaaagggtaatagttatgtggctttgctcttattcaactattaagatatagccagttaattgcaacttacaaatgaggtaaattttctagccttaaattatgaatgatgttgatatgtggcttcattatttaatgcttggtctctgttactctttgccagcaacagagctcaactttgaatttccaaagaagagcaaacatatccattatgcagtgtcactttgaatgcaggcttttgcaaaatttgactacgttttcaagcgatgtctgatctgcccatgctcatagtaaagatttggctttactccacaagaatgggaatttgataatcaagggtatccttacaatttataattttgttccacaagagaaagaaatggataagtagcttgtgtatttcatttgatgatgtgtgtttgccttttgaaggtaagtctattcataggagagtaagtstattcagtttagatgtaaaaagaaaatggctgcctctccaattggcaatactggatatctggcaataattggataccccaaaggactgttcaactttacattttacttctttttg

SEQ ID NO: 411716 - DNA, 586 bp, Homo sapiens
gacttgcactctttctgcccattatacctctcttggcctccttacttatactcaaaattcaaagcaatacttcatttcttcttcttgcttcatatactattggtstctaggttctatcaaattcccttcataatattattcttactcaataataaacatttactgagtgtctgccaaatctgatcactgtgctcagcaaggagaatacaatgataaacaagacacaaagtatttgccttcagtgacttcagagtcttatataagaaagataaaccagctggtcatggtggctcatgcctataaacccagcattttgggaggctgaggcaggtggatcacctgaggtcaggagtttgagaccaggttggccaacatggtgagaccccatctctactaaaaatacaaaaaaattagccagaaaaaaaatagcaaggaaaggaaaggaaccaatcattacaatgtggcagggtaggtgttaacgatgtccctaagaaggaggcccctaacctgacttggcagactcagatcaggcttctcaaagaaaatgatacttgagctgagctgtaagtatcatgtggtatgagcc

SEQ ID NO: 411717 - DNA, 319 bp, Homo sapiens
ctctggtgttctattctaccatagctgagccagcatgcaaaccatgagatacagttcttcccacccttccctctcctttccacaggcagaggcgcctcaccccagggccaccaccatgacagtcccatgggaagtaccaccaggctacgaccaatgttcccttaaggcccaagaactcttcagtcagcttgtggtgaatgctgccaagactgggactcacccttcagagtgctaggctcccatctggcccaggacaggyccagaaatgctacccaggagccaaagcctggaatcagggatcccaagaacccacttggtg

SEQ ID NO: 411718 - DNA, 515 bp, Homo sapiens
tagaggaaatacaaacctcaggaaatcgaggtgggaatttgaagtgaaaaaacacatggagctagaggaaaagaaactagggaagttttgttttgtatttgtttgtgtttggaaaatggcaggcaaaatcaacaatgaggtcaccctggcaggatgcgccaaggatactgaagagtgaagcaagtaagtacaggaatagaaaataagactgattagcaatgagwgctttatagatcctacagacataggtaatcataaatttatagtaagaaaggatcaaaacagagccaagatttttctcgatggccttcagcaaccaggagaaaacacacagttgggtttcagcaaccaggagaaaacacacggttgggttgatccaactttgaggagtgttaatgtgagtgtggcaaaaaaggtcaggtagtgaaaaatggtcagtgggggcaggcagggtcattaaactgatctgggatgagaggagaaacagcgaagagagaaaggggcagggagcctgg

SEQ ID NO: 411719 - DNA, 591 bp, Homo sapiens
gtgtttttggagacaaagtcttgctctgttgtccaggctggagtgcaatggggcaatcatatagctcactgcagcctctaactcttgggtcttgctatgttgcccatgctgttctcaaactcctggcttcaaactatcctcctgccttggcctccccaggtggtaggattacaggtgtgagccactgagtctggccagtactaaatcttattagttaaaaaaactttgataatatataaataaaatgtacattattctaatttaaatttctttaagtatccatacagttgaacatggcccaatttagaaattttaaattataaaataatttctttgtatatttacgtatacatatatacatgcacccttaaagtagatacaaatttgcatatatatacatatatgtaaatgtgtatgttatctatacccatatacctattgtggaaaaactggaaatgtagaagactagaaagaaaaaatygggctggattaactttaagctctgagtgctatgaccctaatatcagaaatttcgtatctaaggctatatagctaaagtcatgataaggaggctgggctcaaaaccatctc

SEQ ID NO: 411720 - DNA, 563 bp, Homo sapiens
tccttttctttctgcttctgtctctacctctttctgtatctgtttctctgtttctatcttcttttctctttctttgcttctgtatctctctcctagaagagatgaaagctcaggacatacatttctttccaagttctcaggtgatacatggcagagatttgagaggagaatatctgaaacccatttgaaggagcaaagttgttcttgtctgtagatttttaaaaaaawttttaatggaatttgcaggtccaggccatgattttctgaagctgaatttatcaacttacaggttttcacatttcttaatagatttgaccaaagtcctggtaggtaaagcaggcatttgcttaataaaaatgtatgatgtggtgtaggctgtgtaagcagacttttgttttattattgcatttaaccactccaacgcccactgaattcctgattatttctgttgtggggatgccaggtatttattatattagaaggatatgagattaggcacgacagaactcctttaggagtaagaggcttaattaggttccagaattgtcctggtttagcacaag

SEQ ID NO: 411721 - DNA, 620 bp, Homo sapiens
ctactgtctcatctaatattttttttatcaggttatttgtttattagaggactgggtaattgcaattcatattttgstatgcctgaaaactttctataatccatcttctgctttggactagagggtctgaagaaaacagtccatgcacaagtttaaacagaaagttaaaaattcatagtggcctttttctgttgaaattactatatgaatcactattatttgggaggttttttttttgcctaaaataggtaacatcctgtagatgtgctctcactattctattaattgaactgctggcatgtttatgttttgagacgtattctagcactattagatttgccagatgaaaaatacaaagaccagttcaacctaggggataatcaatttttcatgctcattatcatttagatgagtctcttataagggaatggtttcagcatgacgcattttaatgctgagtaacacctcattcctctaggtagtgaagagggagccttatatatgctctcagcgaaaatgttaagatcttaaattacagaataaagaggaaatcaaaaggaaatttgtgaaaacaaaatgagagccagagaaatagtaaaatttattgccagaaaactttt

SEQ ID NO: 411722 - DNA, 594 bp, Homo sapiens
aggaactactgtctcatctaatattttttttatcaggttatttgtttattagaggactgggtaattgcaattcatattttggtatgcctgaaaactttctataatccatcttctgctttggactagagggtctgaagaaaacagtccatgcacaagtttaaacagaaagttaaaaattcatagtggcctttttctgttgaaattactatatgaatcactattatttgggaggttttttttttgcctaaaataggtaacatcctgtagatgkgctctcactattctattaattgaactgctggcatgtttatgttttgagacgtattctagcactattagatttgccagatgaaaaatacaaagaccagttcaacctaggggataatcaatttttcatgctcattatcatttagatgagtctcttataagggaatggtttcagcatgacgcattttaatgctgagtaacacctcattcctctaggtagtgaagagggagccttatatatgctctcagcgaaaatgttaagatcttaaattacagaataaagaggaaatcaaaaggaaatttgtgaaaacaaaatgagagccagag

SEQ ID NO: 411723 - DNA, 600 bp, Homo sapiens
gcaacacatgcaatcccatcagacatatgtgcccatataagggaatatggaacagaagaaatgactttttaggaatgtgaggactggaatgggrgaacaaagaaatactgctgccttcctccaatatctgttaggcttttctttttttttcttaaagtatggaaagtttattcttttcaccataaaagcctctggcagtgataagcatgatttccaagattgtacgtagcaccagaagagctccaactaacgtgctcagcttcgatttcagcattgctcattagagcaacaatgcaaaccagctgtcccctggtgtttggcgaagaaagatccaattaactggccgtcatccacctggttccagatttagccctctccttatgagtctgtaagagcagccagtttgcatgaatttttgtcattaaattcaagccagggggtgaggagccatggggggtggggatggatattctctggactgctgtggagggttaaaataaagtgtaaggccctctagagtttggacatctggaaaggcggcaatgaattaatttatcaaggttttgaccttaacactgttccttatattgcatacgtcaa

SEQ ID NO: 411724 - DNA, 548 bp, Homo sapiens
taactcttaatcagtcattaactgtcagcttaaatatcacttccttagggagactggtagttgagattaagcccccacttccatctcgcccctctagtatatcctagaccatatacctctatcacagtcacaattttacatttatttttgtgattatagatttgatgtcacttggatgaacacatggactatgactgtttctgctttttcttgtgccctcaatgactgtactgtatccaataaatgccttatgtggagtaagcataggaaatactttagaagtggcacttttataagtggtaactcytgaagcaagtggtatttagacatcttcaaatattagaaatgttttctttatattgaagtaaagtctgttttcctaattctgttccttggggtcattcagataagtggatttctgacatgttgtcaaatactttaacagagtagaaataccattgctttggtgtaaaatctagttgtagctaccgtatttgggagggcttactcagtgcctagagctctgctcatctgtaaagtggaaataa

SEQ ID NO: 411725 - DNA, 591 bp, Homo sapiens
agtaggagtataacttggtaatcttttttgtaaattggtgtgttacctactcaagtagaagatttgaaaatgtgcattcctatgactctgcatttccacacttagctrtatacccaacagaagtgtgtccatatattcactgaaagacatattaggatgttcatagcagcactattccttgcagccacaaagcagaaaccgtccaaatgccaatcaacagtagatttgataatcgactgtgttgtattcacacactgcaatactacacagcaatgaaaatgcacaaactttacagcaaaaaactacaatatggatgactgtcacttgcataagatgcaagactagacaaaatctaggtgttagagggcaggatagtgactacccttggcaggactagttattagaagagagagctcaggatgggacttggtgggtgctgataatgttctgtttcttgatctgggatagtttgtgaaaattcactgagctttacatttctgatgtgtgcactaacttgtgtgttagttcctattttaatgtagagtttaaaaagagtttgttctattttgtctacttattgaactaaaacca

SEQ ID NO: 411726 - DNA, 570 bp, Homo sapiens
attcacaaaactgaggacacaacatcaaaactctatgccaacatcttgtaacagcarcagccttatttaaaaatgtacattctgtctctttgtttggaaacctctttttccacatcaattaggcctttactttgaatcttattctctatttcaacaaaagtacataatgttgggtaaatgtctccctttctccactaatttcaccttgtggttaagacacttgaatagtcagaacaagcccattgctttaaaaggatactttttggcttatcagtgcttaaattaatttctttatctggagtaataacaccacatgtcctacctaatagaaatgtgccttgccaagatcagcaattgggtaatgggtaaattcagatgtacaaaaaatccattatgtattccggtgatttagggccctcaggatgttatacctatgatggttgacacattttttccttaattgttcccattgtttctatagagaaggagcgaatgggcacagtttgcttttcatgaatctgagtgcttgctaccctaagttgtgatagttttcccgtaagggctcatgtc

SEQ ID NO: 411727 - DNA, 501 bp, Homo sapiens
ttgtattgtttaagtttgagratgttatttggatttctccagagttcacaatctttgacttctgtgatgcatatgcttttccttttgcctggaaggtccctcctcattttgcttgtatttggaagtctttctcattcttttgtatttaactcaaatactgtcttctctgtgagtccttcttcatccctaaaaaaaagctgggtgtttctcttggcaccttgtgggtgtccctcactaagctctgctctcggatcacaattgctgtttgcacctgtgcctcccttgctccttgctgagttttgaagtggcagatttcgtgctgttcactcttgcatcctcagggtctagcacagctcatattataaagtggcagcgcattcaatatcagttgacttcttgagatggcattgattctccagtccagaaaaaaatgtctcaagagcatcaaattccctttcttttgaggtctgagctcatgaagttacttttgataaagaagct

SEQ ID NO: 411728 - DNA, 576 bp, Homo sapiens
gctggtatgataggcatgagccacggcgcccggcccaggaagtcttttgactcacatgctgccatcccctggttaggaaatctacccattttaacccttttgagccttctttccatgtgacagatcatggcaatcaggaagaaaggcacattcatggaaagtgcaccaaggctagaaaaaaatgttcttctgaagccagaagaacaaggcgaagataggtctatcacttagaaaggaatggtaaatattaacaggcaacatcaagagctactgcacrcaattcttactttgtatgtaggtgtgtgttgggggaaagagaggaagagatagagagagtctagctgggacaaggtgggggatgatcaaacaacccatctcgaagtaaacatgaaagtaaaatagaatcaggtcatattaaatgagtccaatccttgaggaccaaacaaaattccacccgaagaggatgaaagaacgtccaggttttatctctgaaccagtgaagctatcttttggggaataatttttttttcagtgaccactttcctgatttaccagaaagggggaaaggatggatct

SEQ ID NO: 411729 - DNA, 541 bp, Homo sapiens
gtccaaagaggctttgtctaaaggcaattatttatttttttaccaggtcaatgacttttattaacatgatataaaaaattttagtgtgatatacagaaatctcagaaagtaattgtaaaacattttaatgcacttcttaaaatcttaatttacaagacattttgtcttaccaccactgacctttcaatacaaaaactttacaatttttgtttgccaattatttaaatatagcccacttttgatcccttgcagacttgtatttgggggataaaaggagagaytggttctataggatgctcctcaacctggcatgcttcccaatccattgtcaacttactgctcaccagtgctctctgacatctcccaggccaccagccccactccagccccatgccaaactcatcttaagataaatgcctgtacagtactctgccggcaatagctcctcaggtatgaatttaactctgttcgtctgtacagctcaaacaaggtgttactctctagtaatgtctgaaggatctttgaaatagtccccctgtcc

SEQ ID NO: 411730 - DNA, 535 bp, Homo sapiens
ggtaccaattcctctttgaatgtctggtagaattctcctgtgaawcttctgatcctggacttttttttgttggtacgtttttaattacagtttcaagttggtctgttcggggtatgtaattcttcctgatttaagctagaagggttgtatttttccaggaatttacccatctcttctaggttttccagtttatgtgcataaaggtgttcatagtagccttgaatgatctttcatatttctgtggtgtctgttgtaatatctcctgcttcatttcttattgagcttatttggattttctcttttctgggttaatcttgctaatggtctatcaattttatttatcttttcaaagaacaagctttttgtttcatttatcttttgtattttttttcaatttcatttagttctgctctgatcttggttatttcctttcttctgctgggtttgggtttggtttattcttgtttctgtagttccttgaggtgtgaccttagattgtctatttttgctctttcagaccttttgatataagtgg

SEQ ID NO: 411731 - DNA, 596 bp, Homo sapiens
actgaagcaggacttcaagccccttggcattaccatgacctggcagaagctgctacagcagcagagcccacatagaggacatccaagaggtgagaaggaccctcagtcaaggtgggcttccatgcagccatagtcagaatgctctggtattatgtgcagtggattaagctgcaaaggatgagagacacagtaactgaatgctcgagtcacacagtttattggcatgtaaattcttaacaaatayaggtattttatccccattcacactgcccacaattcctattttttatcctgcttggaaacattttttacccttctacgacgagccaatcttacaggaataggcatagaattggtcatacaagtcctggggcatccaggaataggttcctcctgcatcaaggttggagcattgaggccgaagcatccagtcaaaaagacggcatgcctggctccaggtccctttctgagtggcagcatcttgtcctcgtgagtctgtttctcagtggagcaggtagggctgactgagggcttctctttttgtagtccctttatgggcatccacctatttctccttagcttgaaagttggcgcac

SEQ ID NO: 411732 - DNA, 620 bp, Homo sapiens
gggtttgtgtgtatgcgtgcatgcacatgtgtgctgaaagacatcagtccccctattggtcatctctatgaccaataaaataagagattgccacaggaaacctaaggttggatacctgaggctaaggtggggctgggcaaagataagaactagagggcctaagaccaagaggaggtggagcttgggagaggactgtggtgctggaggcaggagagctcagtggcagagaccaggcactgtgcaggcttctgagcctgctggcacccaggattctatcctttccagctgtggaaacttggacaatttattgaacttctttaagcttcaggttcctcatctgtaagataaaataattttagtacctacctgatatggtttggctgtgtcctcacccaaatctcatcttgaactgtagctcccacaattcccatatgtggtgcgacggacctggtgggagataattgaatcatgggggtggtttccctctactgttcycatagtagtgaataagtctcaccagatctaatagtttgataataggtttctccttccttggctcccattctctcttgcctgctgccatgtaggacgtgcctttaaccttctgccatgattgtgag

SEQ ID NO: 411733 - DNA, 529 bp, Homo sapiens
atctaactagtggtttattaatcttgcttatcctttcaagaatatagctttccattgtgttgattctttatatatttttttcagtttccatttcatttacttctgttctgttctttattatttctttccttctgctaattttgggtttggtttgttcttgtttttctagttccttgaggtgttccttcttttaaaattctttattcttttttttttgtctgattgggttatttgaaaaaaaaaccctgtcttcctgttccaaaattctttcttctgcttgatgtagtctrttgttgaaactcttgaatgaatttttttccaacatttattttgtttcagggagtacatgtacaggtttattacctggatatgatgctgaggtttggggtatgaatgattccatcacatcactgagttactgagcatagtacttaatagttagtttttcaaccttggcccccttcctacctcccccctctagcagtccccagtttctaaagttgatatatatattttttgtccatgagta

SEQ ID NO: 411734 - DNA, 536 bp, Homo sapiens
ttctgggaacataagaaatatcttttctaagtgattggaataaccagaggacctgtagaattcaccatgatatttctcccttgtaacaggacaacggcaaagcatatacaggagtacaattaactttttttttcctttttttttttttttttttagtgtggaagagccaaagatctgaaaaattaacttatcaattagatgggcatcatgaatcaaactagatctacctccaggaaaagctacataaaaaagaatgctaaattagtgtgtttctattagttaagataaactaaactccraattcacatacaggcaaaaggctgtcatagattcaagccacacaggcttttatttttttcattctcatagaaaaaagaagagtcttattttcaaactaaaagagaattcaccttatgcttcaagacaatgataccttttttctagaatacaggaaaagggataccttgagaggcagactgggaactggactgctctcaaagtgataattaacagagcagttatctacagctgccaaa

SEQ ID NO: 411735 - DNA, 216 bp, Homo sapiens
tccttcttttgttctctgcctattcctctgagtcatgctgttttcctagagagattttatttattttgcaaaacacttgccttcyggggacagccttatttattaggtgtctgtcctgtgactctctagggaatgaccatcacacactgttgcccaagagtacgtaaaccatgcagacagctccatgcagctcactcagcctgcacatatgagctg

SEQ ID NO: 411736 - DNA, 549 bp, Homo sapiens
cttttttttaacagtttagcattatagtaggtgatgtcatctggtccaagttaaattttttcttaattatgtctttgctatatattatagaatcctaagtcagagaggaatattgcctataaaccacaaagaaaatagtatgatgtgtatctatgtgtatttccctttcccttgttaactaccctgatttttrcttggttaactatacctacctcatgcagggtatggattttatggggacaataactccccacttttaaatataactaatcaggataattgcatctcctagccatagttcctggcatggcatgtgatccattttagaatagtggggttagagaggaatttttttttgatgcttctagtaaaggagtcctttcttttctctggaatggtgtggtgtgtaatgtagtgcaccatataagaagccagcctcacagtggacctgtcaccatggaagacacagagaagtaacaggaaaaggcaggttcctgatgacatcattgagtccctgaatcaaaccaaccctgaaaccagaactaccac

SEQ ID NO: 411737 - DNA, 431 bp, Homo sapiens
tgcctttcttaaagtgattggttaaaatgttttagcacttagcactttcttcctagttttgcagatatggccctgaaatggcttatgagtaaggcaaatagaggatgttcttactgggctagtgcttttatttctctctttcgcttgttctattttttaagtgaaaatggcattagcatcttatttgtcaggctttcattttcgtgtttgagaattccacttgtagataaccaatagctataacctgttcaggtttttaaaaaatatagcttattgaatgagcagtcacacacaagaaattccgttcttcccrtagtccatcatgctttacccgtattcagcttctcacttctgtatctaaaaacactagattttatcattctactttaaagtttcttttttttttttttttttttttacttttcctaaaa

SEQ ID NO: 411738 - DNA, 588 bp, Homo sapiens
gttgctgcctaagtataaaaggagatggtttgtaactgagaatacacttgagtaagtaaagcaactgtacattttacttagaaaccaaatctagaaacttggaygagaccacattcaatgaagatgaaaggacccaggtctctccccacttaacccatacatgattattttatctttgaaattattcaaaaagcatgatactgagcaaaatcttcaatctgagtctgatttgacaattcaatgctttttgtgggttcagattggcactgagagcaggattgtcttttagacccacacaccaaaatagtgaatgttttctttttctacctgggctccttttcaaaaggaaataatggaaaaatatgagaatttgttctcaggatagttggctgtacatttttggtatgaggtagtggaatctttgaggcaggttaagggaaataagtcttaccattgaaatctgggggccatagactacagtctgggagtacgggtctagggagtacatggacaaagggaaattgggtgcaaatcccattgactgactcctgctagcatacctgtaaaagctaaccttttaataggtta

SEQ ID NO: 411739 - DNA, 588 bp, Homo sapiens
gttgctgcctaagtataaaaggagatggtttgtaactgagaatacacttgagtaagtaaagcaactgtacattttacttagaaaccaaatctagaaacttggatragaccacattcaatgaagatgaaaggacccaggtctctccccacttaacccatacatgattattttatctttgaaattattcaaaaagcatgatactgagcaaaatcttcaatctgagtctgatttgacaattcaatgctttttgtgggttcagattggcactgagagcaggattgtcttttagacccacacaccaaaatagtgaatgttttctttttctacctgggctccttttcaaaaggaaataatggaaaaatatgagaatttgttctcaggatagttggctgtacatttttggtatgaggtagtggaatctttgaggcaggttaagggaaataagtcttaccattgaaatctgggggccatagactacagtctgggagtacgggtctagggagtacatggacaaagggaaattgggtgcaaatcccattgactgactcctgctagcatacctgtaaaagctaaccttttaataggtta

SEQ ID NO: 411740 - DNA, 588 bp, Homo sapiens
gttgctgcctaagtataaaaggagatggtttgtaactgagaatacacttgagtaagtaaagcaactgtacattttacttagaaaccaaatctagaaacttggatgagaccacattcaatgaagatgaaaggacccaggtctctccccacttaacccatacatgattattttatctttgaaattattcaraaagcatgatactgagcaaaatcttcaatctgagtctgatttgacaattcaatgctttttgtgggttcagattggcactgagagcaggattgtcttttagacccacacaccaaaatagtgaatgttttctttttctacctgggctccttttcaaaaggaaataatggaaaaatatgagaatttgttctcaggatagttggctgtacatttttggtatgaggtagtggaatctttgaggcaggttaagggaaataagtcttaccattgaaatctgggggccatagactacagtctgggagtacgggtctagggagtacatggacaaagggaaattgggtgcaaatcccattgactgactcctgctagcatacctgtaaaagctaaccttttaataggtta

SEQ ID NO: 411741 - DNA, 654 bp, Homo sapiens
aaacactgcagaaaatggtgtaagccaataatgataatacaccagcaatatttggcactaagatgttgaccaaggccagagcagattgggaaggaaagggtctttgattctttctgattactgagatgccctgccaggatccacagaaggaaggaagcccattttgcttatataaacatactaatgacagctcctgacaaacaatttgtttttttgctagcagragagtgattatctatcacagaaacgcttttagcagaatgtacttggtcgtttagaattgcttatggttaacaaagtagaaggttgtggatttatggggctccctggaaaatgtcacatataccacatatgtaactatctgcataaaaatgaagatatttgataattgagacaggtatctccatgtaaataaattgtcggcatacctctctagaagtctcatctatctgcctgggcaagggagtatctaatgacagaaccaaggatctaaagaatcagattaagagatctaaataattctctgatttgcccatgcctaatgattaactgagttcgtgagattactagtaaagctttatattttgtaagatcttagattctgataagtctaatgtcacaatccaatcagtttttcctatctcaaggaatcat

SEQ ID NO: 411742 - DNA, 296 bp, Homo sapiens
aacaattactactagacctaagaaaaggaatagacagcaacacaataatagtgaggaactctaacactccactgacagcactagacagatcactgaagcaggaagtcaacaacaacaaaaarcactggacttaagttgcagtccagaagaaatggacctaacagatgtttacagaacattgtacccaaaaactgcagaattcacattcttctcatcaacacatagaacagcctccaagacagaccataggataggccacaaaaacaaatctcaataaattttaaaaagtcaaaatt

SEQ ID NO: 411743 - DNA, 435 bp, Homo sapiens
tcttttagttctttagtgagcttttttttwaaaaataaaacacttcacaaatattctctctcaaatatatgtacaaactaaatgtggtttgctttcagctacagttgacccttgaacacatgtgtacactacacaggtccacttatatgcacatttttttttcaaccaaactcaataaaaaatgtggtgttttctgtagggttgccttttcctataaacaggttccacagggccaactgggaaacttgagtatatgtggattttggtacatgaaggtgcccctggaattgatccccacctatatggagagataactatatgttgtgtttgctagattcaccagccagagataatatactattatagaatgctttagatttatacaattaactaatatatttggcacatttttatttatggctcacatcaagttac

SEQ ID NO: 411744 - DNA, 435 bp, Homo sapiens
tcttttagttctttagtgagcttttttttawaaaataaaacacttcacaaatattctctctcaaatatatgtacaaactaaatgtggtttgctttcagctacagttgacccttgaacacatgtgtacactacacaggtccacttatatgcacatttttttttcaaccaaactcaataaaaaatgtggtgttttctgtagggttgccttttcctataaacaggttccacagggccaactgggaaacttgagtatatgtggattttggtacatgaaggtgcccctggaattgatccccacctatatggagagataactatatgttgtgtttgctagattcaccagccagagataatatactattatagaatgctttagatttatacaattaactaatatatttggcacatttttatttatggctcacatcaagttac

SEQ ID NO: 411745 - DNA, 385 bp, Homo sapiens
aaaagatgagggagggatagcattaagagaaatacctaatgtaaatgacgagttaatgggtgcgcaaaccaacacgacacatgtatayatatgtaacaaacctgcatgttgtgcacatgtgccctagaacttagagtataataaaaaaaagttgtaaagataaattttgtctagaattcaactaacaggcacctagaaatttttaaggataattaaaattcgaagatgaaatttgaatgttaacacaaagcaaaataaaagaaatgccaaatacatacaattttaaaactataacaacttcaaacttcaaaaagaaacgtttatattattatgttatataatatttttatttttaaaggcacttttttcttgtgattaaaggtat

SEQ ID NO: 411746 - DNA, 385 bp, Homo sapiens
aaaagatgagggagggatagcattaagagaaatacctaatgtaaatgacgagttaatgggtgcgcaaaccaacacgacacatgtatacatatgtaacaaacctgcaygttgtgcacatgtgccctagaacttagagtataataaaaaaaagttgtaaagataaattttgtctagaattcaactaacaggcacctagaaatttttaaggataattaaaattcgaagatgaaatttgaatgttaacacaaagcaaaataaaagaaatgccaaatacatacaattttaaaactataacaacttcaaacttcaaaaagaaacgtttatattattatgttatataatatttttatttttaaaggcacttttttcttgtgattaaaggtat

SEQ ID NO: 411747 - DNA, 385 bp, Homo sapiens
aaaagatgagggagggatagcattaagagaaatacctaatgtaaatgacgagttaatgggtgcgcaaaccaacacgacacatgtatacatatgtaacaaacctgcatgttgtgcacatgtgccctagaacttagagtataataaaaaaaagttgtaaagataaattttgtctagaattcaactaacaggcacctagaaatktttaaggataattaaaattcgaagatgaaatttgaatgttaacacaaagcaaaataaaagaaatgccaaatacatacaattttaaaactataacaacttcaaacttcaaaaagaaacgtttatattattatgttatataatatttttatttttaaaggcacttttttcttgtgattaaaggtat

SEQ ID NO: 411748 - DNA, 549 bp, Homo sapiens
attttgtctagaattcaactaacaggcacctagaaatttttaaggataattaaaattcgaagatgaaatttgaatgttaacacaaagcaaaataaaagaaatgccaaatacatacaattttaaaactataacaacttcaaamttcaaaaagaaacgtttatattattatgttatataatatttttatttttaaaggcacttttttcttgtgattaaaggtatgttttctcttaaaaacatgtatttctctacatttaaaaaaagattttttaacttaaaaaataaattttcttcctttttctattcctattttattttttttaatttttttagacttttggccatttttcttaactttatatagcactaaaatgacttataaaatactataattatataaattttgataggatgttagtgaaatttatatgctattctgttagtttattaaattaatgtttatttttatacaaacattaattattttcaaagtggctaccaaaatgaataataagcaatcataaaataattatacaaaattatatagat

SEQ ID NO: 411749 - DNA, 549 bp, Homo sapiens
attttgtctagaattcaactaacaggcacctagaaatttttaaggataattaaaattcgaagatgaaatttgaatgttaacacaaagcaaaataaaagaaatgccaaatacatacaattttaaaactataacaacttcaaacttcaaaaagaaacktttatattattatgttatataatatttttatttttaaaggcacttttttcttgtgattaaaggtatgttttctcttaaaaacatgtatttctctacatttaaaaaaagattttttaacttaaaaaataaattttcttcctttttctattcctattttattttttttaatttttttagacttttggccatttttcttaactttatatagcactaaaatgacttataaaatactataattatataaattttgataggatgttagtgaaatttatatgctattctgttagtttattaaattaatgtttatttttatacaaacattaattattttcaaagtggctaccaaaatgaataataagcaatcataaaataattatacaaaattatatagat

SEQ ID NO: 411750 - DNA, 549 bp, Homo sapiens
attttgtctagaattcaactaacaggcacctagaaatttttaaggataattaaaattcgaagatgaaatttgaatgttaacacaaagcaaaataaaagaaatgccaaatacatacaattttaaaactataacaacttcaaacttcaaaaagaaacgtttatattattatgttatataatatttttatttttaaaggcacttttttcttgtgattaaaggtatgtkttctcttaaaaacatgtatttctctacatttaaaaaaagattttttaacttaaaaaataaattttcttcctttttctattcctattttattttttttaatttttttagacttttggccatttttcttaactttatatagcactaaaatgacttataaaatactataattatataaattttgataggatgttagtgaaatttatatgctattctgttagtttattaaattaatgtttatttttatacaaacattaattattttcaaagtggctaccaaaatgaataataagcaatcataaaataattatacaaaattatatagat

SEQ ID NO: 411751 - DNA, 549 bp, Homo sapiens
attttgtctagaattcaactaacaggcacctagaaatttttaaggataattaaaattcgaagatgaaatttgaatgttaacacaaagcaaaataaaagaaatgccaaatacatacaattttaaaactataacaacttcaaacttcaaaaagaaacgtttatattattatgttatataatatttttatttttaaaggcacttttttcttgtgattaaaggtatgttttctcttaaaaacatgtatttctctacatttaaaaaaagattttttaacttaaaaaataaattttcttcctttttctattcctattttatttttttwaatttttttagacttttggccatttttcttaactttatatagcactaaaatgacttataaaatactataattatataaattttgataggatgttagtgaaatttatatgctattctgttagtttattaaattaatgtttatttttatacaaacattaattattttcaaagtggctaccaaaatgaataataagcaatcataaaataattatacaaaattatatagat

SEQ ID NO: 411752 - DNA, 587 bp, Homo sapiens
atttgaatgttaacacaaagcaaaataaaagaaatgccaaatacatacaattttaaaactataacaacttcaaacttcaaaaagaaacgtttatattattatgttatataatatttttatttttaaaggcacttttttcttgtgattaaaggtatgttttctcttaaaaacatgtatttctctacatttaaaaaaagattttttaacttaaaaaataaattttcttcctttttctattcctattttattttttttaatttttttagacttttggccatttttcttaactttatatagcactaaaatgacttataaaatactataattatataaattttgataggatgttagtgaaatttatatgctattctgttagtttattaaattaatgtttatttttatacaaacattaattattttcaaagtggctacyaaaatgaataataagcaatcataaaataattatacaaaattatatagataaataagggcagaaattgtatatttttatataattattttattttatttttttgagagggaatctctctctgtcaccctgtctggagtgcagtggcacgattttg

SEQ ID NO: 411753 - DNA, 609 bp, Homo sapiens
acaattttaaaactataacaacttcaaacttcaaaaagaaacgtttatattattatgttatataatatttttatttttaaaggcacttttttcttgtgattaaaggtatgttttctcttaaaaacatgtatttctctacatttaaaaaaagattttttaacttaaaaaataaattttcttcctttttctattcctattttattttttttaatttttttagacttttggccatttttcttaactttatatagcactaaaatgacttataaaatactataattatataaattttgataggatgttagtgaaatttatatgctattctgttagtttattaaattaatgtttatttttatacaaacattaattattttcaaagtggctaccaaaatgaataataagcaatcataaaataattatacaaaattatatagataaataagggcagaaattgtatatttttatataattattttattttatttttttgagagggaatctctctctgtcaccctgtctggagtgcagtggcaygattttggctcactgcaaactccacctcctgggttcacaccattctcctgcctcagcctccctagttgctgggac

SEQ ID NO: 411754 - DNA, 609 bp, Homo sapiens
acaattttaaaactataacaacttcaaacttcaaaaagaaacgtttatattattatgttatataatatttttatttttaaaggcacttttttcttgtgattaaaggtatgttttctcttaaaaacatgtatttctctacatttaaaaaaagattttttaacttaaaaaataaattttcttcctttttctattcctattttattttttttaatttttttagacttttggccatttttcttaactttatatagcactaaaatgacttataaaatactataattatataaattttgataggatgttagtgaaatttatatgctattctgttagtttattaaattaatgtttatttttatacaaacattaattattttcaaagtggctaccaaaatgaataataagcaatcataaaataattatacaaaattatatagataaataagggcagaaattgtatatttttatataattattttattttatttttttgagagggaatctctctctgtcaccctgtctggagtgcagtggcacgattttggctcactgmaaactccacctcctgggttcacaccattctcctgcctcagcctccctagttgctgggac

SEQ ID NO: 411755 - DNA, 530 bp, Homo sapiens
tgacctgggtgctgttaaagtcactcagttttataaaggaagtagagcataaaagttcaaaaagtttgtggcttgacaatctgatagaaaagaaaatcccattttctgaggagaaatttaagtcagctgcagaaatttgtataagaaatgaggagatgaatgttaatccccaagacaatagggaaaatgtctctaaggcatgccagaggtcttcatggcagccccttccatcacaggcctggtgacctaggagaaaaaaaagtggttttgtgggccaggcccaaggtcrtcatgctgtgagcagcctagggacttggcaacctgtgtcccagctgctccagccatggctgaaaggggccaatgtagactttaggctgtggcttcagagggtacaagccccaagccttggcagcttccacttgatgttgagcctgtgagtgcacagaagtcaaaaatgggggtttggggatctatgcctagatttcagatgtatggaaatgtctggatgtccaggaataagttcactgcaa

SEQ ID NO: 411756 - DNA, 530 bp, Homo sapiens
tgacctgggtgctgttaaagtcactcagttttataaaggaagtagagcataaaagttcaaaaagtttgtggcttgacaatctgatagaaaagaaaatcccattttctgaggagaaatttaagtcagctgcagaaatttgtataagaaatgaggagatgaatgttaatccccaagacaatagggaaaatgtctctaaggcatgccagaggtcttcatggcagccccttccatcacaggcctggtgacctaggagaaaaaaaagtggttttgtgggccaggcccaaggtcgtcatgctgtgagcagcctagggacttggcamcctgtgtcccagctgctccagccatggctgaaaggggccaatgtagactttaggctgtggcttcagagggtacaagccccaagccttggcagcttccacttgatgttgagcctgtgagtgcacagaagtcaaaaatgggggtttggggatctatgcctagatttcagatgtatggaaatgtctggatgtccaggaataagttcactgcaa

SEQ ID NO: 411757 - DNA, 583 bp, Homo sapiens
tcataagtggaagggacttgtctcagatgagactttggactgtggacttttgagttaatgctgaaattagttaaggctttttgggactgttgggaaggcatgattggttttgaaatgtgaagatatgagatttgggagrggccaggggtataataatatggtttgactctgtgtccccacccaagtctcatcttgtagttcccataatttctacatgttgtgggagggacccagtgggaaatgattgaatcatgagagtgagtcttccccatgctgttctcatgatagtgaatgggtctcatgaaatctgatggctttaaaaatgggagtttccccaaacgaggtctctatttggctgcagtcatccatgtaagatgtgatttgctcctcttcttgacttctgccatgagtttgaggcctccccagccatgtagaactacaaattgattaaacctctttcttttgtaaattgtccagtgtcaggtatgtctttatcagcagtgtaaaaaaggactaagaaactccccttgggctggggaaagaacaaaatcctggttgcttcactagcaccttcatcatgaca

SEQ ID NO: 411758 - DNA, 583 bp, Homo sapiens
tcataagtggaagggacttgtctcagatgagactttggactgtggacttttgagttaatgctgaaattagttaaggctttttgggactgttgggaaggcatgattggttttgaaatgtgaagatatgagatttgggagaggccaggggtataataatatggtttgactctgtgtccccacccaagtctcatcttgtagttcccataatttctacatgttgtgggagggacccagtgggaaatgattgaatcatgagagtgagtcttccccatgctgttctcatgatagtgaatgggtctcatgaaatctgatggctttaaaaatgggagtttccccaaacgaggtctctatttgkctgcagtcatccatgtaagatgtgatttgctcctcttcttgacttctgccatgagtttgaggcctccccagccatgtagaactacaaattgattaaacctctttcttttgtaaattgtccagtgtcaggtatgtctttatcagcagtgtaaaaaaggactaagaaactccccttgggctggggaaagaacaaaatcctggttgcttcactagcaccttcatcatgaca

SEQ ID NO: 411759 - DNA, 583 bp, Homo sapiens
tcataagtggaagggacttgtctcagatgagactttggactgtggacttttgagttaatgctgaaattagttaaggctttttgggactgttgggaaggcatgattggttttgaaatgtgaagatatgagatttgggagaggccaggggtataataatatggtttgactctgtgtccccacccaagtctcatcttgtagttcccataatttctacatgttgtgggagggacccagtgggaaatgattgaatcatgagagtgagtcttccccatgctgttctcatgatagtgaatgggtctcatgaaatctgatggctttaaaaatgggagtttccccaaacgaggtctctatttggctgcagtcatccatgtaagatgtgayttgctcctcttcttgacttctgccatgagtttgaggcctccccagccatgtagaactacaaattgattaaacctctttcttttgtaaattgtccagtgtcaggtatgtctttatcagcagtgtaaaaaaggactaagaaactccccttgggctggggaaagaacaaaatcctggttgcttcactagcaccttcatcatgaca

SEQ ID NO: 411760 - DNA, 583 bp, Homo sapiens
tcataagtggaagggacttgtctcagatgagactttggactgtggacttttgagttaatgctgaaattagttaaggctttttgggactgttgggaaggcatgattggttttgaaatgtgaagatatgagatttgggagaggccaggggtataataatatggtttgactctgtgtccccacccaagtctcatcttgtagttcccataatttctacatgttgtgggagggacccagtgggaaatgattgaatcatgagagtgagtcttccccatgctgttctcatgatagtgaatgggtctcatgaaatctgatggctttaaaaatgggagtttccccaaacgaggtctctatttggctgcagtcatccatgtaagatgtgatttgctcctcttcttgacttctgccatgagtttgaggcctccccagccatgtagaactacaaattgattaaacctctttcttttgtaaattgtccagtgtcaggtatgtctttatcagcagtgtaaaaaagsactaagaaactccccttgggctggggaaagaacaaaatcctggttgcttcactagcaccttcatcatgaca

SEQ ID NO: 411761 - DNA, 525 bp, Homo sapiens
aagaacaaaatcctggttgcttcactagcaccttcatcatgacacagctgccatatagcgtagagcccagtctctcttccttgtgagctcccwactcctatccttcactaagcagaactccttgctcgggcctgcagagtagctacctcacccaagctgaacatttctattgccagtggctctgtgttatcctgtgatggagctcccagaggcaaatgacagccaactgccactgccaatgcagtggtacctgcccttgctgtcttagactgggaaagaaataaaagagcctgaatgctttactcatgcttccagcacactatgattaccatatgatcaccatatggcatggagcccaatctctattctctgtgagcccctgatcccctgctcttcaccaggcaggggccccagcaaaggctcatagtgcagcagccccactccagactgaaaatgcccagtggcagtggttctgcatttctctggggtggagatcccagaagcaactgaaagtttctctgcaac

SEQ ID NO: 411762 - DNA, 525 bp, Homo sapiens
aagaacaaaatcctggttgcttcactagcaccttcatcatgacacagctgccatatagcgtagagcccagtctctcttccttgtgagctccctactcctatccttcactaagcagaactccttgctygggcctgcagagtagctacctcacccaagctgaacatttctattgccagtggctctgtgttatcctgtgatggagctcccagaggcaaatgacagccaactgccactgccaatgcagtggtacctgcccttgctgtcttagactgggaaagaaataaaagagcctgaatgctttactcatgcttccagcacactatgattaccatatgatcaccatatggcatggagcccaatctctattctctgtgagcccctgatcccctgctcttcaccaggcaggggccccagcaaaggctcatagtgcagcagccccactccagactgaaaatgcccagtggcagtggttctgcatttctctggggtggagatcccagaagcaactgaaagtttctctgcaac

SEQ ID NO: 411763 - DNA, 475 bp, Homo sapiens
agagagattgacatataaatttagaaaattcagataacccatgtaagatgctatgtaagacaaccattgcagagacacaaagtaatcagattcttgaaggtcaatgcaaaagaaaaaaatattaaaggcagttaacgacaaggggcaggtcacataaagtggaaactacatcaaaytcacaggggaactctcagcaatatcccacagtcagaagacattaagaatccatattcagcatttttgaaaaaataaaattttgaaccaagaattttatgtcccaccaaactaagcttcataaacaagggagaaataaaatccatttcagataagcaaaagctaggggaatttattaccaccaggcctttagagaccagaagagatccttaagaaagtgctaaacgtgaaaatgaaggactgttacctagcaccagaaaaacacactcaagtatatagaccatcaacactataaagtaat

SEQ ID NO: 411764 - DNA, 475 bp, Homo sapiens
agagagattgacatataaatttagaaaattcagataacccatgtaagatgctatgtaagacaaccattgcagagacacaaagtaatcagattcttgaaggtcaatgcaaaagaaaaaaatattaaaggcagttaacgacaaggggcaggtcacataaagtggaaactacatcaaattcacaggggaactctcagcaatatcccacagtcagaagacattaagaatccatattcagcatttttgaaaaaataaaattttgaaccaagaattttatgtcccaccaaactaagcttcataaacaagggagaaataaaatccatttcagataagcaaaagctaggggaatttattaccaccaggcctttagagaccasaagagatccttaagaaagtgctaaacgtgaaaatgaaggactgttacctagcaccagaaaaacacactcaagtatatagaccatcaacactataaagtaat

SEQ ID NO: 411765 - DNA, 475 bp, Homo sapiens
agagagattgacatataaatttagaaaattcagataacccatgtaagatgctatgtaagacaaccattgcagagacacaaagtaatcagattcttgaaggtcaatgcaaaagaaaaaaatattaaaggcagttaacgacaaggggcaggtcacataaagtggaaactacatcaaattcacaggggaactctcagcaatatcccacagtcagaagacattaagaatccatattcagcatttttgaaaaaataaaattttgaaccaagaattttatgtcccaccaaactaagcttcataaacaagggagaaataaaatccatttcagataagcaaaagctaggggaatttattaccaccaggcctttagagaccagaagagatccttaagaaagtgctaaacrtgaaaatgaaggactgttacctagcaccagaaaaacacactcaagtatatagaccatcaacactataaagtaat

SEQ ID NO: 411766 - DNA, 604 bp, Homo sapiens
ctaaacacccacttaaaaggcatggagtggcaaagtggataaagaatcaagacccaactgtatgctgtcttcaagagacccatctcacatgtgagaacacccataggttcaaagtaaagggatggagaaagaactaccaaacaaatgaaaaacaaagaagaacaggtgttgctgttcttattttagataaaactgacattaaactaacgatgatcaaaacagacaattaagggcattacgtaatgatgaaggattcaattaaacaagaagacttaactatcctaaatatatatgcacctaacactggatcactcagattcacaaaacaagctcttagagatatacaaagaaacttacataactacacgatgacagtggcagacctcaacacctcactgacagtgtaagacakatcactgaggcagaaaactaacaaagatattcgggacctaaacttgacacttggccaaatacacctaacagacatctacagaacactccacacatcaacaacagaatatatattcttatcatctgcacatgacacatattctaaaatcaaccacatgctcagctataagtcaattctcaacaaataaaaaaa

SEQ ID NO: 411767 - DNA, 531 bp, Homo sapiens
aggaagaaaacgaaactttgaacagactaataggaagttccaaactgaattggcaatacaatgcctatcaatcaaaaaaagtgttggcctcaaaggattcactgccaaattctaccagmtgtataaagaagagctgataccacacctactgacactatctaaaataattgaggaggagggactcatacctaactcattctatgaggacaacatcattctgataccaaatcctggcagagatgcaatgaaaaaaaaaacttcagaccaatatttctaatgaacatagatacagaaatattcaacaaaatactagcaaaccaaatctagctgtacatcaaaaagctaatccaccacaatcaagtaggttttatttcttgcaaaatatttccagaatggtacttccaaggttttcttctagagattttatagtttgaggttttacatttatgtctttaatccatcctgggttgatttttgtgtatggtgaaaggtaggggtccagttcaaatcttctgtgtatggtcagcaggt

SEQ ID NO: 411768 - DNA, 531 bp, Homo sapiens
aggaagaaaacgaaactttgaacagactaataggaagttccaaactgaattggcaatacaatgcctatcaatcaaaaaaagtgttggcctcaaaggattcactgccaaattctaccagatgtataaagaagagctgataccacacctactgacactatctaaaataattgaggaggagggactcatacctaactcattctatgaggacaacatcattctgataccaaatcctggcagagatgcaatgaaaaaaaaaacttcagaccaatatttctaatgaacatagatacagaaatattcaacaaaatactagcaaaccaaatctagctgtacatcaaraagctaatccaccacaatcaagtaggttttatttcttgcaaaatatttccagaatggtacttccaaggttttcttctagagattttatagtttgaggttttacatttatgtctttaatccatcctgggttgatttttgtgtatggtgaaaggtaggggtccagttcaaatcttctgtgtatggtcagcaggt

SEQ ID NO: 411769 - DNA, 531 bp, Homo sapiens
aggaagaaaacgaaactttgaacagactaataggaagttccaaactgaattggcaatacaatgcctatcaatcaaaaaaagtgttggcctcaaaggattcactgccaaattctaccagatgtataaagaagagctgataccacacctactgacactatctaaaataattgaggaggagggactcatacctaactcattctatgaggacaacatcattctgataccaaatcctggcagagatgcaatgaaaaaaaaaacttcagaccaatatttctaatgaacatagatacagaaatattcaacaaaatactagcaaaccaaatctagctgtacatcaaaaagctaatccaccacaatcaagtaggttttatttcttgcaaaatatttycagaatggtacttccaaggttttcttctagagattttatagtttgaggttttacatttatgtctttaatccatcctgggttgatttttgtgtatggtgaaaggtaggggtccagttcaaatcttctgtgtatggtcagcaggt

SEQ ID NO: 411770 - DNA, 594 bp, Homo sapiens
ggtatcccatctcttgcatctgtgtgacctggatgtgagacatggagtcaaaggacatcattttgaaactttaaggtttaatgactgctctgttggatttcagacttgcatggggcctatagctcctttgttttkgtcaatttctcccatctccaatggatgtatttacccagtacctgcactcccattgtatctaggaaataactaacttgcttttgatgttacaggctcataggtggaagggacttaccttttctcagatgagattttgaacttgaacttttgggttaatgctgaaatgagttaagactttgggggattcttggaaaggcataattgtgttttgaaatgtgaggacatgagatttgcgaggggccatggacagaataatatagtttggctttgtgtccctacccaaaatctcatcttgaattgtaatgcaaattgtaatccccacatgttgggggaaggacatcatgggaggtgattagacatggggatcatactgttctcatgataatgagtgagttcttatgagagctgaaggttttataggggctttcccccactttactttgcacttctctctcctgc

SEQ ID NO: 411771 - DNA, 594 bp, Homo sapiens
ggtatcccatctcttgcatctgtgtgacctggatgtgagacatggagtcaaaggacatcattttgaaactttaaggtttaatgactgctctgttggatttcagacttgcatggggcctatagctcctttgtttttgtcaatttctcccatctccaatggrtgtatttacccagtacctgcactcccattgtatctaggaaataactaacttgcttttgatgttacaggctcataggtggaagggacttaccttttctcagatgagattttgaacttgaacttttgggttaatgctgaaatgagttaagactttgggggattcttggaaaggcataattgtgttttgaaatgtgaggacatgagatttgcgaggggccatggacagaataatatagtttggctttgtgtccctacccaaaatctcatcttgaattgtaatgcaaattgtaatccccacatgttgggggaaggacatcatgggaggtgattagacatggggatcatactgttctcatgataatgagtgagttcttatgagagctgaaggttttataggggctttcccccactttactttgcacttctctctcctgc

SEQ ID NO: 411772 - DNA, 594 bp, Homo sapiens
ggtatcccatctcttgcatctgtgtgacctggatgtgagacatggagtcaaaggacatcattttgaaactttaaggtttaatgactgctctgttggatttcagacttgcatggggcctatagctcctttgtttttgtcaatttctcccatctccaatggatgtatttacccagtacctgcactcccattgtatctaggaaataactaacttgcttttgatgttacaggctcataggtggaagggacttrccttttctcagatgagattttgaacttgaacttttgggttaatgctgaaatgagttaagactttgggggattcttggaaaggcataattgtgttttgaaatgtgaggacatgagatttgcgaggggccatggacagaataatatagtttggctttgtgtccctacccaaaatctcatcttgaattgtaatgcaaattgtaatccccacatgttgggggaaggacatcatgggaggtgattagacatggggatcatactgttctcatgataatgagtgagttcttatgagagctgaaggttttataggggctttcccccactttactttgcacttctctctcctgc

SEQ ID NO: 411773 - DNA, 594 bp, Homo sapiens
ggtatcccatctcttgcatctgtgtgacctggatgtgagacatggagtcaaaggacatcattttgaaactttaaggtttaatgactgctctgttggatttcagacttgcatggggcctatagctcctttgtttttgtcaatttctcccatctccaatggatgtatttacccagtacctgcactcccattgtatctaggaaataactaacttgcttttgatgttacaggctcataggtggaagggacttaccttttctcagatgagattttgaacttgaacttttgggttaatgctgaaatgagttaagactttgggggattcttggaaaggcataattgtgttttgaaatgtgaggacatgagatttgcgaggggccatggacagaataatatagtttggctttgtgtccctacccaaaatctcatcttgaattgtaatgcaaattgtaatccccacatgttgggggaaggacatcrtgggaggtgattagacatggggatcatactgttctcatgataatgagtgagttcttatgagagctgaaggttttataggggctttcccccactttactttgcacttctctctcctgc

SEQ ID NO: 411774 - DNA, 458 bp, Homo sapiens
tgagggtttactatgctataagttgcatttaattgactggcttcatttctggatgatttcaggtggccaaggctcagctcagctctcctgggatgtgtgctctaacgctggggggattgggacctggcccacagctttgttatatgccccctcaagatgaagtacctgctgcactgacagggccacagcattctcagtccactggcaacaacagtccaatgggggataccaacaaaagtgcttcattggagcatytgctgaggggtccatgcttatgcacatgtgcaccagctgcagcaggggtgcagtgtggcatgttatactcatactcaccctggcagtggcaggttgtcagggtttacacacacacatcagtggggcccatgcagttgcagtgaggactctgcatatgtgcacactggcgaaacagtgagtggagactgtgcacagtgcatgcc

SEQ ID NO: 411775 - DNA, 577 bp, Homo sapiens
attttttgatgcaagtggagacttaataattgagaaaaataatataatctataagcctgtagtaaagattaaaccaaaaaatcaagagtttgatcacctctgtagataaaggaaataaattgataaagttcaaaatttgtgctacatttgaaggaagtaatttgaaatcatttatcttataaaggctttagaatccaagaattaaaaatactcacttttttccattttaggtattcacatcaaaaatctattacctaacatataaaactatcaagtatgttgattatgtttttagtatagtggtattgtttatcctgatttaatcttgaagattaaaaataaaaataatgttaacttcagttaactgttcaggcaaattattttcttttttgataaaatgtatttgtgttgctacacacagacatggagctgcagattttctcattcaagttattaaaatgtcaaccacctttgtaatgctagtagtcactgccaaatcaattttcattatatcrggaggaaaatacaaatcttcttaaaaactgatataactgaaactgtatgtaattgtattata

SEQ ID NO: 411776 - DNA, 419 bp, Homo sapiens
caacaacaaaaaccagtgcctgacattcacatatgacctggattatacctgtatttgccagccaaatgaaagaaaaaagctaaattcacagtgcatttggtaaagcaatttaaaaggtcttgcctcaggggtagaaattaattacatttaaactgagtactgagttgaacgcawcaaaaaatcataaaagaagtatctaaaaggatcaagcggttttaaacaaattaactgtgtcctagagaaaaagctcatattttgtacagaaatacaaaatatccagcactcacaaagataacattaacaaaaacttccattatattaaactgtagttacgttaaaatttctttaacagattcacagagactggcagcacaaagttttgtaaggatttagagctactggaactctcataccttgat

SEQ ID NO: 411777 - DNA, 419 bp, Homo sapiens
caacaacaaaaaccagtgcctgacattcacatatgacctggattatacctgtatttgccagccaaatgaaagaaaaaagctaaattcacagtgcatttggtaaagcaatttaaaaggtcttgcctcaggggtagaaattaattacatttaaactgagtactgagttgaacgcaacaaaaaatcataaaagaagtatctaaaaggatcaagcggttttraacaaattaactgtgtcctagagaaaaagctcatattttgtacagaaatacaaaatatccagcactcacaaagataacattaacaaaaacttccattatattaaactgtagttacgttaaaatttctttaacagattcacagagactggcagcacaaagttttgtaaggatttagagctactggaactctcataccttgat

SEQ ID NO: 411778 - DNA, 580 bp, Homo sapiens
aaatgtctatcaaagaaaagcggataaacattgtgtgacataatcacacaagagagattacctttcaccaattaacaattaatgagcttttgatacgcacaatgacacaattaatctcaaacacatgttgaaccaaaagatgccaggcagaaattagtgcacactgttttaattccaaaaacagatacaactacggtgcagatatgaaaaaagtgattgcttcattaatgagaggtattaactagaaagagatattaggaaaatttattgggtcatatttgtgcacttgaatgaaagcagaatttatttttgtaaaaatatagatgtcagcagatattcaactactatacatgtactgtcayttgtaacctaccaaagaaaaatatgtttaaaaatacttttacaaaatgacaatttaaattaaataaattttcaactatttgaaaaccaatttggctgttttctataaaattaattattcatccacccaacttccctataatcaagtcactcctaagcacttattcaaaaggagtaaaaactcttctccacagaaagacttgaataagaattgtaataa

SEQ ID NO: 411779 - DNA, 484 bp, Homo sapiens
tttacatttaacatcaatgtcaataatagagtcagaattgatatcaaacttgagaaatatttttrccaaaagtaggtctttcataattaatatgaattgatttctgccaaactattatatttagccatgtggtcagtaatataatgtaaattatatgtagatatatatttttaaagttgaggacacctaaataaaacatgtaaattattttaattacttgacaatctattatatacaaagtatttaagtatattttaaacatattcaatttaactaattttttgagtgatttgggcaaaattctgttttagttcatttatagacatgcttatatttgagttactgaaaatacaaacatttaagtagtctactcttagcatattaatatgtcctgtattcattacaacattaattgcattaaattcaactactatgaataaataatctatcacatatacattttaaaggtagaagcatttcagtt

SEQ ID NO: 411780 - DNA, 484 bp, Homo sapiens
tttacatttaacatcaatgtcaataatagagtcagaattgatatcaaacttgagaaatatttttgccaaaagtaggtctttcataattaatatgaattgatttctgccaaactattatatttagccatgtggtcagtaatataatgtaaattatatgtagatatatatttttaaagttgaggacacctaaataaaacatgtaaattattttaattacttgacaatctattatatacaaagtatttaagtatattttaaacatattyaatttaactaattttttgagtgatttgggcaaaattctgttttagttcatttatagacatgcttatatttgagttactgaaaatacaaacatttaagtagtctactcttagcatattaatatgtcctgtattcattacaacattaattgcattaaattcaactactatgaataaataatctatcacatatacattttaaaggtagaagcatttcagtt

SEQ ID NO: 411781 - DNA, 484 bp, Homo sapiens
tttacatttaacatcaatgtcaataatagagtcagaattgatatcaaacttgagaaatatttttgccaaaagtaggtctttcataattaatatgaattgatttctgccaaactattatatttagccatgtggtcagtaatataatgtaaattatatgtagatatatatttttaaagttgaggacacctaaataaaacatgtaaattattttaattacttgacaatctattatatacaaagtatttaagtatattttaaacatattcaatttaactaattttttgagtgatttgggcaaaattctgttttagttcatttatagacatgcttatatttgagttactgaaaatrcaaacatttaagtagtctactcttagcatattaatatgtcctgtattcattacaacattaattgcattaaattcaactactatgaataaataatctatcacatatacattttaaaggtagaagcatttcagtt

SEQ ID NO: 411782 - DNA, 592 bp, Homo sapiens
taaaacatgtaaattattttaattacttgacaatctattatatacaaagtatttaagtatattttaaacatattcaatttaactaattttttgagtgatttgggcaaaattctgttttagttcatttatagacatgcttatatttgagttactgaaaatacaaacatttaagtagtctactcttagcatattaatatgtcctgtattcattacaacattaattgcattaaattcaactactatgaataaataatctatcacatatacattttaaaggtagaagcatttcagttttatacaaggatgtctttttgagctgacacaggtttccaagatttgagacaatatcagaagatttattaaaattgatatgaracagcaactgcccacatctccccacatcactttgctggcatatatctgcatgggtgggctttacttgcttcaacagcacatgggaatgcagtgtgaccccccataagccccaccaaccaccactgcagatggatccttgttgggcacagagtcatcaagccccatctacaccagtgccctgcccttgtgctgtgctgcacacagagcaggggatccc

SEQ ID NO: 411783 - DNA, 529 bp, Homo sapiens
ccatggccttgggcagctctgcccctgtggctttgaaaggtacggttcccacctagctgctttcacaggctggtgttgagcatctgaggtttyttttaggtgcatatgcaagctgtgagtggatttaccattctggggtctggaagatggtggtcctcttctcacacaggcagcgcctcagtggggactctgtgtggggctccaaccccacatttcccttcccctcttccttagcagaggctctccatgatcaccccctctcccccacagtaaacttcttcctggacatccaggcatttccatacatcctctgaaatctaggctgaggctcccaagccttgcttcttgacttctgtgcacatgcaggctcaactccacatggatgctgccaaggcttggggcttgcaacctctgacaccatggcccaagctgcaccttggtcccttttagtcacagctggagtggctgggatgtagagcaccaagtccctagactgcacacagagaggggccctgggcctgtccccaga

SEQ ID NO: 411784 - DNA, 553 bp, Homo sapiens
aggcattgggtaactatacccattccaaacaggacaaattggccaaaacaaaggggttacaggccccatgcaagtccaaactccagcaaggcagttgaatcttaacgcttcaaaatgatctcctttgactccatgtctaacatccaggtcatgctgatgcaagacgtgggctcccatggccttgggcagctctgcccctgtggctttgaaaggtacggttcccacctagctgctttcacaggctggtgttgagcatctgaggtttcttttaggtgcatatgcaagctgtgagtggatttaccattctggggtstggaagatggtggtcctcttctcacacaggcagcgcctcagtggggactctgtgtggggctccaaccccacatttcccttcccctcttccttagcagaggctctccatgatcaccccctctcccccacagtaaacttcttcctggacatccaggcatttccatacatcctctgaaatctaggctgaggctcccaagccttgcttcttgacttctgtgcacatgcaggctcaactccacat

SEQ ID NO: 411785 - DNA, 529 bp, Homo sapiens
ccatggccttgggcagctctgcccctgtggctttgaaaggtacggttcccacctagctgctttcacaggctggtgttgagcatctgaggtttcttttaggtgcatatgcaagctgtgagtggatttaccattctggggtctggaagatggtggtcctcttctcacacaggcagcrcctcagtggggactctgtgtggggctccaaccccacatttcccttcccctcttccttagcagaggctctccatgatcaccccctctcccccacagtaaacttcttcctggacatccaggcatttccatacatcctctgaaatctaggctgaggctcccaagccttgcttcttgacttctgtgcacatgcaggctcaactccacatggatgctgccaaggcttggggcttgcaacctctgacaccatggcccaagctgcaccttggtcccttttagtcacagctggagtggctgggatgtagagcaccaagtccctagactgcacacagagaggggccctgggcctgtccccaga

SEQ ID NO: 411786 - DNA, 553 bp, Homo sapiens
aggcattgggtaactatacccattccaaacaggacaaattggccaaaacaaaggggttacaggccccatgcaagtccaaactccagcaaggcagttgaatcttaacgcttcaaaatgatctcctttgactccatgtctaacatccaggtcatgctgatgcaagacgtgggctcccatggccttgggcagctctgcccctgtggctttgaaaggtacggttcccacctagctgctttcacaggctggtgttgagcatctgaggtttcttttaggtgcatatgcaagctgtgagtggatttaccattctggggtctggaagatggtggtcctcttctcacacaggcagcgcctcagtggggactctrtgtggggctccaaccccacatttcccttcccctcttccttagcagaggctctccatgatcaccccctctcccccacagtaaacttcttcctggacatccaggcatttccatacatcctctgaaatctaggctgaggctcccaagccttgcttcttgacttctgtgcacatgcaggctcaactccacat

SEQ ID NO: 411787 - DNA, 529 bp, Homo sapiens
ccatggccttgggcagctctgcccctgtggctttgaaaggtacggttcccacctagctgctttcacaggctggtgttgagcatctgaggtttcttttaggtgcatatgcaagctgtgagtggatttaccattctggggtctggaagatggtggtcctcttctcacacaggcagcgcctcagtggggactctgtgtggggctccaaccccacatttcccttccccwcttccttagcagaggctctccatgatcaccccctctcccccacagtaaacttcttcctggacatccaggcatttccatacatcctctgaaatctaggctgaggctcccaagccttgcttcttgacttctgtgcacatgcaggctcaactccacatggatgctgccaaggcttggggcttgcaacctctgacaccatggcccaagctgcaccttggtcccttttagtcacagctggagtggctgggatgtagagcaccaagtccctagactgcacacagagaggggccctgggcctgtccccaga

SEQ ID NO: 411788 - DNA, 544 bp, Homo sapiens
aaaaaaagagattcagaaaaattacttacataagtttgaaaggcaagatgaatctggccatatggtaaaatccaacagaactcttctggttatgagtaatttgtaaaataattcatacattgcccattatatgcgttagatatatgtaaattttaccatgctcattcttcagaacagaaaaagtgaaatacaaaggcaaacatggtaaagcaatttattttagttttcatgagaagttgttcttctagagtatgttatatgactctatgccctcagtttgaactctcattgaaccatatctaaattaactaataaaatgaactttgaattayatatgccactgtgtgcaaattaacattcattgactgtatgtgtatgtaaatattggccagtaaacagagccatttacatcttcataaagagaataacatttccaactaaaattccttctaaaattggactcatatcaattggaagtatttcaaacaattactaaactgatttacttggacaaacatagaaaatattatctaagctatgtgta

SEQ ID NO: 411789 - DNA, 544 bp, Homo sapiens
aaaaaaagagattcagaaaaattacttacataagtttgaaaggcaagatgaatctggccatatggtaaaatccaacagaactcttctggttatgagtaatttgtaaaataattcatacattgcccattatatgcgttagatatatgtaaattttaccatgctcattcttcagaacagaaaaagtgaaatacaaaggcaaacatggtaaagcaatttattttagttttcatgagaagttgttcttctagagtatgttatatgactctatgccctcagtttgaactctcattgaaccatatctaaattaactaataaaatgaactttgaattacatatgccactgtgtgcaaattaacattcattgactgtatgtgtatgtaaatattggccagtaaacagagccatttacatcttcataaagagaataacayttccaactaaaattccttctaaaattggactcatatcaattggaagtatttcaaacaattactaaactgatttacttggacaaacatagaaaatattatctaagctatgtgta

SEQ ID NO: 411790 - DNA, 544 bp, Homo sapiens
aaaaaaagagattcagaaaaattacttacataagtttgaaaggcaagatgaatctggccatatggtaaaatccaacagaactcttctggttatgagtaatttgtaaaataattcatacattgcccattatatgcgttagatatatgtaaattttaccatgctcattcttcagaacagaaaaagtgaaatacaaaggcaaacatggtaaagcaatttattttagttttcatgagaagttgttcttctagagtatgttatatgactctatgccctcagtttgaactctcattgaaccatatctaaattaactaataaaatgaactttgaattacatatgccactgtgtgcaaattaacattcattgactgtatgtgtatgtaaatattggccagtaaacagagccatttacatcttcataaagagaataacatttccaactaaaattccttctaaaattggactcatatcaattggaagtatttcaaacaattactaaactgatttacttgracaaacatagaaaatattatctaagctatgtgta

SEQ ID NO: 411791 - DNA, 573 bp, Homo sapiens
ggcaaactaaatagaatcaggatgataggcttgtacatttatgcttttttacagaaacctttagagaagggttcagctatattgtatctcacctataaaaggtggttcacatttccaaatggataaaggctagaaaaatcaagaaaaagagctgtcatgagtacatgacagcaaacataatttggggcttagactcatgaccaaaytgaagttctgtaagaaagaaattaagagaaaattaatattgggcaggcaaaatccatgttggtatatccttatgcatataactagaaatatattgctaattttaataaacttactttcaaaaatgtattctgtgttattatactttaacatgtgttcagtaactgcgtgtgttcctaaaccttgtcatatttggatatgatttttagccataaatagtggggcaagatggaaaatctgaagttttacaaaaactaaatataagacaaaaacaatatatattcaactaaaaaggagttggcaacaaacttctctgattctatatcaaatcccaaaaaacaatggaatatgtatcagtaattattgact

SEQ ID NO: 411792 - DNA, 569 bp, Homo sapiens
ttaatccttaatttgtcaactgttgattcattttgctctgaaatcaatgacaataaaaaagaattgtacttctattttgtacttttttactcagagtaaatatttattgagatttaatttgtgccctgtaaactgctaaactcctaaatccattacgtctatttctcccatgaggtaaatatttgctcttcattgaggatatagccagcaaggcagaaactagtctaggacttacaaacaatctgattttattatgtggagcaggtaacatcagggtgaaaataactaagaaacaaagcaaggaatagtgatgaaagtattagcactagcagagawctaatcctttcctcatgatagtaaggtcaatgggagaaactaaagttccagagatccagtaatgagccatttcacagtagaattactgctggtgagaaatgggaccagggagaaatatgatctctgatgtaggtgtcattagaagcagagaaaacaaacaaacaaaaacagaagtggcccttctccttgccttttcctgcccttcaatctttggtttttgccttcccttgcct

SEQ ID NO: 411793 - DNA, 553 bp, Homo sapiens
tatactacatgtcttagcaatgcattgagagaggtaagaatacatacaatttagaaagaaagatgtctttcttcacagatattatattctgtgcagaaaataaagaagatatttgcaaaaaagttagtaaaattgtgtgtttatgtagatcacaggacataataataatatacagaaatccagtatattttgatagatttgcaatgaccattcataatctgagaaaaaaaaaaacaaggaaaataagggagtgctcaaatgctaagaaagacatgttaaaagagctgagaaacttgaatagttcctactagcaaaattagcaaaacygaatcaataaaataagtaaaggaacagatcatgggccactgaaagaaataggaatccatgggtccacgtgagataaatccatgaattaatgaatgaataaaagaaggaaacactatttttttcccacagagtgccaaccaataaaaggaaaagggttgatattgtatgttaaaaaattatcatttgaaaatcttcacattgtatttgattgagtgttgaggcatca

SEQ ID NO: 411794 - DNA, 574 bp, Homo sapiens
tataaagaaaatgaggagtacctctgcaatagagaaatctggaagacattacctttcaatatgatcaaaattaaaatcaccactgatgggaaaaattaatttttttttttacccggagaaatatggttagaaaagccttgcctcctggtgggggatttattgccaataatgcatgtcttgacayctcattatgagaaacaccagacaaatcgaaattgggagacattctaaaaatagaatccattggaatattaccttcaaaaaatgtttaggatgctatgaaggttgaagaaggactatggaatgcttctgatttaaagaagttaaagagacataggaaccaggaacaacacattatcctgaagtggattgttttttataaaaagcatcagggcagtttgtgaactagaatgggtcctctcttggtgattgttacatgacagctgtttgcatcactttacaacttaaagataaattgcttaaagataaattggcgtcgtttcatacaaacattaaagaaaatggtaatgtccaacaggcacagagtgcccgcctaattactgttccaggggtc

SEQ ID NO: 411795 - DNA, 574 bp, Homo sapiens
tataaagaaaatgaggagtacctctgcaatagagaaatctggaagacattacctttcaatatgatcaaaattaaaatcaccactgatgggaaaaattaatttttttttttacccggagaaatatggttagaaaagccttgcctcctggtgggggatttattgccaataatgcatgtcttgacatctcattatgagaaacaccagacaaatcgaaattgggagacattctaaaaatagaatccattggaatattaccttcaaaaaatgtttaggatgctatgaaggktgaagaaggactatggaatgcttctgatttaaagaagttaaagagacataggaaccaggaacaacacattatcctgaagtggattgttttttataaaaagcatcagggcagtttgtgaactagaatgggtcctctcttggtgattgttacatgacagctgtttgcatcactttacaacttaaagataaattgcttaaagataaattggcgtcgtttcatacaaacattaaagaaaatggtaatgtccaacaggcacagagtgcccgcctaattactgttccaggggtc

SEQ ID NO: 411796 - DNA, 574 bp, Homo sapiens
tataaagaaaatgaggagtacctctgcaatagagaaatctggaagacattacctttcaatatgatcaaaattaaaatcaccactgatgggaaaaattaatttttttttttacccggagaaatatggttagaaaagccttgcctcctggtgggggatttattgccaataatgcatgtcttgacatctcattatgagaaacaccagacaaatcgaaattgggagacattctaaaaatagaatccattggaatattaccttcaaaaaatgtttaggatgctatgaaggttgaagaaggactatggaatgcttctgatttaaagaagttaaagagacatagraaccaggaacaacacattatcctgaagtggattgttttttataaaaagcatcagggcagtttgtgaactagaatgggtcctctcttggtgattgttacatgacagctgtttgcatcactttacaacttaaagataaattgcttaaagataaattggcgtcgtttcatacaaacattaaagaaaatggtaatgtccaacaggcacagagtgcccgcctaattactgttccaggggtc

SEQ ID NO: 411797 - DNA, 574 bp, Homo sapiens
tataaagaaaatgaggagtacctctgcaatagagaaatctggaagacattacctttcaatatgatcaaaattaaaatcaccactgatgggaaaaattaatttttttttttacccggagaaatatggttagaaaagccttgcctcctggtgggggatttattgccaataatgcatgtcttgacatctcattatgagaaacaccagacaaatcgaaattgggagacattctaaaaatagaatccattggaatattaccttcaaaaaatgtttaggatgctatgaaggttgaagaaggactatggaatgcttctgatttaaagaagttaaagagacataggaaccaggaacaacacattatcctgaagtggattgttttttataaaaagcatcagggcagtttgtgaactagaatgggtcctctcttggtgattgttacatgacagctgtttgcatcactttacaacttaaagataaattgyttaaagataaattggcgtcgtttcatacaaacattaaagaaaatggtaatgtccaacaggcacagagtgcccgcctaattactgttccaggggtc

SEQ ID NO: 411798 - DNA, 523 bp, Homo sapiens
ccacttttcaattaatcctgcttaattcagagaatgtataaatatgtaattttgcatcacttttaaggcagccattttattttgaaatgcaactaacgttatatgcataaattcaataaatayaaagctgttttcaaaaattgaatgtttttacttgtaagttattctttcaataataataaagagatgatcactagtcattttatttttcatagttgaattgatttagttgaacttcattgggtgttcttatgttttagtcatgagtccatgctctttaacaagctaaaggaaaccataatatatgctaaaagatgtcagtttgtgaacaatttaatgaatatatagagttacaacatttttcccgattggatgttggggtttactataattctttgttactttatatgtgaatatactcactactcactatgtttatgtatgtaggaaacatgctagtgatgaaaattcaagcagttattaccctggttttctttcattaacaaaatacagaatagaaatt

SEQ ID NO: 411799 - DNA, 523 bp, Homo sapiens
ccacttttcaattaatcctgcttaattcagagaatgtataaatatgtaattttgcatcacttttaaggcagccattttattttgaaatgcaactaacgttatatgcataaattcaataaatacaaagctgttttcaaaaattgaatgtttttacttgtaagttattctttcaataatartaaagagatgatcactagtcattttatttttcatagttgaattgatttagttgaacttcattgggtgttcttatgttttagtcatgagtccatgctctttaacaagctaaaggaaaccataatatatgctaaaagatgtcagtttgtgaacaatttaatgaatatatagagttacaacatttttcccgattggatgttggggtttactataattctttgttactttatatgtgaatatactcactactcactatgtttatgtatgtaggaaacatgctagtgatgaaaattcaagcagttattaccctggttttctttcattaacaaaatacagaatagaaatt

SEQ ID NO: 411800 - DNA, 523 bp, Homo sapiens
ccacttttcaattaatcctgcttaattcagagaatgtataaatatgtaattttgcatcacttttaaggcagccattttattttgaaatgcaactaacgttatatgcataaattcaataaatacaaagctgttttcaaaaattgaatgtttttacttgtaagttattctttcaataataataaagagatgatcactagtcaktttatttttcatagttgaattgatttagttgaacttcattgggtgttcttatgttttagtcatgagtccatgctctttaacaagctaaaggaaaccataatatatgctaaaagatgtcagtttgtgaacaatttaatgaatatatagagttacaacatttttcccgattggatgttggggtttactataattctttgttactttatatgtgaatatactcactactcactatgtttatgtatgtaggaaacatgctagtgatgaaaattcaagcagttattaccctggttttctttcattaacaaaatacagaatagaaatt

SEQ ID NO: 411801 - DNA, 523 bp, Homo sapiens
ccacttttcaattaatcctgcttaattcagagaatgtataaatatgtaattttgcatcacttttaaggcagccattttattttgaaatgcaactaacgttatatgcataaattcaataaatacaaagctgttttcaaaaattgaatgtttttacttgtaagttattctttcaataataataaagagatgatcactagtcattttatttttcatagttgaattgatttagttgaacttcattgggtgttcttatgttttagtcatgagtccatgctctttaacaagctaaaggaaaccatawtatatgctaaaagatgtcagtttgtgaacaatttaatgaatatatagagttacaacatttttcccgattggatgttggggtttactataattctttgttactttatatgtgaatatactcactactcactatgtttatgtatgtaggaaacatgctagtgatgaaaattcaagcagttattaccctggttttctttcattaacaaaatacagaatagaaatt

SEQ ID NO: 411802 - DNA, 621 bp, Homo sapiens
atattattaggtgtgtattagtccattattgcattgctataaagaaatacctgagattgggtaatttataaagaaaagaggtctaactgactcacagttctgcatgctgtacagaaagaatgttgcatctgccgggcatctggggaggcctcatgaaatgtataaccatggtgggaaaatgaagagggagctggtgcttcatatagctgggagcaggaagaaaagtgagaggtggggaggtgctacacccttttaacaaccagatttcmtaataactcactcactcactatcataagaatagcaccaaggaaatggtattaaaccattaaaaagaaaccactccacaatccaataacctcccatcaggccccacctccaacactgggtattacaatttgacatgagatttggttggggacatagatccaaaccatattattttgccctagtccctcccaaattttatgtctttctcagtttgcaaaatataatcatgccttcccatcagtcccccaaagtcttaactcacttcagcattaactcaaacatccaaagtctaaagtcttatctgagatgaggcaagccccttctgcctaagaccctgtaaaattaaaataaaa

SEQ ID NO: 411803 - DNA, 550 bp, Homo sapiens
cctccaacactgggtattacaatttgacatgagatttggttggggacatagatccaaaccatattattttgccctagtccctcccaaattttatgtctttctcagtttgcaaaatataatcatgccttcccatcagtcccycaaagtcttaactcacttcagcattaactcaaacatccaaagtctaaagtcttatctgagatgaggcaagccccttctgcctaagaccctgtaaaattaaaataaaaaaaaactcccaagatataatgtataatgggggtacagggattgggtaaatactcccatttcaaaagggagaaattggccaaaagtaaggggctacgggccccatgcaagtctgaaacccagtaggaaagttattaagtcttaaagcttaacaatctcctttgatgccatccagggcataccactgcaaggattgagctcccaaagccttgtgctgctccactcctgtgactttgcagggttcagctcctacagctgctctcaagggctggtgttgagtgcttgcaccagttccaggcacacg

SEQ ID NO: 411804 - DNA, 600 bp, Homo sapiens
aactgttttactaaacaatattacagaattctgaatggatgctgattaagcagcaaataaacaaaactgtttatttaccagtttggtggctgttatgctaattagatcatctgtttaaaatgtgtscatatggacaatttttctgtaaatgttttctttatctccacattgtgtggtagtattttcataggaccaactagaaattaacttaaaaattagttatttaaagatgacaatagaaggttttgaactttgagttccaaaaggcaagcaaatatttctgaaataaaatatattatatatatttaatttctaatttaatttacatataaaatatttttaaaattcatatgaatttgagatattttcacattgattggactgtttttgtacctcattttgcttggtcacactaaagtgagattcatcatcttgtggcaccaaaggaaaactagtgtgattataaggaaattattatagttagacaactgtgcattaatttcatcattaaggaccaaacatgtatacagatataaatacttttcttaatacattacttgcaacatatgcacaattatgtaacaatgatggtgaactaag

SEQ ID NO: 411805 - DNA, 517 bp, Homo sapiens
cacatgattttataattataaataaaatagtaatatatcttttctgctgaaattaatgcaaaccaattacaaggaatttattagtttttattttagttayttcatatatattagcacctaagcctcaaagattcactatgtaattgtgtaaattagtagtagggttacctgaatctggcttaataatcaattaatcagtatttatctttaaacattttttcctttatgaattgtgtcacacttttaaagagcccttcctacattacaagcatatataaaatatattcttatactattttagaataatttcagaagttagattgttttctagtttttagtgttttcattgataccaaatttatttttatgtacataaatgtatgattttaagttagattatttcaaactggtatccctgtaattatctgaacaaaatttttaagtagtcacattgacttttttttcaaaagttagttttaagctatttgataacatatggatatacttcactaaagtt

SEQ ID NO: 411806 - DNA, 633 bp, Homo sapiens
gcattgcaattagctttaaaaagatggaacggcattgtaaggacagaccatgaatctaagcccttaggttgaatacttaggttgaataaaattgttggaataagtggctatttgatgtatgtaatgaaagggattcttacttggcaggtattattaggagaaaaaaaaagagagagaaagttgaaggagaggggaaaactgccacagcaggttaagcaacttgctttaaaataattgggattagtaagtkttcagagatagaactggtgatgaaagagtgagactggaattaggaattaatttgtaacactaatgttgcaggttgggtcctggttatgagactaagcagatgctcattctttggagctataactctgaccagtgtcacattaacagatttggaaaatatgagattaactatgaaggtacagaaaataaaggtattaaaattctttctatattttagatctaattgttaataatatagtatatacacatccatactatattatatatatatatataacatatataataacatatatatgcgaaaagctatggtaaatagaaaacattagctgggcatggtggtttacgcctataatcccagcactttgggaggtggaggcagga

SEQ ID NO: 411807 - DNA, 633 bp, Homo sapiens
gcattgcaattagctttaaaaagatggaacggcattgtaaggacagaccatgaatctaagcccttaggttgaatacttaggttgaataaaattgttggaataagtggctatttgatgtatgtaatgaaagggattcttacttggcaggtattattaggagaaaaaaaaagagagagaaagttgaaggagaggggaaaactgccacagcaggttaagcaacttgctttaaaataattgggattagtaagttttcagagatagaactggtgatgaaagagtgagactggaattaggaattaatttgtaacactaatgttgcaggttgggtcctggttatgagactaagcagatgctcattctttggagctataactctgaccagtgycacattaacagatttggaaaatatgagattaactatgaaggtacagaaaataaaggtattaaaattctttctatattttagatctaattgttaataatatagtatatacacatccatactatattatatatatatatataacatatataataacatatatatgcgaaaagctatggtaaatagaaaacattagctgggcatggtggtttacgcctataatcccagcactttgggaggtggaggcagga

SEQ ID NO: 411808 - DNA, 528 bp, Homo sapiens
gagactggaattaggaattaatttgtaacactaatgttgcaggttgggtcctggttatgagactaagcagatgctcattctttggagctataactctgaccagtgtcacattaacagatttggaaaatatgagattaactatgaaggtacagaaaataaaggtattaaaattctttctatattttagatctaattgttaataatatagtatatacacatccatactatattatatatatatatataacatatataataacatatatatgcraaaagctatggtaaatagaaaacattagctgggcatggtggtttacgcctataatcccagcactttgggaggtggaggcaggaggatacttgagcccagggatctgagactagcctgggtaatatggcaagaccatgtctctacaaaaagtaaagaaaagtagctgggcctagtggcacacacctgtcatcaaagctactctggaggctgaagtgtgaggatcacttgaattcaagaggtcaaggctgtagtgagct

SEQ ID NO: 411809 - DNA, 595 bp, Homo sapiens
tcattaggctttaatttttaaatatrataataaaatgagatattgaatattgctaaaatttttaaatatgttatggtaacagcatacatggaatattatacatttattcaaattatgttttaaaaataatgacataaacatacttcttatacattatgattgaaatgctgaggttttatttaatacataaccaataaagctaagaaacccttaaaaatcaagatgtactccttaaataaaatattgagtgagtacttataaggcaataagttttgtaaaatatgctaaaaatttttaaaaattctctacatattcgagacatacttgaagatactgtgggttttgttccagaccatcacaataaagcaaaaatcacaataaaacaagtcaacaaaaatttttggtttctcaatgcatataaaagttatgtttacattgtactgtaaagtgtgtaagagtattatgtttaaacaaataatgtacttaccttaattttaaaaagatttattgctaagtaatgttaatcatctgagccttcagtgagtcataatgttttggttgctggagggtcttgcctcagtactggtggttgctg

SEQ ID NO: 411810 - DNA, 465 bp, Homo sapiens
gttgaccctaaatgtctgcagacatttttgcagaaatgttaagggtaaaagtgacacagccaatagcaaagaagtgccagaaaatacgtaagcaaactgtgacctctttttacctcttgattgacttttatgttaaataatgcatttacatgaggcttgaaagaatttgaaatagtatttggcagtgaagaatttactcctcccagactttcatccaagagaaatttccaggaggagggttgatggtgggttacctccaactcaaccacttcagagctactacagtggtaatgcatgttgaagaaaagagtcaaactctgtgaaatatttgaagagatttattctgaggcaaatatgagtgacctcggcctgtcacacagcccaggagatcttgagaacatgtgccaaggttgttggrctacagcttggatttatacatgtgagggagacataagacatcaatca

SEQ ID NO: 411811 - DNA, 537 bp, Homo sapiens
gcaggcctaggaccccaaaagtttgctgatcaagccagcctggcaaactggtcagtaacaaaccttgctgcagttcttcatcttgttttatgtccttaggagcttgaccttgtaaccaattgataatactttcttttggcctctgccattttacaatggtggcctgggtttaatcctggcttagggaatgagtatattgtggctaatatctgtgtgacttttaccatttgctgattctcttcccctctataaacaacttctagcttcctttcttaaatcttcctttgtctgaaccaactttaaagatcttagattctgtaaaaactgcttagcacctctttgaaaataacttttacacttacagttaagtcataatcttagttgaggcttgttggtttcacctgtgaggttatttttaataaagttctaaagccagaaatattgrctgctcggcatggctaaagctggataatagatttgaaacgattttcttagagcacagctgaattaaaagtggatatccaagttataggtata

SEQ ID NO: 411812 - DNA, 370 bp, Homo sapiens
gggaaaacaacaccctctgttttcctcatgaaaccccaggaattaaaagtggatagatccttctcaaaatctatctctgtcttccagctatgcctgtttattaggccctagaaactgtatgctgtcctaggccctgctcttgaagggcttcacccagaggccaataatctattcagaagattggcaaatgaaaaatcttacaagtactgaatttgcttttgttcatctgtgtaattttatatttcttatgggcgtgatgtttatataaaaaagctctaggaaaataagcacwtagatcaaatattttttgaagaaaaataaaagctgtaataccttttgagttcacatgactataatctttaagaaataa

SEQ ID NO: 411813 - DNA, 588 bp, Homo sapiens
tggaattctattttataatatcaagtgctttgaacctctaacatatttaacaggcttcccaaaatcaaacttcagtttcaaaattgtctttcctggtccctggaacatccaaaagagaagaaaactggtttttttgaaatgtttagttatatggtatttccaaagttatatttaatctgctttaggttatattttagtgaataatattaatatgtttcaaaattatatgagatttctaaaattctaatgtctgagtatatgctatcaatcataattaaggttattatgtttagttattgtaaaccctagaaatgactaaatttctttgtcatttgtattcttgacagtaactaccttagacatttcatcattcacagacaaatgycttgttttgatcctactcaaaagatgatttataatcagctataggattttgacaagtgttctcaaatgcaagattccattaactctggagattatgacattgaaaaaaatacagtactcatgaagaactgaaatgttcatgaatatctagcagaacaagagaacagaatggattggactaatagaaaacaagtattattttta

SEQ ID NO: 411814 - DNA, 588 bp, Homo sapiens
tggaattctattttataatatcaagtgctttgaacctctaacatatttaacaggcttcccaaaatcaaacttcagtttcaaaattgtctttcctggtccctggaacatccaaaagagaagaaaactggtttttttgaaatgtttagttatatggtatttccaaagttatatttaatctgctttaggttatattttagtgaataatattaatatgtttcaaaattatatgagatttctaaaattctaatgtctgagtatatgctatcaatcataattaaggttattatgtttagttattgtaaaccctagaaatgactaaatttctttgtcatttgtattcttgacagtaactaccttagacatttcatcattcacagacaaatgtcttgttttgatcctactcaaaagatgatttataatcagctataggattttgacaagtgttctcaaatgcaagattccattaactctggagattatgacattgaaaaaaatacagtactcatgaagaactgaaatgttcatgaatatctagcagaacaagagaacagaatggattgractaatagaaaacaagtattattttta

SEQ ID NO: 411815 - DNA, 550 bp, Homo sapiens
gttcatgaatatctagcagaacaagagaacagaatggattggactaatagaaaacaagtattatttttaacctttttgcttaaaactttccttgctttgtttttctgagtcaaggatacttattttgaattatttaaagcctttaataattgagtaaactatactcctgtgaacaaaatttgaaggacgtttgtttctctctgcctggctttgccagaatttggaaactatttgtgagaatatttaatttatggcaatacagttattttcatcagtgtaataagaatacattttcttttgcaacaggacacaattgaagaaactggtggttttaccaaggcttttactggaagggtatatgttcctttaagtaattaagctggacttgccaataaaagtctcttgggaaaactggctacataccttgtcaacacagtccttgtacaaggttcctaacccgtgggaagtaaagcatgtcactttttaacaggcctaggagcctgytaaaaagctcctgggcctgttaaaaagcttgttcttgagacatcaa

SEQ ID NO: 411816 - DNA, 551 bp, Homo sapiens
aagaagtcaggcctttaggagtaattaggccatgasgactctgtactcatagatgggattagtgcattacaaaagggctgaagggaactagctaatgtaaggacacagcattcaagttaccattttagaagcagaaactgggacctcacttggtgccaaaactgccagaaccatggttttgaacttttcagcctcctggactgtgagaaacaagtttctgttcttatcagtctcagctattttgttacagaagcacaagcgaactgagacctgagatgggaatgtttatgtgctaggtatggagctaatttctgaataaataaagatgaatacattctatgacctcatcatctagtgcctgttacagtgacacagtggatattttttcttgccttcttattactcatttttgctctcctcactaaatattgaggaaaacatgaatgcatcatcagtttttccactgatacaactgtttaagaagtacatatgacattatattttttctttctgtattctgtagacttacctgtaaagtctaaggctaacat

SEQ ID NO: 411817 - DNA, 551 bp, Homo sapiens
aagaagtcaggcctttaggagtaattaggccatgaggactctgtactcatagatgggattagtgcattacaaaagggctgaagggaactagctaatgtaaggacacagcattcaagttaccattttagaagcagaaactgggacctcacttggtgccaaamctgccagaaccatggttttgaacttttcagcctcctggactgtgagaaacaagtttctgttcttatcagtctcagctattttgttacagaagcacaagcgaactgagacctgagatgggaatgtttatgtgctaggtatggagctaatttctgaataaataaagatgaatacattctatgacctcatcatctagtgcctgttacagtgacacagtggatattttttcttgccttcttattactcatttttgctctcctcactaaatattgaggaaaacatgaatgcatcatcagtttttccactgatacaactgtttaagaagtacatatgacattatattttttctttctgtattctgtagacttacctgtaaagtctaaggctaacat

SEQ ID NO: 411818 - DNA, 551 bp, Homo sapiens
aagaagtcaggcctttaggagtaattaggccatgaggactctgtactcatagatgggattagtgcattacaaaagggctgaagggaactagctaatgtaaggacacagcattcaagttaccattttagaagcagaaactgggacctcacttggtgccaaaactgccagaaccatggttttgaacttttcagcctcctggactgtgagaaacaagtttctgttcttatcagtctcagctattttgttacagaagcacaagcgaactgagacctgagatgggartgtttatgtgctaggtatggagctaatttctgaataaataaagatgaatacattctatgacctcatcatctagtgcctgttacagtgacacagtggatattttttcttgccttcttattactcatttttgctctcctcactaaatattgaggaaaacatgaatgcatcatcagtttttccactgatacaactgtttaagaagtacatatgacattatattttttctttctgtattctgtagacttacctgtaaagtctaaggctaacat

SEQ ID NO: 411819 - DNA, 594 bp, Homo sapiens
taatccacatcaaaagaaatacacacacacacacaaatatgggcaactttcttcagaaactatgaaagcttggagacaatggagcaatcataaataactaaataagaaaaaacagctttatctacatttttataacaagtagaaaattttaagcactaaagtaaaatagggttcgtttatttttagaaaattaaaaataggtttggaactagggtaaagtaaatgacacaactaggtccgaaaacctaaagagctactcactttcagagttatatatttgagatcgagagtgcaagacttgtgtcttgtgtgacccgagagagtgcctcattaagtttttcaccagaggtaatttgctcatctcaacgttgtctcagcactgaacaaaatctaaagaatttcattgtcagccmtcctccattgtcatttataagaaagattcctaaggcagaagtaaaattttatgagatgtatatgtgtgtctgcagaaaaaaactggcaatgtattatactgcatatcaagtgatatactattatttgaaagtaggctgtgaagagttaagtatttatattttaaaactgaaagtagaagtt

SEQ ID NO: 411820 - DNA, 594 bp, Homo sapiens
taatccacatcaaaagaaatacacacacacacacaaatatgggcaactttcttcagaaactatgaaagcttggagacaatggagcaatcataaataactaaataagaaaaaacagctttatctacatttttataacaagtagaaaattttaagcactaaagtaaaatagggttcgtttatttttagaaaattaaaaataggtttggaactagggtaaagtaaatgacacaactaggtccgaaaacctaaagagctactcactttcagagttatatatttgagatcgagagtgcaagacttgtgtcttgtgtgacccgagagagtgcctcattaagtttttcaccagaggtaatttgctcatctcaacgttgtctcagcactgaacaaaatctaaagaatttcattgtcagccatcctccattgtcatttataagaaagattcctaaggcagaagtaaaattttatgagatgtatatgtgtgtctgcagaaaaaaactggcaatgtattatactgyatatcaagtgatatactattatttgaaagtaggctgtgaagagttaagtatttatattttaaaactgaaagtagaagtt

SEQ ID NO: 411821 - DNA, 504 bp, Homo sapiens
acaacaatagtgaaattaggccagttaataaccttataatgggctctaagtgttcaagtgtaagaaagagtttcatgtgtgttactttaaatcaaaagctggaaatacttaagcctagcaaggaagacatgtcaaaagccaacttagatctaaagctagaactcttgtttttaacagttagccaagttgtgaatgcaaagaaaaaattcttgaaggaaaycaaaacttctactccagtgaacacaggaacagtaagaaagagaaacagccttattgctgagacttggaatgttttagtggtttggccagaaagtcaaatcagccacaacattatcttcagccaaaacgcaatctagaccaaagctctaatgctcttcaattctatgaaggctgagagaggtaagagaaaactgcagaagaaaagttggaagctgacaaaggttggttcttaaggtggaaggaaaggagccatcttaacaacataaaagtggaaagtgaaacagt

SEQ ID NO: 411822 - DNA, 504 bp, Homo sapiens
acaacaatagtgaaattaggccagttaataaccttataatgggctctaagtgttcaagtgtaagaaagagtttcatgtgtgttactttaaatcaaaagctggaaatacttaagcctagcaaggaagacatgtcaaaagccaacttagatctaaagctagaactcttgtttttaacagttagccaagttgtgaatgcaaagaaaaaattcttgaaggaaaccaaaacttctactccagtgaacacaggaayagtaagaaagagaaacagccttattgctgagacttggaatgttttagtggtttggccagaaagtcaaatcagccacaacattatcttcagccaaaacgcaatctagaccaaagctctaatgctcttcaattctatgaaggctgagagaggtaagagaaaactgcagaagaaaagttggaagctgacaaaggttggttcttaaggtggaaggaaaggagccatcttaacaacataaaagtggaaagtgaaacagt

SEQ ID NO: 411823 - DNA, 504 bp, Homo sapiens
acaacaatagtgaaattaggccagttaataaccttataatgggctctaagtgttcaagtgtaagaaagagtttcatgtgtgttactttaaatcaaaagctggaaatacttaagcctagcaaggaagacatgtcaaaagccaacttagatctaaagctagaactcttgtttttaacagttagccaagttgtgaatgcaaagaaaaaattcttgaaggaaaccaaaacttctactccagtgaacacaggaacagtaagaaagagaaacagccttattgctgagacttggaatgttttagtggttyggccagaaagtcaaatcagccacaacattatcttcagccaaaacgcaatctagaccaaagctctaatgctcttcaattctatgaaggctgagagaggtaagagaaaactgcagaagaaaagttggaagctgacaaaggttggttcttaaggtggaaggaaaggagccatcttaacaacataaaagtggaaagtgaaacagt

SEQ ID NO: 411824 - DNA, 504 bp, Homo sapiens
acaacaatagtgaaattaggccagttaataaccttataatgggctctaagtgttcaagtgtaagaaagagtttcatgtgtgttactttaaatcaaaagctggaaatacttaagcctagcaaggaagacatgtcaaaagccaacttagatctaaagctagaactcttgtttttaacagttagccaagttgtgaatgcaaagaaaaaattcttgaaggaaaccaaaacttctactccagtgaacacaggaacagtaagaaagagaaacagccttattgctgagacttggaatgttttagtggtttggccagaaagtcaaatcagccacaacattatcttcagccaaaacgcaatctagaccaaagctctaatgctcttcaattctrtgaaggctgagagaggtaagagaaaactgcagaagaaaagttggaagctgacaaaggttggttcttaaggtggaaggaaaggagccatcttaacaacataaaagtggaaagtgaaacagt

SEQ ID NO: 411825 - DNA, 263 bp, Homo sapiens
cccaatcttcaatttctcaatatacagggagagttatcctttctttggattatcctttcactgtgtcttctggaaactgagagaaagcttgggataagtcagattttattttttcttttgtcagggatcagcatcctcagcttcttgtcaatgrttaaaaatttttgtctgcagttagtttttatttgtgtatgtgtttttgttttttgtttgtttgttttgtaaagaatttagtttagttcctcttactgtatcatggcgaa

SEQ ID NO: 411826 - DNA, 497 bp, Homo sapiens
agtgtaccccttcaaaaattttgaaaaattaagagaaatcggtagaacagctgtattatcatttacaaaaatgtttctctacctatagaacaaacaattactttgtcctctaatttccaaataacttacagaacatttatttcctactstcactggaatggcaggctggcaggctgagttggtagcccaattggttcctcacatcaaaagattccctttattatttccttattttctctttaattctggcactccttcatgattgaacttacagatgttcttttgtctgctaattttcgagtaagcctgtgctctctataactttcagtctcaatatccttctaccatcagccttttgtctaaacattcttattctggtttgtttccctgaactcttgacatcaatctctgttccttcaatattctgtttcttctactggaagcactctttcccagatttcacccactttactcttctcaatctctgtgtctgagtt

SEQ ID NO: 411827 - DNA, 649 bp, Homo sapiens
attggtgatgcttgctggtttatttacttgttggttttcagaaggaaagaactataatagactgataactacaaattaacygaaattgtatataccccgcctcctcatgattaggcaggtgaagatggggtgagcaaaatagtagcaacccattgaaagggctgttgaaggggttatattttccagacatatcaggagttcaagttgttactaaaaatgcaaaaagagtttgctaatcagaacataagcattcaatatctatcactatcaagatgtgagataagggataggtaattgattctgttggaaaagcagagtcatataatgatgaaagtctgataatacctctgtgacttgaaagggacagaagtaaacaggaacatgaagcaaagagttttagttctgatagtctctttgaggaggaggaataatggcactattgtcattttttgaatatttcccctagtatttttagtgatttcacaaatcgttcgaatgccttaaaggactaccactctggaatatcactcaaagcaatgttcttgtgaggattaggcttaatgaaaagtcctgtaatgcttggacacatggaaagctgaccagtattagataaaacaaaattgttatagttgggaattgttactatcgg

SEQ ID NO: 411828 - DNA, 627 bp, Homo sapiens
tgctaatcagaacataagcattcaatatctatcactatcaagatgtgagataagggataggtaattgattctgttggaaaagcagagtcatataatgatgaaagtctgataatacctctgtgacttgaaagggacagaagtaaacaggaacatgaagcaaagagttttagttctgatagtctctttgaggaggaggaataatggcactattgtcattttttgaatatttcccctagtatttttagtgatttcacaaatcgttcgaatgccttaaaggactaccactctgkaatatcactcaaagcaatgttcttgtgaggattaggcttaatgaaaagtcctgtaatgcttggacacatggaaagctgaccagtattagataaaacaaaattgttatagttgggaattgttactatcggtattttcatcatcattttgcaacatttatatttttttcttaatgaaatatgttgatttttcagtttttaaagtaaaattgtattacatttaaaaaattaatagagaactattctgttgaagacaatgaatgcatattatgcttaacatgttaatatgtgtttcacattatttatagattttgtctactgcattgaaattttctagaat

SEQ ID NO: 411829 - DNA, 506 bp, Homo sapiens
ttcaaaattatatgaataaaagatcaatttaatgtgcaagatagacaaatagactacagtataacagattatatattgtcattgatatggtttcagtttccatatcacagaaaagtaaaaaatatcacttattgagttctggtgtactrtctaagaaaaatattcacaattatctgaaaactccattaaatgttccttccttttctatgtagatatatgaattaagctatgttttcatcatgtaaataaaccaaaacaacatattttaaaagattgagtgcacaagaagattttagaaatttactgttattaagccagaaattaaagatttgcaaagtcattaaaaatcatcacttttccattaatgtttgttttcaaaaataattgtttctttgcaaaaatgttatttctgttttttatttttaaactttttatttaaaatattctgaccaaaataaaattgaacaagattataatattattcaaatattcatttggtataccac

SEQ ID NO: 411830 - DNA, 424 bp, Homo sapiens
ttaaaattaactgtagacattgtggttggaagtgaatggctgggtatttcctcctttactctttactctttaactgcaaaaatgattatttttctctccctttcagataaatcctctattttggtgaactggtttttgtttttgtttgtttgtttgttygtagctggacttatcttctcatattctacattgatctttgtttctcagcagccttttgtcctgttttggttacagatgtatattagatttatgtaaaactaaattgactttctatttctcctttaccttggcaatctgggttagtttctgaggcagacaaaattataactatatttacatttttctataataaaacctcaaatttcattcttaaactcagaagataatatttaaaaagtgacaaggtaaaggtggaaggaaacaa

SEQ ID NO: 411831 - DNA, 424 bp, Homo sapiens
ttaaaattaactgtagacattgtggttggaagtgaatggctgggtatttcctcctttactctttactctttaactgcaaaaatgattatttttctctccctttcagataaatcctctattttggtgaactggtttttgtttttgtttgtttgtttgtttgyagctggacttatcttctcatattctacattgatctttgtttctcagcagccttttgtcctgttttggttacagatgtatattagatttatgtaaaactaaattgactttctatttctcctttaccttggcaatctgggttagtttctgaggcagacaaaattataactatatttacatttttctataataaaacctcaaatttcattcttaaactcagaagataatatttaaaaagtgacaaggtaaaggtggaaggaaacaa

SEQ ID NO: 411832 - DNA, 631 bp, Homo sapiens
tgaggacattaagactgttgctatattcctcttcaatttgttgccttcacctattgtttcttaatggccaaaaacactaagctgctaggaaaattcttgtatgaacaagcgcaatatttacttcatattatatcattctattttcaaktacacattagttatgttaataactctattcgttcatttgatatcaaattataatgttttctatttcttttcttacttattattatctttgttttgcaagtaataaataagtggcagtccccttaatacttctcccagtattatttcaactcccatagaacacaacaattaacagtccttttggtatattgttttgggcaattgtctgttttcagaagcattgttgttaaaacaaactaccacaaccttggtggctgaagcaacatatttactatcttacagtcctgtacatcagagttcagacatgggtctcactggctaaaataaatatgtcagcagggctgattctgttctggagagtacaggggataatctgttttcttgcctttttcaccttctggcatctgcttgcatatcgtgactcatggcccccttcttctatcttcgaacccagaattagtgggtctaatttttctcacacaac

SEQ ID NO: 411833 - DNA, 631 bp, Homo sapiens
tgaggacattaagactgttgctatattcctcttcaatttgttgccttcacctattgtttcttaatggccaaaaacactaagctgctaggaaaattcttgtatgaacaagcgcaatatttacttcatattatatcattctattttcaagtacacattagttatgttaataactctattcgttcatttgatatcaaattataatgttttctatttcttttcttacttattattatctttgttttgcaagtaataaataagtggcagtccccttaatacttctcccagtattatttcaactcccatagaacacaacaattaacagtccttttggtatattrttttgggcaattgtctgttttcagaagcattgttgttaaaacaaactaccacaaccttggtggctgaagcaacatatttactatcttacagtcctgtacatcagagttcagacatgggtctcactggctaaaataaatatgtcagcagggctgattctgttctggagagtacaggggataatctgttttcttgcctttttcaccttctggcatctgcttgcatatcgtgactcatggcccccttcttctatcttcgaacccagaattagtgggtctaatttttctcacacaac

SEQ ID NO: 411834 - DNA, 550 bp, Homo sapiens
gtgtgattttgttaatggaaaacataatatgattatctagatgttttaccccaaagaatcctattactgaagaatatttattagatgtagagaattacttataaaggtttaatttttcagataatattgctaaataaaaccctcctttttagaaaagaataaaataaaaatctaaaactctagggcaaagtcaaaggagataaaggtattatgaaggtatctgccttcagaaacccccttctctcatgtctcagtgcctctgtgtagcttccaaaccctacaggatagtacaggagagcagggccaggctgcaactggctagtggggcagacytactaccagccctggcacacgggccactgctttccacccaaattccaccaggtttccttttggtggaagtagaaccactaaaagctttcttatatataaataatataagcagactttactgctggaataaaaaaacagaagatattagtatattttacataaaaatatattaattgaaaattatattttatatggacatgtaattaacattaatata

SEQ ID NO: 411835 - DNA, 550 bp, Homo sapiens
gtgtgattttgttaatggaaaacataatatgattatctagatgttttaccccaaagaatcctattactgaagaatatttattagatgtagagaattacttataaaggtttaatttttcagataatattgctaaataaaaccctcctttttagaaaagaataaaataaaaatctaaaactctagggcaaagtcaaaggagataaaggtattatgaaggtatctgccttcagaaacccccttctctcatgtctcagtgcctctgtgtagcttccaaaccctacaggatagtacaggagagcagggccaggctgcaactggctagtggggcagacctactaccagccctggcacacgggccactgctttccacccaaattccaccaggtttccttttggtggaagtagaaccactaaaagctttcttatatataaataatataagcwgactttactgctggaataaaaaaacagaagatattagtatattttacataaaaatatattaattgaaaattatattttatatggacatgtaattaacattaatata

SEQ ID NO: 411836 - DNA, 569 bp, Homo sapiens
tgggatatgtgcattcctggtgtttaatagtcatattttccagtaccaactatttcctggagcaaatatttttacctggcataagattattcaatacagagacaggaaagcatgcctgttcaaagtattatttaacctagggacaggaaaatatgtttgttctcagtattggtacaggtagggacaggggattaggttggctttacttttcattattatttttgtgttgttgtttcttattcttctgctctgcacttatttttgtatctccattacacttgtattgaatttcttttacccattcccctgtgtctaacctttcacttatcatcttcttctgagactcatacttgtrttctgaaaggatttcttgtgctaatactctcattcaatatatctattttgtacaggattcaatttgttatttactctcaccacagcatttttaacccctgtaatcaggtttttgttttgtatttttgttttaataataaaacaatatttcttgatctcagacattctaaccttttgaatgagaggatcacttagttaaccaaactatatacttt

SEQ ID NO: 411837 - DNA, 571 bp, Homo sapiens
tgtaaatataaatattggccatgtaaacaattgtaataatgtcattctgagtttacaatttaaagatgagtrtacaatctcataatgccattcaggaagaagggaaatagaatggaaatgttctaagttaattacattctccttgaaggggcaaaagtaataatttatattccacttcgaatatttaaagatgcatgttttcatctccagggcaattactataataaaaaatgtaaaattgttataatatacaaagaaatgtaatattaaaatatattctaagatgagaaaaaataacatgaagaaaatttacaaaccagtttatgacagtagtttgttcatttaaaagaagtggatgaatctctataaaaataatacttctcatcctgaaaaaaaagactatagggtgcaaattactagatttatacaatttaaaaattctatatgtaaataaaatattttccacaattaagcatacacataagataggtgcaagcagttgcaatcttgggcatttaccccagataaatgagtactgttttttaaagaaaaactccatacatgaatattt

SEQ ID NO: 411838 - DNA, 571 bp, Homo sapiens
tgtaaatataaatattggccatgtaaacaattgtaataatgtcattctgagtttacaatttaaagatgagtgtacaatctcataatgccattcaggaagaagggaaatagaatggaaatgttctaagttaattacattctccttgaaggggcaaaagtaataatttatattccacttcgaatatttaaagatgcatgttttcatctccagggcaattactataataaaaaatgtaaaattgttataatatacaaagaaatgtaatattaaaatatattctaagatgagaaaaaataacatgaagaaaatttacaaaccagtttatgacagtagtttgttcatttaaaagaagtggatgaatctctataaaaataatacttctcatcctgaaaaaaaagaytatagggtgcaaattactagatttatacaatttaaaaattctatatgtaaataaaatattttccacaattaagcatacacataagataggtgcaagcagttgcaatcttgggcatttaccccagataaatgagtactgttttttaaagaaaaactccatacatgaatattt

SEQ ID NO: 411839 - DNA, 571 bp, Homo sapiens
tgtaaatataaatattggccatgtaaacaattgtaataatgtcattctgagtttacaatttaaagatgagtgtacaatctcataatgccattcaggaagaagggaaatagaatggaaatgttctaagttaattacattctccttgaaggggcaaaagtaataatttatattccacttcgaatatttaaagatgcatgttttcatctccagggcaattactataataaaaaatgtaaaattgttataatatacaaagaaatgtaatattaaaatatattctaagatgagaaaaaataacatgaagaaaatttacaaaccagtttatgacagtagtttgttcatttaaaagaagtggatgaatctctataaaaataatacttctcatcctgaaaaaaaagactatagggtgcaaattactagatttatacwatttaaaaattctatatgtaaataaaatattttccacaattaagcatacacataagataggtgcaagcagttgcaatcttgggcatttaccccagataaatgagtactgttttttaaagaaaaactccatacatgaatattt

SEQ ID NO: 411840 - DNA, 510 bp, Homo sapiens
aacctatataagatgtagtatctagtattattataaaaatatcaatatagttctctcctatgatttgyctcctccaaagccaagcacatactgcattaatattcaagtctggtataagtcttagtgaatctctcaatccacatcattattttgttcatatccacactcttgatatggacttgatagataaggctaagaaatacaaaagaatagatttgtttatgtagagattattttaagcttgctggaagcagaaaaatcccagacgaggaaatgagaagcagacaggcaatctgtgtgcctctcatcttccagcagttcctagaggttacgtataagaagattagaaagtaaaactgaattgcaattttaaagctttctaatgaaaacaaatttactgtgtttgattgcttatatttgttgcttatatcggtttttgaagacagcatactatggaatgatgattcaatacaatggaattatttactatataaattgtttgggactgtt

SEQ ID NO: 411841 - DNA, 510 bp, Homo sapiens
aacctatataagatgtagtatctagtattattataaaaatatcaatatagttctctcctatgatttgtctcctccaaagccaagcacatactgcattaatattcaagtctggtataagtcttagtgaatctctcaatccacatcattattttgttcatatccacactcttgatatggacttgatagataaggctaagaaatacaaaagaatagatttgtttatgtagagattattttaagcttgctggaagcagaaaaatcccagacgaggaaatgagaagcagacaggsaatctgtgtgcctctcatcttccagcagttcctagaggttacgtataagaagattagaaagtaaaactgaattgcaattttaaagctttctaatgaaaacaaatttactgtgtttgattgcttatatttgttgcttatatcggtttttgaagacagcatactatggaatgatgattcaatacaatggaattatttactatataaattgtttgggactgtt

SEQ ID NO: 411842 - DNA, 478 bp, Homo sapiens
cagctactggggaggttgaggcaggagaattgcttgaactcggaaggcagaggttgcagtgaaccaaggtcgtgccactgcactccagcctgggcgacagagtgaaactccatctcaaaaaaaaaaaaaaaaattaaaaataaataaataaataaataaatgaaataatatgtgagtgagactaactctgttttgtatttcttgggtaccctaagcttgactgctgattatttttgcttcttactctgtagacctggaaataacttctttatctctccttytccttcctctcattttatcttttaaccactgtcatagtgataagtccaaagtttaattgcatgcattcactcacccacacacacagactctagaaaacttatttattaattgagagaaagcacaatttatatagagtggtaaaaaaaaaagaaaagagaaggctggaggaagccattgcattgaaaactgactatat

SEQ ID NO: 411843 - DNA, 649 bp, Homo sapiens
ttatttgggaataaagagcacaggatcacacagactgactagagctctcttctcctcaatgctccaccacagacacctgaagtcatcgtgtacmcgggtataccaagggtagacccagagggcctgcgactggacagctgagcttctcgctgagggcactggtgacagaggtggtgaggcactttgaagaggagacctaggtgccaatgaataaccatgaataggcctgtcccaaagcacacgtgacaattctgtagggactcccagaaatagatgggagaaactgtagtgggaggaaagacattctaatttgagcattaatgtttattactcccatagtgcagaaaagctcaagaaaactcaagtaccaagaggagtaggaaaatccataatccaggcaagtgtttgaagctgactttgtgaaagtggaatcaccacattgaggttttggttccagttatgggagtaggtgtgattattaatggagagtgagataaaagaatataagagaaagatcttaagagacatcctcatttgttctgttatttaatttggattaacacatttttctccaaccactaagattcccaacttttgatttgggatgaataaaagttgagaaagaagaaaaatgaattaaataaagtag

SEQ ID NO: 411844 - DNA, 657 bp, Homo sapiens
tttagtgccaaatagttcctttttatattgctagattattgctgataaggacagcactcttctttatattgtcctaaaaataatagaacaattaaaatcgaggagtaataactgcaatgttaattcataagatttgtacctattggaataggccacataaaagtgaatagtgtgaaatcaactaatcaagaacttcttggctttatcagatttataacatagctttaacttttagctcttcttccactttggattagtctagaggaaacactgaaactgcattcctcagatacccttccttacatggttctaggttaggactgcccacaagagaaatgaggaggagctctggaagggaggagagaagcagccgcccttacactctgcaggagaatctctcacctgtttttagctgataggctggctcatctcygtgacattaggcagctgtaccggtggagggtgtccaggttcttgttatcttgaacaaagaattggacaaaacgcacaaacaaaacaagggaagaatgaagcaacgaaagtagagatttactgaaaatgaaagcacactccataggttgggagcaggcccgagcaaggggctcaaaggccctgttacagaattcgctggtgtttaaatacttcctagatatttcc

SEQ ID NO: 411845 - DNA, 657 bp, Homo sapiens
tttagtgccaaatagttcctttttatattgctagattattgctgataaggacagcactcttctttatattgtcctaaaaataatagaacaattaaaatcgaggagtaataactgcaatgttaattcataagatttgtacctattggaataggccacataaaagtgaatagtgtgaaatcaactaatcaagaacttcttggctttatcagatttataacatagctttaacttttagctcttcttccactttggattagtctagaggaaacactgaaactgcattcctcagatacccttccttacatggttctaggttaggactgcccacaagagaaatgaggaggagctctggaagggaggagagaagcagccgcccttacactctgcaggagaatctctcacctgtttttagctgataggctggctcatctctgtgacattaggcagctgtaccggtggagggtgtccaggttcttgtyatcttgaacaaagaattggacaaaacgcacaaacaaaacaagggaagaatgaagcaacgaaagtagagatttactgaaaatgaaagcacactccataggttgggagcaggcccgagcaaggggctcaaaggccctgttacagaattcgctggtgtttaaatacttcctagatatttcc

SEQ ID NO: 411846 - DNA, 551 bp, Homo sapiens
tatattttatcacccagaaaacaatcactggatatgagaataatacaacaatttagatgactattacatttgtagaaatccactccactgtagaaaaaaatgcaatccttgtagtgatttgaaatctgattaaaaatcccttatgtacagaaggtaaatacaccttttttgagcggtgcaagctctagcgtccatgagtattagtttcctgaagctgttgtaacaaaacctcacaaaatgggaggctcaagaaacagaaatttattgtctcacagtttccatctgagatcaacgtgtcagcagagccctattacctctaaaaggtctaggaaagactctgttctgggggtctctcgtggcttctggtcattccatggcttgtggcagtgtaattccaatcttcacatgacatttccccagtgtgtttatctctgttyaaatttctccttatgtaaaataaccagtcatattggattagaagactaccctacttcagtaagacctcatcttaacttaaataattacatctacagtgatattatttccatata

SEQ ID NO: 411847 - DNA, 592 bp, Homo sapiens
tgctcctgtattcctcattgcctgwcactacttgtgaaaaatcatcatcactgacttgtttttattgttctaggcagatcatcataccacttaggaccagaatgagagcacatatgattctttctagttaacagtaaagccagcccattccattctctgcttcatctccctctcctataattttattgccagtatgtatgtatttttatctgtgagtgtttacaaattttatgtgcctaccaagtgaatacaacatttcatcaaataaaaaggatttaagagctcttgcttatagtttaattcttctctgacttagaacataacttctagcaaaatagtatccctacttcaatgggctcttgagattaattttaaatagatttgattttggttggagagatgaatctctatatctaaataaatagagagatgataaatggatggacagatgcataagaagaaataacaactccaaaatttctatctttatctaagactttgctcctgaagtacagactcatttatataactcagcatctgaactcgtatatctgcaacacattttaacgaatggatccaacagtgaactaca

SEQ ID NO: 411848 - DNA, 583 bp, Homo sapiens
acttgtttttattgttctaggcagatcatcataccacttaggaccagaatgagagcacataygattctttctagttaacagtaaagccagcccattccattctctgcttcatctccctctcctataattttattgccagtatgtatgtatttttatctgtgagtgtttacaaattttatgtgcctaccaagtgaatacaacatttcatcaaataaaaaggatttaagagctcttgcttatagtttaattcttctctgacttagaacataacttctagcaaaatagtatccctacttcaatgggctcttgagattaattttaaatagatttgattttggttggagagatgaatctctatatctaaataaatagagagatgataaatggatggacagatgcataagaagaaataacaactccaaaatttctatctttatctaagactttgctcctgaagtacagactcatttatataactcagcatctgaactcgtatatctgcaacacattttaacgaatggatccaacagtgaactacatataatttttttgcaccaaacctgcttcacctacatttttacat

SEQ ID NO: 411849 - DNA, 583 bp, Homo sapiens
acttgtttttattgttctaggcagatcatcataccacttaggaccagaatgagagcacatatgattctttctagttaacagtaaagccagcccattccattctctgcttcatctccctctcctataattttattgccagtatgtatgtatttttatctgtgagtgtttacaaattttatgtgcctaccaagtgaatacaacatttcatcaaataaaaaggatttaagagctcttgcttatagtttaattcttctctgacttagaacataacttctagcaaaatagtatccctacttcaatgggctcttgagattaattttaaatagatttgattttggttggagagatgaatctctatatctaaataaatagagagatgataaatggatggacagatgcataagaagaaataacaactmcaaaatttctatctttatctaagactttgctcctgaagtacagactcatttatataactcagcatctgaactcgtatatctgcaacacattttaacgaatggatccaacagtgaactacatataatttttttgcaccaaacctgcttcacctacatttttacat

SEQ ID NO: 411850 - DNA, 547 bp, Homo sapiens
atttaagagctcttgcttatagtttaattcttctctgacttagaacataacttctagcaaaatagtatccctacttcaatgggctcttgagattaattttaaatagatttgattttggttggagagatgaatctctatatctaaataaatagagagatgataaatggatggacagatgcataagaagaaataacaactccaaaatttctatctttatctaagactttgctcctgaagtacagactcatttatataactcagcatctgaactcgtatatctgcaacacattttaacgaayggatccaacagtgaactacatataatttttttgcaccaaacctgcttcacctacatttttacatcatttaatgacaactttatcctacttattgtacagatgaaaaacttgaaagtcatttttgactcttgtgtttctttaaaattccatatccaatccatcagaaaataagttagtttcaggttcaaaatatatcttgattcccaacacttctcagtatctcactgtaatgaccttgatctgaacta

SEQ ID NO: 411851 - DNA, 534 bp, Homo sapiens
gtgtgtgtgtgtgtgtgtgtactctcacacacgctgtatacgtggatgtacctatggaagggagggttttgtcagttgccgttattcttggaaagaatggagtaagggggctggagtgggagtctcgctattctrtgcgtggatttttcctaatgtcccttttccattatggcctctttctacccactgtgtctttaagggaaattactccggccattttaaaataaaatgtattttttcgttccatatgaatttcaaaatagttttttctaattctgtgaagaatgtaaatggtagtttgatgggaatagcagtgaatctataaattgctttcagtaatatggccagtatgattctttctattcaggatcatagaatatttttccatttgtttgtgtcctctcagatttccttgagcagttgtttgtagttctcctcaaagaggtccttcacttcccttgttatctctattcctaggtattttattctctttgtagcaactgtgaatgggtgttcattcataatttgctctct

SEQ ID NO: 411852 - DNA, 593 bp, Homo sapiens
tgtataaattctagttaatgagcgacttctcaaattcctcttatggatctatcgaactgctaagggaagataggtgtcataacatccttacttttctacctgcctgctcccttggcctgcagtgtttcaccctcttaaatcgccagtgtccccrtagctttaaacccccagttctttaaactgcagtctatcatcttccagaaaggatgagatttttctctattaatttattttccctattctggcttcttaacatgttttcatttccatgaactcttgattgttttctattctgacactaatagatttagtgctaatctcatttttcagctagcctactaacaaacaaaacaacctcagacaaaggtacttagaagtcttgcaccaactgaattatcaggtggtaatggttttcagacatatataaagaattttgatgagtataaccttacttattttagctgtcccattgaaaatgccatgtctttttggcaaaaacaagcaaacaaacatatagcatgttcagcgaagttgtaatatatgtctaacattgaaggttgccattctatttacattccaagcaaaaaaaaaga

SEQ ID NO: 411853 - DNA, 555 bp, Homo sapiens
ctcctgttccttcttcaaaatttcaattttgttgctgttgcaggaagctggtgagcttatttctgagcccagcaatgtattttatttattatcactttcagcatttcatccatctttatggcagatagttgcatcaaatcctgtacttactaagtagttttgaccttgtgaaggacttgatggactcagtgttgaacttgtccctatatttggtcatgtaactgtggtcataggggtggttatattgaacaatatatggtgctcccactgtatgcttggaagtgggagwgtgcaggctatgggaattatcagaaaagaatgagtcactaaaatctgtgcaaacagttcaaatgtttcaatacatctgtactacttctgatatcgttgcaaccatagtttcaatagtttccacttgatagtgtcaaacagtccaatcaatgccatagtaccttttctagagcaaggtggcaagatcagattttaatcttttgaaaacattatattccttggttgaagtctcttgcttctgagaacttatttgtgaatacaacacag

SEQ ID NO: 411854 - DNA, 579 bp, Homo sapiens
ttcatttgtatacatgctagcttatctatgaatggattaatgttttcaattctgacataaataygaatccacaccagttctaggcaaagctataaatttcggtgcttcaaacaaaattattagtactagattatcctcaaatccccaaaacttatatagaacaatagagaataagtactcctttggctatagatatttgtaatagaggtaaacaataaaaatagacagaatttaaaataaaaaatatttctttttatgtgattagctgtaaaggttgtcattgatacaaaatgtacattcctcattttggggaatatatcccacatcaataatttgggaatttgatcttgaaagaaactgaagctcccatgcatctcaggaatttgacttcgatccttgtaatcgttgtattgttaagagcatttagtaactacattatgagaatatggtctcactgctgatgagataaaatgtcataagtagaccaagttaagttaaattcaaaggcatattttcaattgtttctacaaaaatcgtcctatgagaaattatatgcctagaaattttctaaaaatttga

SEQ ID NO: 411855 - DNA, 579 bp, Homo sapiens
ttcatttgtatacatgctagcttatctatgaatggattaatgttttcaattctgacataaatatgaatccacaccagttctaggcaaagctataaatttcggtgcttcaaacaaaattattagtactagattatcctcaaatccccaaaacttatatagaacaatagagaataagtactcctttggctatagatatttgtaatagaggtaaacaataaaaatagacagaatttaaaataaaaaatatttctttttatgtgattagytgtaaaggttgtcattgatacaaaatgtacattcctcattttggggaatatatcccacatcaataatttgggaatttgatcttgaaagaaactgaagctcccatgcatctcaggaatttgacttcgatccttgtaatcgttgtattgttaagagcatttagtaactacattatgagaatatggtctcactgctgatgagataaaatgtcataagtagaccaagttaagttaaattcaaaggcatattttcaattgtttctacaaaaatcgtcctatgagaaattatatgcctagaaattttctaaaaatttga

SEQ ID NO: 411856 - DNA, 537 bp, Homo sapiens
gtgagtagtatctcaaaggatttagaggaaaagactaacaatatgcaaaaataaagttaagtggtttaactgataagcaagtagtggatgaaaatggagtacaattaatgttcaaaatgatccaaaggataaagaggaaaaatcaaacaaaaagtagaggggagaaatgaaaaactgcactaactctagttgtctaaacatgccaactcaaaaggcgaaattgttagattgaattaaaagtgagaacaaattacatactgtctataagaaactcattaaatgtagacacacaaagaagttaaaggtaaggggatagagagagatacggcacaaaagaaagatggagtggcaatattaattttagatwaaggagacgtttgaactaagagtcaaggtagcaggaaggcatggtaatgcttaacgtgtatgcacctatcaaaagaactttaagattcttgatccagctgtgattgaacttaaaatgagattttttttaaatccaaaactgtagttagagactttaacactcctctgtta

SEQ ID NO: 411857 - DNA, 573 bp, Homo sapiens
taacgtgtatgcacctatcaaaagaactttaagattcttgatccagctgtgattgaacttaaaatgagattttttttaaatccaaaactgtagttagagactttaacactcctctgttagtgattggtagaagtagagaaaaaattagaacccacatttcagaggaaaaattataatagaaacttccatactgttctccatagaagttctgtgcaatactgtcagtttaaccttctttaaatatgggataatttgtagaataaggcagaaccttttgttttagagtattcattttaatttagagatttttttttctgattacaaaatcagtctatgttcatrtttaaaaaatagaaaaacatataaagaaaataattaaaaatccactaattcatctcataaaaataaccaggagtttctggttccaaaatggtggtgtgggagcaagctaacttcactgccctccatagaagacccaaacaacatatacagcgccaaggttagcaccagcaatatcccagtactcgaatataaggataagacaactcttggggccacagagaagtgaagaaa

SEQ ID NO: 411858 - DNA, 586 bp, Homo sapiens
gtctatgcagggatgtagtcattaccaacacatcactgggacagtgtggcccactgcttatgctgacattccttctcttctaatggagtattttgcaaatgattatggagtggttaacaaatttgctagccattatcaaactgggcatctactgtcaatgggtgttttgactttgtgaatataaaaatgtttgtgctgcaactgctgtgcaagttcaggtcttttatgtgactctggatcaaatctgccctgggaaagcattccctgatgaagttaaccacagacattctcaagaaaatgcaggggaaattttatggcccacgatgtattctaattactgcctggcaggtgagatttgaccactttctaggcaaatattactcttacctgttgtccagggcagcaccttctatggtttggaaggtatgttttctgtaggacttcttttaacaaggctacagtgagtgctattgcagggagatgctggcacctgatagtggccaagagcccatactcatrgttccatgagctcaaaagtgttttgttgttaagtatgtttgggaaattctatgtaagctttgaaggt

SEQ ID NO: 411859 - DNA, 586 bp, Homo sapiens
gtctatgcagggatgtagtcattaccaacacatcactgggacagtgtggcccactgcttatgctgacattccttctcttctaatggagtattttgcaaatgattatggagtggttaacaaatttgctagccattatcaaactgggcatctactgtcaatgggtgttttgactttgtgaatataaaaatgtttgtgctgcaactgctgtgcaagttcaggtcttttatgtgactctggatcaaatctgccctgggaaagcattccctgatgaagttaaccacagacattctcaagaaaatgcaggggaaattttatggcccacgatgtattctaattactgcctggcaggtgagatttgaccactttctaggcaaatattactcttacctgttgtccagggcagcaccttctatggtttggaaggtatgttttctgtaggacttcttttaacaaggctacagtgagtgctattgcagggagatgctggcacctgatagtggccaagagcccatactcatagttccatgagctcaaaagtgttytgttgttaagtatgtttgggaaattctatgtaagctttgaaggt

SEQ ID NO: 411860 - DNA, 669 bp, Homo sapiens
ctggcatgcggtcacacgatgacagctccagccttgaactacagggctccagctatcctcccatctcagcctcttagttagctagaaatataggtgcataccaccatggtgggttactttgaaaattttttgtagagacaggatcttactacgttgcccaggcttatctccaacatttggcctcaagmaatcctgccaccatggcctcccaaagtgccgggattacaggtatggtccactgcacccggcctcctcattctcttttatcagttgtcctagcactgaacttatattttatggtcaaattatttacttttctctttcttactagaatatatggtctataaagtcagtgtttttttgtgtttagtacattgctatattcctagcaattagaccaatacttaactacagaacatattgggaaacacaaatatttcctcatttaatgatggtccaactcacaatttttcaatttatgatgttgcaatagcaatgtgcattcagtatgctcctcaacttaatatggggttatatccagataagcccatcataaatcggaaatatcgtaagtcaataatgagctttcgattcaccatattttcaatttaccattggattatcacgtcatcacacgccatacatcgaggagcatctataaataacgaa

SEQ ID NO: 411861 - DNA, 433 bp, Homo sapiens
tttgtctcctgctggagtgcatcattgcaataatatcaaaaactaactaaaacgttgctgttaaacccagtacattcagccatacagacttctgtctaattccgtagaatcacattaacctcattctcattcctctaaacatgccccatgaagtaccccctcccattwaaggtttggagttctatagtttttagcctagggccagagacccagtgaattcttttgctgcagtctaactaaattcctaaattctccctctctacttggtcctgttgagatttctccatctacttttgtttcatttcaccctagattctacttctctgatcatccaggaagccaacctgcctgaggacgagtcatactctgtcctcccaccccaggccagagagtggtatctgtctttccacaagttgtaagcttctacctttga

SEQ ID NO: 411862 - DNA, 433 bp, Homo sapiens
tttgtctcctgctggagtgcatcattgcaataatatcaaaaactaactaaaacgttgctgttaaacccagtacattcagccatacagacttctgtctaattccgtagaatcacattaacctcattctcattcctctaaacatgccccatgaagtaccccctcccattaaaggtttggagttctatagtttttagcctagggccagagacccagtgaattcttttgctgcagtctaactaaattcctaaattctccctctctacttggtcctgytgagatttctccatctacttttgtttcatttcaccctagattctacttctctgatcatccaggaagccaacctgcctgaggacgagtcatactctgtcctcccaccccaggccagagagtggtatctgtctttccacaagttgtaagcttctacctttga

SEQ ID NO: 411863 - DNA, 433 bp, Homo sapiens
tttgtctcctgctggagtgcatcattgcaataatatcaaaaactaactaaaacgttgctgttaaacccagtacattcagccatacagacttctgtctaattccgtagaatcacattaacctcattctcattcctctaaacatgccccatgaagtaccccctcccattaaaggtttggagttctatagtttttagcctagggccagagacccagtgaattcttttgctgcagtctaactaaattcctaaattctccctctctacttggtcctgttgagatttctccatctacttttgtttcatttcaccctagattctacttctctgatcatccaggaagccaacctgcctgaggacgagtcataytctgtcctcccaccccaggccagagagtggtatctgtctttccacaagttgtaagcttctacctttga

SEQ ID NO: 411864 - DNA, 685 bp, Homo sapiens
atgcagttgtgcaacatgaaaactgcagtgacatgttaccatttgactgtctccgtagttcgtgatgcatctgttgcatgctatgttttcaaagctcactgctatattggctttgaagtaaaccttcctaataaagctgtaggctttattgaggtcaggattatataaggcacaatatcctctgggggaaaaaaatcatttgccctagctgtaattacagaacataaatttcactacgtactccctacctacagtgaagaataatgtaggaaacgttattcttgrattgtctagctgatgcgtggagcagcagcatcccaagtttgacaaggcataagaaagacattaagggaattttaccttgcagcagttaggtcgtcagcattttaagcttggaagtagttttgtgctgtgcatgcataaaagctgttggcagaccagattatatttgcctttatgctttaaaaattagtcattgatcctggagttctgcggaataataattaaggcttgggttttagatccaaaaggtaattctggcacttggagactatatgggagccacttgtcatgcctgcattggtggaacaaatgttcgaaatgaaatgcaaaaactgcaggctgaagcaccacatattgttgttggtacacccgggagagtgtttgatatgttaaacagaagata

SEQ ID NO: 411865 - DNA, 545 bp, Homo sapiens
caggttatagaactgcaagtatggtcactcttattaatgtaaaatcatatgcatatatcttggagcacataggcaaaragggatgtctagaagaaaattcaacaacatgtcaaacagtagctacttaagggttgagtgttttttaaatgtatacattattctttgttgttagaattatttattatgactcatttcattgccggatttatttcatttttgcacattagaatttgtcatattgctaatggaggggaatttagatcatcacagatttctaggttctaaaagggaccatcctgtattaccctctcctttaaagatgaagaaagtgaggctcagaaggcagaatttccttttttaaagttttagatgaattaactacaaggatgggtatgtcttaggtctcctaattcctactcaaggttctctcctctatgttttgctgagttcaatagggtattaaatttaaaataatacatagaagactatgtttaatatggatattgaaagcactttttacataatgacataacctgtttgatgac

SEQ ID NO: 411866 - DNA, 583 bp, Homo sapiens
aaaacaacaacaacaaaaaaaagccaccactttctcctggcatctgttcattcactagtacacattcaacttgacatatctgattttttgaaaaatgtgggaaggataccacataaatgacatctatgtgttttctgagtggttttaagttaacaggacacactgagagtacagggaacagctcattaatatcccctctaccacattgggataagtgtttttaagccaagcatccaaagcaagatactcttagggtctgagcatgcaccaggagtctcctttctgatttctttctgggaagccagccctcctgactttcaagccatgtggttcatatagggctccacaccttgttctagggctggaattcatatccaggtctcagccagctagtgcccccacagtaacctcaggattggctctgtgttggacatgagaggccatcagagccaytgggacagcatgaatatttttctgaggccttggagcaaggaaagatattcttcccactggccttggatctgagaggacataggctgaggctgccctagtcatcttgacaacatcagcaagaatctatatg

SEQ ID NO: 411867 - DNA, 475 bp, Homo sapiens
  misc_feature (1)...(475): n = A,T,C or G
nnnnnnnnnnnnnnnnnnnnnngcttgtgcaagtatctttttcaaataatgactgattttcctccaggtagatacccagtagtgggactgctggaccaaatggtagttcarttctttaggcaatctccacagtgttttctacagtggctttactagtttacattcccaacagcagtgtagaagtgttccctgttcactgcatccatgccaacatctactgttttttgattcttttgattatggccattcttgcatgagtaaggtggtattacattgtagttttgatttgcatttccctgatcattagtgatatttagcattttttcatatgtgtgttggtttgttggccatttgtatatcttctactgagaattgtctattcatgtcctttgcccactttttgatgggattgtattttttcttactgatttgtttgagttcattgtagattctggatattagccttttgtcagat

SEQ ID NO: 411868 - DNA, 475 bp, Homo sapiens
  misc_feature (1)...(475): n = A,T,C or G
nnnnnnnnnnnnnnnnnnnnnngcttgtgcaagtatctttttcaaataatgactgattttcctccaggtagatacccagtagtgggactgctggaccaaatggtagttcagttctttaggcaatctccacagtgttttctacagtggctttactagtttacattcccaacagcagtgtagaagtgttccctgttcactgcatccatgccaacatctactgttttttgattcttttgattatggccattcttgcatgagtaaggtggtattacattgtagytttgatttgcatttccctgatcattagtgatatttagcattttttcatatgtgtgttggtttgttggccatttgtatatcttctactgagaattgtctattcatgtcctttgcccactttttgatgggattgtattttttcttactgatttgtttgagttcattgtagattctggatattagccttttgtcagat

SEQ ID NO: 411869 - DNA, 555 bp, Homo sapiens
aattattacaaatctttgttactctttgtgatcctttacttaatgctaaacattagtgccctagcttctcacatacctggaattggagttgggtttctcagctttatcagagtcctggggcccatttgctatccctgttcatcgctgtacgtgtaaggtgagctccacagctgctctggtgctcacactatccctgcttgagaccagagacccctcccaccccagacktccccttaccaacatctcaggaatctccatttgtgccctggagcatggcctttctctctctttttttctctcttttgaagaataatcaatgtcctgacattcgaatggtttttacccttcagtgatgctgcttttcttccatctcagctagccatgagtctttggtttccctcagtagctaaggacgtcacatttttatgtagcttttatccatcaggtcttttggacaactagataaagcatttccccactgagttccttcttttaactcatctaccaggccacaagaatccccattccctgcctgctggattctcattggcagag

SEQ ID NO: 411870 - DNA, 477 bp, Homo sapiens
gctgttgcaattcgtattctctgtgtctatgccggaaacggcttgagctgtaattgcagtttatagtgatgtaaatgcagccaaacccccgagtgaagcctcacagatgtacatcattaggagagctctcagcctcgctcatatgctgttcagaggcggttcatttgcaatcagtttcaaagactgtggatgggaagaatgttctttcacattgtctagctcagtttaaaatctgccctcctgacattttgataaaaggtaataaccaaacctctgygttcagcagaatgtgcttataataataagcctggcattaaaaaaagaagacccaaagtatcaatagccctttacaaacagaatacacagttttccatttgacccagttgtctgctgcacttcttctctcctacctatcttatgattaggaaggaggcagccctagagctcacaagtcagaaagctctggatacaaatttc

SEQ ID NO: 411871 - DNA, 580 bp, Homo sapiens
ctcatttttctcatcaataaagtcatcattcctgctaccaagaggtgctgtgaagatcaaataagatcatgtgtgtgggtatggcaaacttgaattgtyaaccaatttcttcttttattctcccacctcatcctcattcaagcagagaaacatggggtcaccatttgctctgggactggggttcttcagaaatggaccaatgaataaaaatgacaatttctcatcttctggttctatcttggacatgcagggatgtggagacagaatgaatccacttttatagcccacgtctcctagagccccagagtgttgtggagatgaggtacccaaagcttccctatcttcagcaggaagtgaaagctagttgagaaggaaagatgcatgggcttgcacagggtccagttgtggggacaaggagctctgtgtcagatgtcagctgtgtggatggacagtttccaccgagaatgatgggaggacagacattactttccaaggttacctaagccaggagtcaaatggggacaaatccaaactgggaatttgctcagtctccatttggagtgtgttgaaatctgactaa

SEQ ID NO: 411872 - DNA, 503 bp, Homo sapiens
tcaatcaccttgagagctaagtaagcaagaaaaagaaagtgtgtgtgtgtttgtgtgtgtgtgtgtgtgtgtgtgtgtgtaagaaattttaaatcaccggtcatttttatgtatttttcctcttttaacaatgtctgaattgctatgagcaaargagagaccaggccaaagaaatggcataacctacaaaggaatttattctctaaattgcagggtatgctacaacctttcatttcttgtgaaaagatttttgtctttctcctggagcctcccagtaagaattctgtgatttaaaaatatcacaagtgagaatcatatgaatgactcatgcagaatactcaaattttctttctcttgggactataagtaccataatattttttttaagtaaaaacatcagtctcactggaagaaaagtaaagaatttgtcatgaacagttggcctttttagaagctaaatttctgttcttttatttgattaattaattttatttaatattaat

SEQ ID NO: 411873 - DNA, 503 bp, Homo sapiens
tcaatcaccttgagagctaagtaagcaagaaaaagaaagtgtgtgtgtgtttgtgtgtgtgtgtgtgtgtgtgtgtgtgtaagaaattttaaatcaccggtcatttttatgtatttttcctcttttaacaatgtctgaattgctatgagcaaaagaragaccaggccaaagaaatggcataacctacaaaggaatttattctctaaattgcagggtatgctacaacctttcatttcttgtgaaaagatttttgtctttctcctggagcctcccagtaagaattctgtgatttaaaaatatcacaagtgagaatcatatgaatgactcatgcagaatactcaaattttctttctcttgggactataagtaccataatattttttttaagtaaaaacatcagtctcactggaagaaaagtaaagaatttgtcatgaacagttggcctttttagaagctaaatttctgttcttttatttgattaattaattttatttaatattaat

SEQ ID NO: 411874 - DNA, 503 bp, Homo sapiens
tcaatcaccttgagagctaagtaagcaagaaaaagaaagtgtgtgtgtgtttgtgtgtgtgtgtgtgtgtgtgtgtgtgtaagaaattttaaatcaccggtcatttttatgtatttttcctcttttaacaatgtctgaattgctatgagcaaaagagagaccaggccaaagaaatggcrtaacctacaaaggaatttattctctaaattgcagggtatgctacaacctttcatttcttgtgaaaagatttttgtctttctcctggagcctcccagtaagaattctgtgatttaaaaatatcacaagtgagaatcatatgaatgactcatgcagaatactcaaattttctttctcttgggactataagtaccataatattttttttaagtaaaaacatcagtctcactggaagaaaagtaaagaatttgtcatgaacagttggcctttttagaagctaaatttctgttcttttatttgattaattaattttatttaatattaat

SEQ ID NO: 411875 - DNA, 573 bp, Homo sapiens
gtttctttgcccaattttagatggagttcatacaaatgaaaggttttgcacttgggaggcaggtgaagttaatcatcagtttgacatcaacctggcttagacttcaggaaggcacatccattggtctagggaagggatagagttgtttgggctttgccttttttttcaactgtcatctttgtattgtgcttgttttcttaaattacaaaatttacattctccttggtaaagagaataactggaagaagtttctgagacaataagaataataattgtcatatactgaatacttggtctgtgctaggcactgtgctgagtgaaacatctctcgttagtgagttttctcaatatactcatgtaactgtgcttgaaagtaatctggcactttattcagtgttggatattacagtgtccaawttagttttcacaataatccagaagaggagatagaattattgtctgcattttacagatgaggaaatagagacccagagggtaagttattcacctggagtcacacacaagttacaagaatgagccaggactcaaactcaggcagtctgacttcccatc

SEQ ID NO: 411876 - DNA, 603 bp, Homo sapiens
ctataacatcttttgtagtgtatgtctgttggtggtatatgttttcagccttattatgtctgaaaaagtctatgtcatctttgttttctaaagaaatttttgttgggtatcaagttctagattgcaaggggttttgctttaagtattttaaagatgttgctccactgtcttgttacttgcactacttctaacaagaaattttctgtaattcttatctttgttcctctgtacataatgtgtcttttctccctgggtgcatttaagattttcttcttcatcatatgctttgaacaatttaactatgatgtactttggtatggttttcttcatgtttattgtgcctggaaattcattagacttccttgatccatagaattatagttttataattttcattgaattataaattttcattaaattataaattttatagttttcatcaagttttgatcattattttccraatttcctttttgccctccccttctatagacttcagtttctcataattaggcttcttgaattggtcccacagatcactgatgcgctgttcattttttaaattctttattctatctgtgtttcattttggatagtttcctt

SEQ ID NO: 411877 - DNA, 603 bp, Homo sapiens
ctataacatcttttgtagtgtatgtctgttggtggtatatgttttcagccttattatgtctgaaaaagtctatgtcatctttgttttctaaagaaatttttgttgggtatcaagttctagattgcaaggggttttgctttaagtattttaaagatgttgctccactgtcttgttacttgcactacttctaacaagaaattttctgtaattcttatctttgttcctctgtacataatgtgtcttttctccctgggtgcatttaagattttcttcttcatcatatgctttgaacaatttaactatgatgtactttggtatggttttcttcatgtttattgtgcctggaaattcattagacttccttgatccatagaattatagttttataattttcattgaattataaattttcattaaattataaattttatagttttcatcaagttttgatcattattttccgaatttcctttttgccctccccttctatagacttcagtttctcataattaggcttcttgaattggtcccacagatcacwgatgcgctgttcattttttaaattctttattctatctgtgtttcattttggatagtttcctt

SEQ ID NO: 411878 - DNA, 610 bp, Homo sapiens
tcaagcctggctaaggccctgaataaagatagagagatttccaggaagagctatccctagatgtcttcctgtataaacaggccaaagattattattaagaaggaattgagtcatgatgaaaccagtataccttattttgatgatgactattgcattcaacaaatattgaggacttactacrgccctgcactattcttggcattgggtatcagctgggatcatagtcggagtgatttcagctgcattgggctgatggtctacaacagatgcaaagaagagcgcggagggctctggaggagttgagtgggctatgaaggtgcaatgaatacaggaaagcagagacaacttccaggaaggaggaggccttggctgagtagccagagaagttagagatgagcattccaggccaaaggaacaatgtgggggaaggccccgaggaggggtgcatttttaagacagttaaaaaaaataatcggttagcctggagccagagcattactgggaatgtgtgaaggaatggggaacccgaagccctaggaattaaacgtttttcccaagttcacacaacaggatgcatatccaggtctgtctgaccataagatgcacaacg

SEQ ID NO: 411879 - DNA, 550 bp, Homo sapiens
ttggtctgggttctggaggcatagtggtttaacagggtttttttaactcaatttgttgacaaggaaagaaaaaccagaaagccattttgtaagtgtttgattctgaaatgtatcttgcctgtagctttaggagagagagtacatttcacttktgtcattgtaatttccatcagcctcagctgtgtattatttatatacctcagcatttttattcccattttataggtgaataaacagaggtttggaaaggctaagagagtctcatcaatacactcagttggctatgacacccccccttcatggggaaatgatcagcgaaaaagtcaagtacctcttgatcaaatttactattcatatctcagtgtactgggcaagattattgaaaatggtttccatgtttttcttctttcactcttattacagtactaacaagattcttgtaaaaactggacctcagggattctttctgatataaagtcttaatccttaatcatagcaacaactattcatcttctggttccataccaggctttaagaaatgtgtgttagg

SEQ ID NO: 411880 - DNA, 550 bp, Homo sapiens
ttggtctgggttctggaggcatagtggtttaacagggtttttttaactcaatttgttgacaaggaaagaaaaaccagaaagccattttgtaagtgtttgattctgaaatgtatcttgcctgtagctttaggagagagagtacatttcacttgtgtcattgtaatttccatcagcctcagctgtgtattatttatatacctcagcatttttattcccattttataggtgaataaacagaggtttggaaaggctaagagagtctcatcaatacackcagttggctatgacacccccccttcatggggaaatgatcagcgaaaaagtcaagtacctcttgatcaaatttactattcatatctcagtgtactgggcaagattattgaaaatggtttccatgtttttcttctttcactcttattacagtactaacaagattcttgtaaaaactggacctcagggattctttctgatataaagtcttaatccttaatcatagcaacaactattcatcttctggttccataccaggctttaagaaatgtgtgttagg

SEQ ID NO: 411881 - DNA, 568 bp, Homo sapiens
tggtggactaacactgaataattatatagcaatgactgtataatcacagttgtgattaatgctatagggtgaaagtactgcatgctgacagggaggcctaacctaactttattagggtgggtattaggaaaggcttccatgagaagaggcctttcatgctgacactgraataatgagcagagatctcagcctctatccaaagatgccaatatgttgatcctactttccaaaatctgttccttttagtaccttgattctaaaattgctctataccttcagtcttttactagacatataataagaaaaaatttcatggagagcaaaaaccattatctaaatgattcctgaggaaggagactgccaccaccactagaattatccaaacaattgcaggaatatggagactgaactgtagtaagtagaatgtctgtaatattcttatgcaaataatctacatggtagcaaatagtacttttgggttttgtaccatttagaataatgttcttgtgtaccttactattggaagccagcattatttcccataattaccacttaccttattgctatt

SEQ ID NO: 411882 - DNA, 536 bp, Homo sapiens
gataatatatctgtatgaaaaatgaagttcctagacatcagctgggtgttgctatgcgtttaaatgcttcttatagagtgacatttagataactgcctaaaaatttcactttcaaagtatgatgctataagactcatcctaagattgaaagtcctttgtggttaaaaaaaaaaaaaaaakcactgcttttctgtggctagcacacactgagtaatcaaatggagaacttcatggaataaatacagtggttgacttctgctaaaaacattttgaaaagaggaaatggagcctttctactctttgacatacaaagcacattgctgtctaatggattccacagcaaaagcaaaatccaaacaaagcagcatcttttttctctaacctacatgcaatgtaagtgagattccaagtatgcaaatggtgggaggaaagaaatgcattttcactaccccagttattacatatggttgagaatatgaatagtaattgcccctgaattggaggattaacgtgcactactttttttcttcttttta

SEQ ID NO: 411883 - DNA, 317 bp, Homo sapiens
gtttcctcatctgcaaaatggggattataaaaacatatctcatcattttaagtttaggrttattgtaagggttgttgttttcagtttaagtttagagttgtgataagagaatgtatatagtgaggagtagaaacacaggaggtgctactgaacggatgcactcaaggcccaggtgaaagccgggccttccattttgatcgagacctagctcttttgcaaatgcctgggaaacaacccaaaagcctcagtagcattccacttacctgaaatcttcatcagtaaatgtgtcccctttctggaggctgtggagaatgagt

SEQ ID NO: 411884 - DNA, 317 bp, Homo sapiens
gtttcctcatctgcaaaatggggattataaaaacatatctcatcattttaagtttaggattattgtaagggttgttgttttcagtttaagtttagagttgtgataagagaatgtatatagtgaggagtagaaacacaggaggtgctactgaacggatgcactcaaggcccaggtgaaagcckggccttccattttgatcgagacctagctcttttgcaaatgcctgggaaacaacccaaaagcctcagtagcattccacttacctgaaatcttcatcagtaaatgtgtcccctttctggaggctgtggagaatgagt

SEQ ID NO: 411885 - DNA, 590 bp, Homo sapiens
ctaggggggagaggacactagggaaaaaaatgcagaggagaattctgtsatcagtctttggagttcgatttatcaagactgtcaacctcaaggcatttacagtgataccatctcaaaaatcttagattgcactatctactatagttgtcagtagccacaatatggcaatttaaataattaaaactaaacaaaacaaaaaattcattttctgagtcatactagctgcatcccaagtgctcagtagccatgtgtgtctagtgactgctgtataggacagcacagatgtagaacatttccatcatctcagaaagctctgctgaacagcactgttcttagggatgataacatctccattttgttttaccctttgtttatttattctacaaatattaactgagtacccactttgttcctgtcactgcactgagaagcagctgaaatgcttacaagcatagaccctggagcaacctgggttagcagctcgctcactgagtgatgctgggccgggtcacccatcctcccagtgctctagtttaatcagctgtaaaatgaagataataaaagtatctacctcataggattgttgtgaa

SEQ ID NO: 411886 - DNA, 419 bp, Homo sapiens
gttattcctctccccaggggaagagccaatgagatgactggaagagaagcattgctcccatacttctccttcctgaggggtggggtgtgaagccctccctctctgctgaacattgagcagaaggaaggmaaggtttactttccccatattctattatttgacatagttggcctccaacaacctgacctctgcaggtccctgtatctacctggagagaaagagctttgtcatattcatcagtatatgcttccattctatagggccacacactgggctttgcatccagttggcactcaagcagtgcttgatgggtttgaagatgagcatctttctctgagatattgtgttcttattggattaaatagtgaggggctgctgcctggtagcaatatactggccctgagtgggaagtgcgaatg

SEQ ID NO: 411887 - DNA, 472 bp, Homo sapiens
tggtctcttttgttggtctctatagccccctggccttgtggcagagtttggcaaactatggccaaccagccaaatctgacccactgcctgttttttgtaaacaaagttttattggaacacttccagacccactggtttacatattgttcgtggctgcctatgtgacaaaacagtgaagctaagcagttgtgtcggacactgtgtggccctcacagcctacaccttttactatctggtccactatggaaaatatttgctcatccctggcctaaaccactgactgacaaatattaagtgcttaacaaacactgatagaatgaaggagtggaagaagaaatgaatacacatggatacagagtgtaagaaaatgcagataaatcaaaactgtgaaaggaataggtctgtgcttaaaatttttttctttttaaaycctgttgtattttgtttaacaatataggttgagtatctctga

SEQ ID NO: 411888 - DNA, 554 bp, Homo sapiens
tcttaccccaagctgtaacaaccaaaaatgtctctagacattaccaaattcccctgggggacaaaatcacccctgggtttagaaccactgccttagagctcctgtcttaagcactgtgtttttctgcctgcctttcaatacaggtcaaggtcacccttgcagaatggacccctggcaagcttgtcatagtctatgcacatctgagcctcagccaatttagtttctacctcattttacctagaaaggaaatgccaggtgcccacactctggggtggtttgggatatgaacycaaagctagggttaattaaaaaaaaaaatgaattgccttcctcttattaccagaaatctgaactagaactgaatccatgtgcttggggatgagattgttaagaagtgaggggagtgggaagactcatgtgagttcagagtactcactatttcacatagaattaatctgatgaagaaatagaataagaattgcaaagtcatcaaagatgatggcttttctttatgacccttggcaccagaacaaagagcctattttttgtgggtt

SEQ ID NO: 411889 - DNA, 554 bp, Homo sapiens
tcttaccccaagctgtaacaaccaaaaatgtctctagacattaccaaattcccctgggggacaaaatcacccctgggtttagaaccactgccttagagctcctgtcttaagcactgtgtttttctgcctgcctttcaatacaggtcaaggtcacccttgcagaatggacccctggcaagcttgtcatagtctatgcacatctgagcctcagccaatttagtttctacctcattttacctagaaaggaaatgccaggtgcccacactctggggtggtttgggatatgaactcaaagctagggttaattaaaaaaaaaaatgaattgccttcctcttattaccagaaatctgaactagaactgaatccatgtgcttggggatgagattgttaagaagtgaggggagtgggaagactcatktgagttcagagtactcactatttcacatagaattaatctgatgaagaaatagaataagaattgcaaagtcatcaaagatgatggcttttctttatgacccttggcaccagaacaaagagcctattttttgtgggtt

SEQ ID NO: 411890 - DNA, 384 bp, Homo sapiens
tgacactgcccataattaagggtgtgcttttgtccaccaccataatttcctaaattcctaatgctgtcttgagagcagcgttctcgtgcatggtaggaaaacgctgcctggtactcctggctctgaaagggccgttgcattgtgttacacgaaractgtgacttcaaccctctgccgcagctgctaccaagatctcttgctttctccaattataatgttggtctttcctagatttttctaacggggaaaaaatattcctttaattgattcctttttgtttgattctcttaaagcacagaggcattgggttgtaggctgtgttttttgggaaacgaactttaggacaaatattagcattcaggaagcttattagggagtgctcca

SEQ ID NO: 411891 - DNA, 561 bp, Homo sapiens
ttgatgaaaaaaaattgcttatccaagaaactcaacaaattccaagttgaataaatacaaatagaccacactcagacacataatagtaaaatatgtgaaagtcaaagagaaagagaatgtcttgaaagtagtgaaaggtgaatcactcatcacaaacaaactccaatgggatagatggctgacttttgatcacaaacaatagaggccagaaggcartaaaatgatatgtttaaaatgctgaagggaaaaaaactgtctaccaagaattggccaaattatcttttaaaatgaaaggcaaaatacatactttgctagataaataaaatctgagggaatttgttgctagaagacctgcctcaagagaaatgctacaagaatttttgtagtctgaaaaccaagtgacatcggacaataatttgaatccacacaaaaaaccaaggaatagcagtaaaggtgtaaaagacattgtagagggatgtcactgtgtaggtgacaaagtaggaagctccaaaaatcagtccctccgctggaaaaaaaaaaaaaaaactattgagaaagagt

SEQ ID NO: 411892 - DNA, 561 bp, Homo sapiens
ttgatgaaaaaaaattgcttatccaagaaactcaacaaattccaagttgaataaatacaaatagaccacactcagacacataatagtaaaatatgtgaaagtcaaagagaaagagaatgtcttgaaagtagtgaaaggtgaatcactcatcacaaacaaactccaatgggatagatggctgacttttgatcacaaacaatagaggccagaaggcagtaaaatgatatgtttaaaatgctgaagggaaaaaaactgtctaccaagaattggccaaattatcttttaaaatgaaaggcaaaatacatactttgctagataaataaaatctgagggaatttgttgctagaagacctgcctcaagagaaatgctacaagaatttttgtagtctgaaaaccaagtgacatcggacaataatttgaatccacacaaaaaaccaaggaatagcagtaaaggtgtaaaagacattgtagagggatgtcactgtgtaggtgacaaagtaggaagctccaaaaatcagtccctccrctggaaaaaaaaaaaaaaaactattgagaaagagt

SEQ ID NO: 411893 - DNA, 592 bp, Homo sapiens
gcgatacacagcttccacctcccccaagtactttagagaaaaaaatatatatatatgcttggatcatttagtctacctccactaataatatatgatcaacagtgaattcagaaaggggaagggaagtctgttgaagggtgagcttaggcaaggttgactctaaaatctgctaaggaatctggtcacatttgtcataacccaaatgtctaaaatgacagaaaatacagtgcggtagttaagaggatggtttttaagataagttgaatgaatatgaatcccaaagctaatgtgagatccttgaacagagtaatcaactttaaaatgggcatatagtwgtacaagttattagagatattgtgaatattaagtagaataatatatatatagcgttgcccttggcatgaagaaaatacagacatgtatggttctgtaatatgaattaggccatctgttactgtaataggggaatgtccttcatgtaatgcagaagacattggttcatatgtgatgtttttctcctaggcaaggggcaaggggaattggactagcaggagtccaactgaaagcttcagcaaaaaaggaaaatgtcctc

SEQ ID NO: 411894 - DNA, 500 bp, Homo sapiens
aactagttaaagatggggaaagcatttggtaagatgagatacacttctgctcttaaggctattcttcaaaacaatatgcaatgatatttttgttgaatggatacactcagcagtcactctgatttggagayttgtcaatgatgtaatgcttgccagttaacatgagcagttataatgaaaatgttatagccctagaagctattgtcagtataaaactctagcacagaaagctagtcccagtaatttatagtgaggcagcactcttaatgatttttggcttcatgcattaatgaacagagatgtaaaggataaaggacttataatgtaataaggaaaactcaagaaaagattcagctctaatcaaaataaattgtgtttttagattgattttcataaattcaaccattaccctttatttataccaaaaagaaatgcatcatgctaagctgattcctatcattcagaaaaaaaaggacattatatttttaatatattttaat

SEQ ID NO: 411895 - DNA, 500 bp, Homo sapiens
aactagttaaagatggggaaagcatttggtaagatgagatacacttctgctcttaaggctattcttcaaaacaatatgcaatgatatttttgttgaatggatacactcagcagtcactctgatttggagacttgtcaatgatgtaatgcttgccagttaacatgagcagttataatgaaaatgttatagccctagaagctattgtcagtataaaactctagcacagaaagctagtcccagtaatttatagtgaggcagcactcttaatgatttttggcttcatgcattaatgaacagagatgtaaaggataaaggacttataatgtaataaggaaaactcaagaaaagattcagctctaatcaaaataaattgtgtttttagattgattttcataaattcaaccattaycctttatttataccaaaaagaaatgcatcatgctaagctgattcctatcattcagaaaaaaaaggacattatatttttaatatattttaat

SEQ ID NO: 411896 - DNA, 483 bp, Homo sapiens
acctaactattctagtcttgttcatatcttaatgttctgttttttcagcatgaaagcagaaacttctactctatctgcaattttcttccttccactggcagtgataatatttaaaaagtacttggcatcacccaaatctgtcttccagtgaaaatcagaatccttctgattgtgattgctcccaatttcctagaattggaacagactaaaatatatgggttaactctggagcccaggctaatggcacaacatatggtaggttgcaagtaacacaatgtttagctcagtcttccatggtatctggcaataggatgttaccaataaaaattccttaagctgaaaattggccaagttgcagttattctgcatgtgcaagttgcatcagactctatggtatagtctatgggggggtcctrtgatttcccaaactgtctaatctcttcccatatcattgctcatgttctcaggagagctggcttaatt

SEQ ID NO: 411897 - DNA, 618 bp, Homo sapiens
tcctgtgatttcccaaactgtctaatctcttcccatatcattgctcatgttctcaggagagctggcttaatttgtgtttaagatgatattgatttgttattctaaaagcaattattgttttggtttttgttgttgttaagaaaccaatctgattctgctgcagtagaatctgcaattgcactggggtagaattcttatcacagtgagacaccctgactgtatagatggtagacccaaacaaaaacacacaagggcatttacccgatgtctttagccatttaggttataacacacttacgtgccaaaaatcactttaattttctggcattttcatggcaagatttgttgtgcattcattctacagtagatattagtaaatcctgcattatggttagctgtcagaaagagtgggaattttgyggcggctcttctttggcatctgacacacagcacagtattttcactggaatcttccaaattatttttctatttattgaaataagttctcactgccgaggcattacctcttgaaagtttcatgctacccttaaacggctggacagagtgactggttttcaaatctttttggctcctggaatgtaggctgaactctaaggg

SEQ ID NO: 411898 - DNA, 586 bp, Homo sapiens
ggggtacatacttaacacagaacaatcagttgtgtttctatatgctggaaatgaagaatttaaaaaggaaaaaaaatccttttgatgatagtatgcaaaagtataaaatacttaagaatacatttatccaaggaggkgaaagacttatatacataaaactacaaaacattgctgaaaaaaaaattaaagaagacctgattaaatggaaagatgttccatgttaatagtttggaagattcaatgttgttaagataccagtattctccaaagtgacctacagattcagtgcatccctctcagaattccaatggtcttcttgcaggaatggaaatgccaatcctcaatttcatatggaaacgtgacgagccccaagtagacaaaacagtattttaaaagttgaagaactcacattttctgatttcaaaacttactacagagcaacagtaatcaaaacactatggtatcagcaggacaacagacatatgggccaatggaaaaaaaataagtgttcagaaataaacccaaacgtctatggtcaattgattttcaacaaagttaccaagaccatccaatggggtaagaatag

SEQ ID NO: 411899 - DNA, 586 bp, Homo sapiens
ggggtacatacttaacacagaacaatcagttgtgtttctatatgctggaaatgaagaatttaaaaaggaaaaaaaatccttttgatgatagtatgcaaaagtataaaatacttaagaatacatttatccaaggaggtgaaagacttatatacataaaactacaaaacattgctgaaaaaaaaattaaagaagacctgattaaatggaaagatgttccatgttaatagwttggaagattcaatgttgttaagataccagtattctccaaagtgacctacagattcagtgcatccctctcagaattccaatggtcttcttgcaggaatggaaatgccaatcctcaatttcatatggaaacgtgacgagccccaagtagacaaaacagtattttaaaagttgaagaactcacattttctgatttcaaaacttactacagagcaacagtaatcaaaacactatggtatcagcaggacaacagacatatgggccaatggaaaaaaaataagtgttcagaaataaacccaaacgtctatggtcaattgattttcaacaaagttaccaagaccatccaatggggtaagaatag

SEQ ID NO: 411900 - DNA, 615 bp, Homo sapiens
atatgctggaaatgaagaatttaaaaaggaaaaaaaatccttttgatgatagtatgcaaaagtataaaatacttaagaatacatttatccaaggaggtgaaagacttatatacataaaactacaaaacattgctgaaaaaaaaattaaagaagacctgattaaatggaaagatgttccatgttaatagtttggaagattcaatgttgttaagataccagtattctccaaagtgacctacagattcagtgcatccctctcagaattccaatggtsttcttgcaggaatggaaatgccaatcctcaatttcatatggaaacgtgacgagccccaagtagacaaaacagtattttaaaagttgaagaactcacattttctgatttcaaaacttactacagagcaacagtaatcaaaacactatggtatcagcaggacaacagacatatgggccaatggaaaaaaaataagtgttcagaaataaacccaaacgtctatggtcaattgattttcaacaaagttaccaagaccatccaatggggtaagaatagtctcttcaacagatggtgctaggacaactgaataagtacatgtaaaagaatgaaattgggccccatct

SEQ ID NO: 411901 - DNA, 567 bp, Homo sapiens
tcctagaggacatatttgaattcaacattagaactttctgataattattgtagagtaaaaatagaaggggctatttgggaagtagtaagttctccaccattagaggtatgaagagggaaactgaactatcatgctgaggatacttgagagattgaggcacagggttggtagttggattagatcaggggtaaccagtttagctgtgcatatgaatgggtgggtgatttggttaaataccasttcctaggctttcccactagacattctgggtcagtaggtcaggaaaagatcccaggaatctgcatttgtaacaagctccccaggtgattctcaagggcactgtattagtcctttttcatactgctgataaagacatacccgagactgggtaatttataaagaaaaagagatttatggactcacagtttcatgtggctggggaaggcctcacaaccatggcagaaggcaaaaggcacattttacatggtggcagacaagagagaatgagaaccaagtgaaagggttttgtataaaaccatcagatcttgtgagatttatttactacca

SEQ ID NO: 411902 - DNA, 615 bp, Homo sapiens
atatgctggaaatgaagaatttaaaaaggaaaaaaaatccttttgatgatagtatgcaaaagtataaaatacttaagaatacatttatccaaggaggtgaaagacttatatacataaaactacaaaacattgctgaaaaaaaaattaaagaagacctgattaaatggaaagatgttccatgttaatagtttggaagattcaatgttgttaagataccagtattctccaaagtgacctacagattcagtgcatccctctcagaattccaatggtcttcttgcaggaatggaaatgccaatcctcaatttcatatggaaacgtgacgagccccaagtagacaaaacagtattttaaaagttgaagaactcacattttctgatttcaaaacttactacagagcaacagtaatcaaaacactatggtatcagcaggacaacagacatatgggccaatggaaaaaaaataagtgttcagaaataaacccaaacrtctatggtcaattgattttcaacaaagttaccaagaccatccaatggggtaagaatagtctcttcaacagatggtgctaggacaactgaataagtacatgtaaaagaatgaaattgggccccatct

SEQ ID NO: 411903 - DNA, 589 bp, Homo sapiens
tccaccctatgaccccaagccaagcccaaatgcatagattctgttccttgcacccactgtacatacatatattaaatacttatatagcatgaggacagcttgtatttgttaaaacattttcatgttttgaaagcactgttcacggccattaatttatttaatctcattcaagcatcaaaacaacctagttaatgggatgtggtgatttaaacctctattttgcaaaygaggagacagagaccacagaagctcagtaacttgtccaaggtcaaagccagagaaggatgagagcatgattcatgtccaagtgtccagagtcaaactcccatgttttttccctgacaaggaaaggatgcttgataccagtatatcatttatagtgtatagtgatgatcacaccctaccctacctctgtctctctcctgttcctatgtctctattgttctctttcctctctctcaacttcttttttctctgtctcaccttggatttaagtttactccaaggtgaatgtgcagaaaagccttattatgtgattattttacctacaatgtgatcctgtgacagggaccccaagagtgaccttgta

SEQ ID NO: 411904 - DNA, 542 bp, Homo sapiens
ataaggaaagtgaaggcatatttaaaagagcttcccaagtgattgggatgcaaaactctaataataccactgtctaggtctttctgcgtctctaccccaggacttagtggcagcataatattttgcaagaaaacaccactgggaatgaaggctccaccctatcactaacggtctgtgtgatctaaaggaagtttcacattctctggtcctcagtctctccacaagaatatgagtccgtcagtacttcccagtccttactgtacrttagaatcaactggaaagcttaaaaaaaaaaattcctgtgccccacttccaaataactgcaaataactgctccagaatctctggggaaaggacccaggcagagatatttactagaagtttccatttgatttagcactagatgatctcagaggtcccctctgacttggaaatcctctgcgtctacaaaatccttcatcccctcctgcctggagaatcgagaatgagggagacatgacggaagctcagcttagggggtggggaatgggggagcaatgcat

SEQ ID NO: 411905 - DNA, 580 bp, Homo sapiens
agaaataagtttattgccccaatgctgttgttcagaagctttctgatatgttcattcaccttcctgccttattaatcagagtaaacatgatgaactgtatatttctatgtaacatcatataccatactaattttcacttgcgttctyaatataatttatctttttgggaattgggcattgaactacattaagtagtttcagtatctccccttgaatatgttgagggaatcttttgaaatcaactttgtactgtcatttcattttcttttcgtatacagctaagatttattgagtgcttactgtgagccagacaatgtgataagtgttttaagtgaatgatctattttaatgctttttaaaaatcaacactgacttagtaatagtgttttccctttattaaagatgaagaaactgagttcagaaaagtgaactgacttaccaaggttactcaaccagtaagtgttgaaatcataactaaactgtagctgtgtttgaccacacagccttgcttacaactcacaaaagacttgagttccattcccagctttgaactttatagaccaagtaattcttgacctcc

SEQ ID NO: 411906 - DNA, 580 bp, Homo sapiens
agaaataagtttattgccccaatgctgttgttcagaagctttctgatatgttcattcaccttcctgccttattaatcagagtaaacatgatgaactgtatatttctatgtaacatcatataccatactaattttcacttgcgttcttaatataatttatctttttgggaattgggcattgaactacattaagtagtttcagtatctccccttgaatatgttgagggaatcttttgaaatcaactttgtactgtcatttcattttcttttcgtatacagctaagatttattgagtgcttactgtgagccagacaatgtgataagtgttttaagtgaatgatctattttaatgctttttaaaaatcaacaytgacttagtaatagtgttttccctttattaaagatgaagaaactgagttcagaaaagtgaactgacttaccaaggttactcaaccagtaagtgttgaaatcataactaaactgtagctgtgtttgaccacacagccttgcttacaactcacaaaagacttgagttccattcccagctttgaactttatagaccaagtaattcttgacctcc

SEQ ID NO: 411907 - DNA, 558 bp, Homo sapiens
cctgagtctgaaacttggctataccccttattatcaggttatccaaactctcagcctttttcgcatcttcaaaatgaaaggaaataattcccccttcatactgttaggaagtttagatgagatgaatgatgtaatacttaattctttacctggggcctgatacattgtaaacgcatggtgaatgaccaggttattatgtaaatggtgaacttgaactctgtttctaatagacaggtgacttctcaggtatcaatcattgaaacagaaattgaagaaatgaactattttactcctctgctcaatgcattagttttaaatcttacggaatttcctttataataggtttaaaaaaatttcaaagattagttcacatagtccaatctactgatgattttatactcagaaagttacattcaactccatcctacaaaccaaggaaaatatcaaggacaagaataagttgattatggtttcccttgaaagcccaacaaaccactatatttgtttgttttttttaaagcaatggtaggtaccaaytttaaaactactaatttactt

SEQ ID NO: 411908 - DNA, 628 bp, Homo sapiens
ctacatatgcattgcttttaagacaagtgtgtcccctaaaggcatctaaaaaaaaaaaactcatcagcaagaatcccttgtaaatatttgtacaatacacaatatagcccacttaactggaacattatgctacaaaaggtgatttttagacagagaattgtgtgaaatttccatgactgtctgtatatgaaatcttttttgtcctgtagttatatcatgtgcctaggatttttcattttcattttattttatttctatcgatttctattgatttacttagagacagtttcattctgttactcattctggagtgcagtggcactttcacagctcctgcagctctgaactcctgggctcaagccatcctcttgtctcagcttcctgagtaattgggactacaggtgcatgccaccatgctcgactaattaaaaaaaawaattgtagaaatggagtctcactatgttgcctaggcttgtcttgaactgctggcctcaagtgaccctcccaccttagcctcccaaagcactgggattacaggtgtgagccattgcacctggcatctgtgattttttaaataggaaaatataacttctgtttttataagtgcattagtttcctgtggctgttg

SEQ ID NO: 411909 - DNA, 628 bp, Homo sapiens
ctacatatgcattgcttttaagacaagtgtgtcccctaaaggcatctaaaaaaaaaaaactcatcagcaagaatcccttgtaaatatttgtacaatacacaatatagcccacttaactggaacattatgctacaaaaggtgatttttagacagagaattgtgtgaaatttccatgactgtctgtatatgaaatcttttttgtcctgtagttatatcatgtgcctaggatttttcattttcattttattttatttctatcgatttctattgatttacttagagacagtttcattctgttactcattctggagtgcagtggcactttcacagctcctgcagctctgaactcctgggctcaagccatcctcttgtctcagcttcctgagtaattgggactacaggtgcatgccaccatgctcgactaattaaaaaaaaaaattgtagaaatggagtctcactatgttgcctargcttgtcttgaactgctggcctcaagtgaccctcccaccttagcctcccaaagcactgggattacaggtgtgagccattgcacctggcatctgtgattttttaaataggaaaatataacttctgtttttataagtgcattagtttcctgtggctgttg

SEQ ID NO: 411910 - DNA, 486 bp, Homo sapiens
cctcttgcccacaaatggtattcatttgacctccctttaatttctctgtctttgccacaggaacctcagtgagggttggttctgcctgttgactctttcaccccttgtgtaagatgttcttttgcacctgctccttttygccttaccagtatacataaaagtttgttactaaacccccacaatcctcttctaacagtggaaggaaggaagatgtctgtagctgcagccagctgggaagagctgcttttaggatttcacaggggaagaaatagacacaattttgctaccatatgcagtatctgcggcaaactacagaatgggcctacagttcctcttagctcaccagagcaagtgctccccagtgatctgcctggatgcaacttgcaaattgtattgagagagctaattagatctgagcttgcaaacgagagctctgctacccttgtgtggaacaatttgctttattaaatgagaggtgatgtgtgt

SEQ ID NO: 411911 - DNA, 619 bp, Homo sapiens
tcattaatcataaaccgagggttgcttccaggggtgctaactcactggcattttcagactgccctgcctggcaccccaagaacaactttaagctgagactagcagttgcttccaacagagcacttgagtcatcatgcacagraactgtgagtgctgacgagagactaatgggacaatgtctgttgcacagatgtccccctctgcctttttgtttttcatgggggacaccaagtaatacctgaggaagtagtgcctgaggaacataatttggaaaacagaatgcccaagacatctgagcagttccatgaatttcaagaagctatcatttagttagacataaagagccaacattaggctatagctggtcaaactccaaaaggaattcctgtaaatgccaacaaatgacaaacaaataaatctcaaggctcagcagaaatagccctggaaaatcatagcttgtgggatgctacatcagaaaggcttctaaggctccaaactaagagccaggctctaacttgatctgtctgtgaaagaggaaagtcatctttcccacagccagaggcagggagaatggcatagtaactgagccttatggatggtgacattgacatcgagctat

SEQ ID NO: 411912 - DNA, 619 bp, Homo sapiens
tcattaatcataaaccgagggttgcttccaggggtgctaactcactggcattttcagactgccctgcctggcaccccaagaacaactttaagctgagactagcagttgcttccaacagagcacttgagtcatcatgcacagaaactgtgagtgctgacgagagactaatgggacaatgtctgttgcacagatgtccccctctgcctttttgtttttcatgggggacaccaagtaatacctgaggaagtagtrcctgaggaacataatttggaaaacagaatgcccaagacatctgagcagttccatgaatttcaagaagctatcatttagttagacataaagagccaacattaggctatagctggtcaaactccaaaaggaattcctgtaaatgccaacaaatgacaaacaaataaatctcaaggctcagcagaaatagccctggaaaatcatagcttgtgggatgctacatcagaaaggcttctaaggctccaaactaagagccaggctctaacttgatctgtctgtgaaagaggaaagtcatctttcccacagccagaggcagggagaatggcatagtaactgagccttatggatggtgacattgacatcgagctat

SEQ ID NO: 411913 - DNA, 607 bp, Homo sapiens
tagctaacagccctcattaatcataaaccgagggttgcttccaggggtgctaactcactggcattttcagactgccctgcctggcaccccaagaacaactttaagctgagactagcagttgcttccaacagagcacttgagtcatcatgcacagaaactgtgagtgctgacgagagactaatgggacaatgtctgttgcacagatgtccccctctgcctttttgtttttcatgggggacaccaagtaatacctgaggaagtagtgcctgaggaacataatttggaaaacagaatgcccaagacatctgagcagttccatgaatttcaagaagctatcatttagttagacataaagagccaacattaggctatagctggtcaaactccaaaaggaattcctgtaaatgccamcaaatgacaaacaaataaatctcaaggctcagcagaaatagccctggaaaatcatagcttgtgggatgctacatcagaaaggcttctaaggctccaaactaagagccaggctctaacttgatctgtctgtgaaagaggaaagtcatctttcccacagccagaggcagggagaatggcatagtaactgagccttatg

SEQ ID NO: 411914 - DNA, 607 bp, Homo sapiens
tagctaacagccctcattaatcataaaccgagggttgcttccaggggtgctaactcactggcattttcagactgccctgcctggcaccccaagaacaactttaagctgagactagcagttgcttccaacagagcacttgagtcatcatgcacagaaactgtgagtgctgacgagagactaatgggacaatgtctgttgcacagatgtccccctctgcctttttgtttttcatgggggacaccaagtaatacctgaggaagtagtgcctgaggaacataatttggaaaacagaatgcccaagacatctgagcagttccatgaatttcaagaagctatcatttagttagacataaagagccaacattaggctatagctggtcaaactccaaaaggaattcctgtaaatgccaacaaatgacaaacaaataaatctcaaggctcagcagaaatagccctggaaaatcatagcttgtgggatgctacatcaraaaggcttctaaggctccaaactaagagccaggctctaacttgatctgtctgtgaaagaggaaagtcatctttcccacagccagaggcagggagaatggcatagtaactgagccttatg

SEQ ID NO: 411915 - DNA, 514 bp, Homo sapiens
aatgtcaacaaaccaacagagaaaatcattgtagctggtgggattatgaaggattatgaagaggataatgagggagaatgtagctggcagagaattactttaggttgagtgatacagaatggcatctttgaggagctgaaatatgagctggcactgccttgatrcaatgtgtcagaatgaaaggcatctcaggaggaggaaacagcaagtgcaaaggccctgcgatgggaacaagactagaatatttgaggaatgaaaagaagaacctgcagtattataagtgaagggcagggtgagattagaaaagattagcaaaggctgcagccagaaattattgggtggaaatttgacacgttttgtcttccatttccttgatcttaaaaaacagctttaaaaagcatctgagaacatttggtgaacacccagtgatgctcccacattcctagatgtctgaggaaccctcagaaggaaatcatcgaggtctttcaccatgtggccatgccaattgtctcat

SEQ ID NO: 411916 - DNA, 511 bp, Homo sapiens
ctgcagccagctgggaagagctgcttttaggatttcacaggggaagaaatagacacaattttgctaccatatgcagtatctgcggcaaactacagaatgggcctacagttcctcttagctcaccagagcaagtgctccccagtgatctgcctggatgcaacttgcaaattgtattgagagagctaattagatctgagcttgcaaacgagagctctgctacccttgtgtggaacaatttgctttattaaatgagaggtgatgtgtgtatgttgtatacttagcacgttaagattcacagttacacagrtggcggaagaatccaaggttgcccagggcttaacatgtagctgaatgtcaaaaggtttcaacagggtttcagagagcaaaacagggatatttttgtgagatatacttttctacccagcatagcacatcagagcttcctgtgggatggattaaacagagctaacctttatggactacttggtggtgtcagatactaggcagaacc

SEQ ID NO: 411917 - DNA, 511 bp, Homo sapiens
ctgcagccagctgggaagagctgcttttaggatttcacaggggaagaaatagacacaattttgctaccatatgcagtatctgcggcaaactacagaatgggcctacagttcctcttagctcaccagagcaagtgctccccagtgatctgcctggatgcaacttgcaaattgtattgagagagctaattagatctgagcttgcaaacgagagctctgctacccttgtgtggaacaatttgctttattaaatgagaggtgatgtgtgtatgttgtatacttagcacgttaagattcacagttacacagatggcggaagaatccaaggttgcccagggcttaacatgtagctgaatgtcaraaggtttcaacagggtttcagagagcaaaacagggatatttttgtgagatatacttttctacccagcatagcacatcagagcttcctgtgggatggattaaacagagctaacctttatggactacttggtggtgtcagatactaggcagaacc

SEQ ID NO: 411918 - DNA, 240 bp, Homo sapiens
atgggtacaagttgtgatattgccattcaaggacttccagtagcagtaagaggaaaattatgaaccagctcccctcagagaggaagtgcctttgcaaacaggtcgtcartcatgagcatagtggctgcctccttcctcccaggaacagccctgcctcctaaattgctgactctcccctcacaggctgtttggattggcatgactgtaggacgtgtgatagaggcagcgtttggcatattc

SEQ ID NO: 411919 - DNA, 516 bp, Homo sapiens
ccaatgatgccttgtagaaaccaatcagttttccactcagtattcctcagtcatcatacaagagtatttttcctttttttttttttttttttttrgtaagccgtcacctagcaaagcttgaagtggtaggtggtaggtatttcatttttaaattcagttgcaaaaggaaaattttttgaagaatgagaattttatcgctgaggaaagtgacagaatgctacactatcagttcatttaacaaatttcctaagaggttgccagtgccaggctctgtgccagatgttgggatgcatgttaagacacaggcagtaccacaagaatgaatacagtttggtgttgagttttaaagcagagggagggccaaggtgccttagggtcctgttctgagctacccacaacagccagcaaactgggtcacctgcagcaggtaatggaaggcttgttatcttgtcaaagggatcacatttttcaaagttgcatgcttagactaagaataaccctggttgcaaaatttta

SEQ ID NO: 411920 - DNA, 516 bp, Homo sapiens
ccaatgatgccttgtagaaaccaatcagttttccactcagtattcctcagtcatcatacaagagtatttttcctttttttttttttttttttttagtaagccgtcacctagcaaagcttgaagtggtaggtggtaggtatttcatttttaaattcagttgcaaaaggaaaattttttgaagaatgagaattttatcgctgaggaaagtgacagaatgctacactatcagttcatttaacaaatttcctaagaggttgccagtgccaggctctgtgccagrtgttgggatgcatgttaagacacaggcagtaccacaagaatgaatacagtttggtgttgagttttaaagcagagggagggccaaggtgccttagggtcctgttctgagctacccacaacagccagcaaactgggtcacctgcagcaggtaatggaaggcttgttatcttgtcaaagggatcacatttttcaaagttgcatgcttagactaagaataaccctggttgcaaaatttta

SEQ ID NO: 411921 - DNA, 516 bp, Homo sapiens
ccaatgatgccttgtagaaaccaatcagttttccactcagtattcctcagtcatcatacaagagtatttttcctttttttttttttttttttttagtaagccgtcacctagcaaagcttgaagtggtaggtggtaggtatttcatttttaaattcagttgcaaaaggaaaattttttgaagaatgagaattttatcgctgaggaaagtgacagaatgctacactatcagttcatttaacaaatttcctaagaggttgccagtgccaggctctgtgccagatgttgggatgcatgttaagacacaggcagtaccacaagaatgaatacagtttggtgttgagttttaaagcagagggagggccaaggtgccttagggtcctgttctgagctacccacaacagccagcaaactgggtcacctgcagcaggtaatggaaggcttgttatcttgtcaaagggatcacatttttcaaagttgyatgcttagactaagaataaccctggttgcaaaatttta

SEQ ID NO: 411922 - DNA, 559 bp, Homo sapiens
tgaaatcaagcacatctgaaccaaaggaactgaccatgatttccacagtatgaaggaggaattgtgcccctaaaagatgccgggcagtcttggttccgaagagaatggaaaaaactattatgtatgaatgtacataacagcattagtcacaatagccaaaaggtaaaacaatgcaaatgtccatcaattgatgaattatggcatatttatacaatggaatattgttcaaccattaaaaggaatgaagtactgaatctataacatgcttgaaccttgaaaacattatgctatatgaaagtagccagtcacaagaggctacgtattctttgtccacttatatgaaatgttagactaggctaatgcatagaaacaggaaatagtgattgcgaggggcttggargagagggaatgaagagtaatggttaatgggtatggagctgctttttgggatgatgaaaacgttctagaattcaatagtggtgacagttgcacaattcggtgaatattctaaaaaccactgaacctgtatttaaaagggtaaattttagggcatgtgaat

SEQ ID NO: 411923 - DNA, 666 bp, Homo sapiens
gggaggaagtattgtttcagaatttgaggaaggaaggcagaaatcctccaacttgtctctcccaccttctcatttccttgtcagggttgttttctagctgaactcaacttgaagctagctggccaaggagagcgtgagatgcagtctacaggtgtcagcctcccagggcaagagataggtgaaccattactctagagagagagagagagaataactatgttttaaaaacctggagtcaaatatatggttaattacccattcactcctggtggttgaaattctctttaaataggaggcctgtcatggttctgagttctggcaacctccttcccttcattagtaaatgctgccattaaaacaacaacctaagcaagttggagaataggcaaaggcaacttgagctacttaatttcaaaactccagctttttgaacagcactaaagtctgtttctcatagaaggcaaattagttaatttcaaatgtggtctgtgaatatcaacagaccacccaaatgtttacatattttataccgtccttctagtgggtttcaaaaaaataatttaamacccagctagtttgagagaaaaagggggcactcatgcatataaattgtctgcattaagggccagttccatattaaaacaacattaattattcatttagtga

SEQ ID NO: 411924 - DNA, 568 bp, Homo sapiens
attctcctttttattaacaaagaaaaaagctttttgcatcccagaagactgccttcccatctcattggccagaactaagtcacacagcgatgcttacctgcaaaggaggatgggaaagaagcaagtgtccagcttttttccagtctcttttgtgcagattggacaaggaagatagacatggctgagttatttaaccaatagtttctgccacagtgtgaaagaatgtgatatatctgaaacatctttaaccacataattacaagttctgtgaccacaaaaacatttaattggtcagtttattggagtcaataatgtagaagtgggtcacacgttgraggctgggaaattcttgcattgttgctcgtgagttttgaagactctcaccagggacattaatggacggaatattgggagcttagctcttcctgctggagttgtaaaagggcagaaccgtttttcataacctaagaccgaacagcatcttccaaaattagcttcggactgggcagcaatttcagctaaactccatgcagcttttaaagctttgtattaattatagcttgggtac

SEQ ID NO: 411925 - DNA, 459 bp, Homo sapiens
aaataatttcacaagcacagagctgtgaaaattttaaaaaatgtattcttaactattactatttttctatgtttatctaatggcttgatttttctggtggcatgcttagcatctttaaagagaaaacttgtttcattaagttagtaatgtatgtttctgatggacatgtgtgcgaccatctagggagaaaggaaggaaagaggagaaactggtgtagaactgagctctgaggttcaccaaactgccatctctgcagttaccaatggggcactagggttttctagattttctgccattttcatttagtcaatttctagctgtaggaacacacctgtctttcaagctcaatgcagcactttgtcaattggcccctaatgcaacactctggggccaccacgtctcaaagatggtctgaaatgggctgtargacttcaactccaaggtgtgatactgggccat

SEQ ID NO: 411926 - DNA, 459 bp, Homo sapiens
gtgattttcaaaaaataatctttaataaagcttttatgattgttcactcaaaaggtgaaaagcctgctgaagttccgggtttccttcttggcccattacttaggaattactcatttccccatttttggaaaaaaaaaaaaatacwtgtgtgtaggacccatttcctaccaggaattgatttaaaaaaaaactatgaatcaagcttgaaaaagagttaaggctagttgactgtgcttccgggtctattttaaaaggaaaggggtgcttttccacttttaagggaattcagtgaaaaagtacaggagtggtccatttccagtcctggcaagcagatcaatgttcagagcatctgtggatcaactggctggcacaaaaacagagtggctagattagcttcatcaccttactcagtggcttagctcaaacgcttaaggcatttttcagagtgcattggaccca

SEQ ID NO: 411927 - DNA, 476 bp, Homo sapiens
caggagtggtccatttccagtcctggcaagcagatcaatgttcagagcatctgtggatcaactggctggcacaaaaacagagtggctagattagcttcatcaccttactcagtggcttagctcaaacgcttaaggcatttttcagagtgcattggacccaggactgagtttggataacaccttagaattattagagaaatcatatacgcaccttggtttttgtcccagagagaaaacatgggcccccaaggccctgtttcccctttgcaaggtgttagctgcaaacatgccaccagcagactgtgggttagacyaagcataaagcattcctcaggcttttcaaggaacacaatagcacatgatccctttgagatttgaagtccatcttcaagcatccatccattcttcttctacctacatacatcatcagatcaaaatgtgccccatactgagagctgaaaaatgttttgtaagga

SEQ ID NO: 411928 - DNA, 543 bp, Homo sapiens
aatgaactgctttctttctggcacagtttagcaacacaaaaataatcctcattcccaaagactcccttttaaagtacatcttgtctttttagcaggtaaactctgtgaaagcagggattatgtcttacatgggttttgtagatcctcagccacacattgtgggtgcttagtaagtgataaagatcaaaatagcccaagaaaataggatgagtattaaaattatttcatttagggaatacaagttgtgaaaataccaaagttcaaatatttaatgttggcatattacctaacaatttttttctctatataattattcttcttaaatagcatagataataggacaaactcatatatttggcactaatatcaaccactgagaaataattcattttatatgccacgcaaataaaccctatattacatagtggttagatacggggagatatagatatcgaaggtttacyatgtgtttgatttcaccgaaaactagaactgcattagatcatgcaatacttggtgatgatcctttgacataggtactgt

SEQ ID NO: 411929 - DNA, 560 bp, Homo sapiens
acttacatcgttttacatgcactcgtgtgtatgtgtatgtgcgtatgtgtgtgtgtgtgtttctatgcaattttgttgtatgtgtagattcacatggccaccaccacaaccaagatatacagcagttccatcatctcgaagaccatttgtgctacccttttatcgtcatcctgtttccctcccttcatctctaacctctggcaaccgctgatctgttctccacctctataattttgtctttttgagaatgttctataaatggaatatataagtagaaaaataatattaaataacatttactgagcactcactatgtgccaagaactgtttttggttctgtgcaagtataagyttatttgatcctcttcggaacccactgtaatcatctcttttattattcttactttacagatgtggaaactgagattattacccaattttatgcagcaagtcactggcagagctgagaggaaaatcaagatctggctctagactctgaagttgtaattatcatattatctctctaaattgagtcagcataaatgtttaagaattaaata

SEQ ID NO: 411930 - DNA, 560 bp, Homo sapiens
acttacatcgttttacatgcactcgtgtgtatgtgtatgtgcgtatgtgtgtgtgtgtgtttctatgcaattttgttgtatgtgtagattcacatggccaccaccacaaccaagatatacagcagttccatcatctcgaagaccatttgtgctacccttttatcgtcatcctgtttccctcccttcatctctaacctctggcaaccgctgatctgttctccacctctataattttgtctttttgagaatgttctataaatggaatatataagtagaaaaataatattaaataacatttactgagcactcactatgtgccaagaactgtttttggttctgtgcaagtataagcttatttgatcctcttcggaacccactgtaatcatctcttttattattcttactttacagatgtggaaactgagattattacccaattttatgcagcmagtcactggcagagctgagaggaaaatcaagatctggctctagactctgaagttgtaattatcatattatctctctaaattgagtcagcataaatgtttaagaattaaata

SEQ ID NO: 411931 - DNA, 600 bp, Homo sapiens
aacattgtaaactatttctccatcttctcatcacacttaatccagtaggtttcaattgggagtgtacaaaagaatactcaatggagtgttctccctagagaacacttttggttaatggagtgaaggtccttttcacacctcctacagagggatctagatttgcaaggagctaagcagwttagaattcacggcaagtgtgtcatggaaacagcatttttagacatcagccaatttatggggaaaaggaagagagagcaatgcgtttaaatagcacattgttgatatgcaaataggatcatgtagttcaggcctaaaacgatttagtaatttcacgtcccctctaaggcaaaatctcaactttgccagggtgttaaaaactccataatccaggtcccatgtatctttcaggcctcaacttccatcactcttctgtgtgatccagatgtcctaaatgatatggagtctcaagaatgattctatgtcatttcattttctaagtctttgcccatgctttcccctccttagggaaaagcacccctttaacattttttttatttaactgccaattggtcatcctgtaagggtttattcacataccac

SEQ ID NO: 411932 - DNA, 510 bp, Homo sapiens
tatccttgggagtaagaaagcatttttatagtgtgtagttatgctctttccaattgtttgacaactggggaaataaattgaagtgtttctagcatatttaacttmactctaagcaaagcctgatcattttgggcctgtgactcctattgactgtgtatcttctggttccaatgtcagagctaagtggtctgtttaaatctttactgggggcttttaactgcctgtttatgcaatatctatgtaatgtttgtccaattttatgcacttgaacaattttatcttgatttttggataagaaaaagggtaaagtcagtatccagccttaagggtaaatacaatactaatgagtgtattagtcctttcccttctcactcccatgtaaattgaagtacatagtcaattctgggaatgtaaagtctccaaggaagttaactgagctaagtgttggggccaaacagcctttctgactgctcatcaaggaatccccatcagtctttggaaggtgacctg

SEQ ID NO: 411933 - DNA, 526 bp, Homo sapiens
taattttgcctttgccttgtgatctgtattgccctttgaagcatgtgatcctcgtgayctactccctgttcgtacaccccctccccttttaaaactcctaataaaaacttgctggttttgtggctcagagtcaccatcatggtcctaccaatatgtaatgacacccccagaggcccagctgtaaaatttctctctttgtactctttctctttatttctcagactggctgacacttagggaaaatagaaagtacctacattgaaatattgggggctggttcccctgatacttgtttagttaaaatttaaattggtttaaaggagtagatttttaaaaggcaaattagaaggagtaacttcaggttcgagatagggaactccgcccaagcacctactatccaaacctcccaaacgttccaaattctctgttggtgcgatgataaaaatgcaaagtagggacagatctgtatttactggaagccacagatgctcaatagcaaatttctcaaatgtttggatatgtatgt

SEQ ID NO: 411934 - DNA, 573 bp, Homo sapiens
ggtaaagaaatagccactcatactggccaagatgcarggttgtttagtcatatcgtggtttggacagtgttcacgtttctatctgaattcagacgtgactatataggggggcctcaggcttgccttgatctgtcgtcatcacagagtggccttacatgaggttggtgttctgtggaattgctcatgtacaacaggagagacctgcagcctggctgtgagggccaggccatcccaggtgtcagagcctgctactctctttcccatcttttatatacacactctgataagtgagtacaaacacatattcatatatagtcaaaggttttatatactttattttctcttattaggaacatttaaccttgcttaatgaatctactgtatataatgtatatgcatatatgtatatctctaaagaggtaattcatttttattgtagaaacaaacaaaaggaaacaaaaaagcaaaagggaagtcatcaatactataattttctcaattgaattcaacatctgtgaacagttgggaccagaaacaaattggttagactggttattaaattagttagttgac

SEQ ID NO: 411935 - DNA, 493 bp, Homo sapiens
taagggtgggagagggcacatgrgcttgagagtggggaggacacagtctggacttgatcctgctacagattcaacatatgactggacaatccggtcacctctctgggcctcagttaatgcatctgcggaatgagaggattgcattagaagataggcaatgattctttcactggatgtgacaataattgggggaaggggaaaagggtgtaataaaggttttagagcttgccaggattggtgctagtactaggtcaacaggagggacctgcttcctttctctcctccacctccatctctacctctccttatgcttcatttccatatatcttcccccattatgaccccattaggttctgtgttaatcctgcctcgtccttaagctcaccttcagctgcctctgcccatcctgccttgcttccttttggagagggcagtggccccattcaatgcttagggacaaggtacctggtcctctcctggagagcctgctcct

SEQ ID NO: 411936 - DNA, 493 bp, Homo sapiens
taagggtgggagagggcacatgggcttgagagtggggaggacacagtctggacttgatcctgctacagattcaacatatgactggacaatccggtcacctctctgggcctcagttaatgcatctgcggaatgagaggattgcattagaagataggcaatgattctttcactggatgtgacaataatkgggggaaggggaaaagggtgtaataaaggttttagagcttgccaggattggtgctagtactaggtcaacaggagggacctgcttcctttctctcctccacctccatctctacctctccttatgcttcatttccatatatcttcccccattatgaccccattaggttctgtgttaatcctgcctcgtccttaagctcaccttcagctgcctctgcccatcctgccttgcttccttttggagagggcagtggccccattcaatgcttagggacaaggtacctggtcctctcctggagagcctgctcct

SEQ ID NO: 411937 - DNA, 569 bp, Homo sapiens
ggaaaaaaaaaaaaaaaaagtgggggctgggattgttacatatggccaaaaatttaagcttctttcaatagtattagtattgaaataatacatctttaaaacgcttgagggattagatagggaaagaaaaggcacgtacaaaaaaatccaaccgatgccgatcctgtgatttacgtaacaccacaaacttgcaaaaggcaaaaaatcagaagcaaaaatccataaaccatcaaaatacagaaaccaaaaatcccaagccaccacaccagaaagaaaaaaacccagaacaacagcaaaaacccctgtcctaaataaaaataaagcaaatgaacccaccgaaaactgcttggcaaatatttttctcgtggtgcctaatattctagttggaaagagctgtgatgtttattttattttatttttctcttactcgcctctctaaccctactatatatataacatacttttcccagtggttcaaacctctcgctcccttttgtgcatttagctcgatctgctgagtttmtgggtaagaaagaaggaattagccccagaccccgggaaagcaaagc

SEQ ID NO: 411938 - DNA, 483 bp, Homo sapiens
ccaagagcctttggcactagaacagaacctcgtaaatctgcagcccaagttgaagttcatctggccctagtccacacgctattcctggaggtagcaaacatgagctcaaagaagagagatgaaatcacattcttgctttaaaatatatacttttttaaaaaagacgaaaagatatttgtctctgggggaggaggaaatggcgaacaagtaccaggagatgggcattcccttactctaatgactgcagttgagtcttcaggccaaaatagaaacctgtagatggcaactctctctccacctccccgccccgcccgccaccccaagcttataaatagaagtttccagtatcctatttggaagactttccaatactagaggccgaagcattggctagttttaagggttgttgatagtgacagtaaggctagatgctgttcataaaaactgrgcgacttgaaggagacagccagaaaaagtgggaat

SEQ ID NO: 411939 - DNA, 483 bp, Homo sapiens
ccaagagcctttggcactagaacagaacctcgtaaatctgcagcccaagttgaagttcatctggccctagtccacacgctattcctggaggtagcaaacatgagctcaaagaagagagatgaaatcacattcttgctttaaaatatatacttttttaaaaaagacgaaaagatatttgtctctgggggaggaggaaatggcgaacaagtaccaggagatgggcattcccttactctaatgactgcagttgagtcttcaggccaaaatagaaacctgtagatggcaactctctctccacctccccgccccgcccgccaccccaagcttataaatagaagtttccagtatcctatttggaagactttccaatactagaggccgaagcattggctagttttaagggttgttgatagtgacagtaaggctagatgctgttcataaaaactggrcgacttgaaggagacagccagaaaaagtgggaat

SEQ ID NO: 411940 - DNA, 483 bp, Homo sapiens
ccaagagcctttggcactagaacagaacctcgtaaatctgcagcccaagttgaagttcatctggccctagtccacacgctattcctggaggtagcaaacatgagctcaaagaagagagatgaaatcacattcttgctttaaaatatatacttttttaaaaaagacgaaaagatatttgtctctgggggaggaggaaatggcgaacaagtaccaggagatgggcattcccttactctaatgactgcagttgagtcttcaggccaaaatagaaacctgtagatggcaactctctctccacctccccgccccgcccgccaccccaagcttataaatagaagtttccagtatcctatttggaagactttccaatactagaggccgaagcattggctagttttaagggttgttgatagtgacagtaaggctagatgctgttcataaaaactgggcgacttraaggagacagccagaaaaagtgggaat

SEQ ID NO: 411941 - DNA, 483 bp, Homo sapiens
ccaagagcctttggcactagaacagaacctcgtaaatctgcagcccaagttgaagttcatctggccctagtccacacgctattcctggaggtagcaaacatgagctcaaagaagagagatgaaatcacattcttgctttaaaatatatacttttttaaaaaagacgaaaagatatttgtctctgggggaggaggaaatggcgaacaagtaccaggagatgggcattcccttactctaatgactgcagttgagtcttcaggccaaaatagaaacctgtagatggcaactctctctccacctccccgccccgcccgccaccccaagcttataaatagaagtttccagtatcctatttggaagactttccaatactagaggccgaagcattggctagttttaagggttgttgatagtgacagtaaggctagatgctgttcataaaaactgggcgacttgaaggaracagccagaaaaagtgggaat

SEQ ID NO: 411942 - DNA, 544 bp, Homo sapiens
gttataataggcaacgtggttctaaggtttttttttttggtggggggagggtgcctggttgattttaagtagaagagttctccaggcggaggtagcccggccttccccttggattgacttctcagggcatcttaattctgctgcctgtctgataccgagatagtgagggatgttttggtgtaaaacaccatagtggctggaaatgctgtagttttgccggcggtggcaggacgtatgtgtagggggtgtgttgaggaggtttgtggatggcgtggagcaatggtaggctggtctgtagccctctgtgartcaacatcgaatggcgcgtgccggtttccagcactgcgcaacaagtgggaccgccgctgccgccgcgagcacagcgagggtgcagcgtggtggcagaactggctggtttctctttgccccagtggaaaccaggaacggcccctcccaaccctcccgatgtccactccgagacccacaacttcaccaaaagaccatacccgactccccactcccccgctttgccaggcgcagtgag

SEQ ID NO: 411943 - DNA, 532 bp, Homo sapiens
tttgtctttcctctgagatgctctatcctgcttttctgcctttgctggggtcagaagtgttaatcccactgtacaggtgaagagactaagtctgggaaagacaaatagattcratttttgtaaagccagaaaaaaaagcctgttgatttgtttcaatgacttgttccttatcaactcacattcctttaccaggtagcttctcatgacctgcttgttgtttaaaatctactctcttagtaccgtaaatggccctattatcccaaaaactttccatgaaggaaggttcagccattctattggtttcctctgctgagcatctactcaggcccaagccccacccctcttgcaaatggaatccagctgtagttgccacaagcggaaaaatctgtttgttctaaaagagagaaactagagcagcctgattgtgtctccctggtgaatgagttgatgagtgaatctgtcttatccaagggaaaagctagaagaaccttcccaggtaatctgaagtagcccctcaggttccagagaggga

SEQ ID NO: 411944 - DNA, 515 bp, Homo sapiens
gttcaatcaggaaagcagaaccaaaaataatacagaataatggatttattataggaattagatcttatacaattgatatgaggccaaaggtatatagtgagagtaagtcctaaaaaatcttttgaaatctcaatgaaaaatatttttatatatacttatggtrtaagaagaaccaatcagagtaaaatttggactgtctctgggaaagaggagtctcaaactggagaacaaaaaaattcggctccttgtgacatggtttgaatcctggatcaagtcttacctggtctgtttacttacataagacaacaaattctctttttttgatttaaaaaaaaagaaaaatatttttatatataaaatagatacacatagatatatgtgtatatctatatataaaatgtatgtgtatgtgtgtgtatatatgtgtatatatatatgtatatatgtgtatatatatacatatatatatatgtgtatatatatatgtatatatatacagagacactggaagaaaa

SEQ ID NO: 411945 - DNA, 592 bp, Homo sapiens
aaatgatcaaaacacaacaaataaacaatgcaaacactgtctgattgtatctgcatgcaaataaatcaaaatgatcccccgataagatgctagttattaagcatctactgtgatctagccactttacgtacattatagcactcatcttcccaatgactctgtaagattggtgttattatgcttgtttttcaggtgagtaaactgaggctcagaagaccgatagccaatgtagcagagataagatttagaggccagtcttctggcctcaaaatctgtgctgtttttcaccatgtctaccatcttctccagatttctcaaacccattctgtgtcccatccaccaacaaagcccacacattttatatggctggtgctggtatggaaaaaacttgagactttttaaaaattccatggctattagtttaattatctcatcagtcagttaaggaagtatctcctttatttattggtgtgttyctcatatttaatgcatgttattaatgtattaaattaataatagtaatgcaaattaaaactgtagcatctggtgttaagcggcaatgcttgatatacaaacttaaataaataaataa

SEQ ID NO: 411946 - DNA, 568 bp, Homo sapiens
cctgactctgttgaaggccaactaatcttaaaggataagtttatcactcagtcaactgcagacattagaaaaaaacttcaaaagtccaccttaggcctggagcaaaacttagaaaccctattgaacttggcaaccttggtttttttaatagacaygaggaggagcaggtggaacgggacaaatgggattaaaaaaaaggccactgctttagtcatggccctcaggcaagcagactttggaggctctggaaaagggaaaagctgggcaaattgaatgcctaatagggcttgcttccagtgtggtctacaaggatactttaaaaaagattgtccaagtagaagtaagctgccccctagtccatgccccttatgtcaagagaatcactggaaggcccactgccccagggaatgaaggtcctctgagtcagaagccactaaccagatgatccagcagcaggactgagggtgcccgaggcaagcgccagcccatgccatcaccctcacagagccccgggtatgcttgaccatagaggctaactgtctcctggacactggtgcggccttctcag

SEQ ID NO: 411947 - DNA, 540 bp, Homo sapiens
tcccttttcctcatatcctcgccagcatttcttattgcctgtcttttggatataagccattttaagtgggktgtggtgatagccaccccaccataggagtattgccagactaccaccagtgttgcctgtaggcccaaggtttcttaagtcagcttgtcattaatgttgcctggcttgggactcatccttcaggacagtaggcttccctctggtccagggcaggtcaagaaatgccactgaagagtcaagtcctagaattggagaccccaagagcccacttggtgctctgccccactgtggctgtgttggtaaggtgcaagacaaagtttcctttacttttccctctgcttttctcaagcagaagttttgtcccatagctgttgcagaacttttccttagttcaggtaaagacgaggttctttgtcccatggccatgaaaatccaggctcacagacaatttgaatggtgagtaggactaggttttattgggtgaaaaggaaaaaaggtggcacagggactctcgcaagaccagcgtccctg

SEQ ID NO: 411948 - DNA, 614 bp, Homo sapiens
tcaaatatgcaaaacttccattaaaatattgcaaaggaaaacatgcacttgtataaaagaaacrtaaggctctgtgcatataccaacacatccttgagcagagaacaattacatgtaggcaataaaaagaccacagatttgatcacccttaaagtacagcagaaactgatatccatataaagattgtttgctaaaattgtattcagttgctctggagaccaaaattctaattttcatcactttctgaacatgatttttgctttttcaaagaagcaaatactgaatgctttttattattctttcttaaatcccttaccaacaacactttatatccaattacaatgaaaagagggactattttatttaaatcttcgtcattttacattgtgtgagagaagatgattcaagataagtgatgagaactgaattccaatgatgtgctaaatactgagccagtcaaggtgctgaaatgtattgctcatttaatctgtcactgagtttctgtttaaaacaagtgtgcaaattttggggcatattgacctactgtatatttttgtgataagaagataaaaagtacaggaacttttttctcattaggtgattatttccttaac

SEQ ID NO: 411949 - DNA, 614 bp, Homo sapiens
tcaaatatgcaaaacttccattaaaatattgcaaaggaaaacatgcacttgtataaaagaaacgtaaggctctgtgcatataccaacacatccttgagcagagaacaattacatgtaggcaataaaaagaccacagatttgatcacccttaaagtacagcagaaactgatatccatataaagattgtttgctaaaattgtattcagttgctctggagaccaaaattctaattttcatcactttctgaacatgatttttgctttttcaaagaagcaaatactgaatgctttttattattctttcttaaatcccttaccaacaacactttatatccaattacaatgaaaagagggactattttatttaaatcttcgtcattttacattgtgtgagagaagatgattcaagataagtgatgagaactgaattccaatgatgtgctaaatactgagccagtcaaggtgctgaaatgtattgctcatttaatctgtcactgagtttctgtttaaaacaagtgtgcaaattttggggcatattgacctacygtatatttttgtgataagaagataaaaagtacaggaacttttttctcattaggtgattatttccttaac

SEQ ID NO: 411950 - DNA, 583 bp, Homo sapiens
gctcaggggcggttctgcactcatatttatacccacttttaattacatacaaattaaggggtggattatgcaaaactttttagaaaaagggtggtaacttctgggttgttgccagggaaaggggcagcaacttccagatgttgccatgtcaatggtaaactgctatggcactgacgggtgtgtcttatggaaaggtgctttcgcctctctcccktttcagctagtcttcaatgtggttcagagtctgagcctcacctctggagttgagtcccatctcttaccttgggtgtattcccatttcacagctgagaaaataaattcatagactggagaacaatatttctccctcctcccccaggcatagttactggtatagctagaaatcataagttttaactgaatagtttaaattttcttttttcactacattcagttataacatctagaaacctgcttttcctattaagaaagtcagctaggtcaatgtcatggaattcagtgaggaaaactaatagagtgtgattgtaaaatcccagagaattgctgaacgatgcagtctgcagtgctttcccttcctggcatg

SEQ ID NO: 411951 - DNA, 530 bp, Homo sapiens
tatacccacttttaattacatacaaattaaggggtggattatgcaaaactttttagaaaaagggtggtaacttctgggttgttgccagggaaaggggcagcaacttccagatgttgccatgtcaatggtaaactgctatggcactgacgggtgtgtcttatggaaaggtgctttcgcctctctcccgtttcagctagtcttcaatgtggttcagagtctgagcctcacctctggagttgagtcccatctcttaccttgggtgtattcccatttyacagctgagaaaataaattcatagactggagaacaatatttctccctcctcccccaggcatagttactggtatagctagaaatcataagttttaactgaatagtttaaattttcttttttcactacattcagttataacatctagaaacctgcttttcctattaagaaagtcagctaggtcaatgtcatggaattcagtgaggaaaactaatagagtgtgattgtaaaatcccagagaattgctgaacgatgcagt

SEQ ID NO: 411952 - DNA, 530 bp, Homo sapiens
tatacccacttttaattacatacaaattaaggggtggattatgcaaaactttttagaaaaagggtggtaacttctgggttgttgccagggaaaggggcagcaacttccagatgttgccatgtcaatggtaaactgctatggcactgacgggtgtgtcttatggaaaggtgctttcgcctctctcccgtttcagctagtcttcaatgtggttcagagtctgagcctcacctctggagttgagtcccatctcttaccttgggtgtattcccatttcacagctgagaaaataaattcatagactggagaacaatatttctccctcctcccccaggcatagttactggtatagctagaaatcataagttttaactgaatagtttaaattttcttttttcactacattyagttataacatctagaaacctgcttttcctattaagaaagtcagctaggtcaatgtcatggaattcagtgaggaaaactaatagagtgtgattgtaaaatcccagagaattgctgaacgatgcagt

SEQ ID NO: 411953 - DNA, 457 bp, Homo sapiens
ttaaagacctgatgtgaaaagcaaaactaattttagcagaaatatatgttagaatatctttaygactgcatgacagggaaagatgtcttaagcacaaagcctaaaagaaaagatgtctgtttataataatattaaaactttctttaaataaaaattcctcatgaacaagagagtctacagtaaaacacatactgaaagaaaatatattccagacaactggtaaaagattattttctagaatatattatataaattatttctataaaacaagaggaaaaaaatacaaacttcccaaaaagaaacttaaatagtaaacctgaatagcaaaagtaaacaaggaaaaagaaactaaaagatgcccaatcctatgaagaatcaagaaaatttattttaaaacagtagagtaccaaggacagaagtgcttctagctaggttggagtaacaaatattggattta

SEQ ID NO: 411954 - DNA, 574 bp, Homo sapiens
tgatcctgtcattgtgttgttagctggttgttatgtggacctgattgtgtaattgctttatagtgtaaatgttctatgtacttcagtatgtttttgtggtggccggttatggtcattcatttccatgtttagtactcccttaaagacatcttgtaaggaaggtgctggtggtaatgaattgccttttgcatatctttgtctaaaaagaatcttatttgctcctttgctttggaagcttagtttggctgtatataaaattactggggagattttttctttaaggatgacgaatataggtccaccatctcttctggcctgtagggtttttctggaagatctgaagttagcttgttgggtttccctttgtgggtgacctactcctctctagctscatttaatatttttttctcttgcattgaccttgaagaatctgagactatggatggtcatcttgtatagtgtcttgcagagttctctgaatttcctcaattttgaatgtcaacatcaacatctctaaagaggttgagaaaattttcagggacaattgtgtgactgagttaattcaaataacggg

SEQ ID NO: 411955 - DNA, 615 bp, Homo sapiens
ttttcctctctgttctaacaggacagcactgagttcaatgcctcacaattgctgcattctccctccctcagtgcccagaggcactccccacagctgctaatgccttggatggaggacgggtggcatccrtgatccaggattttttttctatctcttcggcgcttctttcagtgatatgaagttaaaaccaggtactatgattcctcaccttatttttgattcttatgatggtctttattctgtgtagatgttgatttggtgtccttggggtcggagtgagtgggaggattgggggagctttctattctgccatcttgccccaccacctgttagtacttctcatagtgcgcttaccttatcctgtgataaactcatttgtatacgtgccttaattttcttattaaattataacatctttctgatgatgattattcatagtgtttaatccctttagtgtctaatacacctaaactactaagcaagttttattattcacattgaataattcaaagtcacacagttagtaaagaaagaattcctagaaccagtgctagaataggaatcttagttcaacattttctcttcagtaatcattgtctctcaaactttcatgtg

SEQ ID NO: 411956 - DNA, 615 bp, Homo sapiens
ttttcctctctgttctaacaggacagcactgagttcaatgcctcacaattgctgcattctccctccctcagtgcccagaggcactccccacagctgctaatgccttggatggaggacgggtggcatccgtgatccaggaytttttttctatctcttcggcgcttctttcagtgatatgaagttaaaaccaggtactatgattcctcaccttatttttgattcttatgatggtctttattctgtgtagatgttgatttggtgtccttggggtcggagtgagtgggaggattgggggagctttctattctgccatcttgccccaccacctgttagtacttctcatagtgcgcttaccttatcctgtgataaactcatttgtatacgtgccttaattttcttattaaattataacatctttctgatgatgattattcatagtgtttaatccctttagtgtctaatacacctaaactactaagcaagttttattattcacattgaataattcaaagtcacacagttagtaaagaaagaattcctagaaccagtgctagaataggaatcttagttcaacattttctcttcagtaatcattgtctctcaaactttcatgtg

SEQ ID NO: 411957 - DNA, 615 bp, Homo sapiens
ttttcctctctgttctaacaggacagcactgagttcaatgcctcacaattgctgcattctccctccctcagtgcccagaggcactccccacagctgctaatgccttggatggaggacgggtggcatccgtgatccaggattttttttctatctcttcggcgcttctttcagtgatatgaagttaaaaccaggtactatgattcctcaccttatttttgattcttatgatggtctttattctgtgtagatgttgatttggtgtccttggggtcggagtgagtgggaggattgggggagctttctattctgccatcttgccccaccacctgttagtacttctcatagtgcgcttaccttatcctgtgataaactcatttgtataygtgccttaattttcttattaaattataacatctttctgatgatgattattcatagtgtttaatccctttagtgtctaatacacctaaactactaagcaagttttattattcacattgaataattcaaagtcacacagttagtaaagaaagaattcctagaaccagtgctagaataggaatcttagttcaacattttctcttcagtaatcattgtctctcaaactttcatgtg

SEQ ID NO: 411958 - DNA, 578 bp, Homo sapiens
agacttatttatgtgatgccctttgttaaaggatagcaacatgtcctttaccaaaaaatcaaaagcaaaaacatataaaaccaccaccaccaaggaktcaaaagtaaaagaccacctgaagggacttacttcaaaataatcaaattggcagagtgagaggccattgtgaatggagcagttgaaaaatgggctagtgataaagcaagattggccaggaggtgataatttatgatctggcttatgaatatatggaattctcatataattctgcctaacttttactaataacaaatgctaaagaatcaatttgataataaaagttacaaaacattttttataaaacctataaaaagaacattgatattattatgaatgatacatttttgatcttaagaatgcctgtgcttatttgtcaaaatggaaagactttcagcagttttaaattgcatttcagatgggagagccacttaatctttgatagatttgataaatcataaagaagatcttacatacaattaaaaacttaaaagttgacaggtattcctatacctacatctttttgctcaggaatattcttg

SEQ ID NO: 411959 - DNA, 578 bp, Homo sapiens
agacttatttatgtgatgccctttgttaaaggatagcaacatgtcctttaccaaaaaatcaaaagcaaaaacatataaaaccaccaccaccaaggattcaaaagtaaaagaccacctgaagggacttacttcaaaataatcaaattggcagagtgagaggccattgtgaatggagcagttgaaaaatgggctagtgataaagcaagattggccaggaggtgataatttatgatctggcttatgaatatatggaattctcatataattctgcctaacttttactaataacaaatgctaaagaatcaatttgataataaaagttacaaaacattttttataaaacctataaaaagaacattgatattattatgaatgatacatttttgatcttaagaatgcctgtgcttatttgtcaaaatggaaagacttycagcagttttaaattgcatttcagatgggagagccacttaatctttgatagatttgataaatcataaagaagatcttacatacaattaaaaacttaaaagttgacaggtattcctatacctacatctttttgctcaggaatattcttg

SEQ ID NO: 411960 - DNA, 578 bp, Homo sapiens
agacttatttatgtgatgccctttgttaaaggatagcaacatgtcctttaccaaaaaatcaaaagcaaaaacatataaaaccaccaccaccaaggattcaaaagtaaaagaccacctgaagggacttacttcaaaataatcaaattggcagagtgagaggccattgtgaatggagcagttgaaaaatgggctagtgataaagcaagattggccaggaggtgataatttatgatctggcttatgaatatatggaattctcatataattctgcctaacttttactaataacaaatgctaaagaatcaatttgataataaaagttacaaaacattttttataaaacctataaaaagaacattgatattattatgaatgatacatttttgatcttaagaatgcctgtgcttatttgtcaaaatggaaagactttcagcagttttaaattgcatttcagatgggagagccacttaatctttgatagatttgataaatcataaagaagaycttacatacaattaaaaacttaaaagttgacaggtattcctatacctacatctttttgctcaggaatattcttg

SEQ ID NO: 411961 - DNA, 532 bp, Homo sapiens
attcaacaggagattttggcagggacaaatattcaaactttgttacccaccaacttctagccctcaatgactgtaggctagtctgtgggcattaaatctctagcagacttctatctgagcatattctcrtgtctttagacaaaaagccatcagcttgtggagtactgtctgtagaaggactttgtgaagggagatgtctaagggaatacagcttagacgtttgctacagagcatgtggaattttctgttttcctaaattcaatctaaatagacattctaagacattaaaatcctaccattcatggtatccataaggaattttacctacgtatcaatgtgtttatgtatctgcctacttacattaattggtgaatatatacttaatacgttgtttccacagttttaaacaatgagcattaaatataagctaaaacatcttcccatttaacagtcgtgtatagctcacaaatggaattgattctttttccatttctgattgcttaatacatatttttcctggaataagctttac

SEQ ID NO: 411962 - DNA, 596 bp, Homo sapiens
ttcagtatacatttgttgaatgacttgttggattaatttaatcctaattctgtattattccttagctaatatttgcgttattcctcaaaacgagaaatcaacctggataatcattgaaatcatagaaaaggtccaccaggtgattttaagctggaatrtattacctaacacagccgtttataaatgttgtgcctttaatgatattgacttagctttttcagtgttaggtcccccatctacaatgaaaatcaaaatctctacttttcaagtgattggaatgaaattagataacagacataaattgcctagtttagtgcctaccacattacaggagcttcataaaattagttcatgccattttcccaactagggattagtcaagtacttagggacaaatacaatatggaacctcaacaaaaatattactaagcatcaaccatatatgtggtagcttttttggtgggaattgataaaaagaaagagacagataatataaaatttttaaaaaggtggtatcctaacctaaggaacttacaatgtagtaggaagagggacacatgattaaggcaaattaaaccagcctagaaaaatagcat

SEQ ID NO: 411963 - DNA, 596 bp, Homo sapiens
ttcagtatacatttgttgaatgacttgttggattaatttaatcctaattctgtattattccttagctaatatttgcgttattcctcaaaacgagaaatcaacctggataatcattgaaatcatagaaaaggtccaccaggtgattttaagctggaatgtattacctaacacagccgtttataaatgttgtgcctttaatgatattgacttagctttttcagtgttaggtcccccatctacaatgaaaatcaaaatctctacttttcaagtgattggaatgaaattagataacagacrtaaattgcctagtttagtgcctaccacattacaggagcttcataaaattagttcatgccattttcccaactagggattagtcaagtacttagggacaaatacaatatggaacctcaacaaaaatattactaagcatcaaccatatatgtggtagcttttttggtgggaattgataaaaagaaagagacagataatataaaatttttaaaaaggtggtatcctaacctaaggaacttacaatgtagtaggaagagggacacatgattaaggcaaattaaaccagcctagaaaaatagcat

SEQ ID NO: 411964 - DNA, 596 bp, Homo sapiens
ttcagtatacatttgttgaatgacttgttggattaatttaatcctaattctgtattattccttagctaatatttgcgttattcctcaaaacgagaaatcaacctggataatcattgaaatcatagaaaaggtccaccaggtgattttaagctggaatgtattacctaacacagccgtttataaatgttgtgcctttaatgatattgacttagctttttcagtgttaggtcccccatctacaatgaaaatcaaaatctctacttttcaagtgattggaatgaaattagataacagacataaattgcctagtttagtgcctaccacattacaggagcttcataaaattagttcatgccattttcccaactagggattagtcaagtacttagggacaaatacaatatggaacctcaacaaaaatattactaagcatcaaccatatatgtggtagcttttttggtgggaattgataaaaagaaagagacagataatataaaatttttaaaaaggtggtatcctaacctaaggaacttacaaygtagtaggaagagggacacatgattaaggcaaattaaaccagcctagaaaaatagcat

SEQ ID NO: 411965 - DNA, 619 bp, Homo sapiens
gataatttgacttcttcctttctaatttggatgccctttatacatttcttttgtctgattgctctagctaggacttccagtactatgttaagtgacagtggtaacggtgggcatcctagtcatgttccagatcttagaggaaaagctttcagtttttccccattcagtataatactagctgttgatctgtcctataaagcttttgttatattgaggtatgtttcttccatcccctggtttttgaggatttttatcatagagagatgttaattttctcaaatgctttttcagcatttattgaaataatcatatgattttaatccttaattctgttgatataagtatcatgttgattgatttgtgtatgttgaacaatccttgcatcacatagataaattctgtttggtcatgataaatgaactttctaatgtattgttgaatttggtttgctagtattttgttgaggatttttgcrtccatattcaacagagatattggcctctagttttctaattttgatatgtctttgattttggtattagggtaatgctggtctcatagcatgagtttggaaatatttcctcctactgtattttttggagtagtttgagtaggattg

SEQ ID NO: 411966 - DNA, 615 bp, Homo sapiens
atcatttttgtcattggtaatctcattgaagcaattgttgataggtagtagtattatttacacatttgagtgaaatgaggcagaaaagcttttaaattgttgatgatatcaaattttaaacattatagaggatatatgcatcaataaagaaattaaagtctatgacaagatggtgaactaataaaatcgaaaagattgcttcccaaattcccactcaggaaatactaaatatttaaaaagaggttgcatggaaattgctctaataaactaatttttttttwaaaaaaagtagagaaactcttgaattgaaagaaggttggttattagtgctaggagtatggttggcagatggtctggggtggttacaaaggagtcaagcagaagaggtcaaagacaggtaatagcaggctagggtatttgttggagggaatagagaagattaaacagataaaataggtattgcttactttattagtaacaattctctcaagaaaaagaactctgtggtgtgtgtgtgtatgtgtgtgtgtgtgtggtgtgtgtctatgggaagaagagagagaggtttttttttttgttttttgtttttttttttactttaggttctggggtaca

SEQ ID NO: 411967 - DNA, 591 bp, Homo sapiens
taaacagataaaataggtattgcttactttattagtaacaattctctcaagaaaaagaactctgtggtgtgtgtgtgtatgtgtgtgtgtgtgtggtgtgtgtctatgggaagaagagagagaggtttttttttttgttttttgtttttttttttactttaggttctggggtacatgttcagaatgtgcaggtttcttacataggtatgtacgtgccatggtagtttgctgcacctatcaacccatcatctagattttaagccccacatgcattaagtatttgtcctaatgctctccttccayttgccccccagcccccgacagacagcagtgtgtgatgttcctctctctgtgtccatgtgttctcattttcaactctcacttatgactgagaacatgagttgcttggtttctgttcctgtgtcagtttgctgagaatgatggcttccagcttcatccatgtccctgcaaaggacatggacttattctttgttatggctgcatagtattccatggtttatatgtgccacattttctttatccagtctatcattgatgggcatttgggttggttccaaatctttgctattt

SEQ ID NO: 411968 - DNA, 529 bp, Homo sapiens
tttcctcctgctttttaaatatgtcatgccactttctcctggcctgtaaggtttctacttaaaaaccagctgcccaacatattggagctccagtgtaagttatttgtttcttttctcttgctgcttttaggattctttctttatcctttatctttgaaagtttgactattaaatgccttgagatagttttctttggatataatctgtttagtgttctataaccttcttgtaggttgtagaacaacttgtatattgatayctttctctagacttggaaagttctctgatattcctttgaaaaaactttctacacctatctctttttctaccttctttttaaggccaataactcatagatttgttcttttgaggctattttctaattcccgtaggcatgctttattgttttttattctttttcttttgagacctctgtgtattttcaaatagtctgtcttcaggctcactagatttttctgctgcttgatctgttcttctatttaaaaactctgatgcattcttcagtatg

SEQ ID NO: 411969 - DNA, 529 bp, Homo sapiens
tttcctcctgctttttaaatatgtcatgccactttctcctggcctgtaaggtttctacttaaaaaccagctgcccaacatattggagctccagtgtaagttatttgtttcttttctcttgctgcttttaggattctttctttatcctttatctttgaaagtttgactattaaatgccttgagatagttttctttggatataatctgtttagtgttctataaccttcttgtaggttgtagaacaacttgtatattgatacctttctctagacttggaaagttctctgwtattcctttgaaaaaactttctacacctatctctttttctaccttctttttaaggccaataactcatagatttgttcttttgaggctattttctaattcccgtaggcatgctttattgttttttattctttttcttttgagacctctgtgtattttcaaatagtctgtcttcaggctcactagatttttctgctgcttgatctgttcttctatttaaaaactctgatgcattcttcagtatg

SEQ ID NO: 411970 - DNA, 529 bp, Homo sapiens
tttcctcctgctttttaaatatgtcatgccactttctcctggcctgtaaggtttctacttaaaaaccagctgcccaacatattggagctccagtgtaagttatttgtttcttttctcttgctgcttttaggattctttctttatcctttatctttgaaagtttgactattaaatgccttgagatagttttctttggatataatctgtttagtgttctataaccttcttgtaggttgtagaacaacttgtatattgatacctttctctagacttggaaagttctctgatattcctttgaawaaactttctacacctatctctttttctaccttctttttaaggccaataactcatagatttgttcttttgaggctattttctaattcccgtaggcatgctttattgttttttattctttttcttttgagacctctgtgtattttcaaatagtctgtcttcaggctcactagatttttctgctgcttgatctgttcttctatttaaaaactctgatgcattcttcagtatg

SEQ ID NO: 411971 - DNA, 569 bp, Homo sapiens
ccagttataagctgatacctttttctactatctgtgttatataccatttgcttctagcaagcatattggctagtcttagttccttgcctatggagtgacaaaaccttcattcctagaaactctggaatattccattaatatttcctcctatattgggttgttgcagttttccactgactttagtcacaaggtcatatgagtaataagaagaaatgtaggggattacttgcatgccagwtatgttcctccttaccctcactgtgtagcagcaacccaatctccctttggtagtcaggatcaattgccccaaaagatacagcaatccccttctgccttccagattccctaggatgaggagcataaaccagtcagatggctttctttctttccactttgtggaaaccactgccatgtgtcttggtcaaagcattactatgtcctttgatgaagcttctttccttcggagactatgctttctagacaagtggagtccaaagttgcactgacaggagggccaaatcttgctagtgcctcacaaaggcattggtgagcatagccgctcacatttc

SEQ ID NO: 411972 - DNA, 569 bp, Homo sapiens
ccagttataagctgatacctttttctactatctgtgttatataccatttgcttctagcaagcatattggctagtcttagttccttgcctatggagtgacaaaaccttcattcctagaaactctggaatattccattaatatttcctcctatattgggttgttgcagttttccactgactttagtcacaaggtcatatgagtaataagaagaaatgtaggggattacttgcatgccagttatgttcctccttaccctcactgtgtagcagcaacccaatctccctttggtagtcaggatcaattgccccaaaagatacagcaatccccttctgccttccagattccctaggatgaggagcataaaccagtcagatggctttctttctttccactttgtggaaaccactgccatgtgtcttggtcaaagcattactaygtcctttgatgaagcttctttccttcggagactatgctttctagacaagtggagtccaaagttgcactgacaggagggccaaatcttgctagtgcctcacaaaggcattggtgagcatagccgctcacatttc

SEQ ID NO: 411973 - DNA, 569 bp, Homo sapiens
tttttaaactttagctaaaattttgattaactaatatgtttagctcagatattaagatcagaatcagaggaacatgttctgcaatgctgacctcaaccatcactagtctgtttattctttctctatggataaattattaggaaagacttactcaagacacattcattatcagtaacatgtattagcagacaaaggcgccagatactacccaagcattcatgagatggagacacccctgcactaatgacaaatattaaatgaattatcaaaatacactcttatgaatgctctaacaagaatatctttaaaacgcttctgagaaaggagagaaacacaggccaggagaataggcaaaagcttcacagatgtaataaataaatgggataatatctgggaaagtatttttcaaacaataaagatttataccatgtaagaaattatacttgttactataaattcctccatcacagttctcrataatttggacatttttggcatgtaactttgtacatgtaagtattcaaaatatttcatggactgccaaggctcatcatctttttaaacttttc

SEQ ID NO: 411974 - DNA, 568 bp, Homo sapiens
ctctgaattctgtctatgaaaggcattgagttttataagttttattccaacaggcatttatattactgacagatcatgttgctcatgtgaaaacatgacttttgacattattagggtggatctcttttgtttttgtcttttgtccaaggtcaaatggttttagtcctggaatttactatgctatttacatagaagcacattgttgctcatatctctccttggctattttaggcttccaagtgctgttttccttgggactttgactcacatgtgtgcacttcaggagttggcctaggatttgaaggacattttatgcacagttcagtgttctcactttgtacagatttccattcctagatttctgtcctcaatttcacagccattctgaggtgttcagagccctgaactctgatctctgatccatccacccaatcagccagatgsttctctttgagagccatcctctatgtcccacaccaactagttacaattccctttataaagatctttgtgttctacaaatcacacttgagtaatagctactaagcaatgcaatcaatcaatttaa

SEQ ID NO: 411975 - DNA, 623 bp, Homo sapiens
atgagtaaacataatggaaaaaaaaactctatagtagcaataaaaaaagataaacaatctaagaacaaacctaacaggaaatgggcatgatttatatgaagaaaactttaaacacactactgagagaaacaaaaaaatgtaaacaaatgggaggrtacatcacgtttgcaggaagacaaaacatcacgtagatgttaattctttctaaattcatctattaatttaatacaatcccaataaaaataccaaccaggttttgttggaaattggcagattctaaagttcatattaaaaagtaaacagacagcaaccagcctggccaacatggtgaaactccgtctctactaaaaacttaaaaattagccaggcatggtggcgtgcacctgtagtcccagctactcaggaggctaaggcaggagaattggttgagtccataaagcaaaggttgcagtgagccactgcactccagcctgggtgacagagcaaaaactccatttcaaaaaaacaacaacaaaaaaaaacaaataacaacaacaaaaaagcaagggagtttctgaaaataagagtgataagccatttcagatattaaaacataaagttgtaaagttaaaacagtatgatat

SEQ ID NO: 411976 - DNA, 623 bp, Homo sapiens
atgagtaaacataatggaaaaaaaaactctatagtagcaataaaaaaagataaacaatctaagaacaaacctaacaggaaatgggcatgatttatatgaagaaaactttaaacacactactgagagaaacaaaaaaatgtaaacaaatgggaggatacatcacgtttgcaggaagacaaaacatcacgtagatgttaattctttctaaattcatctattaatttaatacaatcccaataaaaataccaaccaggttttgttggaaattggcagattctaaagttcatattaaaaagtaaacagacagcaaccagcctggccaacatggtgaaactccgtctctactaaaaacttaaaaattagccaggcatggtggcgtgcacctgtagtcccagctactcaggaggctaaggcaggagaattggttgagtccataaagcaaaggttgcagtgagccactgcactccagcctgggtgacagagcaaaaactccatttcaaaaaaacaacaacaamaaaaaacaaataacaacaacaaaaaagcaagggagtttctgaaaataagagtgataagccatttcagatattaaaacataaagttgtaaagttaaaacagtatgatat

SEQ ID NO: 411977 - DNA, 575 bp, Homo sapiens
  misc_feature (1)...(575): n = A,T,C or G
tggtctgtaattttcttttcttttaattttcttgtctggttttggtatcacggtaatgctggccttgtaaaaagagcttggatgtattccctcatcttcattttttttttttttggaagagtttgagaggcactggtattagttcttctttatatgtttggnggaattcagccatgatgccatccggtcctgagcttttctttgattggaagttttttatgcactaaatttccttactcataattgttctgttcagacttcctatttctccctgattcagctttaaaaggttgcgtgtgtytagcaatgtattcatttcttctaggtgatccaattttttggcatatactagttcacaatagtctcttatgatcctttgaaatatggtgtcagttgttatgtcataatgtctcctcttttatttctgattttacttatctgagtctgccctttttttcttaaagagtctagctaaagatttgttgtttttatttattctttctaaaaacaaaaactcttagttttgttagtcttttgtattgcttttctcatgtctatttcatttttttctgctc

SEQ ID NO: 411978 - DNA, 583 bp, Homo sapiens
aggaaaggctttcagttattccacagtcagtatgatactagctgtggatctgtagtatatggcttttattatgttgaggtatgttccttctatagccagctttttgagagtttttttatgaagggatgttaaattttatcaaatgctttttcaacatcaattgaaatgatcatgtggcttatgtcctttcttttgatatgatgtatcacattgattgatttgcatatgttgaacaattcttatttccctgggataaatcccacttggtcatgataaatggtcttaatgagttgttgaattcagtttgtttgtattttcttgaagactttcacatgttcaccagggattttgacctttatccttcctttattgatgcatcttcatcyggttttggtatcagggtaatactggcctcatagaatgagtttggaagtgttccttcctcctctattttttggaatagtttgagtagaattggtattagttcttctttaaatgtttggtaaaattcagcagtgaaggcattgactcccaagtttttctttgctgggagactttttattacagcttttgtcttgttact

SEQ ID NO: 411979 - DNA, 512 bp, Homo sapiens
gaatcttaatgagctgcccaaatttgagaattttactcaagaatgccctgacttggctaggcgtacagctccatcagtgaaggcacacagaagtaaggacgttacagttggaagtcacaatcatccgttgcatttctatatgcttaataattttattgttaagaaattgacataggaattctgaaaatcacaacctaacaattctgaaaaagaagttaagaaaatatgttcatttacaattttatcaaaaagaataaaacacttaggataaacctagtcaaagtggttaaagacttgtatactgaaaactacaaatcattgctgaaagaaatgaaagacaaaaaaaagtggaaaaatcctgtgttcatagattgaaagacttaatktattatgctgtcaatactacccaatgcaatcttcagagtcaatgcaattcatatcaaaatccaaaatgacattcttttgtggaaatagacaaattcattctaaaatttatatggaatctcaaagga

SEQ ID NO: 411980 - DNA, 502 bp, Homo sapiens
ataatttggtggataggggaaggccagtgagtccagagtgctgattggttgggttggagatgaaatcatcgggaattgaagctgtcctcttgcactgaatcagttcctgagtgggggccacaagatcagatgagccagtttatcactctggatgatgccagctgctccaacaagtgcagggtctgcaaaaatatcgcaagcgttgatctaaggaacagtttarggatgatcagaatcttgtagcctccagctgcatgactcctaaaccataatttccaatcttgtgggtaatttgttattcctatgaaggcagtctagtcctcaggcaagaagggggtttgttttgggaaagggctgttatcatatttgttgtatttatttattattattttttaaattttactttaagttctgggatacatgtgctgaatgtgcaggtttgttatatacttaggattgtcttggctatatgggctgttgttggttccatatgaaatttaaa

SEQ ID NO: 411981 - DNA, 573 bp, Homo sapiens
atcatttggaggagaagaggcattctggttttcagaattttcagcatttttgcactggtttctcctcatcttcgtggatttatctacttttgatctttgaggctaatgagctttggatgggatttctgtgtgggtttttttttttttttttttttgmttgttattgttgatgttgatgttactgctttctgtttgttagtttttcttctgacagtccagcctctcttctgcaggtctgctgcagtttgctggaggtccactccagaccctatttgcctgagtatcaccagcagaggctgcagaacagcaaaaattgctggctgctccttcctctggaagcttcatcccaggcggcactggcctgatgtcagccagagctctcctgtatgaggtgtctgtcaaccccagttgggaggtctctcccaatcaggaggcatgggggtcagggacccacttgaggaggcagagctggagcactcgtgctggtagaaccctcattttccggatccactgctctcttcagagtgggcaggcaggaatgtttaagtctgctgaagctgcgcctacagcctc

SEQ ID NO: 411982 - DNA, 603 bp, Homo sapiens
ttgccttcagtcactactgactaacacaagaaaaaattacaaggcaaatgaaagcagcacatgccaatagacaaagtgatcaatggaccagattcagatatgacacagatgygggaactatcatgcagggaatttaaaataattatgattaatatgttaaaagcactaagaaaagggtgaacaacatacaaatcatatggacaatttcagcagagagatggacaaaataaaaacgaatcaagtagaagtgctaaaagtgaaaaccacataacagagatgaagaatgcattcagaggccaggtgcagtggctcatgcttataatcccagcactttgggaggctgaggcggaggatcacatgaggccaggagtttgagaccagcctggccaacatggtgaaaccccatgtccactaaaaatacaaaaattagtcgggcctggtggtagatgcctgtagtcccagctactcgggagactgaggcaggaggatcacttgaacctgggaggcagaggatgcagtgagcaaagagtgcaccactgtactccagcctgaatgacagagtgagcctctgcctccaaaaaagtaaaaaaaaaaaaaagaata

SEQ ID NO: 411983 - DNA, 519 bp, Homo sapiens
aatcaatgtggcaaacttcattgttttattgtaagaaattgccacagccactgcaaccttcagcaatcaccatctgatcagttggcagccatcaacattgaggcaagatcctccaagagcaaaattagaactcactgaaagctcagatgttcatcagcaattttagcaataaaacttgtttaaagtatgtatgttttttagacataatgttattgcactcttaatagactacagtatggtttaatgtaaattttatacacatagggaaacaaaaaatttgactcgcttctcactttttcaaaatattcactttattgtggccacctagaactgaacccacaatatatttctgaggtatgctcggaattcatttaaaattgattccttaaaataatatgagatgaaaatcaaatgttattttgcctacaatgataaccattgttagcacattttattggrtagttcatcccttccctctactctgcaatatctgttctgaataaatgaattttttcacat

SEQ ID NO: 411984 - DNA, 532 bp, Homo sapiens
ataagttgttatagtagatatctttgtctttttcactttttcagactcagggggactattttaaatatttataaattggtataataattgctgcgaattttggtagatatttcttatcacatcgaggagttctcttcttactcaagtttactcaacactttttggtttattttttagaaatcataactggtgttagaggtttgctaaattcttttgctgcttcagtcaataatctcttgattgtatttatgtggtgcttgagattgactgatttttttcaaatgttggactaaccttatgtatctcacatattgtagctactctttagaggtatgatggatctccccacaaagtctggttcaggtgtcaagacctacacaccaagaaaygatgagaagaattatcattcacatgagactttctggggcaagcagagtggctaccaaacaggtcttaaaatggcttgagaaatccaggtaaggagattggcttgaaattgttatggtgattaggggatgggtctaggatgaaa

SEQ ID NO: 411985 - DNA, 447 bp, Homo sapiens
ccagccatgtgaaacagtaaatccatattaaacctctttcttttgcaaactgcccagtcttaggtatgtctttataagcagcatgaatattgactaatatatgtcacatgtgtacttgaaaaaatgtatgaatyatattgttattggatgcaatattcttcataagtccattaggtcaagtttcaaatattttgtttatatattgtatattctttctgatattttttcctactggggcagttaactaatgagtgagatatattaaagtctaggtgtctgctgatttgtctattcctcttttaggtctgtcaaattttgctatatatggttttaaggtatgttttatgtgattcagatttaggattatggtatcttcagttgatcctttttcattacaaaatgtccctgttttcccatagtctattttgtctactattattacagctt

SEQ ID NO: 411986 - DNA, 583 bp, Homo sapiens
aactatgaagatattttcattactaaatatacaaataggccagttgcagtggctcacacctgtaatcccggcattttgggggaccgaggcaggcagatcgcctgaagtcaggagttcgagaccagcctggccatcatggagaaactccatctctactaaaaatacaaaattagccgtgtgtagtgacacatgcctgtaatcccagctacttgggaggctgaggcaggagaatcgcttgaactcaggaggcagaggttgctgtcagccaayattgcaccactgcactccaacctgggcaataagagcaaaactccatctcaaaaaataagtaaataaataaataataatatatatacattttcatacacatatacttgtctaaatatggcatataaatctaaataaataaatggatatatccatctccttgtgtataattcatatttatattaatatatactcattctcttatgtaagcccttccccttgattattggtgtgacctgtgacttacttctgtccaacaaaatgcagtaaagatgatgggatatatgcaattacatgcacatgattatatgactgt

SEQ ID NO: 411987 - DNA, 563 bp, Homo sapiens
aaaacttggaaattattcattttttgcttatttatttttaatttattactttttggtcacaaacatcctctgtatgattcatgttgtttgaaagacatttttctattcctaccacctgagattacaacttgatatttgtcctcttctggcttatattgctatgtacttaagttcattgttcttttattctgccttgtttaatttgatgtcagtttcatccagttagtttttcattttgatattgtaatttttttagtttaggaagttccattgatttttttccctatcttccttttctattcttctaattttcttgtttaaattcttaagcactttcrtaatagttgttttattccccctttctgctaatcttatcatttctgtcatttcttgatctctttctgttaattgatttttatcttgattacaggccaccttttttctatttcttctttcgtatagtaatcattgattgaatggctgatattttaccatattgattgaattttactctcttccttattccgtttccaggggtagttaagtaacttataaatattatt

SEQ ID NO: 411988 - DNA, 563 bp, Homo sapiens
aaaacttggaaattattcattttttgcttatttatttttaatttattactttttggtcacaaacatcctctgtatgattcatgttgtttgaaagacatttttctattcctaccacctgagattacaacttgatatttgtcctcttctggcttatattgctatgtacttaagttcattgttcttttattctgccttgtttaatttgatgtcagtttcatccagttagtttttcattttgatattgtaatttttttagtttaggaagttccattgatttttttccctatcttccttttctattcttctaattttcttgtttaaattcttaagcactttcgtaatagttgttttattccccctttctgctaatyttatcatttctgtcatttcttgatctctttctgttaattgatttttatcttgattacaggccaccttttttctatttcttctttcgtatagtaatcattgattgaatggctgatattttaccatattgattgaattttactctcttccttattccgtttccaggggtagttaagtaacttataaatattatt

SEQ ID NO: 411989 - DNA, 563 bp, Homo sapiens
aaaacttggaaattattcattttttgcttatttatttttaatttattactttttggtcacaaacatcctctgtatgattcatgttgtttgaaagacatttttctattcctaccacctgagattacaacttgatatttgtcctcttctggcttatattgctatgtacttaagttcattgttcttttattctgccttgtttaatttgatgtcagtttcatccagttagtttttcattttgatattgtaatttttttagtttaggaagttccattgatttttttccctatcttccttttctattcttctaattttcttgtttaaattcttaagcactttcgtaatagttgttttattccccctttctgctaatcttatcatttctgtcatttcttgatctctttctgttaattgatttttatcttgattacaggccaccttttttctatttcttctttcgtatagtaatcattgattgaatggctgatattttaccatattgattgaattttactctcttccttattccrtttccaggggtagttaagtaacttataaatattatt

SEQ ID NO: 411990 - DNA, 596 bp, Homo sapiens
gttatactgctctacttaagtttcatctctttgtgccatggtccatttagtgtcttcaggcacaaagctgaggtgattatgggtatcatcctttttgtttttcttctcacagatatcacaattctgtgcagctcattttttcaatattcaaaattgatttcccccacttttctagttgtttcagcagtatgtcaagttcgctaacactcatttcaaaattgtatrgccggaagtggaaattcctcattctttatatattgacatatttactcttcaaactgagtggttaactatcttgccaaatgtcactgtgcaaggatttgaacatagtatgccagattcagaatctatgcaattaaccattatagcaaagtgtgtacaataaattataaatggtgctttgtagcctaagtagaaaacacaatgaagggagtggcaggagatgaggttggagagttatgtaggagcagccacattaaagacagtactgcgggcagtgttaaagagtttggtctgcttcctataggccaccaaaagctacaggataatttgcaggaaagagcaactttgtcagactttttctttaggtattattc

SEQ ID NO: 411991 - DNA, 549 bp, Homo sapiens
gtagctaatttacccccaaactgtggtagcttgagtaaacacagcttacaaaagtttgtaagtgatgtattacaaaagcagtacagatcaaatgacaattcaaagtagttctcaaactcataggtcagccatgtcctaaattcttaccttaaaaccttgatcaacaattcttataaaaatacctttttctagctctagaatattaatcttgtcatcacgttacatgtcttaaagaaattctgagaggtttctgtgtgattctaaggttacctgtaaaatgggaaatctataattatatgctttgcagtcagctgcttccttcaggcaacsaccttgcattaaatctgccattaaaataaatttaaaaagtctccccagggattgttttgctctcgtaaactactaatctgctaaatatgtaattgaattattctgtcatcttagcaccaacttcacttttaaataaaaactccttgtaaataagaggacaagccatagagctgagatcaatacatacttctataaacctttcttaatagttgctgagta

SEQ ID NO: 411992 - DNA, 563 bp, Homo sapiens
atggaggtatcagttggataaacctccaatgtagtccaaaccagcctaaaagtatcactgttgcagccccattatgctacaggtaatttatactgagatgtttgatcaaattgtgtcttggctcacctccaaaatcatgaagagacttgctgtcatgtcaatttgtgtacaaggtcactctacttcacatttccaggccagtgattattgggtcattgttgcaccacctcttcctggccttggcttgggttgggtaatgcagaacatcatttataaaaacacagatgtaacagattttagaggttcttttttgtttattatgggtttgtccaaatcaaaactgcaacatcttcctggcaaaatctgtgaatctttcataaatttgtattatattcacagctgttgtgtcttctttggtgaatgktttaaaaaatttttaatttatcattttgaataattttaatatttcataattacatttttaagaaattcagaaaaagaaaaaattaataatattaaatatgcaattatcagtattttaattaatatccaaagccacaaaa

SEQ ID NO: 411993 - DNA, 485 bp, Homo sapiens
actcatgagaacttactatcacaagaacaggatgggggcaacttccctcatgattcaattacctcccacygggtccctcccacaacatgtggggattatgggaactacaattcaagatgagatttcgggtgagaacacagccaaaccacatcaatatcaaaaaggagtcaaggctgcagatggaagtaagctcaccttacctaggtaagataatactggattatttgggcaagaccaatgtaatcacaagagtctttagagtgaaagagggagacagaagaggagtcagaatcagaggaaaatatgactatggagaaggtctgagtgatgtgattcaagaactcgactggcctttgctttaaagacggaggaagcgggccacaaaccaaggaatgcagatgttctcaagactaacctggggaggacaaggaaataaattctgcccaatagactccagcaggagtgcagccctgcccttgacttta

SEQ ID NO: 411994 - DNA, 485 bp, Homo sapiens
actcatgagaacttactatcacaagaacaggatgggggcaacttccctcatgattcaattacctcccactgggtccctcccacaacatgtggggattatgggaactacaattcaagatgagatttcgggtgagaacacagccaaaccacatcaatatcaaaaaggartcaaggctgcagatggaagtaagctcaccttacctaggtaagataatactggattatttgggcaagaccaatgtaatcacaagagtctttagagtgaaagagggagacagaagaggagtcagaatcagaggaaaatatgactatggagaaggtctgagtgatgtgattcaagaactcgactggcctttgctttaaagacggaggaagcgggccacaaaccaaggaatgcagatgttctcaagactaacctggggaggacaaggaaataaattctgcccaatagactccagcaggagtgcagccctgcccttgacttta

SEQ ID NO: 411995 - DNA, 485 bp, Homo sapiens
actcatgagaacttactatcacaagaacaggatgggggcaacttccctcatgattcaattacctcccactgggtccctcccacaacatgtggggattatgggaactacaattcaagatgagatttcgggtgagaacacagccaaaccacatcaatatcaaaaaggagtcaaggctgcagatggaagtaagctcaccttacctaggtaagataatactggattatttgggcaagaccaatgtaatcacaagagtctttagagtgaaagagggagacagaagaggagtcagaatcagaggaaaatatgactatggagaaggtctgagtgatgtgattcaagaactcgactggcctttgctttaaagacggaggaagcrggccacaaaccaaggaatgcagatgttctcaagactaacctggggaggacaaggaaataaattctgcccaatagactccagcaggagtgcagccctgcccttgacttta

SEQ ID NO: 411996 - DNA, 473 bp, Homo sapiens
agacacttgtcaaaagaccagcmtagcgtggatgccagcaaaactgtaaatggtcatttaatttcaaattgaactgaggctctattcatttgagttattcagagcttcgtcagagcagcttacaggctaatttttctgatgcacaaaagtgctagccataatctaggaatgccttcctctcattttagaagaatggatttaaatgtaatttatttcccctgatgagtcaaagttgatttttgtttatttaggtctcagttaatgccaaataggcatccatgctagaactctaaattattctcaaatctgttagtcataaattgcattatttaagtggtattatcacctgcaataaactattatttgtattcccttgtgatacctggaggtgtttgtgtccagctgccatctggtaggcattgctaagccagtggcccctttttctttctcagattagtcatcacagtgcagtg

SEQ ID NO: 411997 - DNA, 553 bp, Homo sapiens
gactacattttattttttacttgccaatctctcctacaaaattgtaactgatttaaggttgaagaaacctagacctgtatgccatgatattggctacagaattttaactagagtattttaaacacggtgtaggctaaaagctagctatgggtccacagcaaagagtagaacagtaatagtgatttaggcaggaaattggcaaaagataaatccaaggaaataagtcctcaatttctttattttccttatcttctcactcttatctgtttcacctttacttccaaagtactgaattcttgaagataaatgaagaatagacaggatttagsaggcagaggcaaagatgaggttgttatttaagggaacaatctgaacaaaatgaggattgtaattggagaagtagcccagaatggttacagtacaagatgtataagagaagaaagaggcataaccttggcaaggtcattttggaccatattatagaatcgagggaagaggttaaattattgattgaggagtttaaacttaattcaggaggcaatgaggaaccatt

SEQ ID NO: 411998 - DNA, 580 bp, Homo sapiens
atcatagacataattgtaaagtgcaaaatttttaaacttctagaagaaaacacaggagaatatctacctagcatatgagtctttggtttggctcaaaccatatgactcattggtttggcaatgagtctttagatacaacagcaaagccatgatccacaaaagaaaaattaagttggactttactaaaatttaaaatgtctgctttgcaaaagacagaatagacggttaaagagtcaggtaagagaatgaaaagaagtcacagactgggaagaaatatttgcaaactatatctgataaaggtgtatcaagatatacaaagaacacttaaaattcaatagtaaataacccaattaaaatatgagtgatggatccaacagacatctcactaaagacattacgtatggcatataagcataggaaaaaatgttcaacatcatcagtcactaaggaattgcaaattaaaacctcactgaawtaccactacataactattagaagggctaatatctaaaaaactgataataccgaatactgactaggatatggggcaaccagaaatctcactcattgctgatgaaag

SEQ ID NO: 411999 - DNA, 593 bp, Homo sapiens
ttttggctttttgtttgcttgtttaacatgtcaggttacatactaaactaaatgttttaaacaatttgaaaatgcctcagaacagtaattgaaagtaaaatcataaacaaaatatagttctattttgagaaaatgcaccttcacatatacctttctttaaacagttaattaaatactcaagtgtttcatggtcatttaatatttaagataaatgaattcagactgtaaacattttgtatgttgctttattggctaaattatatgtgcaaggcaccttgcacatactagaggataaaaatatattttggattgattattaccattaacataacctatatttttagcttgtaatgttctcaayggtaattttattttggtaattcccttatattttaatttttatctacggtaaaattaaatagaaaagtgatgcttaaatgaaatctatagatttgtcactagcaattaatttcaaactttgtacttttctttcttgcctggcagattatttttgtatataaattttaaaagtggtatctatatataggtaaaaggagaaaccacaagtaatgagggagtgaaacagagaaaaa

SEQ ID NO: 412000 - DNA, 556 bp, Homo sapiens
tccttgattaaattattttgccaaagccttggagtaygccatctctttcctgccaggaccctgtccggtccaggaatctattttgcatttgatgccaatcttccttgtttccagagacattattgctgttacagtgctaaaaatgatccaggaagttcatctcaatttaatcatctccctactattagactgatacactagagccagttgtgtgaccacaactcttcttcccttttattcattttccttctacaactgcccatcctatcccttatacttacatcttttatctgacattctgtggcattcattcattttccactccccattataacttcccatgatatattttttaaaattaacaattcagtaagataaggatgttaagagaaaaaggaatcagattactttgatatttttagctttggtaactaaaaatctgtatcaaaccaacctatgcagcaggatacctattagctcatccagcttgacaactagggcagggcaggtttcagggttgggtgattcatttatttgctcaacaatgtcagccagt

SEQ ID NO: 412001 - DNA, 556 bp, Homo sapiens
tccttgattaaattattttgccaaagccttggagtacgccatctctttcctgccaggaccctgtccggtccaggaatctattttgcatttgatgccaatcttccttgtttccagagacattattgctgttacagtgctaaaaatkatccaggaagttcatctcaatttaatcatctccctactattagactgatacactagagccagttgtgtgaccacaactcttcttcccttttattcattttccttctacaactgcccatcctatcccttatacttacatcttttatctgacattctgtggcattcattcattttccactccccattataacttcccatgatatattttttaaaattaacaattcagtaagataaggatgttaagagaaaaaggaatcagattactttgatatttttagctttggtaactaaaaatctgtatcaaaccaacctatgcagcaggatacctattagctcatccagcttgacaactagggcagggcaggtttcagggttgggtgattcatttatttgctcaacaatgtcagccagt

SEQ ID NO: 412002 - DNA, 556 bp, Homo sapiens
tccttgattaaattattttgccaaagccttggagtacgccatctctttcctgccaggaccctgtccggtccaggaatctattttgcatttgatgccaatcttccttgtttccagagacattattgctgttacagtgctaaaaatgatccaggaagttcatctcaatttaatcatctccctactattagactgatacactagagccagttgtgtgaccacaactcttcttcccttttattcattttccttctacaactgcccatcctatcccttatacttacatcttttatctgacattctgtggcattcattcattttccactccccattataacttcccatgatatattttttaaaattaacaattcagtaagataaggatgttaagagaaaaaggaatcagattactttgatatttttagctttggtaactaaaaatctgtatcaaaccaacctatgcagcaggatacctattagctcatccagcttgayaactagggcagggcaggtttcagggttgggtgattcatttatttgctcaacaatgtcagccagt

SEQ ID NO: 412003 - DNA, 622 bp, Homo sapiens
gtctgcaaaccataagaggaccgaaacccaaccatgctggcaccctggttgtgggacttccagcctatagaattgtgagacaaaagttttgctttgttttttgtttataagccaccagtctatggtattttgttataacaccccaaactgactaagacatcattatacttgggtggtttttaaatttgtcttcactcccattccctataatctgttttgaaattwtagccattttaagattgggttgtttgtattcttcctattgtgtggcaagaattctttacatatttctttattagatatgcatgctgtgaacatgatcgtcccacttatggcttgccttttcattttcttaatggtgtctttgaaagagcaaaagtttgtgtttctgttatttgaattttgaagtccaatttttcatttttggatggtgtatcctttttttagttctatctaagagactttacaccaaagtcccaaagagttcctctcatattttcttctcaaagttttacagtttcacttgttctatttagatctatgatccattttgagttgattttggtacgcaatatgaagtaaaagtttaggtctatttatagactttctgttctattccatc

SEQ ID NO: 412004 - DNA, 485 bp, Homo sapiens
atgccgtcttgttaaaaatcattaaaatagagttcaaaaatggttgagcttatctaagactgtgcaagttgctgtagcagaggtaggtctaaaaaccccctttcctgccttttaatgtgatgaggtttacccaaaaatttgtgccagaagagtcttatccagagatttgtgtgtggtcaaagtgttggagggacagaaaaaaaggtccaatgtccagtggttaatgctttggtcagtcagtcattctttgagcaactatttattgagtgctttattgccagttcagttggctgcttcttcacttatttttaaagtataacatcaaatttgccaacagagaactggtattggcagcagcagttttttagcaattttattsctttacaaataaattgagagtgaaggagagatggatcaacatttgggggcacaaacttacatttatatatagatattttgaaatactatttgcttacacaatgaat

SEQ ID NO: 412005 - DNA, 648 bp, Homo sapiens
aataacatgaagttaataaaatggagaggttaataatggtggtggtcagtgaaatgattatttgaaaggccacaataatgagttagaaatattaattgagctagtataagttaaatttcacactaagttcttttgccagtaatttcaaaagcgagaaaagggattataacttgaaactcaagaatatttactccactcagacaagatttctatcttctattataaacacttttctctttaattgtggaaacttcccaacacttgaaataagataatctaccacccattaaaaagctcaattttcacccttacatctattttcataaatcacttcacgcctgtaattggtacattctgcttagtattgaaaatactttaataatatttaaagattatcatgttgtctgctgacaggcctaacatgttaaacagaaagtagttaccatctgataagctaatgagaaattaaaagtccaagcattagagccatgagattctctttcttctgttatattattttccctgtaaaagaaacattcctccaatgttctgtctcatgttaaaatacagtataatttattgaataatgggagagaaygattcaaaaattacccacaaactggatttgcttgtggaaagagaaacaga

SEQ ID NO: 412006 - DNA, 607 bp, Homo sapiens
ttataaggtttacaattctaagttgtttcatcctgttcatatgttgatgaactaaaaatcttatttgtttctttcttyttctcgttaacttacccaatgatgttttaagttatttaatgtatgcaagtagtttaaaggtagtgactatggttttatctttgttcctctagagcacataggagacaaatttgacacttggggccaggaatagtgtattcttaagtagaagaaagccaaaggttggtttggtttattttttcctaatttaagcactcaagggaattcattactttatttaaatccataaaaacagagaaatgtcctttattacttcaaggggagaaaggggtttaccaattttgaaacagcatggcgggttcctaaaaagttaagccgaacctttgccttgaacaattccccttttacagcccttaccctcttagcttatactcaagataaaaggaaatacacatctctacagagattagtacacaaatgttcatagagtctttatttgtaataatcccaagctggaaaaaaacccataaatccccatcaatagaaaaatagataaactatggcatatccaaaccttggaatatcactc

SEQ ID NO: 412007 - DNA, 482 bp, Homo sapiens
tgggggcacacacgagtctttggctactgtccctctcagcctccattgcatgttctccttcactcaattgttattattttttacctggtattcaggctttagtgaaacatgacaaaaagaaccttcacaaactagccccacatgttccttgaaagttccttgaaggtttctttgattgctttctttcctttctggaattctcatttttcttctttgtatcwatccatcttcctattcttcctacataccaatttctctatttagtgaattatagtctctgtttagcaaactgggactcctacacattcttcagagaaattaaattttatctcattccttcttgaaaattactactgtataactatatatatatatatatatattcctggaataacttatgtcccagcatcattttggctgggacccattcctgtttttcctgctagactctgaacactgagagaattgtatcttactcattc

SEQ ID NO: 412008 - DNA, 482 bp, Homo sapiens
tgggggcacacacgagtctttggctactgtccctctcagcctccattgcatgttctccttcactcaattgttattattttttacctggtattcaggctttagtgaaacatgacaaaaagaaccttcacaaactagccccacatgttccttgaaagttccttgaaggtttctttgattgctttctttcctttctggaattctcatttttcttctttgtatcamtccatcttcctattcttcctacataccaatttctctatttagtgaattatagtctctgtttagcaaactgggactcctacacattcttcagagaaattaaattttatctcattccttcttgaaaattactactgtataactatatatatatatatatatattcctggaataacttatgtcccagcatcattttggctgggacccattcctgtttttcctgctagactctgaacactgagagaattgtatcttactcattc

SEQ ID NO: 412009 - DNA, 561 bp, Homo sapiens
aaacatctaaataataactaataccaatcctgctgaaataattttgagaaatgagagaagggaatagttccaaattcattctgtaaggccagtattacactgacaccaaaaatggacaaagacacatataaaacagaaaagtacaggaaaacaaggctgataaatattgatgcaaaaaacctcaacaaaatactagcaaaccaaattcaacaacacattaaaaagattattaatcattaccaaatagcatttatcccacggataaattcaacatatgcaaatcaatgattcaacatatgcaaatcagtcaatgtgatacatcatatcaatagaaaggaggacagaaaccatacgatcatttcaattgatgctgaaaaagcatttcataaaattcaacatcacttcatattaataaatctcagaaaactggatatagaaggaacatacctcaacatartaaaatccatatatgacagacccaaagctagtatcagattgaatgggaaaaactgaaagcctttcctattagatatagaacacaacaaaggtgcccactgtcac

SEQ ID NO: 412010 - DNA, 609 bp, Homo sapiens
ttggaaaaatctaccaccaaaaaactgttggaactgataaacaaattcattaaagttgcagaatacaaaatcaacatgccaacatctgaagcatttgtctatgcccacagtgaacaatatgaaaaagaagtcaagaaaggaatcttatttacaacagctaaacaagycaaccaataaaattaagtacccaggaattaacttaaccaaagaagtgaaagatctctacgatgaaaactgtaaaacattgatgtaagcagttgaagaggacacaagaaatggaaaaatattccatgtttatagattgaaaggattaatattaaattgaaatgtccattctacagattcaatgcaatccttattaataccaatgatgctcttcataaaaatagaaaaaaaaatcctaaaattgatatggaaccacaaaatagccaaagccatcctgacaaaaagaacaaaattggaggaatcacactacttgacttcaattatactatagagctatagtaaccaaaaacagcatggtatgggcaggcatagaaacagacacatagaccaattaatggaacagaatggagacccagaaacaagtccacacatctacagtgaact

SEQ ID NO: 412011 - DNA, 565 bp, Homo sapiens
gatgtaagcagttgaagaggacacaagaaatggaaaaatattccatgtttatagattgaaaggattaatattaaattgaaatgtccattctacagattcaatgcaatccttattaataccaatgatgctyttcataaaaatagaaaaaaaaatcctaaaattgatatggaaccacaaaatagccaaagccatcctgacaaaaagaacaaaattggaggaatcacactacttgacttcaattatactatagagctatagtaaccaaaaacagcatggtatgggcaggcatagaaacagacacatagaccaattaatggaacagaatggagacccagaaacaagtccacacatctacagtgaactcattttcaaggtgtcaagaacatgcttggagaaaagatagtatcttcaataaacggtgctgggaaaactggatatccatatgcagaagaatgaaactagacccctgtctcttaccacatacaaaaatcaaatcaagaaagattaaagacttaaatgtaagatctcaaactatgaaaatactacaataaaacactgggaaaac

SEQ ID NO: 412012 - DNA, 520 bp, Homo sapiens
ttggaaataaaaaaacttgtaacaatttatgataaaagaagttgacaaatttcaaaactaaaaaatatttagaaatagctaaatatggctgggtgtggtggctcacgcctgtaatcccaacactttgggaggccaaggcaggtggatcacctgaggtcaggctttcaagaccagcctggccaacatggtaaaattcccatctctactaaaaatacaaaagttagctgggcrtggtggtgcatgcctgtaatcccagctactcaggaggctgaggcaggagaatcacttgaacctgggaggtggatgtttcagtgagccgagatcacagctttgcactccagcctaaacgacagagcaagattctgtcaaacaaaagaaaaaaagaaaagaaagaaggaactaaatataaccacattgtacatcaaaactcatgggaaaatacaaaaacaatgctttgaaagaaacatatagccttaaatatttatactagaaaagaaaaatagctgaaaaaataataaac

SEQ ID NO: 412013 - DNA, 520 bp, Homo sapiens
ttggaaataaaaaaacttgtaacaatttatgataaaagaagttgacaaatttcaaaactaaaaaatatttagaaatagctaaatatggctgggtgtggtggctcacgcctgtaatcccaacactttgggaggccaaggcaggtggatcacctgaggtcaggctttcaagaccagcctggccaacatggtaaaattcccatctctactaaaaatacaaaagttagctgggcgtggtggtgcatgcctgtaatcccagctactcaggaggctgaggcaggagaatcacttgaacctgggaggtggatgtttcagtgagccgagatcacagctttgcactccagcctaarcgacagagcaagattctgtcaaacaaaagaaaaaaagaaaagaaagaaggaactaaatataaccacattgtacatcaaaactcatgggaaaatacaaaaacaatgctttgaaagaaacatatagccttaaatatttatactagaaaagaaaaatagctgaaaaaataataaac

SEQ ID NO: 412014 - DNA, 596 bp, Homo sapiens
cttgtaacaatttatgataaaagaagttgacaaatttcaaaactaaaaaatatttagaaatagctaaatatggctgggtgtggtggctcacgcctgtaatcccaacactttgggaggccaaggcaggtggatcacctgaggtcaggctttcaagaccagcctggccaacatggtaaaattcccatctctactaaaaatacaaaagttagctgggcgtggtggtgcatgcctgtaatcccagctactcaggaggctgaggcaggagaatcacttgaacctgggaggtggatgtttcagtgagccgagatcacagctttgcactccagcctaaacgacagagcaagattctgtcaaacaaaagaaaaaaagaaaagaaagaaggaactaaatataaccacattgtacatcaaaactcatgggaaaatacaaaaacaatgctttgaaagaaacatatagccttaaatatttatactagaaaagaaaaatagctgaaaaaataataaaccaaattataaaaggaacacaaaataaacccaaaattagaaggaatraaaggagcggatcaatgaactagaaagacttgcataccaaggaca

SEQ ID NO: 412015 - DNA, 584 bp, Homo sapiens
agttcccatgtacccttcatgccatttcttctattagtaatatcttgcaaaactgtagaaaatcacaaccagaatattaaggttgttacaaaccatcaattttattcagattttacaagttaacttgtacttattcgtgtgtgtatacttagtttaataaaatgtttttacatgtagatttctgcatccagsactacagttaacatacagaacaattctatcccaaggatttcctgtgttgcccttttgtagccataccatcccagcctcatcactaaaccctagtaatccctgctctattctatacttccatagtttgttatttcaagaatctgatatgtaagtaagaccatgcagtacggaggcttttgggattggcttttttcacccttattcacctgtataattctgtagaactccttgattcatccatgttgctgcatgtgtcaatgatttttctattttgatagctagtagtagtccatggcagaaaaacaacacagtttgtttcataatcacctttaaagggaatctgggctgctcccagttttcatttattatgaataaagttgctattcttcata

SEQ ID NO: 412016 - DNA, 584 bp, Homo sapiens
agttcccatgtacccttcatgccatttcttctattagtaatatcttgcaaaactgtagaaaatcacaaccagaatattaaggttgttacaaaccatcaattttattcagattttacaagttaacttgtacttattcgtgtgtgtatacttagtttaataaaatgtttttacatgtagatttctgcatccaggactacagttaacatayagaacaattctatcccaaggatttcctgtgttgcccttttgtagccataccatcccagcctcatcactaaaccctagtaatccctgctctattctatacttccatagtttgttatttcaagaatctgatatgtaagtaagaccatgcagtacggaggcttttgggattggcttttttcacccttattcacctgtataattctgtagaactccttgattcatccatgttgctgcatgtgtcaatgatttttctattttgatagctagtagtagtccatggcagaaaaacaacacagtttgtttcataatcacctttaaagggaatctgggctgctcccagttttcatttattatgaataaagttgctattcttcata

SEQ ID NO: 412017 - DNA, 486 bp, Homo sapiens
atagttaaaggaacatcagcccacacagatgagaaagaactagcacaagaactccagcaactctaaaagccagcttatcttcttacctccaaatgactgcactatctcccaagcaatggttcttaaccagactaaagtggytgaaatgacagacatagaattcagaatctgggtggcaatgaagaacattgagttgaggagaaatttaaaacccaatccaaggaatctaaggaatccagtaaaatgattcaagagctgaagtacaaaatagccatttcaagaaataaccaaactgagctgatagagctgaaaaactcactacaagaatttcataatacaattagaagtattatcagcaggattgaccaagctgaggaaaggatctcagagttcaaagaccgatgctttgaatcaagtcagacaaaaaaaaaaagaattttaaacaattaaaacctcagagaaatatgggattacataaataaacca

SEQ ID NO: 412018 - DNA, 519 bp, Homo sapiens
aatcaatgtggcaaacttcattgttttattgtaagaaattgccacagccactgcaaccttcagcaatcaccatctgatcagttggcagccatcaacattgaggcaagatcctccaagagcaaaattagaactcactgaaagctcagatgttcatcagcaattttagcaataaaacttgtttaaagtatgtatgttttttagacataatgttattgcactcttaatagactacagtatggtttaatgtaaattttatacacatagggaaacaaaaaatttgactcgcttctcactttttcaaaatattcactttattgtggccrcctagaactgaacccacaatatatttctgaggtatgctcggaattcatttaaaattgattccttaaaataatatgagatgaaaatcaaatgttattttgcctacaatgataaccattgttagcacattttattggatagttcatcccttccctctactctgcaatatctgttctgaataaatgaattttttcacat

SEQ ID NO: 412019 - DNA, 638 bp, Homo sapiens
ttaaataagtacagccaaaataaggatgtggattcaactcaatgggcctcaatggcaacacctcaaagggtgtgtagaagagcagccaagggtggtggtgaaatgcatctaagagcagtgtctagaatcatggaggcccctactgtcagttgaagtaattcgtatgtgaagtgaggaggcctgaagtagcattgtgatggagggacagagggaagaaaaatcatcaggacttgttctctctctctctctctgtctgcttctttctccatatattatatgtatatacamcatgtatagatatatatttagagggatatgtatctatatcacatatagatacctatatattaatcaaaataactgcaagatttaaatctggcttatggcaaatatgacaatttaatacacaaagaaataaggcagaagaggagagtgggaagagtttctgagatgttgaagtcaagactggtgatggcaagtcatccatgggaaaacaccgactgagcttttggtgatatggacctggggatgtagatgtatccagattttgagattaagtatgatggtgatatttgtgcttttggaacaaatgagctccccacagtgaatagaaaaaagaaagagcataattcaggatt

SEQ ID NO: 412020 - DNA, 591 bp, Homo sapiens
tctctctctctctctctttctgtgtgtgtgtgtaataaaaaacgaaaggaataatatcttgagatgtttcacagtcttaataaattgctatatgtccatgattgttactttgcaatatctttactagcgtataaaggaaaccctttattcagtgtcccaaaacaaaaagtttagttggatgttatcatacctcatctgagaaagagatgatcaacagtctcataggtagagaagtagtgattggatcacgtccaaagaacgagactctagcgaaaatgtttctgtccaatccttttaagagasaggcttcttttctgctcagatatgtacaagtttaaggaaagagatctgtctcccaagggctgaaaaacaaattggaattatatgtgatgtctgtcatatatagttctgagtctttcacctatgctttataaacaataatctattatttaatttttgacttggcaaggagaagaggttatttccctgagtttcagctacaaattcccaaaaaaacttcttttaagacgaatattgcagagtaacaaattttgactttctatgaaaacgacttatcatttccaggatgtg

SEQ ID NO: 412021 - DNA, 616 bp, Homo sapiens
gaatggaggctacgcatggaaccaatgttatgaaatccttctctttaaagttcatctactcactgtctctactgcatatccaaccagtcagaagaatccaagctaaaccatcaatatgatatcattcctcaaaagatcaaccacccacttggtaaaaaaaaaaaattgattatattaaaccgtaagaaactattccatcctggaaaagatagatattttatttattacaattgctacatattctaaatatggattttccttgtgctggaccactatctcagaaacataaagtgatttagcctcaacaaattccatataaaattgcctcaaaccaaaggacccagttgacaatgaaggagatgaaataaaggacacattaccattgaatatrctagtagtactattatcacataagctaaaagctagcagcctaagagtgtgctggaatagcctcttaaaccattgtaaggaaccagcttaaacatgatactatatagttttaagtgtgttattattcaagatgaggattaatacttccagtcaatgtccattatttggtgttgtatccccattagttgtaatatataggtttgagaaccaaaaagtagaagtagaa

SEQ ID NO: 412022 - DNA, 489 bp, Homo sapiens
ggagaaagaagaaggaaaataaaaagagggaagggtagataaagggggcagctgttgcattctcttgagtcttcaattagtgttcactgaatccacatcttatatgtgaaaggagcgggtagaagaacaggcaattatgcattcatcttgtgctcagtaactctgtatttttacatatgataaaaaaagagttgaggaagcrgtcagatatgcacttgtctctggtgaacggagggatgacttttagttttctcgtttgtcctgtggctgtgacaataagctgtcaatttacattgtcagggtgaaattcgacagatttgttttaggataaagatcttggggttcacagggaattttctggtgagcaaattgtgagggagatatgtagccttttatctttgtagctatctatttaggaacaaaatgggaggcaggtttacatgacctagttcccagcttgacttttccctttggcatagtgagtttgga

SEQ ID NO: 412023 - DNA, 561 bp, Homo sapiens
ggggcagctgttgcattctcttgagtcttcaattagtgttcactgaatccacatcttatatgtgaaaggagcgggtagaagaacaggcaattatgcattcatcttgtgctcagtaactctgtatttttacatatgataaaaaaagagttgaggaagcagtcagatatgcmcttgtctctggtgaacggagggatgacttttagttttctcgtttgtcctgtggctgtgacaataagctgtcaatttacattgtcagggtgaaattcgacagatttgttttaggataaagatcttggggttcacagggaattttctggtgagcaaattgtgagggagatatgtagccttttatctttgtagctatctatttaggaacaaaatgggaggcaggtttacatgacctagttcccagcttgacttttccctttggcatagtgagtttggaatccttaggttttattttcctttcacaggcaaaagcatgtttacaagaacatagatactatatcagatgggactgacagactgagatattattcttacatgtgaggctttttttgt

SEQ ID NO: 412024 - DNA, 489 bp, Homo sapiens
ggagaaagaagaaggaaaataaaaagagggaagggtagataaagggggcagctgttgcattctcttgagtcttcaattagtgttcactgaatccacatcttatatgtgaaaggagcgggtagaagaacaggcaattatgcattcatcttgtgctcagtaactctgtatttttacatatgataaaaaaagagttgaggaagcagtcagatatgcacttgtctctggtgaacggagggatgacttttagttttctcgtttgtcctgtggctgtgacaataagctgtcaatttacattgtcagggtgaaattcgacagatttgttttaggrtaaagatcttggggttcacagggaattttctggtgagcaaattgtgagggagatatgtagccttttatctttgtagctatctatttaggaacaaaatgggaggcaggtttacatgacctagttcccagcttgacttttccctttggcatagtgagtttgga

SEQ ID NO: 412025 - DNA, 592 bp, Homo sapiens
gaagtattttggaaggggaaaccagagttttctgactcaatgagaagaaagcttttaaaggatacctgtaacatgaactgttaagggttctcatctcttctggaaggctattacctgtttcctgaagacccgtggagataagggataacaaataggttctatgttatgggtcagctgagtttggtcatggtagtagttgacaggaagtgtttctcagagtgtggacccccaactagcaacatcagcatcacttgggaacttgttagaaatgcaaattcttggtctttgctccagaccttctacatcaggaactctgaggtaatctctatcataaataagtcttccaggtgattctgatgcacaccaaagtttgagaatacagggttgcaggagcgtgttgaggattctaatccgggctccgtgtagaaaaaaaamcacaataattcattaatgatatctgccatgaacatgggagggagggatggcagcaagtgctgtatgtatttgcaaactcacttctggcagaattgataaatatcatgcaaacaaatgacctaagcaagatagtagttacctaaaagttctaaagaat

SEQ ID NO: 412026 - DNA, 598 bp, Homo sapiens
tgcatccacctgcagcctccccaatggctatgccagtacacatgcctatgcacagaccctgccatgctgctgccacctgccactcccagcacatgcatgtsggcatggatcatgttgccatcaccttgacaaagggcttttgccagcatccaccaatgcagtatcattgccagaggaccagaaacacttacccccttccccccgccaccccggctgagtacatcaaatggttaactttgagaagccagagaacaaagccataggcttgatcccagcaaccccaggattaaagtgcacagcccaagagtgctgagttgagccatggcctcctgaaatcatccagaaatgaagccagtcaactaaacccaacttataccacagtcgaacattcaaaggtagcaaagaatataaaaagaaaaagccccatccaaaggacagcaacttcaaagattaaaggaacatcagcccacacagatgagaatcagtgcaagacctctggcaactgtaaaatccggagtgccttcttacctccaaatgaccatattagcttcccagcaatagttcttaaccaaactgatttggctgaaatgacagacat

SEQ ID NO: 412027 - DNA, 598 bp, Homo sapiens
tgcatccacctgcagcctccccaatggctatgccagtacacatgcctatgcacagaccctgccatgctgctgccacctgccactcccagcacatgcatgtgggcatggatcatgttgccatcaccttgacaaagggcttttgccagcatccaccaatgcagtatcattgccagaggaccagaaacacttacccccttccccccgccaccccggctgagtacatcaaatggttaactttgagaagccagagaacaaagccataggcttgatcccagcaaccccaggattaaagtgcacagcccaagagtgctgagttgagccatggcctcctgaaatcatccagaaatgaagccagtcaactaaacccaacttataccacagtcgaacattcaaaggtagcaaagaatataaaaagaaaaagccccatccaaaggacagcaacttcaaagattaaaggaacatcagcccacacagatgagaatcagtkcaagacctctggcaactgtaaaatccggagtgccttcttacctccaaatgaccatattagcttcccagcaatagttcttaaccaaactgatttggctgaaatgacagacat

SEQ ID NO: 412028 - DNA, 598 bp, Homo sapiens
tgcatccacctgcagcctccccaatggctatgccagtacacatgcctatgcacagaccctgccatgctgctgccacctgccactcccagcacatgcatgtgggcatggatcatgttgccatcaccttgacaaagggcttttgccagcatccaccaatgcagtatcattgccagaggaccagaaacacttacccccttccccccgccaccccggctgagtacatcaaatggttaactttgagaagccagagaacaaagccataggcttgatcccagcaaccccaggattaaagtgcacagcccaagagtgctgagttgagccatggcctcctgaaatcatccagaaatgaagccagtcaactaaacccaacttataccacagtcgaacattcaaaggtagcaaagaatataaaaagaaaaagccccatccaaaggacagcaacttcaaagattaaaggaacatcagcccacacagatgagaatcagtgsaagacctctggcaactgtaaaatccggagtgccttcttacctccaaatgaccatattagcttcccagcaatagttcttaaccaaactgatttggctgaaatgacagacat

SEQ ID NO: 412029 - DNA, 528 bp, Homo sapiens
tgaaaacataccaaaactcgtgggatgcagcaaaaacagtgctaaggccaaaatttttagtttactttttaaaaaagtctcaaacaaayaactttataacataaggaactagaaaaagaacaacaaaataaacacacagccatcagaacaaagggtataataaagattagagcagagacaaattaaaaatagagaaacaatagaaaaaatcagtgaaaccaaaagttggttctttggaaagatgaacaaaattcacaaacctttagctagatgaacgaagaaaaaaaagagaagactcaaattactaaagtcagaaatgaaaaatggaatattactactcattatacagaaataaaaaggatgataaggcaatcctataacaattacacatcaaccaactgaagaatctagaagaaatggacaaattcctagaaacacaaaatctaccaacactaaccacagagaaacagaaaatctgaatagacctacaacaataaagaaattgactcagttgtcaaaaaaatctca

SEQ ID NO: 412030 - DNA, 528 bp, Homo sapiens
tgaaaacataccaaaactcgtgggatgcagcaaaaacagtgctaaggccaaaatttttagtttactttttaaaaaagtctcaaacaaataactttataacataaggaactagaaaaagaacaacaaaataaacacacagccatcagaacaaagggtataataaagattagagcagagacaaattaaaaatagagaaacaatagaaaaaatcagtgaaaccaaaagttggttctttggaaagatgaacaaaattcacaaacctttagctagatgaacgaagaaaaaaaagagaagactcaaattactaaagtcagaaatgaaaaatggaatrttactactcattatacagaaataaaaaggatgataaggcaatcctataacaattacacatcaaccaactgaagaatctagaagaaatggacaaattcctagaaacacaaaatctaccaacactaaccacagagaaacagaaaatctgaatagacctacaacaataaagaaattgactcagttgtcaaaaaaatctca

SEQ ID NO: 412031 - DNA, 511 bp, Homo sapiens
ctttcatgagtctagcatgccctgagccacaaatctaagcagaagcaacatcatggctgctgagaatatgatgaagacacataaaactgttaagtctgcttaaagcactatcttatctcttgctttcactatgtgatacattttctttagtgtacaatcttttataattgtttatcaaatgaattttcaaatgaattagaatttttaaaacatcatttaaaaaattatactattagaatgtcaaatgtgcaagactacaaactgcttttcctctccccagaaagcttttaggatcagtcagccccagaccactctgtgtacactcaaagtgatcagttaccaaagtcaacctctgattcctgttgatgcaacaaagcacagccactaacaatttgaaaaagtaaaaatctatgttaaaaataaccyatgtttgatatgaaatacactatatgcttcactccctgaagagatttctttcttgattaaattttccttagagaaattagattgc

SEQ ID NO: 412032 - DNA, 587 bp, Homo sapiens
cagcagcttttagttgagagtcttggtttgtttgtcttcattttgtttttgaattaaatctctgtgtagattcttgttccaggcagagtgggccaagataagagttcaaatagaatacttgcactgtttttttttttttttagtgcaaataaacttgaaccctatagttgagggttttaaatataaacacacacacacatacacccccctacacacacaatatgtatatatatatttcttattaatcatagaattataccattctttatttatrattactattgttactattattattatttagagaccaagttttgctgtgtcacctaggcaatggagtgaccatagctcagcataatcttgaactcctggactcaagcaatcctcctacctcagcctcccgtagctaggactacaggcatgtgccactgcgcctggctaattttaaaattttttgtatagacatcagccaccacatccaactgaattttaaaattctttagtgtatgttgttttctgtaattcgaatactattcagtggaacaaagtatagtctattattgtataattagatatatttttcaatt

SEQ ID NO: 412033 - DNA, 587 bp, Homo sapiens
cagcagcttttagttgagagtcttggtttgtttgtcttcattttgtttttgaattaaatctctgtgtagattcttgttccaggcagagtgggccaagataagagttcaaatagaatacttgcactgtttttttttttttttagtgcaaataaacttgaaccctatagttgagggttttaaatataaacacacacacacatacacccccctacacacacaatatgtatatatatatttcttattaatcatagaattataccattctttatttatgaktactattgttactattattattatttagagaccaagttttgctgtgtcacctaggcaatggagtgaccatagctcagcataatcttgaactcctggactcaagcaatcctcctacctcagcctcccgtagctaggactacaggcatgtgccactgcgcctggctaattttaaaattttttgtatagacatcagccaccacatccaactgaattttaaaattctttagtgtatgttgttttctgtaattcgaatactattcagtggaacaaagtatagtctattattgtataattagatatatttttcaatt

SEQ ID NO: 412034 - DNA, 534 bp, Homo sapiens
tcacaacatgaaatgtacttcttatgtggttgcaatagaaaagtttgaaaatcactgcgtaaagtgtaggagagaggctgttctctgccgttttactaatacttagttttaaatttttacaaacggcataggtcaattactgcacctcattctcatttaaatttatagtttaattaataatgtttattgaccatttgtacttcttcagtcaatttcttggtgacggcagatattcatttycaattattaatccataaaatatctatatattaagccatataatatatatatgtgtgtgtgtgtatactacatacatattatctttgttatgtataatgcaggtctttttcttttttgtgtgtgttttttcatattccattattgcttacagttgagtgtttttacttttttgtttgtttgcctgtgacaatatagctgttttcagtgttacatagccaaattatcaattcttttttttttgccttttgtatcatacttagaaaattattttctattctataggtaagtaaatat

SEQ ID NO: 412035 - DNA, 324 bp, Homo sapiens
tgagctaatttttgcctctgcagacatttctgttatgtcagcatcacccacatgacctacctactactcaccattgttccaatttaactacttcaagtgaaaagttactaaattggcagtaccacatygggcaaagtctgttacttcaattggtctctccaaaattcctgaggccctgggtgcaaagtctcagttctctgaaatcctgacctaattcacaagggttactgaagatttttcttgtttccaggacctctacagtggattaattggccccctgattgtttgtcgaagaccttacttgaaagtattcaatcccagaag

SEQ ID NO: 412036 - DNA, 499 bp, Homo sapiens
tgttggaggcattagggtgtgcataactctgtgcctttttccattcattgtgtaaattccaggagggcagagaacgtgtctaaatgctccctttgttcctctgacaatatgtcacagcacagtgtcctgcaaacagtgcacttttagtaaatcaggataagaattatgtaaaatgaatcaaaacatgtagctttttactacagtcrttcttaatgacagggatacgttctgagaaatgcattgttaggctattttgtcattgtgtgactatcacagagtgtacttacacagacttatatgatatagcctactatacatctaggtaggctatatggtatacctattgctcctaggctacaaacctgtacagtctataactatgctgaatgctatagacaattgtaacacaatgatatttctgtatctatacatatgcaaacatagaaaatgtacagtaaaaatatgttattataatcttatgggaccaccatcacatatg

SEQ ID NO: 412037 - DNA, 550 bp, Homo sapiens
tggcaaatatctggcacacatgctggtattcytgccccctatactcatgtcagacattgctaatcaatcacagcactctttcattttggaactgaattcagcctgaggattcttatcaataccatattaacagatgaacacaatactgaagataaaacctatttgctgtctttgttataaactgtacacattgtgtgtgtgtgtaaatacagaggtgtgcatatatacatacatataaacaaaacacacatagaattaatagaaaaaagattgaatattagtattcaatcagttattcatcatgttggtagtatggatgtttttgcttgtcagaaaatttccaattttctaccataaatttattttgtaaaaagtacataagaatagcttttttttaaagattgcaagacaaaatttttaagattgaaaaagatatgaaggagggaaaaaatgtagaagggcagcagggacagagccacaaagacctaaaagttcataggcaaggtggcctgaaaccctcagaagaaacttatggtcactgttcaaactg

SEQ ID NO: 412038 - DNA, 533 bp, Homo sapiens
tcttgcctgttcattcatggtcaatccttgtttccatccccagctccatgcaaccaccagtttttctatttttgtagtcttttctttactagaaatttcatataaatggaatcataaaatatcttgacttatgtctctggctttcttttacttaccrtaatatttttgaggtccatccatattgtttcatatgtcagtaattcattttaaaaattgttgagcagtattccattgtatggttatagtaccaccttttatttatctgttcactagctgctcaacatttgagttgtttccagtttttggcagtgaacattcacttacaagtctttgtgcggacatgtttttatttttgttgggtagacacctaggaatggaatttctgggtgtgttaactttttaagtagttgtcaaactgttctccaaagtggttggaaacagtttaacatttttactggtaaggtatgatggttcttttttttttttttttgagacagagtctcgctctgttgcccatgctggagtgcagtggc

SEQ ID NO: 412039 - DNA, 538 bp, Homo sapiens
gataagacagaaaacaaactcaatagattatcaactgttttgaagtaaatacatgaaaatgtttggaaagacggtctgctaaggcctcttagaaaagacctaacaaagactttgaattatgagaaagttgtatttaggaaattttgggagttaacgtgctggctgagacagggatggaacataccagcctgaacaggatagggagtatttcctccaaatataagatactctgaagtaaatttatgtattcttttaaaaacctaaaactttaaaggcacaatttagagttttctatatgattatgggaagcaacaggaattattcaagaggcggaatttccagtttctcctccattaccttttaaaagcagaagacaacagcaactctataatggttataatactttaaaagtttggttaaaaataaattatttggcagggwatgatgactcatgcctgtaattccagcactttgggaggccaaggtgggcggtggcacttgaacctaggagttcaaaggccagcctggacaacatagt

SEQ ID NO: 412040 - DNA, 476 bp, Homo sapiens
ctggctccccgttcccccttgttattttcatacctggcgttctggtgtttttcattcaggacacttaccacagccatagttgtttactattcctttcagaccacttcttccccaccctttgctgcttatactatgtgtcaccctctccccttcctgtcactctcatcattggcttccgtctctaccacttcaaatcctcccttaatcctacatgcttccaacctccatgkggttgagtgctagagtttgggtgtttttatcccctcaaatctcatgttgaaatttgatccccggtgttggaggtggggcctaatgggaagtgtttgggtcgtgagggtggatccttcatgattagattaatgctccccggggaagattaatagttctagctctattagtttccaagaaagctggttgttaacaaaaagcctggcacttccctcctccctctttgcctcctgtctcaccatgtgtga

SEQ ID NO: 412041 - DNA, 527 bp, Homo sapiens
atagatatcatacaaagtatcttctgtaactacaacaagacaaaattagaaagcagaatcagaagtaaaactagaaaactcacaaaattgtggttaagcttgtctaaattcaaattagaatgttataactttaggatgctaaacaaccaatgtttcaaagaagaaatcacaaagaaaattagaaaatacttacagatgaatgaaaataaaaacagaacataccaaaacttacggcactcagcaaatgcactgatcacagggaaacgtatagctataaatgtttacattaaaaaaaaaaacctaaacaaagctagcaaagagaaggaaataataaagatcagagcaaaaataaacaaaatagacaatacaaaaaatagaaaagattaatgaaacaaaagttggttatctgaaaagatcaacaaaatttacaaacctttagggagagggactaagaataaaagaagattcaaattattraaatcagaaatgaaagtgaggatattactaccaatcctacataaataaaa

SEQ ID NO: 412042 - DNA, 629 bp, Homo sapiens
ccagtaaagaatcatgagctgtgtctcaaaagaagaatagctgcctgcagaagcagcatggattttctctaaaaccctggaggcctgcgctgtggttttatctatgattactctgtacagcatcactacttaccatagatactttaagtatcattgtctattagggttctccagagaaactgaaccaatcgcatgtagatatagatactgttccatggtaagcaggtttatgcaaacctatcctcaaaggccawggaagctaagaggctgaggaaagaggctgacaaatccagtttctcagaaaggaacatataatagggacttaagaacagaggccatgctcctggaagccatgagacaagatggtggatcctataccattactcaccagacccagagcttacatacctcagggaaagggtatgtatgcttcagaagggatgtgtagaacaattgcttaaggtcaggatttatggtaagtactataacattaaagttgttttgatctaagggcagggcttacagtaagtacatgctctcatgcaaggaacagtagataaaacagacttttttttttactatactttaagtgttagggtacatgtgcacaacgtgcaggttagttacat

SEQ ID NO: 412043 - DNA, 605 bp, Homo sapiens
cgactccagtgtttctaaactcttggcagttccaaggacaggtctttgggctggcctttgaggtaactcccactgtgggaggagccccttgtggggggcaagttaattcatgctgaaattaggataagaccctccctcactgtcctgaggtagtacagtcatccagagacacatatcacagatgagacgctaagcatgtcaaaggctggcttcacaaagaacgatgcctatctctgcagaaactattacgatgttatctgatttttaaaaaaacattttcttacaagagctcaacagtgaggacttcagaccaggagtgaggaaagagaggaccatcaggaagagacttcttgtctggttcttgcatttggtagcaaggtggggataaacaaagaggtggcagacatagcctcccttgtgaagtggaaggacccctggtttctagggagagagtctgagtattagcrtttggttttctttttggatgttgtaggtccctgtagttgtcatcaaacccgcgctcaaccttcagccatcattgctgtgtggtctcagctttcttatgaggaattacggggtggggtcttgtctccttttggagcagg

SEQ ID NO: 412044 - DNA, 571 bp, Homo sapiens
tcagctgaacagggtttctacttctgtctaccccatagacagggttctgtgtctgtaaccctaccttctccagcagccctcctgtctgcaaatctgggagaggggcctccctatttttttcctaagtgcgccaacctacccctaggcagcacttttcatgcttcttgttgatggtctgctaactgtgggctcagagaaaaacgcagtcggccttctcaaagtcattgctcaaataccagtgcccagtactgtgcctgtcacctacttggcacccaacaaatgcttgttgaataaatgatggaatgaatgactaagaatatattaaccagtggaaattcagcagtacaggcagtsagcataagcatagagcaaataaaacagatgtgacaaactggatcaagaaagacttgaagaaattaagaggagatttttccttttaaaaaatgtcctctccctaccctccaaacctacaggcatacttaaagctccaggtgtgccttgataagggattaggtagcaccaaaatgtcaggtgggactttggcacagtcaggggtccagacataaccagc

SEQ ID NO: 412045 - DNA, 617 bp, Homo sapiens
cttcaccaacattgagagaggtatctgtactcaaggagatggtgcatcttatatagcaaagtagttaacaaacctgtagggtagagatattatttacatatcaaacaaacaggaacacctgataaaagaggttaggggccttttatgttttgggtataactatatccccagtgcccaggtgcctaggatagtggctggcacataaaaggtactaatgtatattgttatctagacgaatgaacccacacgtaaaaagttatccatagtcttagctgtccctaastttctttttcttgaacttttatctgccacatcctcaccagacctctagctagacggacactatcatgatcattcatggaaatctgagtttcctcactaatccagcttaggtgcatctaatttatttcccttataatggtggaatctatcaactgagactttactaagaaaaataagataattatgcatatataaagatatgatagtatttacataaaactgatatcttatcctcttataaatgaagtccaatgtgacctatgcaaaactcagactcccagcccagagtaggttattataattgttttggagtctgcagaaactttggacccttc

SEQ ID NO: 412046 - DNA, 578 bp, Homo sapiens
catctataagcagctatagtattctcctcaattcttgtccaggctaactatccctatttccttcaatctttcctcataagacataccttttagttcatctaccaccctggtctctttcctttgaaactgtttcagttttcctcactattaatggccagtatccagcattgaatacaactgctcagataagatctgaccagtacattacttcaatcttggcaaatggctacctgccagatacccccattaatgctggctctatattcttgaaaatacaaaataacaggattcttacatgtttttcttcaaactggtctccaccaaaagctgccacacagggtttgatgcctcctgtccccaaagctattagactcaggccgatcaatgataggactctgaaatggagaggtgagaatgccaaycatgttgatactaaatgcacctgtagagatggactacagagctgcagaggggaaaaaatgtgtacaagggcaaagatccccttcacatttctaccccatgggtactttccatttgcctttattcctaggaggtattcatggtcaattaccctattt

SEQ ID NO: 412047 - DNA, 577 bp, Homo sapiens
ccaccgctacatgaagcaggcccaggccctaggtcctcagatgatgggaaaacccctgtactggggggcggacaggagctcccaggtttcatcttatccaatgcacccgctgctgcagcgaggtaaactcttccagagatttgggataggggagggcagagggcaagggcrggaacatgggctacatcaagacctctgtgaccgatgcggcaggcatcttcatgatggagatgggagggattcatgctaaccaatgtcacattttgatgtcctgattctgaggtgtatgttttgggccatttgttctattgtcctgtccttgtttccattcagatttgtccctgccgtccagcctcccgcagatgccaatgacccagaccaccaatcagcctcccatcgccaatggtgtcctggagtatttggagaaagaactgcggaacctcaacctggcccagcctctgccccctgacctcaaaggcagatttggccatccctgcagcatgctgtcctccctgggctctgaggtcgtggaacgcagaatcatccacctagccccactgatcagagacctgtcatc

SEQ ID NO: 412048 - DNA, 577 bp, Homo sapiens
ccaccgctacatgaagcaggcccaggccctaggtcctcagatgatgggaaaacccctgtactggggggcggacaggagctcccaggtttcatcttatccaatgcacccgctgctgcagcgaggtaaactcttccagagatttgggataggggagggcagagggcaagggcgggaacatgggctacatcaagacctctgtgaccgatgcggcaggcatcttcatgatggagatgggagggattcatgctaaccaatgtcacattttgatgtcctgattctgaggtgtatgttttgggccatttgttctattgtcctgtccttgtttccattcagatttgtccctgcsgtccagcctcccgcagatgccaatgacccagaccaccaatcagcctcccatcgccaatggtgtcctggagtatttggagaaagaactgcggaacctcaacctggcccagcctctgccccctgacctcaaaggcagatttggccatccctgcagcatgctgtcctccctgggctctgaggtcgtggaacgcagaatcatccacctagccccactgatcagagacctgtcatc

SEQ ID NO: 412049 - DNA, 553 bp, Homo sapiens
gaggaatcctgggacagcctgtaaccaggtatttctcccacctcctcagttgtaattcagagactttgctcttttcacatgcctttcttgttatgcctgaaagtcccacactcttattagggaaggacgtgttagccaaagctggagctattactgatatgatatgaatatgggggacaagttacccatttgttgtctcctacttgaggagggaatcaactctgaagtctgggcattggaaggacaattcagaagggcaaaaaatgcccagccagttcgaatcaggctaaaagaccccaccacttttccttatcaaaggcaatatcccttaaggcccaaagctcataaaggwttacagtatattgttagacatttaaaagctcaaggcttagtaagaaaatgcaataggccctgcaacactccaattctaggagtacaaaaagcaaatgttcagtggagactagtgcaagatcttagtctcatcaatgaggcagtaatttctctatatccagttgtagccaactcctataccctgctctctcaaataccagag

SEQ ID NO: 412050 - DNA, 553 bp, Homo sapiens
gaggaatcctgggacagcctgtaaccaggtatttctcccacctcctcagttgtaattcagagactttgctcttttcacatgcctttcttgttatgcctgaaagtcccacactcttattagggaaggacgtgttagccaaagctggagctattactgatatgatatgaatatgggggacaagttacccatttgttgtctcctacttgaggagggaatcaactctgaagtctgggcattggaaggacaattcagaagggcaaaaaatgcccagccagttcgaatcaggctaaaagaccccaccacttttccttatcaaaggcaatatcccttaaggcccaaagctcataaaggtttacagtatattgttagacatttaaaagctcaaggcttagtaagaaaatgcaataggccctgcaacactccaattctaggagtacaaaaagcaaatgwtcagtggagactagtgcaagatcttagtctcatcaatgaggcagtaatttctctatatccagttgtagccaactcctataccctgctctctcaaataccagag

SEQ ID NO: 412051 - DNA, 537 bp, Homo sapiens
tgaacacaggaggaactaccaaacactaataaaaccatcagatcttatgagtactcactatcatgagaacagcrtggggaaactgcccccatgatttagttacctgcacctcgtctctaccttgacacatggggattataaggattacaattcaaaatgagatttgggtgggaaaccacagcctaaccatatcaatgtacattcactcttttaaaataatttatattaacattttgttaatctgcaatgtgttttatttcatttaacaatatgtcatgggtaaattgtcatatcaacacaaacagacccaatgcattatttttaacaactgcattgtattccatggtgtaggcataccgaactcattcaaccattcccctaatgaccatggtttccagtatttctcctcttgtaaataatgctgcagtaaacattttcatatgaatattatggaacttattatttgctgatgctttttactgctatattttaaaagggttcattactttttatttgcaaactaaacatactgtatga

SEQ ID NO: 412052 - DNA, 537 bp, Homo sapiens
tgaacacaggaggaactaccaaacactaataaaaccatcagatcttatgagtactcactatcatgagaacagcatggggaaactgcccccatgatttagttacctgcacctcgtctctaccttgacacatggggattataaggattacaattcaaaatgagatttgggtgggaaaccacagcctaaccatatcaatgtacattcactcttttaaaataatttatattaacattttgttaatctgcaatgtgttttatttcatttaacaatatgtcatgggtaaattgtcatatcaacacaaacagacccaatgcattatttttaacaactgcattgtattccatggtgtaggcataccgaactcattcaaccattcccctaatgaccatggtttccagtatttctcctcttgtaaataatgctgcagtaaacattttcatatgaatattatggawcttattatttgctgatgctttttactgctatattttaaaagggttcattactttttatttgcaaactaaacatactgtatga

SEQ ID NO: 412053 - DNA, 569 bp, Homo sapiens
agaagtatcacagaattttctaaagaatgtcccttattttgcacaaaaaaaaactgagaagaaaattccattgatttaaataatgcatactacccgtataggctctatggagttaaacgatttttttcacaagggttaaaattattaaagttatagtgatatagaagtcatccttaattttctatgacctaaggcacttcttggtgcatgttctttagatatatttcaatagcaaaatgaagcagtaatgtattatttctatcaccagaaaagagttaactatacattatatatacaaacaccttcgcacaaatacataagacatgcacatccctgtatatgaccatatctacaggatcttacatggtctcttacctgtattcgagcttaataagtgtttcctattgaaagagggtataaattagaagtgtataagcatcattaaatcatccttacaggtttctttctagttcataaaggtctatraaactcataaacatgggtttataatctgctttcttttcattcttgttgtatcttcccacctcagacattttcattgtaggctg

SEQ ID NO: 412054 - DNA, 477 bp, Homo sapiens
gtactgcattttttattttgatgtccaagagttcattgctagtcatagaagtacaaatgattttgtrcatgtatcttatatcctgtgaccttgcttagctcaatcattagcttgaggattttttgtcgattccttgggattttctacataaatcaatcatgtcatctgcaagttgcaaaagtttcatttcttcctttctggtctgtacaatttttgtttccttttcttttcttttttatttttgagacagggtttcactctgtcactgaggctgggtgcagtggcatgattatggctcactgtagcctcaaatccccaggctcaagtgatcctctcacctcagcctcctcagtagctgggattacaggcacacaccaccatgcctagctaaatttttttattttttgtacagatagaggtggaggctacagtgagctgtgagcatagcactgcactcagccttggtgacagtgcaaa

SEQ ID NO: 412055 - DNA, 543 bp, Homo sapiens
ttcatctcaaaagggagaaataggcaagaagaaagaagtaatacatttcaagtaagtccaaaacctaaaagggaaaacaacgttgaatatcaagtcttgagaataatcttcttcagctctatctcctgtcttacggacttactgagactgaagttgggctccaaaggccctgggggatcccacccccatggctttgctggatgctgctcatgcagcagttctcatgagttggagtcatgtgcctgcaagctgggattgcactctggcagttctagagttctggagtttcagggcagccttactcccacagcttcatgagacattgactaagtagagactctgtggtggccccaccttcacagacctgctaggcattgccctggtggggactttttgcagtggccccaccccaygactctgctaggcattgctctactggatactctctgcagccaccctgctcctgtggcatttctttgcctggccacctgagactctctgagtcatcctttgaaatctaggtggaggtagcaatacctccac

SEQ ID NO: 412056 - DNA, 543 bp, Homo sapiens
ttcatctcaaaagggagaaataggcaagaagaaagaagtaatacatttcaagtaagtccaaaacctaaaagggaaaacaacgttgaatatcaagtcttgagaataatcttcttcagctctatctcctgtcttacggacttactgagactgaagttgggctccaaaggccctgggggatcccacccccatggctttgctggatgctgctcatgcagcagttctcatgagttggagtcatgtgcctgcaagctgggattgcactctggcagttctagagttctggagtttcagggcagccttactcccacagcttcatgagacattgactaagtagagactctgtggtggccccaccttcacagacctgctaggcattgccctggtggggactttttgcagtggccccaccccacgactctgctaggcattgctctactggakactctctgcagccaccctgctcctgtggcatttctttgcctggccacctgagactctctgagtcatcctttgaaatctaggtggaggtagcaatacctccac

SEQ ID NO: 412057 - DNA, 617 bp, Homo sapiens
ttgactgttgaggtccaggaagtggacttcctcctggacactggtgtggtcttctcagttttaatctcctgccctgaacgactgtcctcaaagtccattactatccgaggaatcttaagacagcctgtaaccaggtatttctcttgcctcctcagctgccattaggagactttgttcttttcacatgcctttcttgttatgcccaaaagtcccacacccttattagggagggacatattagccaaagctggggccattatctacaggaatatggggaacaaattacctatttgttgtccctaattaaagaaggaatcaactttgaggtatgggccttaaaacgacaatttggaaaggcaaagaatgcccatccagtccaaatcaagctaaaagaccccascacttttccttattaaaggcaatataccttaaggcctaaagctctcaaaggattacaggatattgttagacatttaaaagctcaagttttagtaagaaaatgtaacagtccttgcaataaccgaatgctaggaatacaaaaaacaaatggtcagcagagactagtgcaagacctcaggtttcacttgtctaacttcaggcatttttttcatctataa

SEQ ID NO: 412058 - DNA, 563 bp, Homo sapiens
aaaaggaggaacattaaagccaatgaccaggctccattagcagaaagagctgaaagaaaattcctatagctattttattttttgaatccagcagatattttgctcaaaaccagtgttttccaacctaggttctcatcagaatctcttggagaaaatttaaaaaatacaaggatcaggtmtccacactcagaattttttaacttaattagtctatatgaaacaggacatcattagataattctaacgtgtagtcagttttagaaaaccattattataaataaagcctccaaaaggcagttaagcatgccatcatgatggatgcaattgaaatatttttttccaggttaaaatacttatactgaataaaacatggatacccttggagaaggtcactgtagaccatcatggtgtattcactggaccccagcacctgttgctattcacatgatctcatccgttccattcacattgtcacaatctaacagaaaataacccaaagaactgatgtgttctcattgctcctcatatacttgcttttctgataactataccttatacatgtg

SEQ ID NO: 412059 - DNA, 623 bp, Homo sapiens
ccttaaaaaaactgaaaaaataataagacaaacagcaagaaaaacaagtctaagcatagcttatttttttaatgtgtggggacaytgatttttataacttgcctcaatgtgcagagatatttaaaataaagaaataatcatttttgcctattttgaattgcaggaaagcatattgatatgtgaactatatagattctaataaaatacttttaaaaacacttgtttttcaggttattttggaaaagtatgctttagttaatgagttatttagaaaaatccactgatctatgttaccttacatttatagtgcttttacatttactgttttttcatctataaattagttgtgaaaaatacactgtaaattgatgagtaaacagcagtattcatatatatatacacatatatatacacacacacacacacccttatggactgtagtttgtgggaaaagtgccaatttggaatccaattttccttttgcttttcctaagtgtgttaggagaattcaatttctctacatcttttttcctctgtctctgtctctctttctccccagctttccactgttctcttagctactatttctgtatttttcttagtttctatatacttgagcctcc

SEQ ID NO: 412060 - DNA, 530 bp, Homo sapiens
catcgttgttaaaactgtccacttttgttttttaccttctgatgcatgaggctccgaattttataaagttcaccgttaaagctatgtagattaccagcccaacagcgaacgagttcacgaaattattagattcaccaaagcatatgctgcattgtatatctgctattttgggatgtattttgctggtgaattgctagaagcagcaaaattacaacggtagccattctgttcactttttatacaaaggaatcatgaaaatgtgtttaaactttcggtatttgggtatttaagtgcaaagtgactctcaagaaaatcaagtatacttctttctgtctccctggcctgcaatctttgacactattttatgaaataccatccataattccagttggtctatgtcatatataatacgcctgcctcataagtagtaaaataagccactttgtgccttyaccaattctatttcacaacaaagtcaagagacatgtttattaatagaactaaacttttattgatagaagtttaaacag

SEQ ID NO: 412061 - DNA, 451 bp, Homo sapiens
tagcctgaaactgcataattggaatctcatcataagacaaacccaaagtgatggtcattccatgaagtaactgacctagagtcatcatctgtgtcaaggttatggaagtcaaggaaacgctaaggaagtgttcacattaaaggaaactaaagagacctgacaactagatgtaataggtgattctgaactagtacctttggctataaaggacctgattgagacaatgggtgaaacttgaacggggtcaaaggatttgaaggttataatgtatcagtgctaatttgctgatwttgatggttgtattatgtatatgcaggagaatatccttgtatacagggattacacactaaagtattccaggtattggggcatgaggttggcaacttattctcagatgattgagaagaaaattaagtttatctgtactagtcttgttacttttctgtaagcc

SEQ ID NO: 412062 - DNA, 622 bp, Homo sapiens
tcagtgggacccttcaaatttgttaagacctcctgccattttctttctccaaatccatcaccaaccaagtgagagacagagggtgattcattctttatctccaaattgacctagatagtagctccatataaataagacactcaagcctacagattttattaacttaatagtggttcttattcaagtattatttacttgctatggtgtccaatttggtcgccaccaacccacatggcttttgcacatatgaaatgtggccagtctgaattgagatgtgctgtaaagtgcatacatacaccagattttccagatttagtatgaaaacagggatgtaaaatatcttatcaacaagmcaggcatggtggtgcatgcctatagtcccgactacttgggagattgaggtgggaagattccttgagcccagaactttgagaccagctgggcaacatagtgagaccatgtctcaaaaaaaaaaatcttattaactattattttatattggttacatgttgaaaccaaaatattttggatatgttacgttaaataagctgcattatcaaacttaatttcacctatttatttttattcattttaaggtagttactaggaaatttaaaattac

SEQ ID NO: 412063 - DNA, 622 bp, Homo sapiens
tcagtgggacccttcaaatttgttaagacctcctgccattttctttctccaaatccatcaccaaccaagtgagagacagagggtgattcattctttatctccaaattgacctagatagtagctccatataaataagacactcaagcctacagattttattaacttaatagtggttcttattcaagtattatttacttgctatggtgtccaatttggtcgccaccaacccacatggcttttgcacatatgaaatgtggccagtctgaattgagatgtgctgtaaagtgcatacatacaccagattttccagatttagtatgaaaacagggatgtaaaatatcttatcaacaagccaggcatggtggtgcatgcctatagtcccgactacttgggagattgaggtgggaagattccttgagcccagaactttgagaccagctgggcaacatagtgagaccatgtctcaaaaaaaaaaatcttattaactattattttatattggttacatgttgaaaccaaaatattttggatatgttacrttaaataagctgcattatcaaacttaatttcacctatttatttttattcattttaaggtagttactaggaaatttaaaattac

SEQ ID NO: 412064 - DNA, 565 bp, Homo sapiens
attttgacaatgtctagtttcttttttcctttttttcaaaacataccagataaaaataaaaagatttttacttacccacacaacgttaggagagtttttaatctaacgacaataaagaactaagcggcagcaaaatgtacttcatgtggcaaaatacatcaagcaattttctgtcccatttcacttaaaaagtcctaagaatctggyctgaatcacacagctggggttaatgggagcactcctggactgcagggaggttgtgggcccctgggcaaaccacgtggagaccttcaagcttctagaatgagacagaggccttctgctcattttggagggccccggcaggtaagctgaatgataggtgtctgaatcactcactatgaaatgtcatttttaaaaatggtcatgctacatacaaaattgcaataccactgatggcataaggaccagggtcataactctccccaaagaaggtggatacaaatacacaaacagaagcatttctaagcaactgggcagagagatacagagaaaagaggatacagcgaaaaatctattaacccat

SEQ ID NO: 412065 - DNA, 444 bp, Homo sapiens
ttcccactactccaatggcttacaaaatatttgagcagtggcaccatttttattttctkcccggatctcttagagaagcctaatctgtacaacagatgaaggcagagtggctgtgtttgaagcatgaattcgggaggcatgaccccatccactctcctctcccattcttgttctctccttaggcctggagggccaaggaagcttcaggtttcagggaatgcagcttgggaaccactgccctggcccagacagcccaatggtgggagggccagtgtcaggagctccacaccctctctctggcccaatgtgagcaagttctgcctgtgaactgaaggaacatccacatctctcctaaacattcttactggccaaaaggaaggagaatgtgactctttagtgaacacctccgcagggtctttcatccaccattcatgtctgtaaaag

SEQ ID NO: 412066 - DNA, 444 bp, Homo sapiens
ttcccactactccaatggcttacaaaatatttgagcagtggcaccatttttattttcttcccggatctcttagagaagcctaatctgtacaacagatgaaggcagagtggctgtgtttgaagcatgaattcgggaggcatgaccccatccactctcctctcccattcytgttctctccttaggcctggagggccaaggaagcttcaggtttcagggaatgcagcttgggaaccactgccctggcccagacagcccaatggtgggagggccagtgtcaggagctccacaccctctctctggcccaatgtgagcaagttctgcctgtgaactgaaggaacatccacatctctcctaaacattcttactggccaaaaggaaggagaatgtgactctttagtgaacacctccgcagggtctttcatccaccattcatgtctgtaaaag

SEQ ID NO: 412067 - DNA, 542 bp, Homo sapiens
ggtaggtttcattctgaggcctcttttggctggtaggcggctgccgtctggctgtgtgctcacaggacctcttctttccccgcttctttttggagagagagagaaagaaagagagtgcgcgtgcaagagtgcacatacatgagctctctggtatctcttacgaaaacactaatcctatcagattcaggcatcacccacaggaccacatttaaccttaattacttccttcaaggccccatgastaaatacagccacaatggggcttccaaatataaatttggaagggaacacaaacattcagcccataacaggaaactagtgcaaggttgcagagctaagaagtgttggagcaggaactcaaaccccctcccttatgctgaaaaccatgtacctaactgtgaggcagtaccaccatcgtgtatggagtgatagcttggtgtgtagagagggataggatgctgtcatcggagataatgatgatcaggctgtctgggctcagatgaatctaaagactgaatctctccctgtcttcatctccttct

SEQ ID NO: 412068 - DNA, 558 bp, Homo sapiens
gattagcactggctcccaagaaaggtacagtcccttctttcttggagcttacaaattttaaatattaagtcaactagccattaagttttgtgaaaacagaaatgaatcacattggtggaatgtgcgagccagctgggaaataaractcatcttccagaaaccaatcagaaagccatgtctagagagtattattatgagttgaattgtgtcccctcaccacaaaattcatatgttgaagtcctaatccccatactcagcatgtgaccatattatagatagggtctttaaagaggtaattaagtgaaaagaagtgactagggtaggtgctaatccagcaggactgatatccttataagaagaggaaatgtggatacagagagaaggtgatatgaagaaagagggagaagatgaccattgagtggccaaggagaaaggcttagaacagacccttccctcaccatcctcagaaggaaccaggtctgtggacttcttgatatcagacttgtagccttgtgaggcagtaaatctctgtcatgttaaccactcagactgggtggt

SEQ ID NO: 412069 - DNA, 594 bp, Homo sapiens
taaatcctctgctattgaactatttaaacttatgataaaaaaaatttaaatgtcaaattttggataaacatgtggaggtataaagaatttcaaaattctctctctctctgtgtgtgtgtgtgtgtgtgtgtgtgtgtgtgtgtgtgtgtagtaaatgaacgacaaaaaatgaaacccactgtctaatgcatctcatgactattctttttcctccatgggacccaagaatttactttattgggtttaagggggctaatgaaaatatttgattwagctctctaaagagatctggccatattccagctgcacccacaagccaggtatatcagctgggtctctcgagcaggtgatcaagaacgcatgaacaggaatgagcacaggtcagccctgaggaagagggtcatgtctgatactgggctgttccctgaggggtggaatcaatttgactcacagaaggaaaggaaaactaaactttccacctgtgacttataactacaatcaggtcatttatgctatcatttccaagaatggaagaaatcctatggaaaaaaatgcgcatgtagatggaattcttttcctttgtacacatttgac

SEQ ID NO: 412070 - DNA, 562 bp, Homo sapiens
atgctataatagaagatggaagaaggccatgcgaacacagagtaagtagtaattaactctgatgggggcagtcaggaaaggctttcctgaagagcagacatagcatgccattgtgagagatcaataaggcaagcctatgaaattgtttaatgactttatcattcatggaaacaacccagaaaaagcctgagggaccatctctgtctctgcattaacatgggtgtgyttaagatttgattaaatgtttgttgtttctgtaacatcgcatttaaaaaaaaaccaagtatgaacattcgtctattattctgatcttcttcaaagagagaaagagtcctagaaatacttttcttttttccaaagcaaaccctctgcattaatagcaaaagaagaatggcaagttatcgaacgtattatgaactagttagccaaagcgcaagtctgggaaggcccacatttgttttatgtagcaatgagacaaaatatgagagtttttttcttcttatatatggttgcctctttctacttgactataatcattaataatttctttggaccagcagag

SEQ ID NO: 412071 - DNA, 562 bp, Homo sapiens
atgctataatagaagatggaagaaggccatgcgaacacagagtaagtagtaattaactctgatgggggcagtcaggaaaggctttcctgaagagcagacatagcatgccattgtgagagatcaataaggcaagcctatgaaattgtttaatgactttatcattcatggaaacaacccagaaaaagcctgagggaccatctctgtctctgcattaacatgggtgtgtttaagatttgattaaatgtttgttgtttctgtaacatcgcatttaaaaaaaaaccaagtatgaacattcgtctattattctgatcttcttcaaagagaraaagagtcctagaaatacttttcttttttccaaagcaaaccctctgcattaatagcaaaagaagaatggcaagttatcgaacgtattatgaactagttagccaaagcgcaagtctgggaaggcccacatttgttttatgtagcaatgagacaaaatatgagagtttttttcttcttatatatggttgcctctttctacttgactataatcattaataatttctttggaccagcagag

SEQ ID NO: 412072 - DNA, 588 bp, Homo sapiens
gttcacattcttccttggtaaaacagatggttgggaggccgaggcaggcagatcacgaggtcatgagttcgaggcaggcagatcacgaggtcaggagttcgagaccagcctgaccaacatggtgaaacctgtctctactaagaaaatacaaaaattagctgggtgtggtggtgcacacctgtaatcccagctactcaggaagctgaggcaggcgaatcacttgaacctgggaggtggacgttacagtgagccaagattgcaccactgtactccagcctgggcgacagagtgagactctgtctcaaaaaaaaaaaaaaaaaaatagatggaccagcttgatagtttgcaaacttcaatgtgcatgggaacttacmaaatctgttaaaaatgcaaatccccagatcccacctccagacattttcattcagcaggtgaggctgggcccaggaatctgcctttttaacaaaggacccaggtaattctgatgcactttctttgccaatcagtgttagaaaacattggttaactaatgctatttggtaaagaatttgggccattttgttgatggtagttttccaattacattcc

SEQ ID NO: 412073 - DNA, 575 bp, Homo sapiens
tattttaaagaaaagatatatttatatgtcattaactttctagaaagtaatatttttattaatattaaaaacatcttcaaaaattgtttttcccctgagaatggctgcttctcaaatagtgtgttttaaaaaattaagatagtctactgatatactcaaatactcacatttatcttcttagaaagcacccatgtatatcttccacrtgatagttatggcttaaaaaaaattcaaatttatgttgctgctgtcccatctacccatctctacaatagaagattctaaaaagtgattttgtcaccagaaacccacattttctcccatctggaccttgaagtttcctttaactttgctttagtgattgggcaagtcatctttctttctgtggctttaagaattgcccatgataaagtaaaagagccataacctcaaggaaaccatttattaggcttaatcaaaacataatactcttgtttatgtcttcaacacattgtttatggagagagtgagccacaatgcacagacactatcacgatgctccggtgaagatgggtgatttaatgcccaagagcaca

SEQ ID NO: 412074 - DNA, 545 bp, Homo sapiens
ttattccctgacgaaagaaaatgcatcaataatttcagattagttactgtactggagcttctgaaattccaaattttctattttgaagcatcaatttrtagaagaatgtaagtattcttaatttttgatgctgtaaaatgcaataacgatagacatattttaacacagaaagataaagacttcaaaagtacataaacagccagaaaaacatagaaaagaattagcttaaacaccttcaaattgcttgggctcaagatacctgggttctaatccctcctccacttgataactctgcaacctcattcattgactcatacatttattcaacaaaggcgtattcggtttgacaccaaggtactgtgctgggcattagttacagagaaatgctagatatggtctctatcctcaaagagcccatagtgtaggggaagaaacagccatgcaaacagatattcctacagtgtggtgggaacattaatacagatatacagagagtattggaaaggaaagagggtaggggtgggggaatgtcagggtttcaagtt

SEQ ID NO: 412075 - DNA, 545 bp, Homo sapiens
ttattccctgacgaaagaaaatgcatcaataatttcagattagttactgtactggagcttctgaaattccaaattttctattttgaagcatcaatttatagaagaatgtaagtattcttaatttttgatgctgtaaaatgcaataacgatagacatattttaacacagaaagataaagacttcaaaagtacataaacagccagaaaaacatasaaaagaattagcttaaacaccttcaaattgcttgggctcaagatacctgggttctaatccctcctccacttgataactctgcaacctcattcattgactcatacatttattcaacaaaggcgtattcggtttgacaccaaggtactgtgctgggcattagttacagagaaatgctagatatggtctctatcctcaaagagcccatagtgtaggggaagaaacagccatgcaaacagatattcctacagtgtggtgggaacattaatacagatatacagagagtattggaaaggaaagagggtaggggtgggggaatgtcagggtttcaagtt

SEQ ID NO: 412076 - DNA, 567 bp, Homo sapiens
aactttgattttatgtttctagagaaaacaaaaaaggcatacctcaacaatagcctattagacttttccaagcatgacaaatcatgtgtatttgttatatatacagataggctatgtggtcttaattaaggtgaccatataatttattgtccaaaccatgaaagaaggtgctatcaataattatccagggacaacagtggtaacctggaactgttccaagatggcaagggtgcctggtcaccctagtcctaatgaataaatacacacacacacacatacacacaaacacacaaacacacaattagatatcgttactttcagacacattctgatactacccgctggagtacggatgtgkagttaaatgctttctaacactgtgtgagcccaccctcctcccacctcaagagctgctagccctttctttacctaatgcatttcttttaacttgttttctcacaaaagactgtacgtaattggtcagccatgagagattaatttgtgcttagctggctgagcggacacaagataactcaatagcggatgatgccagtgcatgaaccagca

SEQ ID NO: 412077 - DNA, 567 bp, Homo sapiens
cctgggttataaacagacctccggctgaatgttaagcactttaatgactgagaagctggggagtatggggcagcatctttcaattgctgcgctgaagtaaaaaggctgagacaaggacagaaggtggggaaggtgagtactctgaggcacccaagctgcatagcactgcttgtgctgggatcacaaggtgcccagatcatccaaggggkgtaccaggtatagaggggagaagaagaccctagaacaggtcagacagtgcagagaatgagggcaggccctggccaggagtcagggagaggctgggcctcaaggcatactgcagtgtccagcaaatcaaaaatctgacaagggactggcctacatccctactccccattccattcctttctagacctaaaatctcaacacaaacggaatgtctgatcactttagctataaaaacacataaagccatatttttcccccttaaatcagaagcaaatgctaagggaaaaggacttcgtggcatgcagagaacaacaggcacaactattgtctctgtctcctggcagtctcccccagacatct

SEQ ID NO: 412078 - DNA, 610 bp, Homo sapiens
ttttcaacagtttgattatgatgtatctcagtgcagatctattctagtttatcttacttggagttcattgagctttttgtatgtatagattgatattttttatcaaatttgcaaagtttcaccattatttcttcaaatcatggttctacccctttctctctcttctctgagacgctctttatgggtgtattgatgggcttaatgtcctccggtctcctaggctctgttaatttttcttcatctttttctttcttgttcctctgactggatactctcaatttacctgtttcaagtcttctcattctttctttggtctgttcaaatcttctgttaagcccctctagtaattttttcttttagttattctacttttcaattccaaaatttctatttggtcccattttataatttatatctctttattggtattcactatttggtgaggtattgctctcataacttaactctttagacttagtttcagctttttgaatatatttacaatagctgatttaaagtctttgtctagtaatraactcgttttcactttctcactttctcaaagacagttactgttgattgctttttttttttctcctggtatgtgccc

SEQ ID NO: 412079 - DNA, 571 bp, Homo sapiens
aggagaaagcgtaaattaaatgtcgtctcattttttaaattaggtagaaaagcttactcccacttaagaaaaagaagaactaaattaaaattcgtttcgccctgagagcaatcagtatatctaatccaaattgagaaaaatgaaatcctttttaaattttagtacctgtatgttcaaaagccataattctgtttggaaatctatgaaggtayatttttctcacatacgaaaaattaatcttgtgctaggtaagaaactcatcctctttttttttttttttttttttgagatggggtctcactctgtcacgaggctggagtgcagtggcacgatcttggctcactgcaagctctggcttccgggttcaagcaattctcctgcctcagcctcctgagtagctgagactacaggtgcgcgccaccatgcccagctaatttttgtaattttagtagaaacggggtttcaccatgttggccaggctgatctcaatctcttgacctcatccgcccgctttggcctcccaaaatgctgggattacaggtgtgagccaacgcgcccagccgacatgttt

SEQ ID NO: 412080 - DNA, 558 bp, Homo sapiens
tgcacagctagcaactggcactctgatcttgaaggcaagccctctttacctacaagtgctctccacacagaaggggctcaagtgcaaatactgattgatgggctggatcccactcatatcgctggtctaattgcatccttttcttcgtggcagcttggcctgctgtcccctggctgccaagatgttcttactcacactgctctgccttcactcttgccattgtgttgagaatccatcaatacaaagctgtacaattctaagtacccaggaagtgagcagaccatattgcacagggcaactaagtggtaagagtgaaaacagcgtagcagacggaagccctaagcaggtcctccaggccagaaggagggttgggagagggaagacactgggggcaagtgacagattacctaatcctagaaacaggtagaaatattaattccctttggggtagaaagtcagaagcaaatgtagctacaatcagtcatagcatgctaatagccaggaagtcacatytgatgctcctggaaatagactgctcacctcgtaggtcagaaggca

SEQ ID NO: 412081 - DNA, 362 bp, Homo sapiens
atctcaaaaaaaaaaaaaaaaaaaaaagacctgggatctaccttaaatgttgtagatacattgttatgatcagtaccgcatttaattctcattcaaccagtccaactcctttttctaaggaacctaactgcaatcttttaaaccatcagcaaaatcatttggtattcttagacacccacaaacagtgctackagtagcttggataaagacaatttagggggtggatccctgtacaccaaaggtaaattgataaaacattttccctataatatttacctagatacataattttcaaaggaaaataaaatataatctctatctaaaaattctaagacctataaaaggggcaaaaaacatgtgtt

SEQ ID NO: 412082 - DNA, 642 bp, Homo sapiens
ataattacatattacatataatatgacatttatattacagtatataaataatattcatatagtttatataatatataaaaatttatattttatatgtatatattatatataatatatacttatatattgtattagtccattcccatgctgctrtaaggacatacccaagactgggtaatttataaagaaaaagaggtttaatggactcagtctcacgtggttggggaggcctcgcaatcatggcaaaaggcgaaggaggcacaaagtcacatcttacatggtggcaggcaagacagcctgtgcagaggaactgccctttataaaaccatgagatctcatgaggcttattcaatatcactagaacagcatgggaaaaacccacccccatgattcaattactccccactgggtccctcccactacacacggggattatgggagctacaattcaagatgagatttgggtggggacacagccaaaccatatcatatgtatagaaacttgagttgcaagttttccatagtggttaaaatttatttgtcatagcttatatataagttttatatatattatatataatgtaaatatctattatatatatctatataacatatagagatatatattagagagacagaaag

SEQ ID NO: 412083 - DNA, 642 bp, Homo sapiens
ataattacatattacatataatatgacatttatattacagtatataaataatattcatatagtttatataatatataaaaatttatattttatatgtatatattatatataatatatacttatatattgtattagtccattcccatgctgctgtaaggacatacccaagactgggtaatttataaagaaaaagaggtttaatggactcmgtctcacgtggttggggaggcctcgcaatcatggcaaaaggcgaaggaggcacaaagtcacatcttacatggtggcaggcaagacagcctgtgcagaggaactgccctttataaaaccatgagatctcatgaggcttattcaatatcactagaacagcatgggaaaaacccacccccatgattcaattactccccactgggtccctcccactacacacggggattatgggagctacaattcaagatgagatttgggtggggacacagccaaaccatatcatatgtatagaaacttgagttgcaagttttccatagtggttaaaatttatttgtcatagcttatatataagttttatatatattatatataatgtaaatatctattatatatatctatataacatatagagatatatattagagagacagaaag

SEQ ID NO: 412084 - DNA, 563 bp, Homo sapiens
atcttacatggtggcaggcaagacagcctgtgcagaggaactgccctttataaaaccatgagatctcatgaggcttattcaatatcactagaacagcatgggaaaaacccacccccatgattcaattactccccactgggtccctcccactacacacggggattatgggagctacaattcaagatgagatttgggtggggacacagccaaaccatatcatatgtatagaaacttgagttgcaagttttccatagtggttaaaatttatttgtcatarcttatatataagttttatatatattatatataatgtaaatatctattatatatatctatataacatatagagatatatattagagagacagaaagtcattaattaaccttgcaaacctggagtcagactatgggaatcctccttgggctcagactctattgttcaagttgtttaattcctccaaaccttggagaagcttcctgctctgatgtccaataagtgacagtatatttctcataaggttgctgtgaggagtaacaattaaatccacgtggcttcctagcac

SEQ ID NO: 412085 - DNA, 563 bp, Homo sapiens
atcttacatggtggcaggcaagacagcctgtgcagaggaactgccctttataaaaccatgagatctcatgaggcttattcaatatcactagaacagcatgggaaaaacccacccccatgattcaattactccccactgggtccctcccactacacacggggattatgggagctacaattcaagatgagatttgggtggggacacagccaaaccatatcatatgtatagaaacttgagttgcaagttttccatagtggttaaaatttatttgtcatagcttatatataagttttatatatattatatataatgtaaatatctattatatatatctatataacatatagagatatatattagagagacagaaagtcattaattaaccttgcaaacctggagtcagactatgggaatcctccttgggctcagactctattgttcaarttgtttaattcctccaaaccttggagaagcttcctgctctgatgtccaataagtgacagtatatttctcataaggttgctgtgaggagtaacaattaaatccacgtggcttcctagcac

SEQ ID NO: 412086 - DNA, 458 bp, Homo sapiens
gaagcttcctgctctgatgtccaataagtgacagtatatttctcataaggttgctgtgaggagtaacaattaaatccacgtggcttcctagcacagcacctggyaagtaggcgctgggtactcttagctattagaattaatattagcattgctgttaatatctttattgctattcatacttgagtgaaataagccgactgagttcacagcacagctgagaaaatttccattgcttgtgtggtttaacatggattctgggagcaataaccctggtcactgatgcatcaactccggaataaatgccagtggccgctggcaagaaaggaacaagagcatcccatattccagctccatttacaagatggcttattgcttttatagatccttcagacaatggcacaaaggcttccagagagaaaagcctgagatactctaatacgtatatggacaggaatatt

SEQ ID NO: 412087 - DNA, 644 bp, Homo sapiens
gggttgggagtagatatagggtcagccctttctacaactcaaagcccaagaacaaggaagaatgataccaaggaaaatcagaaagaggagtggatatatggctggaaaatcagcaaatacttagcacagatagttttttgtccccttttttcccaggagatgccaagcaagctaatgtcaaaagtgacatccatctcgactgattctgtgagaaacaccaccagacagagtatttggcacatagtaatcggtcaataaatgtttctcaaattgaactgagattttcttttatctggtrtctttctggccctctctgggcatctcttcctttcttttgatctaagtgtcatgcatttctcctcaagtgcatccctcttttctcataagtgaaagttgtaaactattctaaacataacttgtcttttattcttctctcacaaaagtataatcttaccattggtggacaaagacttactatgtaaagctacatgactgttatgattgtgatgacaatgtgtttgaatgccacctttctccccaggttcccaccaaagtcctcagatgtgtgatttataagaaagaatattatgcacagaaaaatcccaaccattcattttctgccattctcatgtcacccagtgaac

SEQ ID NO: 412088 - DNA, 586 bp, Homo sapiens
catcctgcacaacatttcaggaggttcttggacttttgtcatagagacctggcctcactttaatgaatcccatcttgggtatccagcaggcaatgtgcacagtgcttgtgtgccgtctatgctgcagttgccagacctctcggattcatccctgttctgcttctcactccctctgcacatttaggcaaattactctaaccttcccctccaccctttttcttgagacaagatggagtacagtgrtgtgatcacagctcattgcaggctcaacttcccaagctccagtgattctcccacctcagcctcacaagtagctgagactacaggtgtgcgccattgcactcagctaatttattttatcttattgttgttgttattattattattattattattattattattattattattattagagacaggggtctcactaggtttcccagggtggccccgaattcctgggcttaagtgatcttcccacctcagccccccaaagtgctgggattagaggtgtgagccaccacacctatcctctaacttttttctgagcctcagtttcctaatctgtaaaagccgacttata

SEQ ID NO: 412089 - DNA, 518 bp, Homo sapiens
gatggtctttcaatatgtcaaacattgaaccattctctctcagatcctctcattctctcttacccctctgcaatcacctttgcattggcccaacttctcttctatgttaaaattcagtgcaatgtgcaatatgccattgattctgtcatgtccaatgccctgggatcagggatgaaagttggaaatcatccttagaacatgcatttgttctccaaccaaaatttttattcaaaaggtagaaccacaaccgtgtcactttgcatctatctaacaatgcaattatttttataaaaaagaagrcaaaatgtatagggttcgttaaaaacatttttaaaacacagaaaacaatggagaagaaaaaaaatttaaagcatgacaaatagtgtcaccccaaaataacaattttaaatattttggtgtgttcctaaatggcctttgtgtgtgcactttttgcacggcttttagattgtactatatgtaatattgtgaatcctgctcttagtagaatataaggttct

SEQ ID NO: 412090 - DNA, 426 bp, Homo sapiens
ccccgagccacctggacccaggaagccaagcatagatggggaagcttcaaagacaacattttttgaactcacagtcaaacatgaatcaataactgcaaatgaggcagcgccgggggtggtggatttgcatttgcactcggcaggttgggcagaaactaatttgacaattggcacccaccttaacgaaggccacatacgaatcctctgtctgtttgtttatctagagctggtgatggttggaaatgtacatggcccgaggaagcgatcaggggctccagagaggtatgggggaactcggagggaaccaggaagcaggaactcagagggctggcccttcacatacctctctcttagtgctggtgataattacagtcatgtgttgyttaatgatgagggtaggttctgagatgcatcgttaggcgattt

SEQ ID NO: 412091 - DNA, 546 bp, Homo sapiens
atgataaggaacctaggctgcaaagcaagtactgccggcaccactcagctggagaagccccttcatctggctaagcctcagtgtcttcatctgtaagatggagatgctaaaagcatccccctcatggtgctgatgggaggcctgggtcagataagacgtgcaaagtacctggtaaggacactgctaatagtagctataataatggctcgagtatgcaatgccccagcttggttttgaaacagtcattgatcccagcaatgaaaccactgtagaataaaggctgtcagcttacagcttggcctaatgctgatgtgacagatagttgggcttytgatggagccttatgctccatagttgagcaactctaattgggggaatgaggtccaatccacgatcaatcacagatatgcaaaatttctatttcctgtataattcacaagccaaaatttccagtgaaactttggtgctgccctgtctttctttaggatagaaatattcttaaaacaaaagaaattgtagacagctctcattgccttctgggtaatc

SEQ ID NO: 412092 - DNA, 580 bp, Homo sapiens
gattatatgccttttactatgagctaagcaatgttctaaatcagtgacactcaagacttttagggcttaagatgccttcacactcttagaaatcattgagcttcccagagagtttttgtttatatggcttatcgcaatcaatatttgccatggtagaaattaaaactgtgaaagttttaatatakttatttataaattcatgctataaaataataaattaataataaatgactgaatccattacatgttaatataaacaacatatgcttataaaaggataactatagtttccaaaacaaaaaatatttagtaagaagtatatttttaatgcctagttgtagaaaagagctacattctcatatctttccctgtgttgtctgtaataatatgttgttctggttaaggcaagcgtatgaggaaaatccagtcccgcacatgtgtgtacttagaatagtactataaaaagcttttcagataagtagggattttcttctttgatactacaccaaaactcaacaagtaataattttttaaaggttactacaatgtggaatgtgaaatcatattcaatagacttttc

SEQ ID NO: 412093 - DNA, 569 bp, Homo sapiens
gttgacatttggggccagataattctttgttgtgaagatgcttgtaggatgtgtagcagcatcccaggcccctactcattagatgcgagcagcacctcccctctcagggttttgaccactaaaaatgcctcaaggcattgcgaaatattccaggggagkgggtaatactgcccgcagttgagaaccaccattaatacctcaatgttaggagtaaactttcttcccctaaggaactgatgtagtccttgctttctgataaagaaaatgatgtaagtgatcatgtctccatttttgctatggccaccaagaagctcgaaggcaaattcaagtttcaactatagccaaaaggtattcccaatgtcctgggcaattttcattggtcgttttctaattctttattttctctgtctttttgcctctcttccttatttctctacttatgttttccattatagatgtcttcctctaaagtcatttgaaatgcttcacagaagatagcaaggtacagatatgaaaacatttttatactgattttgaaattgacttgcttaattatttgatcaaagctg

SEQ ID NO: 412094 - DNA, 576 bp, Homo sapiens
agtactcaaccaactgttggctttgcatctttcaaagaacatgaaaaatgtttgatccaaccaggatgaaacaattcttacaaatgtccacagaaggagtatatatgcaaacagtgcaaatctctttttatttctatcacacaccttctaatttacttcagtcaaacttctttgtcaacattaaaatcattactgyctatcaataaatgatcatagaatggtgtctttatttattttgtgtattttctaattcccaacactagaatataagctctcaaagggcaatgccattttctgcatgtttccccactgtatcctcaatgcttagaagagcacttgacacatgctaggcactcaatacattgctgtcgaatgaatgaattaatgcaaggctaaatgtgtttgcatttcaccaagtatatttgcattacagacttgtaatttcacactgggtttagtcaatgttttttaacacactgacacttataatcaagactcagggttttgcttacgctaacaaatgctgattctccctaatatagagcactgcttttcccagctctgaatattagcttc

SEQ ID NO: 412095 - DNA, 556 bp, Homo sapiens
cttgttcttccttcctatggctggcacagcataagccagtgcctggactagggtgaggggaataaggtgccaagggcaccaaatggaaggattaaatagtaattaactaattagtatgtttgaaaacataaatacaacactaaaaatccaaagagtgacagagggtaacaggggaagcaatgttagaaaaataagtaggagagtaagaagagaatgaaacaactttaaaaattggtatcagaaataaaacagagaggaaatttcattgaggtgaggttgtgaggatgagttgaaaattattatttccttgttaatgaatgcartagatactggagaaccatattaattattgctcatttttacgttattttgtacttatagaacttacctgtttaagccctatttcacagttttgctatgtgatatctttggctagaagaagcgaaagaatggtgtcttgaaaaagtaaaagtcaagattcttaatggaatacagtccatattctattccttccttatccacttgaagaattatcattctcaggtctccgatagac

SEQ ID NO: 412096 - DNA, 556 bp, Homo sapiens
cttgttcttccttcctatggctggcacagcataagccagtgcctggactagggtgaggggaataaggtgccaagggcaccaaatggaaggattaaatagtaattaactaattagtatgtttgaaaacataaatacaacactaaaaatccaaagagtgacagagggtaacaggggaagcaatgttagaaaaataagtaggagagtaagaagagaatgaaacaactttaaaaattggtatcagaaataaaacagagaggaaatttcattgaggtgaggttgtgaggatgagttgaaaattattatttccttgttaatgaatgcaatagatactggagaaccatattaattattgctcatttttaygttattttgtacttatagaacttacctgtttaagccctatttcacagttttgctatgtgatatctttggctagaagaagcgaaagaatggtgtcttgaaaaagtaaaagtcaagattcttaatggaatacagtccatattctattccttccttatccacttgaagaattatcattctcaggtctccgatagac

SEQ ID NO: 412097 - DNA, 558 bp, Homo sapiens
ctttaagttgcactttcctaaaatgtgatttcaacatataggaaaaaccaaatcattccatatatttttttctatacacataaccttgatatgtatggaatctgggtacttggaatttaggttaacaagatggatgtggccttttacatcaggaagtttagtatggagagtgtgttagggaatgacttccctcttctggcctaraagttctgcctctctttactacagcacttagttggtggatgggaatggtccacaggctcttagaaaatttgttggtgtgcagcaaacaagctcacctctattggttcctggcaggaaggagagatgcagcagcaactctgcaattgtgagcaataatttccaagagagatgtaagactgtgctaatattgtcaacaccttgttgattaactttctctggaagagcacgtatagcaactaatcaataacaagtccaagtcttctcttctcctactactcactctttggttgatggaggttaaaaaaaaacttatgtttatgtaatttttaacaactaccagaacaaatcctgagt

SEQ ID NO: 412098 - DNA, 560 bp, Homo sapiens
aaactagtacggcaataccaatcatccttgctgaatatcaactcttaagtccaaagtcaaactccattataaaagacatcacaataccatcccagttttgttgttgttgttgttgttttgtttggttttgtttttgctgggatactatttgtgttattagcataatccaaattayacattcttgagttaaagctgaaagaaaaaacctgaggtgtagtcctcaggttaaatatcagcgaggaaatgcaaggttcttaacaaaatagaaagttttaatgttatgtgcttttcattctaacctcttcttttttcatgctcctaaatgttttggtatgttgcatttagtttggatggtatattaatcagggtacaccagagggaaaaaaagaccaatgagatggggggagagagaaacaagatttttttttttaatttgctcatgcaattgtgggggctggcaagtccaaaatctgtagggcagacaggcagactggaaattcaagtatgagttgatgttgcagtctagtgtctgaatctgcaggtaggccagcaggtagaaa

SEQ ID NO: 412099 - DNA, 560 bp, Homo sapiens
aaactagtacggcaataccaatcatccttgctgaatatcaactcttaagtccaaagtcaaactccattataaaagacatcacaataccatcccagttttgttgttgttgttgttgttttgtttggttttgtttttgctgggatactatttgtgttattagcataatccaaattatacattcttgagttaaagctgaaagaaaaaacctgaggtgtagtcctcaggttaaatatcagcgaggaaatgcaaggttcttaacaaaatagaaagttttaatgttatgtgcttttcattctaacctcttcttttttcatgctcctaaatgttttggtatgttgcatttagtttggatggtatattaatcagggtacaccagagggaaaaaaagaccaatgagatggggggagagagaaayaagatttttttttttaatttgctcatgcaattgtgggggctggcaagtccaaaatctgtagggcagacaggcagactggaaattcaagtatgagttgatgttgcagtctagtgtctgaatctgcaggtaggccagcaggtagaaa

SEQ ID NO: 412100 - DNA, 584 bp, Homo sapiens
  misc_feature (1)...(584): n = A,T,C or G
nnnnnnaccaattttgagctatcctgtctttctttagttagaatattcttgaaacagaagaaactgtagacagctctcattgcctctgggtaatcatgtctttaatgtaaactcctggggcttattatgaaacaaattgcattttatctgtgaccttggagacaaattttagatggatgggtgttggagtaaaattgagtctgggctgcctgtctaccttggtaccaacttctactcttgtacttttctcattgtgttgcattggctcatactcaaaggttaaaaagaaaaattggcacaagccacatttggtccacaaactccttgccctccaaggttcttaaagggcatgaaattttgctggatcacgcttcagagttgctcataacatttctgattttattgaattcccccctcctccctttttaggtccttaggtaaaactccactaaaacaaacaaacaaacaaacaaaaaaacaatgacccattgccagcaatcctctgrctgcacctttttctgttgtctttagattcatggagtagacattcaactaagcagaaatcctcctccaacccttacttc

SEQ ID NO: 412101 - DNA, 590 bp, Homo sapiens
gaggatcccagtgctttttttttctgaagccctttcatattttatgcctatagaagcttagggtcttaatacattcatttctgcatgggtggggtttcagtctgcaacaagatcttgtagggaygctatcgctggctattaggtgatcacagttctgtgcattgtctcacccagtcctcacagtaactccaaagacaggttgtattatgatcctattctatagatgaaggaacttaggaaagtcacacatccaggccatacaggtagagagtgatgaagccaagacttgaggcgaggtctttttgattccaggtatggattggctgattataactgcttcttttgtgataagagagggtactgggactcctctacttgagaaagaaatgcagtaagtgaaagaaatggtggaaactcagatgctggacaacacatccaggaggctggctcctctccatcaataaaccaagaacagttgcttagtgctgtcacttcagaaaactgactgagagaggccagataatgatccttccttctccatatctatctgccagtctaacttctcagttccatgttctacttaaggggca

SEQ ID NO: 412102 - DNA, 590 bp, Homo sapiens
gaggatcccagtgctttttttttctgaagccctttcatattttatgcctatagaagcttagggtcttaatacattcatttctgcatgggtggggtttcagtctgcaacaagatcttgtagggatgctatcgctggctattaggtgatcacagttctgtgcattgtctcacccagtcctcacagtaactccaaagacaggttgtattatgatcctattctatagatgaaggaacttaggaaagtcacacatccaggccatacaggtagagagtgatgaagccaagacttgaggcgaggtcttwttgattccaggtatggattggctgattataactgcttcttttgtgataagagagggtactgggactcctctacttgagaaagaaatgcagtaagtgaaagaaatggtggaaactcagatgctggacaacacatccaggaggctggctcctctccatcaataaaccaagaacagttgcttagtgctgtcacttcagaaaactgactgagagaggccagataatgatccttccttctccatatctatctgccagtctaacttctcagttccatgttctacttaaggggca

SEQ ID NO: 412103 - DNA, 590 bp, Homo sapiens
gaggatcccagtgctttttttttctgaagccctttcatattttatgcctatagaagcttagggtcttaatacattcatttctgcatgggtggggtttcagtctgcaacaagatcttgtagggatgctatcgctggctattaggtgatcacagttctgtgcattgtctcacccagtcctcacagtaactccaaagacaggttgtattatgatcctattctatagatgaaggaacttaggaaagtcacacatccaggccatacaggtagagagtgatgaagccaagacttgaggcgaggtctttttgattccaggtatggattggctgattataactgcttcttttgtgataagagagggtactgggactcctctacttgagaaagaaatgcagtaagtgaaagaaatggtggaaactcagatgctggacaacacatccaggaggctggctcctctccatcaataaaccaagaacagttgcttagtgctgtcacttcagaaaactgactgaragaggccagataatgatccttccttctccatatctatctgccagtctaacttctcagttccatgttctacttaaggggca

SEQ ID NO: 412104 - DNA, 615 bp, Homo sapiens
tacttttcaaaactgtagctctcaagaaatcgtgtgcaatgtcayggcactgttatatattcttgattagtcaaaaagaggaaaaggtttagatttttttaagcagcctttggttaccctggaacatttacattctgatgtctttacaagtgttagtttcaaatgcagatgttggtgtcaatcattagagaatgtctataggacatctggtaaggctatcaataataatatatgcctatgccagtaaaaagaagaacaggcagcactgtttctcatattgcagatgaaaagggagccgtaagtcaagaaatagcttttcaaatgaacagcaagcccctattatttgattttaaagttaccatcttggagacagttattcttaaatagttaagattttctgaaatattagagttctcaaaatatggcattatatttattgtgtgtcatttatgccatggttattttatgtagaattacttcttgaaaattcttttttttactattatcaagtcatcccagaaaaataagcccctcctttttcctcatcagaatcactttatgctgtaatgatttatttattcatatgggtttaggcattgagaggaaaagacaggc

SEQ ID NO: 412105 - DNA, 588 bp, Homo sapiens
ggcactgtacatacataataaatgaggctactacttttcaaaactgtagctctcaagaaatcgtgtgcaatgtcacggcactgttatatattcttgattagtcaaaaagaggaaaaggtttagatttttttaarcagcctttggttaccctggaacatttacattctgatgtctttacaagtgttagtttcaaatgcagatgttggtgtcaatcattagagaatgtctataggacatctggtaaggctatcaataataatatatgcctatgccagtaaaaagaagaacaggcagcactgtttctcatattgcagatgaaaagggagccgtaagtcaagaaatagcttttcaaatgaacagcaagcccctattatttgattttaaagttaccatcttggagacagttattcttaaatagttaagattttctgaaatattagagttctcaaaatatggcattatatttattgtgtgtcatttatgccatggttattttatgtagaattacttcttgaaaattcttttttttactattatcaagtcatcccagaaaaataagcccctcctttttcctcatcagaatcactt

SEQ ID NO: 412106 - DNA, 579 bp, Homo sapiens
ttaattacttaataaatgtccatttatttgtattstaatgaacatattaatagcagcggtagagattatttactgtcacaaaaatggactttggatacatgtttagaaaaatgagttaataaattatcaattttgtaatttttattgcctatatgtggcaaaggccttattatatgtagcaatgagggaagagatggagccttttctggctatttcatggttagaagtttgcttggagaatgtgctttcctattttttagaattactgggaatcaatattatcacttcatacaattcagatattgagcaaagtgggctccaaattacataagagaaagtaaagtatgtaacttctttataactaaataataggcataaatgggtgtttctatcatgtgtttctctatgtgcttcatgtgtatttattgattattccaggctgttacctttttcttttccttctcactatcaatattattcttggtcagtaggtgtctttgaaaagatgcttataataaaacatcccttcttctgaaacagaaaaacaaaattagtttttctgttggccacatatttacc

SEQ ID NO: 412107 - DNA, 593 bp, Homo sapiens
tcctggctacacctcagggatgtaacacctaacgatattagtgatacttaacacattttcatgggacatgggagaaaagtrgaatgtcattatgtcaagtgcaagtccagatgagctgttcatgaagaatctatggaaatggcttacaaatattatgggtgggtaaagatgttacaggaagaaaatagcaattacattatgtaaagcaattctgtgctataatttaaagttgcttgcagttcggtatttcccagagaagtttttaattaggaaatataaaaacacatctcagagaatgattttaaaatcttccatcctccaaaatgaaaaatggaagatatatttcttcaatattgccaatttatctgagattagattattatttgaaaacataaaatgtttagatattttatgagtaataaacaataaacaaatgtctactgctctacacagtagattaccccatttcccctttatttcaaggttaggggactaaaggatatatcacagaaacaaggagctttctcatggatatacaagaatggagtaagtttaaaataacttcatggaaaattgaaagattagttgacaaa

SEQ ID NO: 412108 - DNA, 593 bp, Homo sapiens
ttgacaaaccaagctaagagatgtaaagaatgattgacaacaacagtgatgctcagttgagaatgaaaagcacaatttttatgtaatgatatgaatgtacatgtttatgtgttattatctccaagtaatcagcaatccttattcaygttataatatccaaactcatacatgttaaataatcctccgaaatgtttttataatttgtcaaagaaacaagatggatcatagaagcagttgaatttacaattttgctactcagaaaaaaagaaatatcagatgtatactatccacccactcctttgcagagattttttttttttttacaaaaacttgtttttaataggttaaacatattatggtgtctgtgtaagtagttgtaagctcacgtttaaatgtaaataattacttggaattttatatgacatatcacacttctgaaacttgcaacagtgtacaaccaagtttgggaagagaaggaaggcacctggtgattcccaagtggtgaatggaaaagcaaggcttccaaaaattatattcagccatgtaaggccatataacgctatggttaagaatatgcagactctagccagact

SEQ ID NO: 412109 - DNA, 519 bp, Homo sapiens
gtgtttatgtatcactattcacccagtgcttaacataatgcctagcaatagatgttcaacatgtatttcttgaatgaatgaatgaatatgaagtgaaatgagaatagtgtcagtataaattacatccaataagacgatgagactgagagatgagatggagatttcaatttcccatctatacattttaaaaagagaaaatgagaagcagagctaaaattttaagtgatattaccaaggttatatcaaaagaaactaccaaattaggattaaaacactagtcccccaatttcagcactatttcgtatgtttaattttattgtaaaatgtcagacatgtagataagcacataatgcattttcagtaaaaggaataattatgaaagaaattcctttggaaytatcaaataagtcaagaaatggaatattgtcagcaacccagaagccactcaaatggcctttctcattgacaaccctctaattgtctacaagaagtaatcattattctaacatttttggcaat

SEQ ID NO: 412110 - DNA, 543 bp, Homo sapiens
ccagagacaaccattatcattatttttcccactgaaaattaggtttacctgttctaaaatttaatatattaatacacgtaattatacataaggtattcatttggttaaggtgtctttcactcaccataatatctttcagatttacctatattattgttatactagtagtttcttcctttttaattcattgaaatgagtagtatctcattgtaagactataccacaatttgttgatcaattcctgttgatagacacttaggtagttcccagttttgtggattatgaataaagatgtcatgaacactcttatagaagttttgtgtgagcaagtatttttgtttctggtaaggaaataccttcaagtgcaattgtgtatgatagggtaagtgtatttttcataagaagcatctagagctttttccaatgagattttaccattttacattaccactaccaatgcytgagaggtcttcttgctccaagatatcaccaagtcagtcttctaattatagttcttctggtggatatatgatatgattgtac

SEQ ID NO: 412111 - DNA, 615 bp, Homo sapiens
cttgacaattggtagaacaagtagtcaaaaagagtaagtctatagatcttaatactaacaaccaactttacttattgacttttgtaaaccattacatccaacaccttaaaaaacacacattctttttagtgcacactgctatttgtgaatataaacaatatattgaaccatactggaccacacatgagttacatatttctaattaacttttgggtaagcagatgtcacaaatggcttataaggtttatcgaaacaaacagaatacataaagaacataataaaattcacgagttgcatctaaattatcctttaaagagggatttatagccttatgttcttgtatcagagaaaaacctgaaaaccagagatttttatttcatcttgtaaaggtagaaacaaaaaggcaaattaaaccaaagtaagtataagtaactaaaaaattgaatataaaaacagaaatcatggatagtagagagacaaagagaacaaatctgatactttagaaaggtttgttaacatgatgacccttaaatatgactaatagagaacaagagagagaacagaaaayactaatatcaaggattaaagatggaatatcaccaaatattctccaga

SEQ ID NO: 412112 - DNA, 533 bp, Homo sapiens
agggccttttccccttttgctcattctctctcctgctgccctgtgaagagttgccttctgccatgatttcaagtttccggaggcctccccagccatgcagaactgagtcaattaaacctcttttctcaggcatttcttcatagcagcatgagaatagactaataaaatgatgtttgttttatgacttttatttcagaaattcactagtaactaactcgcttaaaaattttcagctatattttctagcatcagtactaataataaaatgacagatgcatttcttattatattacattgccttgtacatattttacaccttattctacagatcagaagtttatccaagttaattattttaatgtttcacccagatctgttcattctactaaagtaatctgacaccataaacgaacataytgattttgattctagagggcttttgtggtgggtttcctaatattctcatattccttttgtaattaagcccactttaactgcagacccaccaccttttaagaaacacaggtgcatat

SEQ ID NO: 412113 - DNA, 533 bp, Homo sapiens
atgtttgttttatgacttttatttcagaaattcactagtaactaactcgcttaaaaattttcagctatattttctagcatcagtactaataataaaatgacagatgcatttcttattatattacattgccttgtacatattttacaccttattctacagatcagaagtttatccaagttaattattttaatgtttcacccagatctgttcattctactaaagtaatctgacaccataaacgaacatactgattttgattctagagggcttttgtggtgggtttcctaatattctcatattccttttgtaattaagcccactttaactgcagacccaccaccttttaagaaacacaggtgcatatgtgaatagagtcatattgccagcaggtataactatgtattgaatttgcaagtcatttttatgaagaactcttgtttattttgtctgctstgcttgtttctgcgatggttttattaaacaagtaataaagaagtataggtacaaaagggtatatatggaagcatggcggg

SEQ ID NO: 412114 - DNA, 636 bp, Homo sapiens
  misc_feature (1)...(636): n = A,T,C or G
taactgtaaaattaagtttagtcagggcatatttaatcctctcattccatatcatataagagcctgtttataataccattattcatattgcrtaaccaaaaagaacataaaagttctagggcaaaattaaatataatgcacaatgggaaataagtataaaaacagaaaattcaattaatacagtttatgcttataaactttcagaggatgtatctttacctttcatatcctttgtgtatttttagcttgaagagttaaatcataagaatgagctaaagctttcataatatttgaagtttgtgaaaagagacagcgaanaatatataatgcccatcataatgacaacatcgattacaggaaacaatgtaaagatataaataatttatctttgctatattcaagttgagtcaatgtcagaatgcctaatttgcggaatcttacaaataatgatttaagaataatttgaataataaaataatgtattaaatagagataactctagtcctatacttcatgggatttagaagatagctactacagtgaactcacaattgataagatgttatgggcaaaataattgttaattttcttgaaatcatgatttagatgttgtgtatgtatagtcaccaaagtaag

SEQ ID NO: 412115 - DNA, 492 bp, Homo sapiens
gataactgtgaagtttgctagtattatttgtaagtagagcttcataacactgactttgaataagtctaagtgaaccaaatcagatttgcttaggagagctatgctaatgtgtcttgaaatcgggagtatgtctttgtgtaacccaatrgggaggagatagtacatgtcatctataatagtaatttgagaataaatgcaatactgaattaaaatgtaattatgaataaatagattgttttgcatttaatgatacataaaaatattttaatatttaatacatattttaacatatttgctaatttattctatagtaacataatataaacatatttttatttataatataacaatgcatattatatatttgcatatgatatataagctgcctataacataaatatattttaatataaaacagtttatcaaagttatatcagcaatgatttattgatgtggggaattgaattataatcttaaatagctgcattccac

SEQ ID NO: 412116 - DNA, 636 bp, Homo sapiens
  misc_feature (1)...(636): n = A,T,C or G
taactgtaaaattaagtttagtcagggcatatttaatcctctcattccatatcatataagagcctgtttataataccattattcatattgcataacyaaaaagaacataaaagttctagggcaaaattaaatataatgcacaatgggaaataagtataaaaacagaaaattcaattaatacagtttatgcttataaactttcagaggatgtatctttacctttcatatcctttgtgtatttttagcttgaagagttaaatcataagaatgagctaaagctttcataatatttgaagtttgtgaaaagagacagcgaanaatatataatgcccatcataatgacaacatcgattacaggaaacaatgtaaagatataaataatttatctttgctatattcaagttgagtcaatgtcagaatgcctaatttgcggaatcttacaaataatgatttaagaataatttgaataataaaataatgtattaaatagagataactctagtcctatacttcatgggatttagaagatagctactacagtgaactcacaattgataagatgttatgggcaaaataattgttaattttcttgaaatcatgatttagatgttgtgtatgtatagtcaccaaagtaag

SEQ ID NO: 412117 - DNA, 526 bp, Homo sapiens
atactatgctgtaaacttgcatggatctgaaattgaatatgagtggtattgttaaaaatatgacatatggttgatacctaattacttaattcctagttgcctcttttcattaaggcacagggtgtatatttgggtgggttttccaaagcaagcttatattgatatgaaatttgaaagtgaccaaagaattacakaggttaatgttagagaaatatgcctgtggatcaaaagtagacagtagtatgtaggaactgaaactatgggattaattgtatccagatctagaagcaaaacaaacagggagggttctgattccaatatagtaattgatattaaaaggtccccatacgtcttaagcaactgaagtgaggttcaatgcatgaatctcttgtataaaatagtagttgcttattgataaattaaagcccctcaatgttaaaaagctgcatatgttcagtagcacacacaaaagaagaaataggcaacagagagaaaatgtgggcagagcctcctaagtagccactga

SEQ ID NO: 412118 - DNA, 565 bp, Homo sapiens
tgaataaaaataaaggacagaaatgaatgcctctgatattgttgaagtagcacaaattgctcacttatggtaagttttaaagatgaagtaaagcaaggtcttaagaacagaccttsgcaaagcagctgtactctggggcacaggcactgagaaaagttaagaaccctttctatttaaaatcacttaaggcagatatgagcacaaagggataaaatgtttttcctgaaggaagactcattagttaaaaaaaatgcaaagcatgattctcaatggtacaatggtaaaaattgtctagggaaccctatggatagagacattcagagacaatgcaaagtcaagacagagaagaatgtacaaaccctctttagaaagttttctgcataaagttggggtgcattgttcacagagaagtggaggctatgcctgatagagtgcaccacctctgtttagttatagcttgctaggaacatgagataagtacaaattaagtatattatgcagtttacaattcacattgacaacctgacagtcacttcccctctctttctctctttctaaacagaac

SEQ ID NO: 412119 - DNA, 572 bp, Homo sapiens
ttgctatatttgatctctataattctggtatgtgtttggccatagactagtgatcatatcacccaggtcttttgtaacattcattccttcagaacttaacaatgggaaataacacaggtgtcaattggacagagagatttgagggaaactctcaaattagagtgaaagtttcaatctgtctactgcgaagaagcctcattctttctgctcctrtatcataacacagaggcctatgtgaagtacatagactaaaattagttcaatctaaagggatttatttttaccaataaaattgtgtttcttcaaaatgcataacattgatacagatttgagatgctgccaggtccacttctcattagttttttttttgttacttgcaatgatagaatccccttatgtattggcagagtgttgtgccaaggcatctttctagtttacttcaggaacctcaaggagtaacaaacggtgaagaaaaaatattgatattaggagaataaagaccagaaactttctccttgttgttgttgatgatgttatttgtttgttttctactacagacattaactaaaaca

SEQ ID NO: 412120 - DNA, 572 bp, Homo sapiens
ttgctatatttgatctctataattctggtatgtgtttggccatagactagtgatcatatcacccaggtcttttgtaacattcattccttcagaacttaacaatgggaaataacacaggtgtcaattggacagagagatttgagggaaactctcaaattagagtgaaagtttcaatctgtctactgcgaagaagcctcattctttctgctcctgtatcataacacagaggcctatgtgaagtacatagactaaaattagttcaatctaaagggatttatttttaccaataaaattgtgtttcttcaaaatgcataacattgatacagatttgagatgctgccaggtccacttctcattagttttttttttgttacttgcaatgatagaatccccttatgtattggcagagtgttgtgccaaggcatctttctagtttacttcaggaacctcaaggagtaacaaacggtgaagaaaaaatattgatattaggagaataaagaccagaaactttctccttgtygttgttgatgatgttatttgtttgttttctactacagacattaactaaaaca

SEQ ID NO: 412121 - DNA, 610 bp, Homo sapiens
agtgttgctgtgtttttcttgaaaattatgaaatgcaatgcattattccatgggaattgggtgaattcactgttgcaacctgagcayctcagcacacattttgggaacttcaagcataggcattgctattaactctctggatataaaccaacacagctaactcctcctccagaaatgttaaactgtcatgaataccaatgccttgccaacaaagatataatatatgtatataaatataaaattgaaacaattatacttttaattttaaattaattataatgaatctggtgacttagcatgtggttattagttttaaccttataagaataaatcacattagtaattaaacttctaaaaataaatttcctggattatgtttatttatttacacatcccttatatcacatgatatgccaaatctttattagaataattttcaaattctattaaatgttaatatcttcaatacatctagagcttgccttttgtacacatagacacgaacatatacatattttgttagatggctaagtttcttgaaaattaagtctactgtatgattactgcatggtatattaatttttaaaataaacacatttaatgcttgcta

SEQ ID NO: 412122 - DNA, 520 bp, Homo sapiens
atatatgtatataaatataaaattgaaacaattatacttttaattttaaattaattataatgaatctggtgacttagcatgtggttattagttttaaccttataagaataaatcacattagtaattaaacttctaaaaataaatttcctggattatgtttatttatttacacatcccttatatcacatgatatgccaaatctttattagaataattttcaaattctattaaatgttaatatcttcaatacatctagagcttgccttttgtacacatagacacgaacatatacatattttgttagatggctaagtttcttgaaaattaagtctactgtatgattactgcatggtatattaatttttaaaataaacacayttaatgcttgctatgtgccaagcagtattctaaatgttaatttgttcctgcctcataacaaccctatgttactgtaatttacattgttaagctgaaatcaagcagagccatacctttttataagatgcaaagatgataacta

SEQ ID NO: 412123 - DNA, 618 bp, Homo sapiens
attacataggtaaatgaagatttcatttctcatgaagggcagaaagttactttatactaatatagatgatggcatatgaataggtgtagtggtgacagtctgtcaatattctcttgtgattgcctcaacttcccgaggaaagtaagaacgataggcattatatragggtaaatgaggtagaaaatgttggaagttttagtaaagaaaaggcagtgtaagataacatctagaacaacgggagagcaaatagtatggtttggttgtctggcagcacaagaacccacttttgttttttggtcgtatatttaaatatttatgtgcattttctttagtcacaatcagcaatgcatagttgcaagataagagaaataagagattgaataaaccatgatgttattctgtcaacaaatgaaggcgtaagctaggtccctggaattcaacaatagttatgagggagtagtagtaatgattgcatatggaattgaagtaggatgagaaggatggagagcacctccagtagtgcaggaccacgggaatatggaatggacaatagtttggaagttctagttgaattaggggacactggaactaacttagaaagacagaggtggtattagg

SEQ ID NO: 412124 - DNA, 610 bp, Homo sapiens
gacgttagtctaattttcttcacttcttagagacggagtctcgctctgtcgctcagactggagtgcagtggcgcgatcttggctcactgcaagctccgccttctgggttcaaaccattctcctgcctcagtctcccaagtagctgggactacaggtgcccgccactactcctggctaattttttgtattttttagtagagacggggtttcaccatgttagccaggatggtctcgatctcctgacctcgtgatccacccgcctcggcctcccaaagtgctgggattacaggcgtgagccactgcgcccagtcagttcagttgatttttgccaccctcatatatatgagaatattttctcttcaattttcggtctctgatattttatcttaatctgtttcaccatgagtctttgatcattggttccgttcaacagtcagtggattccatcaatctaaatatctattccctcttcagctcatagagaatattttattaaagtgcttcatcaaatctaaagtgttcttgactctatattatgccatagtttgygtaacattaccaaagaaaaaatctgccaaatgaactaccacatgccagtgattgtatcatc

SEQ ID NO: 412125 - DNA, 618 bp, Homo sapiens
gatcattttggccactcttctaatctactattaatggtcgtacattcttacatatgtgtaaagaaactttccccagcaacttgctgctctgagattttccttaaagtatcaatggctttttgtctatatcattataatattggaagtaatttattacaagaagtttcaagttgcttgcatataattttactcctctgctatctctgcagcatgcttaaaaacttacacccttgggctttgtctcttctggttattactaacctgcaataaagtgtattcattactaccctaatgcagcagttaattaaatttcagtgctagtcaacttcaaccaaggtcatctgaagtcagcttctattttgacaggaatctattagcatcatgaaacaccaagcaagttaatagctacatttaaagtttggttattttcattttttctttccctacatcttaataaatggaaacacatatcaaaccttacagttatgaattagaatgtctttcctagtaaatgacttattgrtgctgaagtgattaacctttcattaaaacttgatataaaattcttccctccatatatctatgtttatgactcaagccccaaaggaaaatacatca

SEQ ID NO: 412126 - DNA, 604 bp, Homo sapiens
acctacaagaaacccaactcacctataaaagcacaaatwaactgaaagcgaaggggttgagatacctcatgcaactgggaaccaaaaaaataaaaaagcaagagaagttacacatatcagataaaataaactacaaattggatgataaacagagacaaagaaggtcactatacaatgaggaaatgggtcaatttagaaagaggttataacaattataaataggtataaacccaacaccagagctatgaaatatgtaaagtaaacactaatagacataaagggagagatagactgcaatacagtaatggtagggaattttaacacctcactgtcagtaaaggacagatcatctagccaaaaaatgacaaagaaacagcagagttaaagtacacgctagatctaatagacctacatgacatttacagaatattttaccaaattactgtagaatacatattttttcatcagcacataaaacattctccagaatagaccatatcttaggcaacagaacaagtcttagctaattctttaaagtagaaatcttatcagctatcttgtctgaccacaaaggaatacaattaaaaatcaacatgaagaggaa

SEQ ID NO: 412127 - DNA, 604 bp, Homo sapiens
acctacaagaaacccaactcacctataaaagcacaaataaactgaaagcgaaggggttgagatacctcatgcaactgggaaccaaaaaaataaaaaagcaagagaagttacacatatcagataaaataaactacaaattggatgataaacagagacaaagaaggtcactatacaatgaggaaatgggtcaatttagaaagaggttataacaattataaataggtataaacccaacaccagagctatgaaatatgtaaagtaaacactaatagacataaagggagagatagactgcaatacagtaatggtagggaattttaacacctcactgtcagtaaaggacagatcatctagccaaaaaatgacaaagaaacagcagagttaaagtacacgctagatctaatagacctacatgacatttacagaatattttaccaaattactgtagaatacatrttttttcatcagcacataaaacattctccagaatagaccatatcttaggcaacagaacaagtcttagctaattctttaaagtagaaatcttatcagctatcttgtctgaccacaaaggaatacaattaaaaatcaacatgaagaggaa

SEQ ID NO: 412128 - DNA, 476 bp, Homo sapiens
aagatggagtttgattaaatcctacgaaattagaagtgcttgagaaacactttggacttcccaaagattctttgcaacaaacattagtaaagcctacataaacaaggactatttgatcctcaagtaattaaactcctcaccagaagaaaataaatgcacttcagaggaagttaacagaatatggagtctttacagtgtctcctcaaaaacattccataaaaaatagttttaaaaattagatatacaaagaaactctggactgtgtgattagtagtcagtaaaacawgcattcaatagatatcaaatcagcgataacctgtgtgtgaaatacagcgacaaaatatttaaagtagatattatttagttcaaagaagtaagataggttttataactattttcaaactagtgaaacaaaagtagacaaaaataaggggatgataagtgcacatagatggagtttcattagagaaatgaga

SEQ ID NO: 412129 - DNA, 596 bp, Homo sapiens
actattttcaaactagtgaaacaaaagtagacaaaaataaggggatrataagtgcacatagatggagtttcattagagaaatgagatttataaagaataaaaatctaaaacaaaaaacaatcactaagggaaaattttctgtgcttcacagtgcattagaaattagggaagaatcagtgaacttgataacaaatcaatagaaattatactatctaaataacagagggaaatacatttgagacaaagatacgcataatagcaattgaggaacaaaataaaacagtctagtatacatgtaaccgcagttctggaaagagaagggtatgtgattggggtagagcatttctgaagaaacagtggagaataatttcacaaatatgaaagaaataaaggaacttgaaaattcaaataaattcagcagaaaaaagtagaaaatctgaaaatactcagagaaaaaagaaatattacatacagagaaacaatgatacaaaattctacctactcatcagaaataatagaaggccaggaaaatggtattttgaaagactataagaaagcaaggcacaaaaacaaaactagattctgtctacccaagt

SEQ ID NO: 412130 - DNA, 596 bp, Homo sapiens
actattttcaaactagtgaaacaaaagtagacaaaaataaggggatgataagtgcacatagatggagtttcattagagaaatgagatttataaagaataaaaatctaaaacaaaaaacaatcactaagggaaaattttctgtgcttcacagtgcattagaaattagggaagaatcagtgaacttgataacaaatcaatagaaattatactatctaaataacagagggaaatacatttgagacaaagatacgcataatagcaattgaggaacaaaataaaacagtctagtatacatgtaaccrcagttctggaaagagaagggtatgtgattggggtagagcatttctgaagaaacagtggagaataatttcacaaatatgaaagaaataaaggaacttgaaaattcaaataaattcagcagaaaaaagtagaaaatctgaaaatactcagagaaaaaagaaatattacatacagagaaacaatgatacaaaattctacctactcatcagaaataatagaaggccaggaaaatggtattttgaaagactataagaaagcaaggcacaaaaacaaaactagattctgtctacccaagt

SEQ ID NO: 412131 - DNA, 567 bp, Homo sapiens
ctgaccttagccaatatatctccaggaaacaatgctcactgagaacattaattcatgaaatttgattagatgacactcagtgggctcaaactgatacttcacctcctctggacatgttaattacacatttggtttctataaataaataaaactcaatgtatctcctaagactgtttcacacatcattggaaaccaggtcacaactatttatagcactgtgaacagacaaatgaaacacctactgtgtatttactagggacatgatctgaataaccatagttatttcttcccaactaggaatctttgaaaacattacctagcattatatttttctcaaatataaattttgtaaactgtagatgagttcaaataataatatctcttcaggtgaaacaaacacaaaggaaaaaaattacatatgccaatttaccttattttcatctttcttttcctactgctctrtgcctcctcccatacataacaaagacgaatccacagagtgaacatacaaacacagatactcataactggagcacaaaattaattcagcaccatgtaaagaaaaat

SEQ ID NO: 412132 - DNA, 618 bp, Homo sapiens
tttctttgtgtgaatcttactgtctatcagctatcatatcctttccacatgaagatattttagcattttcttttatcacaagcctctcagcaattcactctcccagcttttgtttgtttggaaatgctttatgtttacctttmtttggaataatgtattattttttcatttatttacttatttaacttttattttaggttcaggggtacatgtgcagatttgttatacaggtatactcgtgtcaggatatttgttgtacagattatttcatcacccaggtattaaggctagtacccattagttatttttcctggtgacctccctcctcccactctccatcctctggtaggccccagtgtctgtcgttcccctccttgtgtccatgtgttctcattatttagctcccacttacaagtgagaatttgtggtatttgcttttctgttcctatgagagtttgctaaggataacggcctctagctccatccatgttcctgcaaaggacatgatcttgtttttttttatggttgtgtagtataccatagtgtatatgtacgacatttcctttatccagtcttccactgatggacatttaggttgattccatgtctatgctattc

SEQ ID NO: 412133 - DNA, 620 bp, Homo sapiens
tgaaaattagtttaaacatgatagcagctactgaggctagattccattagtacttcgtaagctgcttccacatgtagcaagagattccctttcacttgcaaggtaaaaaaaatgaggcttaaagtactatttttcattgttttgaaaagaacagaagcagcagagtagttcagcaaagcactgttagaacaagttataatttccagatatagaatgcattcaataatacataatacaagttgggatctgaacttttagtatgaactgaatgaaaaaagacagttatttcattattaatatgtgagagcaaatgataaacctgtcaatatgccaggtaatgggaccacatcaaggagcaaaacagacacgatgcctgcctgccctttgtacatgtacayattaataataaaggcagacattaatgaaatatcatgagtaagcttattataaatggaaagagcatgccttacagaggtgggtaaatagagattagatgtaatcagtaacattggggaaggtatagtggaaatatactgatgtgtttatcaagcattaccttttcctttctgcagacctgtcttacctgtagctcaggtaatgatcaaatgcatggacatatc

SEQ ID NO: 412134 - DNA, 618 bp, Homo sapiens
tttctttgtgtgaatcttactgtctatcagctatcatatcctttccacatgaagatattttagcattttcttttatcacaagcctctcagcaattcactctcccagcttttgtttgtttggaaatgctttatgtttacctttctttggaataatgtattattttttcatttatttacttatttaacttttattttaggttcaggggtacatgtgcagatttgttatacaggtatactcgtgtcaggatatttgttgtacagattatttcatcacccaggtattaaggctagtacccattagttatttttcctggtgacctccctcctcccactctccatcctctggtaggccccagtgtctgtcgttcccctccttgtgtccatgtgttctcattatttagctcccacttacaagtgagaatttgtggtatttgcttttctgttcctatgagagtttgctaaggataayggcctctagctccatccatgttcctgcaaaggacatgatcttgtttttttttatggttgtgtagtataccatagtgtatatgtacgacatttcctttatccagtcttccactgatggacatttaggttgattccatgtctatgctattc

SEQ ID NO: 412135 - DNA, 618 bp, Homo sapiens
tttctttgtgtgaatcttactgtctatcagctatcatatcctttccacatgaagatattttagcattttcttttatcacaagcctctcagcaattcactctcccagcttttgtttgtttggaaatgctttatgtttacctttctttggaataatgtattattttttcatttatttacttatttaacttttattttaggttcaggggtacatgtgcagatttgttatacaggtatactcgtgtcaggatatttgttgtacagattatttcatcacccaggtattaaggctagtacccattagttatttttcctggtgacctccctcctcccactctccatcctctggtaggccccagtgtctgtcgttcccctccttgtgtccatgtgttctcattatttagctcccacttacaagtgagaatttgtggtatttgcttttctgttcctatgagagtttgctaaggataacggcctctagctccatccatgttcctgcaaaggacatgatcttgtttttttttatggttgtgtagtataccatagtgtatatgtacgacatttyctttatccagtcttccactgatggacatttaggttgattccatgtctatgctattc

SEQ ID NO: 412136 - DNA, 622 bp, Homo sapiens
ttcttgttcaccttctgccaagattgtgaggcctcccaagccatgtggaactgtgagtcaattacatctcattcctttataaattacccagtctcgagtatgtctttattagcagtgtgagaacagactaatacagcctctcttaccatgataagtataccctcacacattcataagtttagaagttggtttttactaatatgagatagggtatattaaataattgaaaatataaaatgggatttgattgattatatttaaaataaatatttcataacatgrtgtaataaggtagattttgaataacattttataatacatccagaatataaaagaatccatgaaattttatttttgtgttttatacagtgttcttgaaaaagatagttgctctcagaaaaaattccagttgcattgaaaagaaactatcatttattggctcagaaaaggctaagtattctttaacttggcatattgtttgaagtgttcatttcacagctttcttgcaattagttgtggtcatgtgtccaaattttgaaagctcatttcaggctaagtcccaagaaaactttgcaaacttttcttcctctccatttgacatctttttaaaaaaaatttattt

SEQ ID NO: 412137 - DNA, 549 bp, Homo sapiens
caatcaacatgcttttctcttttatattgaatctctctcttttttttttttgaatttcacttttagttctgggatacatgtgcagaatgtgcggtttgttacataagtatacatgtgccgtggtggtttgctctcttaagtgtagggacccagaaaatctgtgytgagggctcttgaaacataaatttaacacgtcctaatgggaataaaatggacattaagtgacaaatcaggacagaaggccaccataatgtgtcatgctggccctgagcttctctttcaaattatgagccaatagtttcatgagtcaatacctcccattattagagttcaaattggccatctgtcaccagcaaacagaaaagtccaacttcatacacaaattcataattgtaaacattacaagtaacatcataatatgtgagaatggttgtgaaaaatgcatgattataaatgttcctccagtgataccatgagatgccattgatgtttgctttgttataatgaaggatctgtttaaaatttctctctcaaaataagatatcttgg

SEQ ID NO: 412138 - DNA, 646 bp, Homo sapiens
ataacaatgtaatgcagctgtgaggaaagagagaagtggcrcattatgaactaagcagctattgcagggagcacacaatggccttgataagaacagtgaatatagaggtgaaaaaagtggctcaagaactgtgtgggaggaaatttcagaagtttgtagaagttgagtctatgtgttggtacagaagtacttcaaagtgcttctgaatttctagtataggtgactgagaatttgtaacattgttgatttaggttaaacacaaaaggaagacaggtttggggtgagaaagaaggaagataaacagtgtacgtggaaaacattcagcagcatgaagtattgctggctgaatagaaccaaacaatcaagttattctgaagatgagctaaaatgactaacactattcattatcatcaggcatattacataaatttcattgattctttcaaatgaatgaataaatttctttctacatgttttacttctttaaatttgttttataatcattgaacaaaaacaaatgcataaataaatctaagtatgttactttttacttttccttgctttttaactgttttataccctcttcactccttctcttgtaaagctagttttcattcaccctttttttctaaccatcagaataatc

SEQ ID NO: 412139 - DNA, 646 bp, Homo sapiens
ataacaatgtaatgcagctgtgaggaaagagagaagtggcacattatgaactaagcagctattgcagggagcacacaatggccttgataagaacagtgaatatagaggtgaaaaaagtggctcaagaactgtgtgggaggaaatttcagaagtttgtagaagttgagtctatgtgttggtacagaagtacttcaaagtgcttctgaatttctagtataggtgactgagaatttgtaacattgttgatttaggttaaacacaaaaggaagacaggtttggggtgagaaagaaggaagataaacagtgtacgtggaaaacattcagcagcatgaagtattgctggctgaatagaaccaaacaatcaagttattctgaagatgagctaaaatgactaacactattcattatcatcaggcatattacataaatttcattgattctttcaaatgaatgaataaatttctttctacatgttttacttctttaaatttrttttataatcattgaacaaaaacaaatgcataaataaatctaagtatgttactttttacttttccttgctttttaactgttttataccctcttcactccttctcttgtaaagctagttttcattcaccctttttttctaaccatcagaataatc

SEQ ID NO: 412140 - DNA, 623 bp, Homo sapiens
acctctaattttcctttcttgtaatatccttgtcagatttgatagcaagtgcatgatggactgagaaaacacattgtgagaaatacttctttatgttgtttggaggaattgttgaaagatttgcagtagtttttccttaaatgtctgttgaattgacctgtgaacaaaytgagcctagaatcttgtgaaaaggtttttaattaagatttattttacttagaccaggcacagtgactcacacctgtaatcccaaaactttgggaggtcaaggcaggtggatcactttaggccaggactgtgagacttcagcctagccacagagagagatcccatatctaaaataataatactaaaaatgataataaaaataaaatgatttattttatttaaaagttgtaagactttatattttctaattttggactgtttttggtagctgtgtctgctaggaataatcacttttatttatattttaaaatttattcatccaattttctttatatttccccttacctttattgcttttaggatatattgtgatgcctcctttgtcattagatattatgtcttctctttttttggttcctgatccatacactgcatttttcattaaattttattat

SEQ ID NO: 412141 - DNA, 580 bp, Homo sapiens
ctggcagcatttatttgttgtgtttgtttctctgcaatttgaatataatatgcctaaatatgtttcttttttggtttttattgttgttttgttttgtgctttgatatttattctacttggtattctttgagcttctgggatctgcaatttgatgtatattattacttcaaatatttctttcatttttttctcttgacattttaattacacatatgctacaccttcgatattgtcaccctgtcattctgtttatttatctctttgaattttcttctggaagtttcagaagtttcttttgaatctatcttcaagttcactaattatttcttcagctatgtaaagtctaatggctagcccatcaaagacattctttattagacattgtttttgatttctagtattttcttttgatttttggttacagtttctacctttctgccttcactaaytatttattttctaatgttgtctacttttttccattagagcacttaacatgttaatcttagttattttaaattcccagtctgataattccaaaatatctgacataattgaatttatttctgatattttttgt

SEQ ID NO: 412142 - DNA, 457 bp, Homo sapiens
tataatttttttgtttaaaactgggcatgatgtatttgattatgggaactaagttaaaaaggcctttagtgtgaggttttatgctaggagttgtgttgtgttaaagtttattctaactgtaggtgtcagagtcatcaatttcctctagtgtgcttgttttttgtcttttyccttggttttgaacttcccttaagcactgctcctcagaaagagtttaagttctacagttctttcaactgtaattatctgttactaaatttgcacccagttagtgtagaaaaagatgtatcaaagaagagtattttataatattcctgttaaatcagtgtttaaatggccctgtgtcttaggatagtaaccttcataatgtttctccagtggtataatattttttttccacagacctctactctggtctacagtgttctgtcaacttccatgacttgattcctattag

SEQ ID NO: 412143 - DNA, 457 bp, Homo sapiens
tataatttttttgtttaaaactgggcatgatgtatttgattatgggaactaagttaaaaaggcctttagtgtgaggttttatgctaggagttgtgttgtgttaaagtttattctaactgtaggtgtcagagtcatcaatttcctctagtgtgcttgttttttgtcttttcccttggttttgaacttcccttaagcactgctcctcagaaagagtttaagttctacagttctttcaactgtaattatctgttactaaatttgcacccagttagtgtagaaaaagatgtatcaaagaagagtattttataatattcctgttaartcagtgtttaaatggccctgtgtcttaggatagtaaccttcataatgtttctccagtggtataatattttttttccacagacctctactctggtctacagtgttctgtcaacttccatgacttgattcctattag

SEQ ID NO: 412144 - DNA, 457 bp, Homo sapiens
tataatttttttgtttaaaactgggcatgatgtatttgattatgggaactaagttaaaaaggcctttagtgtgaggttttatgctaggagttgtgttgtgttaaagtttattctaactgtaggtgtcagagtcatcaatttcctctagtgtgcttgttttttgtcttttcccttggttttgaacttcccttaagcactgctcctcagaaagagtttaagttctacagttctttcaactgtaattatctgttactaaatttgcacccagttagtgtagaaaaagatgtatcaaagaagagtattttataatattcctgttaaatcagtgtttaaatggccctgtgtcttaggatagtaaccttcataatgtttctccagyggtataatattttttttccacagacctctactctggtctacagtgttctgtcaacttccatgacttgattcctattag

SEQ ID NO: 412145 - DNA, 566 bp, Homo sapiens
ttttatttttctccaagacaaggctctcagagataaggctgatccagtagccccaggatttcatttcattaatgtggtagatttctcaacactttctgttccactgtcattagtgttgtgtctctgctttatgagctcaggaatacacctctatgtccaggaatcaagggcatgttattggcagttagtaaaaggaaatgaaagtagaagagagttgtcagctgaccctattttaaacaggttttccatttttgtacagctctgtggccaaaattttgtcctatggcaatatttctcagaaaagagtccttgatatatagttttcattttctttgtttagctttacccattgtatctctggactaaattgaagtttttatagtttctattagtaatgaagaaagctataatagatattggattgataactagcagtgtgtgccagaggcattaatagttcttgtcatwagtaggtgtggaataagaaagagaaaaggtttcaagagcaagagtactaaagcatatacagtatgattccaagagagtcacatcttgcatattgtcaa

SEQ ID NO: 412146 - DNA, 623 bp, Homo sapiens
acccataaaacttgatagtaaagaaataagagtgttaccagtactggagaattctcctgtgtatccctctgctatggtttggctctgtgttgccacccaaatttcatgttgaattgaaattcccagtggggcctggtgggaggtgatgggatcatgggggtggtttctaatgatttagcaccagccttctagtgctgtctggtgatagagttctcatgagatatagttgtttaaaagagtgtagcaccttcccctttactctctctttcctgccagccatatgaagaaattggagggaagatacagtgtttatactgggttagcctgtataaaaagggagtttcataaaagaaaaaaaaagaagaggaagaatggaagaaagaaacaggaagaatgaaaacaataaacagaaagaatagccacaccaatatggcacaaataggcaggacctacatgtctgatttggaagatgtctactttatctaatactctaaatttaagcagaaattscccaggtaaaaaaatgatgaaggatagagcacagtggctgaatagaagcctccagtgagggttccctcctaaaacaccaaactgaacaactagccaaagacaaaaagcacctt

SEQ ID NO: 412147 - DNA, 545 bp, Homo sapiens
gccactatggcatacaatatagaggtttctcagaaagctaaacatagactcaccatatgatccagaaattacacttctgagtgtatgtatccaaaagaaaaaaaatcaatatatcaaagtaatgtctgcactgccaggtttattgcagcacaatttgcaatagccaaaacctgaaatcaagctaattgttcatcaacagataaattaataaagattatgtggcctmtatatacaaatatatatataaaatagaatattattcaaccataaaaaagaatgaaattctgtcatttgcaccaacattgataaaactggaggtcattatgttaagtgaaataagccaagcacagaaagacaaatattgcatgttttcacttattttacagaggtaaaaaatgaatctcaggaagacagagaatagtttggtggttaccagaggccaggaagggttgggggaggaaaagtgaagacaggttgattaatgggtacaaatacatagcttgatagaagaaacaggacctggtgtttcatagatcaatagggtg

SEQ ID NO: 412148 - DNA, 562 bp, Homo sapiens
tcacatgtcggcaggttctgtgatgccccagaagccgcaaaaacagcaaattgttattagtgattttcaaaaagagtgggagtgtatgaatagggtgtgggtcacagagatcacatgcttcacaaggtagtaaaatatcacaaggcaaatggaggcagggtgagatcacaggacccgggcaaaattaaaattgctaatgaagttttgggaacgcattgtcattgataacattttatcaggagacagggtttgagagcagacaactggtctgaccaaaatttattaggcgggaatttcctcatcctaataagcctgggagcgctwcgggaaaccggggcttatttcatcccttatctacaactgtaaaagacagatgttcccaaagcggccattttagagaccttcccttaggaacacattctctttctcagggatgttccttgctgagaaaaagaattcagggatatttctcctatttgcttttgaaagaagagaaatacggctctgttccacccagcccacaagcagccagtctttaaggttatctcccttgttccctgaa

SEQ ID NO: 412149 - DNA, 579 bp, Homo sapiens
tcacaggacccgggcaaaattaaaattgctaatgaagttttgggaacgcattgtcattgataacattttatcaggagacagggtttgagagcagacaactggtctgaccaaaatttattaggcgggaatttcctcatcctaataagcctgggagcgcttcgggaaaccggggcttatttcatcccttatctacaactgtaaaagacagatgttcccaaagcggccattttagagaccttcccttaggaacacattctctttctcagggatgttccttgctgagaaaaagaattcagggatatttctcctatttgcttttgaaagaagagaaatacggctctgttccacccagcccacaagcagccagtctttaaggttatctcccttgttccctgaacatcgctgttatcctgttcttttttcaaggtgcccagartttatattgtttaaacaatttgtgcagttaatgcaatcatcacagggtcctgaggtgacattcatcctcagcttacgaagatgacgggattaagagattaaagtaaacacaggcataggaaatcacgtaagtattgattgggg

SEQ ID NO: 412150 - DNA, 579 bp, Homo sapiens
tcacaggacccgggcaaaattaaaattgctaatgaagttttgggaacgcattgtcattgataacattttatcaggagacagggtttgagagcagacaactggtctgaccaaaatttattaggcgggaatttcctcatcctaataagcctgggagcgcttcgggaaaccggggcttatttcatcccttatctacaactgtaaaagacagatgttcccaaagcggccattttagagaccttcccttaggaacacattctctttctcagggatgttccttgctgagaaaaagaattcagggatatttctcctatttgcttttgaaagaagagaaatacggctctgttccacccagcccacaagcagccagtctttaaggttatctcccttgttccctgaacatcgctgttatcctgttcttttttcaaggtgcccagagtttatattgtttaaacaatttgtgcagttaatgcaatcatcacagggtcctgaggtgacattcatcctcagcttacgaagatgaygggattaagagattaaagtaaacacaggcataggaaatcacgtaagtattgattgggg

SEQ ID NO: 412151 - DNA, 544 bp, Homo sapiens
atgactagaaacagcacacaacggcatttaccatagggatggttctcaccatggccactcatgggctctctatgaagccccagaggataaattctttagaccaaagtactgaggcattgtgtgcttttgaaaagtattattaatgctaacgatgtgactattgtgtctcttttctttgctgtaaccactaggatgcacagaattaaattttagtataactttaattactatattttaattttacctttatccttaatacaggcctgggagtgctctctctctctctctctctctctctctctctctctstgtgtgtgtgtgtgtgtgtgtgtgtgtgtgtgtgtgtaagatccctttttagaattttggaagcttccacatgaaaggctgagtcattgtgtccctgactcatttggcacgtgaggtcatttagtatagatctgggcaaaggaggctggaccatgggctgggctcacctaaatagaggagaactggttacaccttgcggcaagcaggccagccttttgcacttcatgtcagttat

SEQ ID NO: 412152 - DNA, 635 bp, Homo sapiens
tagaatcaagtgctaggaaacccagccgcaatttcacaaatgtaacctttcaactttagagctcatctgatatataagggcaaccacatagtgctcacatttttgaccctgcttagcatgcaaaaggaaccccagcatgtttctggaattttagctgtaccagagattcatgtgcattttggtagaggacatgttctccagacttatctcatgatgtattgcasccttatgtttatagccctgcatttcggttgtcaatgggggttggaggtgtccaagaaagaaagaaaaaaaagaagcagaaaaaggaaggtatgcccttgagtaaaatgaacacgaagaaagctggacatgaactaaattgagctttgtttgctattaactatatgactatgattcattctaatttatatgtgctctgattagtaaacttattaaaatacgtatcagggcaccattgcaagacatctattcagaccccccatcatcctctttgatttgtgagagatggaaagacacctgcttaggaaagggagaaaattaaaaattctgaggttcagaaatagggattccccatttacaatgataacattaacgtgcacatgggatagtcacacttaaatgaattaagaagg

SEQ ID NO: 412153 - DNA, 607 bp, Homo sapiens
ttggcactataatattgacttactaaaaatagaatgagccaatgcactttaaataaagaaaagaaagaaaaataagaaatttctgtttaactatgaaaaaaaaaaaaaaaccttgaagcttgaatttgaaccaaaagttggtttccctggatttctgtgcactgaagtactaaaggggtgtcagatttgtttttgtgacagtaaaacactattcatgttggggatactttcaggtgattaaataaccaggtagaagttggaattataaaaatacctgtatattttaataacaaaataagacctctctaactgaaaatttattctgtttatattttgtttcaagaaaatcaatttaacaattgttagatcataaatgtttgtcttctctcattcayttagaattcagaaaacatgttcattttccatgtcctttccattgatttccaagataattcacaatacaggcattactaatgatgatttctttaaattaaaacaaaaaaacactattttgatatgggtaggaggatcacttaaccagagaaaggctatctgttgtagtacagatgatacaatgagtgtgttcattttactgtaaatagcagag

SEQ ID NO: 412154 - DNA, 467 bp, Homo sapiens
ctgtttatattttgtttcaagaaaatcaatttaacaattgttagatcataaatgtttgtcttctctcattcacttagaattcagaaaacatgttcattttccatgtcctttccattgatttccaagataattcacaatacaggcattactaatgatgatttctttaaattaaaacaaaaaaacactattttgatatgggtaggaggatcacttaaccagagaaaggctatctgttgtagtacagatgatacaatgagtgtgttcattttactgtaaatagcagagaggtttatctcttcacaaataatattaatgcaaataggattagaactatttgcaacactagaagtaaagcagaaaggtattatggaatgcctaccrtaaaaagagaaaataaattatagggtaatgagaaaaagaagaaaaaacaagaagtaagaaaaatgcaaggaaataaggggtatcaa

SEQ ID NO: 412155 - DNA, 615 bp, Homo sapiens
cacttcaatccactgcccgagagtagggagcatattctccatagttttcacatgttagatttaataatctatagattaagaagtaaagagaaaagggtatctatctattgactctatttattagatttgaagttgaaggaaataaatgtgtgtgtgtgtgtgtgtgtgtgtgtgtgcaaagttcttataatgggaacatatttaaagatcttgaaccctttttcaatactcagacatacttatggctttgaaataaatgtttactctacttaacaatgttcatttcactggaacttgtacttaaaawtatatagtttattacctgctagactatgactatatggccccaagtaaaggcatattttttacatttgttgaagaaatgtagaaagtttacctagataatttctgcttggttttttttttttgttaagataccttattctgcaaaacagaaagaggcaactgacagattgctatgctttgggccatctaataataaatgaagaaatctttctcatcagaatcccagattcttcccaaatctaataaagcctaagggattggagaactttccactgccattcttttgccccagaagaaataccaaactag

SEQ ID NO: 412156 - DNA, 579 bp, Homo sapiens
  misc_feature (1)...(579): n = A,T,C or G
tttggtggattggttactatagcaactgtaccaccattgtcagtggcaattcctgtaatctccctctcctaaggtttcataagcattcactccaaaatgacgagagagagagagagagagagagagagaaggttataatgcagatatcttaaaacagctgtattgtgtagtaattaagacctgaaagttagacanatgctagtttaaatctcacctctaccacttacaagctgcttctccttgggtaatttacttaaccaattttcagacgcctttacccataaatgtacatcataatacccacttcattagggncattctaaatgttaaataatgtgtgtacatcatcacttagtatagtgcctggctatacatattcaatgattgatagcttggatttttataggaatagttccatttatatatatatttgcctttctgttcacttgttaggacttccacttccatacaaaatgtttagagttggatttccacaaygtgagtattgacactattctgataatgattatgcttctgctgaagcattatccattttagccatcatgttaagtggatgtt

SEQ ID NO: 412157 - DNA, 623 bp, Homo sapiens
atttatcattttgttgttccactttgttctgtcacttaggtttctcccaccttgatgtaatgcttgtggaatgctatgacccaaaaggtgaccagtggaatatactccaaactcccattttggagggtcgaagtggccctggctgtgcagtgcttgatgacagcatttaccttgtgggaggctacagctggagtatggtatgtgtccacatttactgcatcctcctttatttcgtttgtgcttacgttttctgtatccttccaaatgtgttatcctccacacatgtaccttttaagagtatcatacttacatgcaagcagtcagttgctttasatagtaaaataggatcagcctggtggctgttgaactggcttgctagctgatcaacagcatcacaaggtgcagtaggtctcccttctctcctgtctctatgaccttgtgattctggcttcccaactgaaagtcaaactgaggtgattttacaaatgttctgcagttcagtaagagagtctgaaaggtttctgaccggtaaggcatgaaaaatggaaattcattctccaatattcatgaaatctatttaggatgtgtgatttgccattgatttttccccttattttccctct

SEQ ID NO: 412158 - DNA, 623 bp, Homo sapiens
atttatcattttgttgttccactttgttctgtcacttaggtttctcccaccttgatgtaatgcttgtggaatgctatgacccaaaaggtgaccagtggaatatactccaaactcccattttggagggtcgaagtggccctggctgtgcagtgcttgatgacagcatttaccttgtgggaggctacagctggagtatggtatgtgtccacatttactgcatcctcctttatttcgtttgtgcttacgttttctgtatccttccaaatgtgttatcctccacacatgtaccttttaagagtatcatacttacatgcaagcagtcagttgctttagatagtaaaataggatcagcctggtggctgttgaactggcttgctagctgatcaacagcatcacaaggtgcagtaggtctcccttctctcctgtctctatgaccttgtgattctggcttcccaactraaagtcaaactgaggtgattttacaaatgttctgcagttcagtaagagagtctgaaaggtttctgaccggtaaggcatgaaaaatggaaattcattctccaatattcatgaaatctatttaggatgtgtgatttgccattgatttttccccttattttccctct

SEQ ID NO: 412159 - DNA, 623 bp, Homo sapiens
atttatcattttgttgttccactttgttctgtcacttaggtttctcccaccttgatgtaatgcttgtggaatgctatgacccaaaaggtgaccagtggaatatactccaaactcccattttggagggtcgaagtggccctggctgtgcagtgcttgatgacagcatttaccttgtgggaggctacagctggagtatggtatgtgtccacatttactgcatcctcctttatttcgtttgtgcttacgttttctgtatccttccaaatgtgttatcctccacacatgtaccttttaagagtatcatacttacatgcaagcagtcagttgctttagatagtaaaataggatcagcctggtggctgttgaactggcttgctagctgatcaacagcatcacaaggtgcagtaggtctcccttctctcctgtctctatgaccttgtgattctggcttcccaactgaaagtcaaactgaggtgattttacaaatgttctgcagttcartaagagagtctgaaaggtttctgaccggtaaggcatgaaaaatggaaattcattctccaatattcatgaaatctatttaggatgtgtgatttgccattgatttttccccttattttccctct

SEQ ID NO: 412160 - DNA, 517 bp, Homo sapiens
agctgcaccattttacattcacaccagcagtttatgacagttccaattgctccacatcttcaccaatactcatctgtctttttcattataaccatcttaatagacgtgaagtagtatctcatggtggtttgcattcccctaatggctaatcatgttgagcatcttttcatgtgcttattggccacttgcatatctattttgaaaaatgtctctgggcctggtggtgcatgcttatagttccagatactcagaggctgaggcaggaaaactgcttgaacccaggagtttgaggctgcagtgagctgtgatcggtccactgcactccagcctgggcaatagagcgagacaccatctctaaaaacaaacaaacaaaaaaaaacaacaaaaagatacaaaagagrgagagagagagatgtctattcaaattctttggccattttatttttagttgtgctatgtgtctgtttatgattaagttataaatatcctgtaagcatcatagggcttcttatggtac

SEQ ID NO: 412161 - DNA, 552 bp, Homo sapiens
ttatatcacttcagataaagtaataaagtgatccttgattgtaacctccctttcccttctttatttattaagctgactcttattctgtggccttccaaatcccttatatacaacacaatggcctgtaggggtaggctggggaaaggtgaacatttggttgcagggagatagcaggctctttgcttccaatcacgttgctcaaatctggaacagttgacccatcagtcacctcaagtgcacatgtgcaccataataacagtcccacaaaacctgccaccagcacccaagcataccatcgaaacctgagaatcaccccacctcacctcccgccactgacgtctgtgcactctttttggaggcctgagaacaggcccactcagcctgctaccaccaccaacactggtaccacccacacatgtcaccaggggcctggggactgcctcacccagccatagcagccaccrctgacaccagctcatgccatctgagagcctgaggttatcttactactgctactgccatcatgcatgccatacacactgcccagcaacc

SEQ ID NO: 412162 - DNA, 603 bp, Homo sapiens
ctggaggcccaagaattggtcttcctagacccactaataccagtgcccatgtacaccaccagggggacccaaggacaggcacgcttagctcaccactgccattacaggggccccaggactggcccacctggcctccccatcctaagcaaagtctcaccatagcctccactaacaacttcagcctaagccactgaggaaatcacagacaccattgacactactgacagccaragaaatcatacaacaactaccctactgcacatacccagaatcaaaactaaagcgccctacccaactaatgccaccgatacatctacaggaagaagtctttgtctatgaaagcaatctaaaaactggaagaaacaactgttatgtctgtttttttttctgattccctttcaccaattttattctacagttcatgttctaccccaactactattattatttcaccataacactttgaaatctctaagtttcggatcttcagggacattgcttatttggttcatctctgatcctttttttcatttaacatttctgatgagaaacactgcagctccttccacctgcaggctcttccagaatagctgtggtaaattg

SEQ ID NO: 412163 - DNA, 603 bp, Homo sapiens
ctggaggcccaagaattggtcttcctagacccactaataccagtgcccatgtacaccaccagggggacccaaggacaggcacgcttagctcaccactgccattacaggggccccaggactggcccacctggcctccccatcctaagcaaagtctcaccatagcctccactaacaacttcagcctaagccactgaggaaatcacagacaccattgacactactgacagccaaagaaatcatacaacaactaccctactgcacatacccagaatcaaaactaaagcgccctacccaactaatgccaccgatacatctacaggaagaagtctttgtctatgaaagcaatctaaaaactggaagaaacaactgttatgtctgtttttttttctgattccctttcaccaattttaytctacagttcatgttctaccccaactactattattatttcaccataacactttgaaatctctaagtttcggatcttcagggacattgcttatttggttcatctctgatcctttttttcatttaacatttctgatgagaaacactgcagctccttccacctgcaggctcttccagaatagctgtggtaaattg

SEQ ID NO: 412164 - DNA, 540 bp, Homo sapiens
ctgtctctaaataaataaacaaacaaacaaataaataaatgttaggctgaactcctctaaagggaaaatctgaatctcctgcaaactgcagggctgactggactcacagccaaaagcctgggagggcctaccctaggaagagtgacaaaccaagtatagattgaatcttactaaaatgagttccagccaagctygatccctgaatgaattaagataataacttcctcactctatctgcataacagaaaaggggactccttctctgatagaagataaaaccatatggagcctacagttctttcatacacaaaagcattcattcagccaaaaattgttactcatgaaaaaaaatcatgtgacttataatctacagaataaagcaatgaagagaaatagacccactgatgatccagatgtttgaatcagcaaacaaataactatgatcaatatgttaaatacaaaaaagtagaaaatataaatgaaacgatgaaagctctaaccacagaattagagtctattttttaaaaataagaatcatag

SEQ ID NO: 412165 - DNA, 556 bp, Homo sapiens
aagaaagaagactgagccactatgacagctctgagtgcaagatggtagggatcatagtgtgggtttctttatatttcagggagacaaggtattatcaaaagtatgtgataatttcacaggttgtagaatgcattttcaacaaatcccaagaatgcagaaaacctctagaaattagtcacatgtttttgtctttagaagatatcttcttcccttggcagaacttctagtcatgtagagaaggtatctaattctagacagtcacttcagaacacctagaatcctgacaaacttcaattggcattsttgtattcaaaattgaaaagagaaaatagacatgcaatgcaaaactgaaatatttaaacaccacccttaaggcacttaaataaattcaagatttgggatttttccagggttaaggagcagcaaatgaaaccaacagcaagtagtctaggtaaaaatctatcccaggaaaagggacacctcttgtgcaggaaagagcccctcaagccttccatcagtttaatcaaactgacagtccaacttccaggaaaacagt

SEQ ID NO: 412166 - DNA, 537 bp, Homo sapiens
agaaggcataatgcagagagatggagggatgcattcacaaccatagttagtaagggaaagagataaatccaggagccaagtggctggtctcagtcccaaatcaaccctcttctgttattgtgccatttcctttatagttgagtttccatttatacaagtaaactgaactaaaaacctggagaattatctcaggaagctatactaaaatgatttgtctcaaatattctattgattcaagtttactcccccattcaaccacccaaaaatgttttcgttttaaaaatctggcattaaatcaaatattccaaaatttgaaactacagcatacatagcaagacattaaatgkgattttttctgttgcctcaagttagaattttagctaagtcttcaaaacaaaggacagtgggcattaattaccaatgtgttagtttgggttctctgaggaaactgtagatgtgcaatagatgtattgggggaaatgcctactagggaaaaaggaagggcaccagtggcaacagagagaaccttgaaaatac

SEQ ID NO: 412167 - DNA, 490 bp, Homo sapiens
tcctgtttccagagcagaaagcaagagtatccttgggagaacctaacaccaaggaacagtgcctacctttaatctggagaagcctgggagtgggattctggttgaagaacttctggtatgtgcatgttaaacacaccctcttcacatcagatctctctgttatttgggaggcagatttgtaaacccacaaagggcaaaggtggtacaatgacagtgttctttgccttgccacttatctgtgacttgaagtagattattttacttctctgagtcacaattaactcctctataaatgagtagtaacttctwctccaaaagcttgttttcagaattaaatgaaacaatatatgtaaagaccgcagaaacctcaacaaatagtaactatattcccaagtaaaaaagtaaattcaagacaaatttgtaatttaaaaatcacttttaaagaatttgttgtctgtaagtaattttttattttcttttttttaattat

SEQ ID NO: 412168 - DNA, 426 bp, Homo sapiens
taaggttttaaggagcttggttaagccaaactagatattacatttccaaagaaccaaaaatgtatttgtattttgacatttaaaatagttgattttgatctctaataaaaggtagtattcatagatagtgaatccaaggawgctggcatcttttgattttgaccctacagatgtactctccaccccaggtccttgctctgttcttccactccagtggtactgaccaaattaggggctctcttgcctctggcttctggatggatttgctttcagaagactgagggaggtaggagaggaaggtcagggtatttactcttcactttctttttctgggtcagtgcaagctgcctttctcatcttaatgaaggtccttagttggccctttccacagagccctctctgtgtctggttctggtaatcctctct

SEQ ID NO: 412169 - DNA, 551 bp, Homo sapiens
tcttcctgatgcagcctcccaagtaggtgggatgggactacagcatacaccaacacacctgactacttatttttyaattttttgtagagacagggtcttgctttgttgcctaggctggtctcaaactcctgggctcaagcaatcttcccaccttggcttcccaaagtgctggaattacaggtgtaagccaccacacctggccttccttgcgtttttattccttacttcttttgcatatggagtaatcaaataggctcattttatgtaacagatatttgcagttcaaagagagttttaagcagaaaaatctcattacacacatttaagagctggacatatctttgaaaggctgttgttgtctcattacaaccagcagatgctccactggaggaacccgtggctaatgagccaatgtctggtcccctttggtgcttgcccatggccctggcacagcacgagagttaattccctgattcagtattgtccagtgtctgcggaatgtgtcctgtgagctaggcatgggggagctgtcagtcatggaggtagacata

SEQ ID NO: 412170 - DNA, 551 bp, Homo sapiens
tcttcctgatgcagcctcccaagtaggtgggatgggactacagcatacaccaacacacctgactacttattttttaattttttgtagagacagggtcttgctttgttgcctaggctggtctcaaactcctgggctcaagcaatcttcccaccttggcttcccaaagtgctggaattacaggtgtaagccaccacacctggccttccttgcgtttttattccttacttcttttgcatatggagtaatcaaataggctcattttatgtaacagatatttgcagttcaaagagagttttaagcagaaaaatctcaytacacacatttaagagctggacatatctttgaaaggctgttgttgtctcattacaaccagcagatgctccactggaggaacccgtggctaatgagccaatgtctggtcccctttggtgcttgcccatggccctggcacagcacgagagttaattccctgattcagtattgtccagtgtctgcggaatgtgtcctgtgagctaggcatgggggagctgtcagtcatggaggtagacata

SEQ ID NO: 412171 - DNA, 597 bp, Homo sapiens
aagacagtttttccatggatgggggtagagtgggggtagtttcaggatgaaactgttctgcctcagatcctcaggcatgcgttagatagagtgcacaacctagatcccttgcatgcacagttcacgatagggttcactctcctataacaatctgatgctgccactgatctgacaggaggtggagctcaggtggtactgctcgctcacctgcccttcacctcctgctgtgtggcccagtacctaacaggccacggactgttacctctccatgtgtccatggcctgggacttggggacctcttcctttcaattaaaaataaattgtccttttactctcatgagaaagagagttcttactaaatttacctcccttttcatagagaattttttctccttcaggttttttttaattgaaagraagagctttttatcgagaaaaatcaataccttttagggtactaaaattgttttatattcatttccagtctttcctaaggctttgtaatcatttgtggtagcctctaatatataaataaattatagcattttacctttcatcttttacctgaattataaccatttaaatagatatgatagc

SEQ ID NO: 412172 - DNA, 592 bp, Homo sapiens
tgttttgttttgttttgttttgttttgttttgaaaatatttttattactaataaaaccatccagtgaactaactcacaagtaattttacagctcccttgtatcttgatattagatcaaggaattaatgtgtgtcctctattcagctatttgcagaaagctatttgcagagggattccaacaggtttaaaaatagaccttctggacctggagtacagtactcacatttttctcttgtagagagggaatccagttttagagacaacaaatacaacttaatgaacattttacaatttaggtagaaaattaccrgaatttttcatagaaatatccttgagaaactagaatttctgtattaaaagccttgtttgcactttgaatcaatagattatatattagcgtgcatacacatctgtaacaaatgtttgtttaaaaagtatgttaatcctggtaatctttttttaaagcaagacgtatttgtctatatagacaattgtgtatgtgtgtgtcgtaatgtatgtagataacaaagactggtggttacttctagatcattaaaaatgtcttccctaagcaagctgtgcaattgagtca

SEQ ID NO: 412173 - DNA, 472 bp, Homo sapiens
cattctgacaactctttctaatgtatacattaggcttatatgtctaaagctgtgttttaaagaatttcttttaagtggcagagtctattgttcacatcaaattttatctgaaagcttttgatacgtactatgattgaaagaggattacaactgaaaaccactggtcttatgcttcatcctgagtckttccttattttctcaattttctctctcactgggcttccatgttaattctttgaggtgggtagctttcccatattttttccttacactcccgactagaatactctttttctccctcattatttatctcctaaataaaatgtcaaaaaggtttgtaggaatgcaactaggcctttagacttacaatttaatgcttattctattattccacaccttaaatttcctctccttcccaacaccaacctgtggctgtaggtgagtaggttcattcctttcctgagaatgctcc

SEQ ID NO: 412174 - DNA, 583 bp, Homo sapiens
  misc_feature (1)...(583): n = A,T,C or G
tcactgggcttccatgttaattctttgaggtgggtagctttcccatattttttccttacactcccgactagaatactctttttctccctcattatttatctcctaaataaaatgtcaaaaaggtttgtaggaatgcaactaggcctttagacttacaatttaatgcttattctattattccacaccttaaatttcctctccttcccaacaccaacctgtggctgtaggtgagtaggttcattcctttcctgagaatgctccctttcctcaaattatacattctaatcatctttcaagatccatctcaaaatttarctatttcatgaaggcttcctgtttatttaagtccccttactgtaattcttaactttatatatacagcacttagtgaaatactatgtaacgtctctcanaggaactccacttaacatattatcttatttagccaaagctctccatttctcctctgaaacagagcaactaatgcccatcacacacagatttgtggctaatagtttctcttacactctcatatttcttaccttagtagttgngttgtgtgtttactaagagtcagctgcat

SEQ ID NO: 412175 - DNA, 583 bp, Homo sapiens
  misc_feature (1)...(583): n = A,T,C or G
tcactgggcttccatgttaattctttgaggtgggtagctttcccatattttttccttacactcccgactagaatactctttttctccctcattatttatctcctaaataaaatgtcaaaaaggtttgtaggaatgcaactaggcctttagacttacaatttaatgcttattctattattccacaccttaaatttcctctccttcccaacaccaacctgtggctgtaggtgagtaggttcattcctttcctgagaatgctccctttcctcaaattatacattctaatcatctttcaagatccatctcaaaatttagctatttcatgaaggcttcctgtttatttaagtccccttactgtaattcttaactttatatatacagcacttagtgaaatactatrtaacgtctctcanaggaactccacttaacatattatcttatttagccaaagctctccatttctcctctgaaacagagcaactaatgcccatcacacacagatttgtggctaatagtttctcttacactctcatatttcttaccttagtagttgngttgtgtgtttactaagagtcagctgcat

SEQ ID NO: 412176 - DNA, 596 bp, Homo sapiens
tctgagggtggtgatttttaaatatctgttttctttttgggggatggggggtgtcaagcaaagcttcagggcagaggtraagcttcagctgtgtgtttgaaaggtaacaggggccagatcagtggggactatgtttgtcaggagcaaggaggagtctctgaagagtttaaaagcaaagttatgatttgaacaggtgcccccaagtaccctatactccaaaattattcatttccttttttcctttctcgctgaaacaaaacttccattctctcagagtagctggtttcagctgaacattaaggccaaattaattcagcccaagataaagtcagataggcccttcactctccagaatgttaagctacattttaaaatatgcaaatacttatgagtacaaataaatctttaactgctcaatgttcaggttgtcagtgcataaagctatttttgaactcaacagccagattggccccagtaacactttcccaaagctttgttttttaaaaacctttttgatctgtttccccgttctcctagaaatctcctagatttctgagctcctagattgtataaaagatctaagtttttttccacaa

SEQ ID NO: 412177 - DNA, 596 bp, Homo sapiens
tctgagggtggtgatttttaaatatctgttttctttttgggggatggggggtgtcaagcaaagcttcagggcagaggtgaagcttcagctgtgtgtttgaaaggtaacaggggccagatcagtggggactatgtttgtcaggagcaaggaggagtctctgaagagtttaaaagcaaagttatgatttgaacaggtgcccccaagtaccctatactccaaaattattcatttccttttttcctttctcgctgaaacaamacttccattctctcagagtagctggtttcagctgaacattaaggccaaattaattcagcccaagataaagtcagataggcccttcactctccagaatgttaagctacattttaaaatatgcaaatacttatgagtacaaataaatctttaactgctcaatgttcaggttgtcagtgcataaagctatttttgaactcaacagccagattggccccagtaacactttcccaaagctttgttttttaaaaacctttttgatctgtttccccgttctcctagaaatctcctagatttctgagctcctagattgtataaaagatctaagtttttttccacaa

SEQ ID NO: 412178 - DNA, 510 bp, Homo sapiens
ccgcttactcttagtggcactcaartgtagctgtaaagactgggatctgtttttaagtgcctagaaaactctgtgtttatggaatctgcatctgttggtgaagtttagctcattcatcttagacctcaaacagccctgaagaacttaatgcttacatctggttaaattctcagtgtgtagtttgtacgtttttccacagctttaagtaatgatagagaagaaaagaatagagaatgaatctcagagaaatgaaagcaacttaggaacagaaacagagaaacagtaagaaatgcatttttcagagactgggccaaaggattcatcatggagttttaacttctagcagaaagttgaggaaaaggaataagactcttttctgaaccatacaaagccccgcagctcctgtcttctggctgacatagcaccatctttacccatcacacctgtggcctggaaggtagcctctctgtacctgaatttcttcatctgtaaaatgggattaaaaaaatc

SEQ ID NO: 412179 - DNA, 533 bp, Homo sapiens
agtctctttcctttctactaattagtcttattgtgaagcatcagtggtttgagaagaacacatttttttgcttaagacaagtagcaggtaaatttgtctcctgagatgaatatagactctaaataaacatactstttcacagactagtattttccaaaatgttgtgaaagaacagccgaacagcatcaaatagacttgtggatcaaatatacttcttatattattttagagagcttaaataatctatttcacaaataatgtattctaagtgaacttatttacaactaatcattaacaattcagtctaatattgctaagttatcattctgcaggcatagcacaattttcactagtgaggtttgataacagtttttcagcatttaatatcaaacagttaggttttgttcatttaagtaatacataatgaccacttaggaacagaaaggaacctggatactttcttttagaaaaattatgaacctggacatagccaattagaaacaacatctatcctacatacacatttgtacatg

SEQ ID NO: 412180 - DNA, 625 bp, Homo sapiens
ttccaaactttcatcacttacttgatggactcttcctcactaccttctctaatagtgaaatgttaaaacagtcagatttggggctacttcagtcctacctgcttaactcaacctgcttgatcagaggactatcttaaacatgtagtgcagagcccaggtgaggaaggtgatgaccatgaaactatgcaacctgcaggtagtaccatatgctatgtagaacaggtgggagttgtgtatgaaaactgtcctaagacagagagggattcttagataatggagaaatagcccccaggggaaaatgggctgtattccaaaaattcaattttaaattgactgtttggaatgcagaacacattttcccttagaaacaatgccatgaataattgcagttatttttctcaggaaagyccacacaagcttgtttaactcataatgtaacagacatatctgctaagacattttagatttgcgtcaagtagatccctaaatccttactactctgaattataaattagccgtgtacatagctgccaccccaactagactgtgaactctttgagggctagaaactgttgaattattcatttttgtattctgaatgcctggcatataactggcaataaac

SEQ ID NO: 412181 - DNA, 567 bp, Homo sapiens
agtcaataggcaaaaatcaatagcattcctgtataccacatgcagtgggtttcattgacagctgagaaactctgagcttgtgggaacctgaatcttttataacaagctgcaatataaggaaggctgccctttgccccaaaggaagacatcacctctgtgatactggatgttaacaacatctgtcctttgcactgcaaggagacactatctttatcttctaaagctgtttgctctacaaacccttgaagagacaggctgaaacaaaaggccaatcagtaagttgcttgtaagatgtgcagaaatatgagaagccaatagagaattatctgtcagcaatgatctaytgcccaaaaaagtcacatggacaagccaagccaatacgggcagaaacaatatgcatggacacagagaggtgtgattcgtttagagtcagtactgtagcaatgtgtcacagtcttcagtaaaataattcactaccaggtataagatattcttacacatacatacaaaaaaatacaagtatgttcattataattttttctaacaagtaaaatattgaataaaatt

SEQ ID NO: 412182 - DNA, 584 bp, Homo sapiens
tataaaactttagctcacatttactttcctrttactccattttcttctgctacaaagcattgctgtcaaaaatttggtaaaaatcagattattagtcttataagtaactgagtatttttatcctcgatgtccaaaggtatgtattttttcaagtcttaaatacttaccagaatttgtctgggtgttgacttgttttctttctttggcatgtcaaccgcaataattttttttacctcttttataaagtttgataggcctgctagaatatgtcttggtgttaggcatttttggttgatttttccaggtatgtgacttacctcttcagcatgtagttttaagtcaaaatttttcaataaattattcttgattcatattgtttagtacatattctctttcattgttttcattttctttatcaatgcctgttatacatattttgtatattagtttatttctatacttgtctgttttgcttggatcttttaaatccctttcctcatcttttgaacttactttgttcttatgtttatttgctgttctttctagtagttttcatttcggaaataatttttctttttatttat

SEQ ID NO: 412183 - DNA, 628 bp, Homo sapiens
catttggccactgttttctgttctgaccstcagccgttttgaactccatactccagagtaacagacttttgctttttcaagcctattgtgctttgtctcctggataggcctttgcacatgtgattttctctatctggaacactctccccaaccttttgaaacaccaatacttagtatttcacagggggcagttctatgcaaacctattccaaaatctgaggaagctgagaggttgaagaaaaaggctgacagatctagtttcttagaaagaaacatttaataggtgcttatgaaataaacatttaataggtgcttataaacagaagtctgtgtctctggtggtgttgagacaaaatggtggatccatgcaccattaccccatagattcagggaatatacaccacaggggaggggcacttgtgtatcaagggaataggtaggaattgtcccaagggcaagatttatggtaaagttgagtttattaaggttgatctgctatcaaggcaggatttatcttaattacattctcttaaacaaggaaaaatagataaactggaaatcctggaaccaaggctgatcagaagtcaacatggcagattagcttctgagatggagttgctttgacttc

SEQ ID NO: 412184 - DNA, 560 bp, Homo sapiens
attttcatttgtcttaagatatttttgattttccttttcagttcatctttgacccattgtttgttcaggaaastgttgtttaatttccacatatttgtgacttttccaatttttctcctattagtggttttcatttcacaccattgtgctcagaaaaatgtaattgatgtaatttcaagcttcttgaatttgttaagatgtattttgtggactaatatataatccattttgaaaaatgttccatgtaggcttaagaataatgtgtattctgctgttgttgggtatattgtttcatatatgtctcttaggttcatttggtataaactgtagttcaagtccagtctttctgattttttgtcttgagagtctgtttattgttgaaagtaggataataaagtctttgattattattgtactgccatcaatttttctcttcaattatgttaatatttactttgtattttaggtgccctgccatgttgcatgcatatataagtgtcatatcctcttgatgaattaatacctttgtcattctatagttatgttctttgtctctcatg

SEQ ID NO: 412185 - DNA, 561 bp, Homo sapiens
catgaatcattacccaaactgaacaattgtcaattatagctaatctagttttattctcactgactcactccctcaatattgaattgaattttgaagctaatctcaggcatcctgttacttaatttgtaaatacaatcatgcattgctcaacgacagggttatgttctgagaaatgtgtaattaggtgatttcatcattgtgtgaacatcatagagtgcactgacacaaacctagatggcatagyctactacacacctaggctatgtggtacagcctattgctcttaagttccaaacctgcacagccatgttactgtactaaattctagagataactgtaactcaatggtaagtatttgtgtagctacacatatataaacatagacaaatactgtattataatcatgtagggccactatcatataggcagcctgtcagtgacctaaatgtagttattgggtgcatgattgtaaatcagtatgtcaaaacttaaggtatcttttgaaaagtaaacataaaactataatttttaaaaacccaataattccttaatgtcatgaaa

SEQ ID NO: 412186 - DNA, 561 bp, Homo sapiens
catgaatcattacccaaactgaacaattgtcaattatagctaatctagttttattctcactgactcactccctcaatattgaattgaattttgaagctaatctcaggcatcctgttacttaatttgtaaatacaatcatgcattgctcaacgacagggttatgttctgagaaatgtgtaattaggtgatttcatcattgtgtgaacatcatagagtgcactgacacaaacctagatggcatagcctactacacacctaggctatgtggtacagcctattgctcttaagttccaaacctgcacagccatgttactgtactaaattctagagataactgtaactcaatggtaagtatttgtgtagctacacatatataaacatagacaaatactgtattataaycatgtagggccactatcatataggcagcctgtcagtgacctaaatgtagttattgggtgcatgattgtaaatcagtatgtcaaaacttaaggtatcttttgaaaagtaaacataaaactataatttttaaaaacccaataattccttaatgtcatgaaa

SEQ ID NO: 412187 - DNA, 568 bp, Homo sapiens
gaaagctggaatgactatatcagacaaagaagattttatagtaaagaaaactatcaggaataaaagaaggacaatcaatgaaaaagacatagcaattctaaatgtttatatacatagtaacagagcttcaaaatacttgaagcaagagctgataggactgtgaggagaaatagacaaatgcaaaattataggcagatatttcaatactcctcttattagttgataaattagtagtcagaaaattagtaagaatatagaagatctgctcaacactatcaaccaacctgacctactggcatttatggcacacttcatctaacagcagaatatacattctcttcaagtgcacatgggacacttgccaagactggccatattaytggccacaaaacaagtctcaataaaattaaaaggattcagggtataactatgttctgtgatcacaactgaattgaattaggaatcattaacgtgctcttctggaaaatgtccaaatatttggaaactaaataatattgttctaaacaacccatgggtcatggaagaaatcaaaaggggaattagaatg

SEQ ID NO: 412188 - DNA, 569 bp, Homo sapiens
gctgttttattggcatacagctgaacctccaaacttttaagtctggtctctcgtggtttttgccttatttacctttgtatcatcattttctgttactcttctatgtataacctaggctccaggtgaaacaaactatctggttcctgaaattgatttcagtttcccacttctactcttacccttttccttctctctgaatccttatacaaaaacccaggccaaattctgcctactttataaaggctttcctgatccacttccacccacttccctccccagcacaagcagattcttcctgtaagactcatgacattttattgttatcattcttgccataattacccaaatatacttctctttcaggcatctaaagtgggtaggttgctatacgtattagaagaacacacaggagtcaaatgggaaagaataacccagctccactgtatactgaatgtatggttggtcaagacactaactccttcagagcyttagattcctgctctgaagaatgggaataatcataactcactttacaggttggtgcttactttatatgctaagcacaaaaa

SEQ ID NO: 412189 - DNA, 466 bp, Homo sapiens
actttggagctcttaaaaagaatgtggaagatctctaatctacactgtcatagcatgatcctcatgacatactcagtgttaaaagcacactgggggccaggcrcagtgctcacgcctgtaattccagcactttgggaggccaaagtgggtggatcacctgaggtcagaagttcgagaccagcctcgccaacatggtgaaacccggtctctactaaaaatacaaaaattagccaggcttggtggtgtgcccctgtagtcccagctactcagaaggctgaggctggagaatcacttgaacctaggagacagaggttgcagtaagccaagatcacgccactgcatttcagcctgggccacagagcaagactccccgccaccacctcccttcacacccaccgcccaaaaaaaagcatgctggggaaaactctactatgctgccatctatcgaagaaagggggaatttgaa

SEQ ID NO: 412190 - DNA, 501 bp, Homo sapiens
tgctgggattacaggtgtgagccacagcacccagcctaattttattatttttaaaaacttggtatctcacaaaatcatctctcctttggaacagaaagataaatgtcctctgctacgtaggtatcattagttttttgcttttgtttttgtttttggatggggtcttattctgtcacccaggctggagttcagtggcgctatcttggctcactgcaacctccacctcccaggttcaagcgattctcctgcctcagcctcccaagtagcagggactacaggcatgcamcaccacgcccagctaatctttttgtatttttagtagaatgaggcttcaccatgttggccaggctggtctcgaactcctgacctcaaatgatctgcctacctcgggcccccaaagtgctgggattttaggcgtgagcctccacacctggtggtgtcattagttttacttttgtatttccatacagagctagagaattttctgtgtttgttccctct

SEQ ID NO: 412191 - DNA, 451 bp, Homo sapiens
tggcatcagtgattcaaagctatctctctaaccctcttcaatgcctctttcagcaatatgaagttaaaaccaatactgtgattgctcacctgatttttggttcttgtgatggtgcttttctgtgtgtagatagttgttaaaagttggtgttcctgcagtgggaatcaatagtgtaggcttctattctgccatcttgccctgccatcaatttcttggaataatttaatcaattcatagtatttacattattgaatatccaaatgctttttgtacccaaccctcaagacacaaggtcttccacaaattgtaagttagtgtttagaaatgtaactgcaggctatcatgacaaagaattttaaatctagaaggagcaaaaaatcttacgtctgatccctaaggtcataacaccaaggatgtggatgcttgtttgmtgacatttactcaccattcc

SEQ ID NO: 412192 - DNA, 582 bp, Homo sapiens
ctaaagttaattaccttacccttgcaactattttctgtataagaatctcaaagttaataaaaattayacagatgaagaatgacctaatactaagaaggggatgaattctgagagcaaatacattttacaacccttgtctcaaaataagatcaatcctacaaaatacaaaatgttaagaatacaatttacacagtaaaaatgatttgatttgttttcagtatgaaagtacttttaatttctttactgcaggtacaatggcatccaagtcatcaatttctgtaatacaaaaacagtaataataaaagagagtaactttttctagtggtaaactcacatgaaacaagaacctatatgcaaaggcaaaccccaaacataaaggcaataatactggtgcttttgtgcacatgaagtttttctccgatagtgatgatagattatcactgattcggatacagatgcttcacaggggctctgtttatataagttaccacatacccacaagtaccctctgattctagtattaacttcattagcagcatgtccttattaacagatccaactgcccacatgtgtgatatgtta

SEQ ID NO: 412193 - DNA, 606 bp, Homo sapiens
atctgttttcctttgggtatagacacagtaatggacttcctgggtcaaatggaagctctgttttaggttctttaagaaatctccaaaatgctttccayagtggttgaactaatttacattcccaccaagagtgaataagtgttcccttttctccacagctttgtcagcatgtgttactttttgactttttaataatagtcatcctgactggcatgaatggtatctcattgtggtttagatttgcatttctctgatgattagtgatgatgagcattttttcatgtttttggccactggtatgtcttctcttgagatgtgcttgttcatatcctttgtccattttttgatggagttttttttttcttgttgatttaaattccctacggattctgtgtctcagacctttatcagatgcataatttgcgagtattttctcccatagtttaggttatctgtttactttgttgatagatgtcttttgctgtgtagaagttctttaattaggtaccacttgttaatttttgtttttatttcaattgctttgaaggaatttgccagtagttctttgccaaggccaatgtcaagaagagtattttccagattttc

SEQ ID NO: 412194 - DNA, 587 bp, Homo sapiens
caaatttccacaaataacttattgttaaaaatccaaaagcatcattgtattagtcatcttaggctgccataacaaaatatcacagaccgggtggcttaaataatagaaatttattttctcacagcctggagtctggaagtctaatgtaaaggtactggcaactttggtttctcctgagacctctcctaggtttgcagatggctgccttctggctgtgactccacatggcctttccacygtatgctcacccttccttttcttaaaaggacacaaatgctttgacattagagctctgtcttcattaccttatttaaccataattacctctttaaagaccctaccctatctccaaatgcagttgcattgggggttattatttcaatgtgggaattttttgggaaacacaattcagtacaaaacaacagcaatgacaacaataatgactgagcaaaacttttgtaatacaagtctgccaatgagaagaataggagtattgggggatggataacatttttgctcaattacagttcaaagttagggtttcctatattgaaaattgattgcaaaagttaatatgttaatgctca

SEQ ID NO: 412195 - DNA, 543 bp, Homo sapiens
caatacacaatatattgagacttagaacttttatatatatataatacatatagttttatatatttatttatatatttattatatatatatttatatagttttatatatatagccaaaaaaggtgaacctgttagttaaaaatgtagaatgcagaagaggtggtggaaattacatatctaagttctcaatagatttttctcaaaatggaatgatgtttatttacttaaagtgaataatcaaaataaagaacacatagtcttttttacatttttttttttttttgagatagggtctccctctattgcccaggccatggtgcagtggcatgatcacagttcacagcagccttgacctcctgggctcaagagatacttccacctcagcctcccaagtacctgggattggaggaatgaacctccatacccggctgttgtttttacttttgaagagtatttttgcttttgaattcttagatggctaaacaggagaataaaaataaattagkgtaatataagtcaaatccatttgtatttaccttgaact

SEQ ID NO: 412196 - DNA, 620 bp, Homo sapiens
  misc_feature (1)...(620): n = A,T,C or G
ccgggctggagctataaatttaggacccttcagagtaaaactagtaaaccagagactaaatgaaataatcaagggagtcaatttagaatgagcagagagaaacagacagacagacagaaccaaatacagagacagagagagacagggacagagaaaaggacatagagacagaaagagagagaaagaaacggaaagaagagaaaaatcagatatgaagattgagaagaaattttcatatgcaaatgagaaaaactatacaaaacatattttgtataagccaaataggtgaaagtttcaaraagaagcttgtgaaaataagtttcaaatgtgcatagagcaagtgaaacataggattaaaataattcactacattaggtcaaatttcagtagtgaaagatgtcagaatatagtagcatggattagaaattatatagtaacgtaattgttcataagaatcagatatttatttggtaagggcaatttaccttcactgggtacataaatcaatctaaatgtatttttcattctctttagcaggaattgcctaaatggcatctcagttagtttatacagtttcaggatcagaaggtctctgatcctggaggtgattaagaacanta

SEQ ID NO: 412197 - DNA, 569 bp, Homo sapiens
  misc_feature (1)...(569): n = A,T,C or G
agtcctcctgagtctaccttattttttatataggaagtcaaaacaatatgttattgatgaaatgcctgaaagtctctatgcaatgcaagaagaatattaatataacagagttccagcataaaaatatagagctatgtattaatcagagtgaattatagctttgacttgcattgcgctctaaataaatgcaggtgagaaagaaggggttaaaattaataatttatactaaaaccagtaaacantagtaataaacttagtaagtacctaattcagcacaccatttacattttacatgtattagaggcaatttttgaaaaactgtgttgaatacacttgaatatcttacacagtcatrtattgtgaactgtgttgaatacacttgactatcttatgcagtcatatattttgctcatgactgcatttttaaaatccatattttatatttctctgtattccacatattttggtcttatttcttcctattctgttcacaagggattatagtccatgccatgatttatagatggattgtgtattttgtgatgcaaaactcttatataactggattt

SEQ ID NO: 412198 - DNA, 495 bp, Homo sapiens
ctgaacacatatattcccaataaataaaatgattacagatatttatacttttagatttgttagtattttgcttggagtaattttaagacattcgaagatgaaaaccaatgaacagtctaccaatcatattatccarttgttctaattgtactctatttcatgctgtgtaataacaaagaacccagcctccagaaatattacttgtttttttcttcatatcaccttaaaacgatgatcatggaaggctttactttttcactataggccactaactataatgtcaaaatactgcctatctaatgtaaagaaggctaaaatttgcttgaaatcttgatacacaattttgacttctctgcattcagaattgctataaaaaccactcccattatgactatgtgttttgaatttgaaaaatcatcttatatttatacaaagataattagaaatgtacaaaggcaaattgaaagcctactccaactctgccagttactttcc

SEQ ID NO: 412199 - DNA, 484 bp, Homo sapiens
tggttggcctgattccataacctgtaaacttacctggtacaaaatattgcttcacattttatatgttattgaatgcataagcaaaaaacattcataaacacaaacatagattttaaaatattaattaatttttataaatgataaaaagtacaaatgaatgaacttttttgtacatcaacatccaatttattcagcaacactaatttaaaaatgtttattcctttttcatgaattttctttgcaactttgtcaaaaataaatgaccatatatgcatggataaatttctgaactcccctatagtctttcatgtatttacatatctataacttaagaaatttggcactgcctagatgacttaacttggtagtgttaaaactagatagtagattcctccagctctcctttgtgaaaattattttggccrctctaatttatttgttctttttccatgaatattttaaaaatagtttatttacttcaacc

SEQ ID NO: 412200 - DNA, 511 bp, Homo sapiens
agaaaaaaaattctaaaatttatatggacccacaaaaggcccagtgtagccaacaatatcctaagcaaacaaaacaaaacaacaacaacaaaaaaamaaaaataaaaaactgtagtaatcacatgacctgatttcaaattatattacagagctgtaataaccaaaatagcatggtattggcataaaaacagacacatataccaatggaacagaataatgaacccagaaacaagaccatacacctacagtgaactcattttcaaaaaaggtgcaaagaacatacactgagaaaaagtttcttcagtatatggtgccaggaaaactgaatagccatatgcccaagaatgaaactagacctgtatctctcaccatatataaaaatcaaatcaaaatgtctgaaagatgtaaatctaaggcctcaaatcatgaaactcctacaagaaaatttgggaaaaatctccaggacattggtctaggcaaacctttttcaagcaatactccacaaattagc

SEQ ID NO: 412201 - DNA, 511 bp, Homo sapiens
agaaaaaaaattctaaaatttatatggacccacaaaaggcccagtgtagccaacaatatcctaagcaaacaaaacaaaacaacaacaacaaaaaaaaaaaaataaaaaactgtagtaatcacatgacctgatttcaaattatattacagagctgtaataaccaaaatagcayggtattggcataaaaacagacacatataccaatggaacagaataatgaacccagaaacaagaccatacacctacagtgaactcattttcaaaaaaggtgcaaagaacatacactgagaaaaagtttcttcagtatatggtgccaggaaaactgaatagccatatgcccaagaatgaaactagacctgtatctctcaccatatataaaaatcaaatcaaaatgtctgaaagatgtaaatctaaggcctcaaatcatgaaactcctacaagaaaatttgggaaaaatctccaggacattggtctaggcaaacctttttcaagcaatactccacaaattagc

SEQ ID NO: 412202 - DNA, 515 bp, Homo sapiens
gaactgctatgagaaaacattagggaaatgcttaaggacacctgtctcagcaaagatatttttgactaagaactcacagtcacagacaacaaaaggaaaaatagacaaataagattttatgaagccaaaagtcttctgcatagcaaaggaaacaacaaagtgaagagttaaactacaaaatgggagaaaatatttataaactattcatctgacaagggattaattaaaaatatatatatatayacacacacatatccataacaccaacagttcagtagcgagaaacgtaagattaaaaaactggtaaatatcagaataatcatttctcaaaagaagacatatagtcaacagatatatgaaaaaatgctcagcatcactaattatcagagaaacacaaatcgaaagtacagtgagataccatctcactccagttaaaatggcttttctcacaaagacagggaataaggatgctagcaagaatgtggagaaaggggaagccttgtacattgttagtg

SEQ ID NO: 412203 - DNA, 624 bp, Homo sapiens
tacctttgttacaactgattaacctacactgacatataattttcacctaaagcctgtagtttacacatgtgtttcattttaagagcaataaatgctataaaattaaattgtgatgatgcttaaataatcctgttaatataatttaaaaattggatttcacactttaaatgggtgaattttgtactaagtatatatcaatacatctgctaaaaaagaatatatactatatgattatatttccagtctatttrttatatgtatttatattaaatatactatacattggtttatatcctattgcatttaagatttaaaaatttcactgtaaattaaattttcctcatttataaaatcaatctttttacattcttaggaaaaaataaaaaaactaacatttataaagttatttgttgttaatattctgttttattattctatatattctgtgtattaatttttgaaagaaactatgtgaagtgctatgatttttggtgatgttgcatttcatttctcccacaaatatataccattttactataaaactatcaaaatataaaataactatggatgataaattatatgcacatattccaaatgaaaatgtagaaatcaagttttatctca

SEQ ID NO: 412204 - DNA, 540 bp, Homo sapiens
gattctccatctgtccctgaatcctcaccctgtgtggagtggctttgcgatatctcctagcagagcctgtttcccttcccctagaatcagggctggccttgtcatttggatggacagcagattgtggcagaaggcacggtgtaccagctctgagcctcagcctcaagccatcttctgtgcctttggttgttcaccttctttgacccccagtcccctcatgaaaaaaatcctggctatttgggtgcaaaatgagagaccccacagggctatcccagcttttccagccaaaggccccagacatgagattgcttggtatgattaccaaagctgcctagctgactcatagctgactgaagatgcagagcctagctcagatcagaactgggacccagagacttgtgagcagtaagtgattgctgtttgaagccartgagttttgggacagtttgttatgcagcgttgttgtagcaaacaaccaataaaaggcatgctagggagaaaacctagctggtgcttggcctgccacactgtgcaatcaag

SEQ ID NO: 412205 - DNA, 578 bp, Homo sapiens
ttcagtgtatggggcctcactaacatacgtgaggtagagtggtttatggagattacttacgtcgtagattagaaatggtaaatatggctgacggccgggtgtggtggctcatgcctgtaatcccagcactttgggaggccgagacaggaggatcacgagatcaagagatcgagaccatcctggccaacatggtgaaatcctgcctctactaaaaatacaaaaattagctgggcatggtggtgcgcacctgtagtcccagctactcgggaggctgaggcaggagagtagcctgaactcaggagggggaggttttagtgagcagagattgtgccactacactccagcctggcgacagagcgagactccatctcaaaataaataaataaataaaaataagagaaatggtaaataccaccaccaayctgaagagaaacctgactttggaaaaatattacatgtatgttgattaaaaagaaagatttaaaataccataaatgataacttcttttttcaattcttcacaaaaccttctagtcccagtgttctgtgtttgggtgcccaaactccagagccctacc

SEQ ID NO: 412206 - DNA, 610 bp, Homo sapiens
atttccccatgctattctcctgacagcaagggagttctcatgagatctggttgtttgataaatgtctgggacttaccccttctctctctcttgcctgctgccacatgagacttgccygaatctcttccaccatgatcgtgaagaaagtgccttgctttcccttcaccttccatcatgattgtaagtttcctgaggcctccccagccatgtggaactgtgagtcaattaaacctcttttcttcataaattacccagtttcagacagcactttatagcagtttgaaaatggactaatatccttgcttgcatatgaagcatcatgctagaccaaggggcgtggggagtaaaaacaggaagatgctgactgttattgaggaaacactaagtacacgtgtgtacatctataattatacacacatacacagtagcagtcacaagaccaggacacacacacatatttgtgtacatatataactatacacacatccacagtagcagtcacaatactagtgttaccagtggagaatgtccaggttcttggtgtcttgaacaaagaattgaacaaaatgcacaaacaaagcaagaaaagaaggaagcaacaaaggcagag

SEQ ID NO: 412207 - DNA, 549 bp, Homo sapiens
gtaaaacaaattctataccatgagattttgaagaaagggataattaaaatttaactgctggagaaggaagacaagtagtcttgaaaccatggagcgcgggggaagtaaagagaaaaaaagaccaagaatgctagaaaaagagaacaataaagaattatccacgaggccagagtccaggtgaagggcccatggaggacagcaacagctgccactcagagctctctctctgttttcagtctctattacaaaatgagatcatttcgattaaataagtgtatgtgacataatcatgtgctaccaccccttcattttctaaattgycgtccccaggacagaggtcagagaacagaaagaacatctgctaccaaataaatcagagaaactctggttcattgctcctgcatctgtgaaaatttgcactggtttctgctatctcatcttgggaagaacagtttacctggttccctggaaatgttggccaacctctcaggtgttttcaggttgtgtgtttgtttatttccatattaaaccagtattgtttctgccttc

SEQ ID NO: 412208 - DNA, 577 bp, Homo sapiens
ctgctgtctactcttctgggaatccactccctgtctatgtgatatgatttggctctgtctccacccaaatatcatcttgaattgtaatccccataatccccacatgtccagggaagtaccaggtgggaggtgattagatcatggtggtggtttcccttgctgttcttgtgataatgagtgagtcctcatgagatgtgattgttgtayaaggcagttttccctgctcttgctctctctctgtcacctgccaccatgtaagacgtgcctcttccccttcagccatgattgtaagtttcctgaggcctacccagccacgtggaactgagtcaattaaacctcttttctttataaactacccagtctcagcaatgtctttatagctgtgtgaaaatgaactaatacagtaaatgggagtcggacaggagtggggtggagcggggcactgctatacagataaccaaaaatgtggaagcgactttggaaccaggtaacaggcagaggttggaacattttggaggactcagaagaaaacaggaagatgtgggaaagtttacaatttcctagaaacttattgaat

SEQ ID NO: 412209 - DNA, 570 bp, Homo sapiens
ggaaaggttcctgcaggatcagatgtaatctcagaatatgtaaaagcctgtgatggaatcggaggagctatgcataaagctatgcttatggctcaagcaataacaggagttgttttaggaggacaagttagaacatttggargaaaatgttataattgtggtcaaattggtcacttaaaaaagaattgcccagtcttaaataaacagaatataactattcaagcaactacaacaggtagagagccacctgacttatgtccaagatgtaaaaaaggaaaacattgggctagtcaatgtcgttctaaatttgataaaaatgggcaaccattgtcgggaaacgagcaaaggggccagcctcaggccccacaacaaactggggcattcccaattcagccatttgttcctcagggttttcagggacaacaacccccactgtcccaagtgtttcagggaataagccagttaccacaatacaacaattgtcccccgccacaagcggcagtgcagcagtagatttatgtactatacaagcagtctctctgcttccaggggagcccccacaaaaaaccc

SEQ ID NO: 412210 - DNA, 586 bp, Homo sapiens
gcccacattttctttctttctctcttttgtgcagttggcgggccaccatgcacacacccgctgtctggcatcttcttctgtttcctttaacaacacagcttggcaggtgtcctctgaccagccacataaaactacctcctttgttaaagaaattggtctatgggacattttgaatccctctgagccaggtggaaatacggcctctgggcacgactggagcggtaagggagtattacaattatttataccatgttctcctttcccctgatattataataataactgacacttaatgmctgctcatcccagctggtttgcatatgttacctccaatgtttacaagatccctgcaagggaaggaacgtcatttgcattttactgaagaagaaactgaagttcagagggctgaatcattggctatgagcctcaggtctgtccaacatccgtcctctctcaactgtttcctccctaacgtggggatcagaaccaatcgcagtgcctgccacgttgccagcccctctggggagaaattgccctctctgaagcccccgctgaagcgagccctctacagaccaaaggacccagc

SEQ ID NO: 412211 - DNA, 582 bp, Homo sapiens
ttttactttgttattgacccactagtcattcaggctcatattgtttaatttccatgtgttagtatagttcccaaaattcctctagctgtttatatctagttttattccattgtggtcagaagatgcttgataaaatttcaatatttttgtcagggcgtggtggctcatgcctgtaatcctagcactttgggaggctgaggcgggcggattacgagctcaggagatcgagaccatcatggctaatacagtgaaaccccgtctctactaaaaatacaaaaaattagctgggcatggtggcgggcgcctgtagtcccagctactcaggaggctgaggcaggagaacctgggaggtggagcttgcagtgagcggagactcctctcaaaaaaaaaaaattctatatttttgaatgttttartacttgttttgtgaactaacatggtctattctcgagcatgatctatgtgctgaggagaagaatgtgcattctgcagctattgaatgaaattttctgtaaatatctattaggtttatgttttctatactgcagattaagtctgatatttcttacttgagtttctgtc

SEQ ID NO: 412212 - DNA, 550 bp, Homo sapiens
gtgatgaatccctagggcctggaataagggtctcacgactctgccagatgccctgtcctaccgtgactgagctggtatccaagatgcaagacaaaatcctttccagtctttgctttcttccacttaagcagaaggaaggagacacttttgttgttgcgagctccacagcttggagttgggttagagtgatgcaagcccttctttagctacctcagctagtgtctccctaggtcacatgccaccctagtcctctggctttcagcccagcacaaggagttgcctaggaatcagtccctgagtgctagagtgccttttcagtttgtttagtgacccagagcmctttgacctgtggttgtgagactttccaagaaactcaagttctgaccaatggaatggatgactctcctctggctagatatggtctaaatgctccctctgtgtgtggtcactggctgagctcagttcagctttgttctctgctatgacatggcaaaactgagttcaaggtaataacccccattcactgtgctatttttccgccaaatgtaca

SEQ ID NO: 412213 - DNA, 579 bp, Homo sapiens
acagggcaggcagaatctggaggggtccgtgcataggctccctatgttctccctcttgggagaggccacgccaagggagccctgtttgggagttcgaggtttttacttgaggatggttgcataggcacaaacaatcagctgtagctgatgaaattccagactcccagaaagaaggtagatgtgcagtgacacaggcgggcaaaccaactttatcartggatcagactttctgaaggttgaatgttccaatgccagccaaaagcccaacccacaagaaaacgttctataggtaactgctacaggcctgctatggtaaggttttttttttctgaagcacagctgctgagatagggatgggaccgagcgtcagagagaaggacattcagaagtgtagaagttgattccctaaaagtagaagtgccccattttttttcctacaaaatcaaataaaaatcaagcccatctcagtcttcatcctctacatattcatccttcattctctgccttcattttctcattgaactctattccttgaaaccctgcagctactatttgtattaccattaggatatttaacac

SEQ ID NO: 412214 - DNA, 573 bp, Homo sapiens
tataccaggtcttagtttctaataccattctgcattagatagaaccacagccctttggataaattgttgtttccaggactggaacagggaatatgaaagatgaatgtagatttccttcccttattccctcctcccttgctttatttcttttatcctagcacattgctaaacccaaatctaaaaaaggaaaacagaaagaaaaatgagtgtataacaccttgcagtgctggaaaataagaaaatgctccataaaaaaccacaatgatggaatgtcaaaggttacagaagccaactaaacaagctcctaatgtccaaagttggaataatttgagcaacaaaataaatgatggaattttggattataactcaayatataataaatatatatgagtccatactgatagaaaaattaatacatgaataaataaataagggagaatagaaaaaaaaaactttcctgtacagaaggatatcaaataacttatgtggattctttaccctgaaaaagactgagcacagccctccaacccttaactgtcagctgtgaatagtgacttttttccaaagggtacg

SEQ ID NO: 412215 - DNA, 618 bp, Homo sapiens
tgattactctaataattaaataagataatggagtcaaaaatattagatctttacaattttaggtaaaatattaacagatctccaagttttttatttgcttatgattttcataattataggtagctagtagccttgttcctttgtattttaataaaaaaactctttttaggaaattaatattgttaawgtgtatattgtgaatttaaatcaatattttatctcttgaggaaatattcatgtattttagactcatcactgtttgaagaataaaagttttgtctaattacatacatttcaaccttccaataacaggtaacgtggggatgaggatgtagtagaggattagcatagttatcttttcccatgctgataaactgaacatcaaaatggtgacgtttaaactattagtttatttctgtctctaatatctgatactaaagcaataatactaatattggaattgatgttaatagttttaattgggccagatgaagtggctcacgcctgtaattctgacactttgggaggccaaggcgggcagatctcttgagccccagagtttgagatcagcctgggcaacatgacaaaaccctgtctctactaaaaatataaaaatta

SEQ ID NO: 412216 - DNA, 583 bp, Homo sapiens
taataaactacttatttttaatatatgtttatttagaaacttccagaaattttattaggaaataataaagaactaatgacaagccagatagggatggcrtctctatctcataaatatataatatcattctagtaagttgaaatcgacttgggagtccacccagatttacatcatacttatttcagtgaaaatagacgtttaataatgatatggttcagcatttattttataaagatatcattcagcgatatagtttgattcatgaactcattttttaaagaactaaaatatttaatctaatatgaatttaaaacttcaactttatatctagtaaaaacaaatttgattccttcagtccaagtctgactcctgtttatagacaccctcctataagaaaaggagggacataaaattgtctctcactcttctagactcaggcccccatgccccactctacttccagagtcagagcaaaaataaggagaatctggagacctagagattcagatatttttacttatgctgctctggtctcctagttaacattacctagctactctgtgttctactaaaagaagtgtcc

SEQ ID NO: 412217 - DNA, 598 bp, Homo sapiens
ttctcaactgtgacaccaacctactacctatgagacatccacctacacctatttgtgtcacccctgtaggacatgcagagtggtgggagccaaaacaaacataaagttcatactatttgctgtgcaatgagtaatatgtgaccaggagtcttatgccttttgccagcatccatgaaactaacttgtcaacaatgacttagggtaaatgctcagatgctttacagttttcggtaccaatatttctatttagtaagaatttaagcaaattgcttcctctatatctaatagtgatagaattaagttccaaaagcaccaactagggtggtcagtcaattatatgtcattttgttccaaggtcttcagacaaattgactttcaaaaacaatttaagaactttctatgtactaattgttagyaacaaacatcattccatgtagtaggtattctatagacagtcacgtagctcaggcaagatacagtcaattcatttaatttatcttatagttcacattaattttagttcagttacattatgttttacttcagtttaaaaaatttactattggttaaaacaattacccaaaacagaattgtgtct

SEQ ID NO: 412218 - DNA, 598 bp, Homo sapiens
ttctcaactgtgacaccaacctactacctatgagacatccacctacacctatttgtgtcacccctgtaggacatgcagagtggtgggagccaaaacaaacataaagttcatactatttgctgtgcaatgagtaatatgtgaccaggagtcttatgccttttgccagcatccatgaaactaacttgtcaacaatgacttagggtaaatgctcagatgctttacagttttcggtaccaatatttctatttagtaagaatttaagcaaattgcttcctctatatctaatagtgatagaattaagttccaaaagcaccaactagggtggtcagtcaattatatgtcattttgttccaaggtcttcagacaaattgactttcaaaaacaatttaagaactttctatgtactaattgttagcaacaaacatcattccatgtagtaggtattctatagacagtcacgtagctcaggcaagatacagtcaattcatttaatttatcttatagttcacattaattttagttcagttacwttatgttttacttcagtttaaaaaatttactattggttaaaacaattacccaaaacagaattgtgtct

SEQ ID NO: 412219 - DNA, 498 bp, Homo sapiens
ctcttctctgttttatcttttaaagatactattagtaagcaacagaattttacttctttatataaatttttattcttttttatgtatttgttttagagaaagggcctaactgtgtcactcgggctggaatgcagtggtgtgatcatagctcaatgcaacctcaaactcctgggatcaagcaatctttctgcttaaacctctcgagtagctaggactacaggcctacaggcrtctgccaccacatccagctgattttttaaaatttttgtagatataaggtcctgttctgttgccgaggctggtctcaaactcctgggcttaagcaatccttttgtctcaccctcccaaagtgctgggattataggcatgagccattatgcccagcctcttttacgtaaatttttaaaatagcctcctcatgtttttccaaaactctgtttgagttttattggaattattttgcaattatagatacatttacaaaaaattaaaaccttt

SEQ ID NO: 412220 - DNA, 584 bp, Homo sapiens
ttgggcttcttatgccagtgtactaatgggaaggaaggtaactgtacagattgsagaatcgattctatcaggaaaaaatcatgttgataggactggataaggaggggtgaaactagaatgcagaagatcccccgagatatcttttagttatttcatattctgaagtaaatttaatttaaaaagtacaacagcgaatacagccaaaattgctattgggacagattctttagaaatgaaggcttgggtcaccaccaagaaatcagttagttgaagctcttgctaagggcaaagggaatatggattgtaggtaaaggaaaaaggaaaatacaaattgcaactatgaccatgtgaccacatgtagaaatgaagactgaagtagttatgagtatttattctttacattgacatatatatgtttgtgttctggtaattttgttgtatttctttctgtttcttatattcttaatatttaaggtaagatgttataattatatcacattaatataatgatggaagtcatagctctgtgcataagttataggatatcagggaggagcagtgcttggctagaaaagtactgaaca

SEQ ID NO: 412221 - DNA, 584 bp, Homo sapiens
ttgggcttcttatgccagtgtactaatgggaaggaaggtaactgtacagattggagaatcgattctatcaggaaaaaatcatgttgataggactggataaggaggggtgaaactagaatgcagaagatccmccgagatatcttttagttatttcatattctgaagtaaatttaatttaaaaagtacaacagcgaatacagccaaaattgctattgggacagattctttagaaatgaaggcttgggtcaccaccaagaaatcagttagttgaagctcttgctaagggcaaagggaatatggattgtaggtaaaggaaaaaggaaaatacaaattgcaactatgaccatgtgaccacatgtagaaatgaagactgaagtagttatgagtatttattctttacattgacatatatatgtttgtgttctggtaattttgttgtatttctttctgtttcttatattcttaatatttaaggtaagatgttataattatatcacattaatataatgatggaagtcatagctctgtgcataagttataggatatcagggaggagcagtgcttggctagaaaagtactgaaca

SEQ ID NO: 412222 - DNA, 596 bp, Homo sapiens
actgatttaaaaaactaaattttgctcacagagaagtaaatttacttcagggatgtattttatgaaaacacttctaatacagattctaaaagaatgtaaaacttgacaattcagatcttaatctgattaatgttttttgttttattttttaattaaaagcaaccatattcactaatcttcagataatatttatagcattattaacttcattattcatctgggtagtttaaactatgtccatttgtatagttcatagaggctcacataattagttttatttagaaggcttccattaacagggatttgagatgaacacatgtataacccagaaacaaggatgaatggcatgaaaccttgtcaagagaagcatgcaccaaagttatagtgtgaccaaagttgtgtgcataaccattgatttgattttgtgatatattccaagcctagtcacaaaacaatatagatggtaataacaagacaagaaatatttrttctctaatatacatgcaagtactgatctaataatatataaatgttctctcttcaaaattgtaatcactttcacatcatggaccacatgaagagtattctataatgcc

SEQ ID NO: 412223 - DNA, 572 bp, Homo sapiens
catttcagtggggattaacaaaattacaggayttatctcctgttgtcaagaactgtggagtataaacctcggaagactgaattgccttgcagtggagcacagaaatgggggatggggacaggtgtggaagggaatggaggtgtggtctctgcaacaccaattgaataactttgtcagaaacaatttgtgagtcaagttttcactgtttttatttcatactttccgtttatacattttacataataatatctttatgacattatatttattctcattaagtataatcagcattatttccatttgctcattctcagaaattagaagaaaagaaaaattccacttgtagacattagaaatttaaaactatgtaactatagatagagttattctgtaaaaaaaacaataaacaagcaaactccataatcttgtatctgaatgattttgactcttcactatttcaacatttgtaataaaaaaagattatatcttgtttggtgagtttccaaagtataagtgactattattgcttctttgttttgcttatttcatgcttaaattctaaggaggacatt

SEQ ID NO: 412224 - DNA, 622 bp, Homo sapiens
ctttgactttggctgaaggactctcggatggttttactaatacttccttagcctgctcaactgtctagagggcttctatacaactttttctccctctccttcacttaggtcccaaggctctttcagaaattctctgttccctcttcgttttcctccacacagttggttctctaataatacccttgcacatttaatcctatcttggcatctgcttctcagaagtcctggacaaacacaggcccaaaataatagaggtgtacagctatctcaatatttaaaaactaaaatacagactctaaaaaaccataaacttcagatgtattgagatcaaataaaatgtaaagacaaggcgatcaacaaatagcaaacaggtttataatatccatagttcaaaatgttcttgtgtcctttctatatagaggaggaattcaatatttaattcatttctattgcaagtcccagaactgcaatggtgcaatacacacaccatctcaaagctcacgccaacatcgttctggtaaataaggaaaagttaaactcasagtggctaatgctgaacatacacagttatagagtgttggagtggaaatctgaatctaagttgcaaactcattcttagttc

SEQ ID NO: 412225 - DNA, 510 bp, Homo sapiens
gtgctaccagacatattggaactctgttttatgttatttgtttattttcttctgttgctttaagaattctttttttttattgtcctttggggagttttattattagatgccttgatgtagtcttctttaggataaacttgttggtgttttataaccttcttgtacttggatattgatatctttctctaggttcgtgaagttctctgatattatttctttaatctttctactcctatctctttttctatctcctctttaaagccaataactcttagatttgctcttttgagtctattctctagctcctgtagaaatgtattattgttttatattttttcttttgtttcctctgactatattttcaaatagccygtcttcaagatcactatttttttcttctgcttgatcaattctgctattaaaagtctctgatgcattcttcagtatgacaattgcatttttcaactccagaatttctgcttaattatttttaattattttaatctctgt

SEQ ID NO: 412226 - DNA, 587 bp, Homo sapiens
tgtaatcactgccaccttagtccagtggggggtattaccagattattgccaaggtttccttaaggctcacaggctctttagtcagcttctagtaaatgttgtccagcctggggctcaccttacaggtgagggtaggtcagccctgggtaggtccagaaattctatccaagagtgaagtcctagaatttgggacaccaggagcctccttggtgctctacccccactgtggctgagctggttcttaaggtgcaagacaaagcccctttactttttcctctattatttttaatcaggagtattgccccacagccaccatagctgggaatgtgctgggtctcacctgagtccagcaagtctcagcatctcacccaaggccctcaatgtagtacctaggcacagctcagaacaaaaacttgcttaggcwttgcagttctagtggcttcatctatgtttgagattaatttgccaccccagagtactttagcctgtggtagcaaggagtataggaacctaatttccaaccactgggatttgtgattcctctctggctatgactggtttaaatgcacccttcatgggtgagactg

SEQ ID NO: 412227 - DNA, 625 bp, Homo sapiens
taaaacaaatagttttgctcttcatctgattggggagcaagatgaggatatgttgaatagcaccattcttaaaagagctacatatgtgtcatgaaatttaatgaaataactattctgtgttagagataagtttggaagattagatatgttaatttatatagaaagttctgccctgatagtgatagagtagatgttgtcagaccttttctccaagaaataacaattatgatcttaggagaaaaataaataaataatataggtaaattatctagaggtactggagaatgaccaaaagcaagcagaagctagaggactttctcatgttttttgtttttgtttttgtttttgtttttgtttttagtagctyttaccttaaaagcaggccccagttggtggcatacaaaatgacaaaaacttagaatcttacagcttaatggcatgaagagccataggaaaggagagctattacaactggaaagaattccacaaaaggggggatccttggggggaaacatcctcaaatcctgcacatgagctcttttcaaatctctagccaactgctgaatgatggatgcatgtgacagatttcaaacagcccagctaaggctgaaagagttaaacaaat

SEQ ID NO: 412228 - DNA, 598 bp, Homo sapiens
cccctcccttttacttcatgagccttttagtattttttttttccttcaggcataataggtattaattacttgtaatcagcaattgtacttaraaaccaatatctggtcatttggtgtctcattgctactaggttattgttatttctagacctttatagtggacagacacaggaaatgtcttttggtgtttttaatcaagaattcaaactaatatttctaataaaattttaacattaacaggatttttttaccttgtattttatattggtacctgtttttctctcagtaaaaatatgcacgtatgtatgatttagacaaggtctcgctccgccacccaggctggtgtgcaatggcatgatcatagctcactgcagcctcaaattagtaggctcaagcaatcctcctgccttagactcctgagtaaccaggactacaagcttgtgccaccatgcccagctaatttttaaacattttttgtagggatggtgtctcgctatgttactcaggctgacctcaagcaatcctccttcctttgcctgccaaagcactgggattactggcatgttttcttttcataaaattaatgtattaatttatt

SEQ ID NO: 412229 - DNA, 598 bp, Homo sapiens
cccctcccttttacttcatgagccttttagtattttttttttccttcaggcataataggtattaattacttgtaatcagcaattgtacttagaaaccaatatctggtcatttggtgtctcattgctactaggttattgttatttctagacctttrtagtggacagacacaggaaatgtcttttggtgtttttaatcaagaattcaaactaatatttctaataaaattttaacattaacaggatttttttaccttgtattttatattggtacctgtttttctctcagtaaaaatatgcacgtatgtatgatttagacaaggtctcgctccgccacccaggctggtgtgcaatggcatgatcatagctcactgcagcctcaaattagtaggctcaagcaatcctcctgccttagactcctgagtaaccaggactacaagcttgtgccaccatgcccagctaatttttaaacattttttgtagggatggtgtctcgctatgttactcaggctgacctcaagcaatcctccttcctttgcctgccaaagcactgggattactggcatgttttcttttcataaaattaatgtattaatttatt

SEQ ID NO: 412230 - DNA, 582 bp, Homo sapiens
ttttactttgttattgacccactagtcattcaggctcatattgtttaatttccatgtgttagtatagttcccaaaattcctctagctgttkatatctagttttattccattgtggtcagaagatgcttgataaaatttcaatatttttgtcagggcgtggtggctcatgcctgtaatcctagcactttgggaggctgaggcgggcggattacgagctcaggagatcgagaccatcatggctaatacagtgaaaccccgtctctactaaaaatacaaaaaattagctgggcatggtggcgggcgcctgtagtcccagctactcaggaggctgaggcaggagaacctgggaggtggagcttgcagtgagcggagactcctctcaaaaaaaaaaaattctatatttttgaatgttttaatacttgttttgtgaactaacatggtctattctcgagcatgatctatgtgctgaggagaagaatgtgcattctgcagctattgaatgaaattttctgtaaatatctattaggtttatgttttctatactgcagattaagtctgatatttcttacttgagtttctgtc

SEQ ID NO: 412231 - DNA, 555 bp, Homo sapiens
taggaatacacctaacaaagaaggtaaaagatctctacgaagagaactgcaaaagcactactgaaagaaataacagatgacataaataaatggaaaaacatgctatgctcatggattggaagactcaatatcagtaaaatggccataatccccatgtgtcacaggagggaccaagtgggaggtaattgaatcatgggggcagtttcccctatgccataccacccaaagcaatctacagattcaatgctactctatcaaactatcaacattatttttcaaggaattagaaaaaaactattttaaaattcayatagaaccaaaaaagagcccaaatagcctaagccatcctaagcaaaaagaacaaagctggaggcatcacattatccaacttcatactatgctatcaggccacagtaaccaaaacagcatggtactggtacaaaaacaagacacatagaccaaagcaacagaacaaagaacgcagaaacaaggatgcacaccaacaggcacctgaaattcaacaaagtcaacaaaaataagcaatggggaaagaac

SEQ ID NO: 412232 - DNA, 485 bp, Homo sapiens
gggttcacagtaagtttctaaggcaagtttataacactcacctaattaacactgaagcacacattatatgtaatcatttcagaagaatattgcatagtgacccaacagagatatgcagcagagcatttaagatgcattgagaaaactgaaatatttacagctaaaatkaaatgatgttttgaatttgcttcaaactaatctgcatttatggagattgagtacagatcaaataagattgtttatgtgtagataattgttgaagctgggttataagtagatcaggctcactatatactcttttactcacttttgtgtgtgtctaattttcaatgtaaaatgttttttgaaaaatgcaggtagttactaggacatcaactctaatctctatctctatagatatccaatcaaaagttccccaatcaaagaaccagttgttgatttctcataaatatttccttagtgcttgtctaaatgttgctatggga

SEQ ID NO: 412233 - DNA, 546 bp, Homo sapiens
gggtactcacggacacaaagatgggaactacagacaatggagattttaaaagtggggaggtagtgacaggaacaaggrttgaaaagctacctattgggtactatattcactacttgggcaacgagattattagaagccccaacctcagcatcacacaatatacccaggtaaaaacctgcacatgtacccccttgaatctgaaataaaaacaaaaattatattcaaaaaaaaaaaagagggaagttaactgtcaatgaaatacagtgacatcctctccttcccatcgtgtcaatccccttcccccagaccaagattttcacattttaatggacatcaagaacctcctagggagcttgtgaaaaatacgaatgacttttgctctatggttaaggattctgattcactgtactataaacttcagaatattcattttaatatttgcctttagaagacaatggtgcagatattttattcccctcaattagaatacaagagccactgtgtacctggcctctttgttcaggttactaagaaccccaacctcag

SEQ ID NO: 412234 - DNA, 404 bp, Homo sapiens
tgtgtgtgtgtgtgtgtgtgtgtgtgtgtgtgtttgcatgtacacactcataaacaaagaggaaaagaaggacacccaaaatttaaagtaaaggcttggacccaaatacatacaaagctcctattcatagcaagtttgttatatttaagaagcgaagttctcctttaggctaaagacaggcctargtccatcaaccctgtccctgacagaggatgaggttccttgtcatcctctgttcccttggccccattcccctcagctcagaccctaaccttggcccatagactgtaccactctgaaagagagaagaacccagaaaaagtatgctgagaaagaaggcatttttccctcaggctttgaacagtagtgtaaactattccatccagctctgctttctgctgagc

SEQ ID NO: 412235 - DNA, 404 bp, Homo sapiens
tgtgtgtgtgtgtgtgtgtgtgtgtgtgtgtgtttgcatgtacacactcataaacaaagaggaaaagaaggacacccaaaatttaaagtaaaggcttggacccaaatacatacaaagctcctattcatagcaagtttgttatatttaagaagcgaagttctcctttaggctaaagacaggcctaagtccatcamccctgtccctgacagaggatgaggttccttgtcatcctctgttcccttggccccattcccctcagctcagaccctaaccttggcccatagactgtaccactctgaaagagagaagaacccagaaaaagtatgctgagaaagaaggcatttttccctcaggctttgaacagtagtgtaaactattccatccagctctgctttctgctgagc

SEQ ID NO: 412236 - DNA, 525 bp, Homo sapiens
caggaaggaaacaaaaatcaacagcacagatttctgtcagtgcctggaacaactctgctttttccatttgaaagcaccaaaaagcatcccataatgaagaaaaaaactctaattctgcaagtatggggaatctaaactacatgagattggccctacggtcaaacaatagtactttcctaacagaaaagaaagagaaattccaaaggcaaatttgcaaggaaaaaatgccctctgagcctttacagttcagatcaaagccatcaacttattcagccatcatgagaacacacactccaagtttytaaaggagccagtaagctgaatcattgcatattaaataaacatgctgagttgaatcacaaagtaaataaaagcctcttctgacataagtttgtatttacagaaattctgtgactaaaagcaactaaatttggatcattaaaaacaaaacaagtttctccaagtttacactaattatacaatgcatccagaaacccagggcctgacagaccatgtagcaaagtc

SEQ ID NO: 412237 - DNA, 582 bp, Homo sapiens
catttacaacagaaataagcctattctcagactaactctacctatagatgaaaaaaattatcataatgatggcactggtgattatgataaaagtccataaaaataatacagatgctgtttttttagaaattcagcatcacctacgtgaaaacatctctggttactttgcaatcaaagtactatagtggaattaaataatctatacctccaaataaattaattgataacatcttccaatatttagggaacaatttgatttcactcttcagtcttcaactactttttttttagcctcaaaaaaataataacatgaagaaaacaaaaccagctcttcagcagaatcctatgaagaatccgttggagagtctcaggtcaggaagattattagctttaggcggcgtctgcctgtgctgggcgacttgctgcaccttgaagacgtacacatgataamtaagctgtggtcttctcataaaaaaaggtaattaatgctggaaaaggtttctggggaaaaacgagacatgttttttaaacaactaggagttaaccagcaaaataattgtgaggagaaaaagaggatgggaa

SEQ ID NO: 412238 - DNA, 543 bp, Homo sapiens
aaaaaaacttactgtcagcagctgtctttctaatctcattcttttagcaaacccctccttctctttctgtcctctttgggattttattgacgaaaaaaatttgtaatccctgccctaaaattgaaataacttacctgcaatgcaaataacaggtattggttttcacaaaagcaatttaaaattgtacctcgaccaacgtctcaaaaaattataattcaccaggctaatgttataagaagaaacattcggagtggaggagaacaagagayggcagaattagatagaatacaaggtgtagagcaaatgctctcagattcctagaagtgcagaaaaagcattaggtattcagaacttctgctacaaggtgatcaatgtctactcttggagggaaaagtcattggaagcctcatccatgagaaatcttggaatctttgaaaattctgccagcaggctggtgtttgcccttgtgcagggatagaagctgtatgctcatctctcttcttaatcagaaaagccagggaagccagacagccacctttccct

SEQ ID NO: 412239 - DNA, 602 bp, Homo sapiens
taggagacatggaaaccttcatgataatactctatttgcaatataaatctaattatccttattagctattctgtttctcttgacaaattaacatttgatagtcttgataattctatttagagactttgttatgggaaaaacaaccctcaacaaatggctaaatttcctaagcttacctcagatataattatttgatataaagtacagattgctttgatatttcggtaaatgggattaaagtttgtaggatccactttctcattaagaaaatagcygagggcaagtgggttgaatcgaaggccctttgcaatattaagtgcccaggagatatccaccctgaatcactgaaaagttcctttaggcttttctttgtgaacctcagctctacagcaaaaacgtattctgatctagaaaggtcacattgtttttatcatcttggactacatctctaagcagggctaaaacagaaaaaaatctaatgccacttcctgtctccctgggttagctctgatgcttcaacaatgaccgcaaaatagatgatgtagattataaagcgctagctagtatagggcagtagatcctgtttcagtttgaaacagcaa

SEQ ID NO: 412240 - DNA, 699 bp, Homo sapiens
gcaataactaatatttgtgagaatatatttaaatcataatatgcttgtgaatgtctagccaaaaaatggacaatgttggatcttaggcaagttgcttaggtaccctaagtccctgagtctccatttctttatccataaaaatgggaaaaaatgtgtgtactcccatagtggttttgttttattattattaaatgagctccagataagctactaaaacagtacctattacataaaaatatcaaccaatagtagtagctctaataatattactttattttaatctttaaagtgattagatttaagaagagtctccgtagaaatgtatgtgtttatctaagtgaacttggcaagtcccaacctctcttaagctcgattttcttatttataaaaacactaaatgtatttscttgtctcacatggtagttgctgctcttgtgaaataatcaagtataatcatatatgcaagaagcagttttgcaagggagcatattattattgttattgccattctttactatttaactgcttattaaaacctccattaaaaaaaggtaaaggacaacaaaatagacaaagttccagaaaaattagttggaaagaaaaaagtaaattcataaatgctctttaatagatctagtcagatatacataagattagaaatggaaacttttcataatataaaaaagtgaaagaagtaaa

SEQ ID NO: 412241 - DNA, 560 bp, Homo sapiens
caccttgctgatcattagctatttgctatgtcttccacataaacatattatttcaaatttactttttattattaacatgcaacatagaataaggattacaaattcagattttaaactttgtacaatttacttaacttctctaagacccaactcaaatgtgctctttataaagttggaataatggaggggatcgttgtgtgtgtgaaaaataaatatttgtaatcttcacatatgtgttgtatataaagtycttagtataatcttaaacattataagatctcaataaattttgagtggtggatgtagtagtattagagtatgagtagtgcaacagttatgaaagctactttctcttgggccccaaaagagctggatattggtagttccatcatctgtcctttacctgttagaatgtgagttcatagctccttgtacaagtctacaacaattctggtggggccagaggtaactacctggccactgtctttcaaactttcccattgccaccagaatcctaaggcccttcagctgattattctcagcaaaaataagaaattaaa

SEQ ID NO: 412242 - DNA, 573 bp, Homo sapiens
ttgttggggggtggtttttttgttgttctgaaacaactccagtaggctttttagctctacaaagtccctccacacaagtggtgatgcttgacatttcagctccaagaaggtaaaattgcttggtgatgaagttattaatggtgatgttgaagtcagagctgcacctctgcagaccaggttatatttgaggaaaatatgcttagctaaaaaaagaagaagaacagtgatcagatacgtcaaggtgtctgcccaacctcttggcctgggtctcatgacggagttggtgagattcagaaggcaatgaaaccattttcattgagtgcataagcacaagtagatctgtccctgagcctgaagggcaaggaaatcatgggtttttacaaatttagttagtatctggccactttaacaaatttctactaatgmtaataactcttcagttgattttttagtgcacaatcatattatcttcatttaaagataatgttactttattcttttgaaaagttgtacctcctatttcctgccttattgcttcagctgtaagtcaagtctctgcatatacttagtttg

SEQ ID NO: 412243 - DNA, 546 bp, Homo sapiens
attttttagtgcacaatcatattatcttcatttaaagataatgttactttattcttttgaaaagttgtacctcctatttcctgccttattgcttcagctgtaagtcaagtctctgcatatacttagtttgaatgatgaaaagggtgttgagatttttaagttgttttgagaaatatggatttgagtacaaaatgctgaagatagagaaactgaagaactattgtagtagtttaggtgtgggccaggtgaagtggctcacacctgtaattctagcactttgggaggaagagggaggcacatcatgaggtcaggagttcaagaccagcctggccaacacagtgaaaccccgtctcyactaaaaattaaaaaaaattagccaggcgtggtggcgggcacctgtagtcccagctactcaggaggctgagccaggagaattgcttgaacccgggacgtggaggttgcagggagtcgagatcatgccactgcagtccagcttgggtgacagagtgagactctgtctcaaaaaacaaaaaaaaagttgaagtg

SEQ ID NO: 412244 - DNA, 573 bp, Homo sapiens
ttaaagtgaggtattcttcctcctatactgaaaatctaaatctcagaatgaaaatgctgaggggtgcttgttggaggagtggattatgatcatgtaggtagagtagactgtgagatccagttgcccaaccagcttttatggagtaagtctacaggccagtctcacatctactctctgagagtggatgtggggtgaatggcatcctcctcccagcctttgggtaaagcatagtccacatttgctaactgcttgaaagaagcatttgaggaagaggtcacacctcacctaagggtaagaagagaaagaggaagtgcttgcactaattcttgcttttgagctgctgcaagcctccaacagtgaaacgtagtccatgaacatcaagttcaggataatcaaattagtcattcttttcttctggaggagcaaaaagggcatcagagagakgagccagagacattccatctcaaactcctcaaagagagaatcaagggaagatgcctctccctctgcaggctgcttgcaacttgaaaaattgtccctgacactgtcaatgataattcataagaatgataa

SEQ ID NO: 412245 - DNA, 404 bp, Homo sapiens
gcaaaaaacccaattttttgttcacaatagtaacttgatgtctggtaactaacacataattatagattgcagatctagggaatacattattcaagtatttatttttgaaaagttctaatagtatcacaccatgaagggcaatattgtgccctggaaagaatattagaattaaagtaaagaagtctgagtactccttcttctcttggtagatgtttgcttaaccaagctatttaacttttccaagtattgagttctttgtgtgttaagtgtggtatttgggctaaattctccttttcggttgtaatattctatgaatctytgaaatactgtattataaaaggatgcaagaatcaaggttcagaatctgttaaacaaatcatgtcaaaaagtacagagattataag

SEQ ID NO: 412246 - DNA, 530 bp, Homo sapiens
acaataatagctagagacttcaacaccacactttcagcactgaacagaacttccagacaaaaaatcaacaaagaaacatcagtcttaatctacactacagaccaaatggatctcagatatttacagagcatttcatccaagagctgcagaatacattctttttctccacacatggatcattctcaaggatagaccacatgttagatcacaaataggtcttaaaacatttgaaaaattgaaatactatcaagtacattctctgaccacaatggaataaaactagaaattaataagaggaattttagaaactatacaagtatgtggaaattaaacaatatgctcctgaatgaccagtgggtcaataaaaaaattaagaaagaaattgaaaaatttcttaaaacaaatgacartgggaaccaaacataccaaaacctgtgggatacagcaaaaaatagtattaagagggaagttcatagcagtaagtgcctacatcaaaaaaagaggaaaagcttcaaataaacaacctaaca

SEQ ID NO: 412247 - DNA, 456 bp, Homo sapiens
ctttctattcatgaagatactagggttctagtgttgcagaacaggttctggaccattttgtacctgcagggtagggtgtatgttacatcacacattttgtgataatgctttaactagttctataattccccgtagtaagtaattatggcttcctggaaattgctgaagtaacayattgaagactgaagccactgcggtttgcaggcccttatgatttttatttacttcataacgcataccagcatcttgggaataatagaaggagcatcttaatttcaggtcaaataatagtcactaaagtctacataggctaaatactttataatacttctcacagatcttcttcctcaataatttaaccccctaacaatcagaatcttaaaatagggacttgagaatcgttgtacctcaaaaatatcttctggtgatcatagaatgcttaaaatgctaacataa

SEQ ID NO: 412248 - DNA, 460 bp, Homo sapiens
cattacacattgtacgcttgtatcaaaataacacatatatcccccataaatacatacaactctctgtatccataaaaattatttaaaaattttttaaaataaataaatcttttaaaaaataaataaaagaggaggaagcagagcaagatggctkaatacaactatcgacacagggaaacgcatcctaagaaccaaaaatcctgtgagcactcacagtacctggttttaacttcctatcactgaaacaggcactgaagaagcagataaaacaatcctgaatctcagacgtgaccccttcctctccctcagtagcagcagcagcagtgtggtgcggagagctctctgggtgctgggggaagagaacacagcaattgtgaggcactgaactcagtgctgtcctgtcagagcagaaagaaaaacagaccaatctcagctgacacccacagagggagcatttaaa

SEQ ID NO: 412249 - DNA, 460 bp, Homo sapiens
cattacacattgtacgcttgtatcaaaataacacatatatcccccataaatacatacaactctctgtatccataaaaattatttaaaaattttttaaaataaataaatcttttaaaaaataaataaaagaggaggaagcagagcaagatggctgaatacaactatcgacacagggaaacgcatcctaagaaccaaaaatcctgtgagcactcacagtacctggttttaacttcmtatcactgaaacaggcactgaagaagcagataaaacaatcctgaatctcagacgtgaccccttcctctccctcagtagcagcagcagcagtgtggtgcggagagctctctgggtgctgggggaagagaacacagcaattgtgaggcactgaactcagtgctgtcctgtcagagcagaaagaaaaacagaccaatctcagctgacacccacagagggagcatttaaa

SEQ ID NO: 412250 - DNA, 621 bp, Homo sapiens
cagagcctttgctgatgcctgccatcaatctagatcactgtccccactggacagcctgcacaaactaggagcaatggtagcacacttgtcttcaaggtgttcactcaggctgggtgcagtggctcacacttgtaatcccagcactttgggagggtgaggcaggaggattgcttgagcctaggagttcgaaaccagcctgggcaatatagagaagccctgtctctaccaaaaaataaaataaaataaaataattaattagctgggtgtggtggcatgcacttgtggacccagccacttgggaggctgaggtgggaagatcacttgagcccgggagattaaggctgcaatragccatgattgcactactacattccagcctggaagacacagggaaaaaaaaaaaaaagaaaagatgttcattcagctcagcctgaaaatatcctctcactagtaagagtgaagcagctgcaaagaataccaggagaaatgcaaagttctctctaaaagcaaacaggcctaaaccactcaaagcactctgcactgaatggtactatttaaataaaaaataaattatattcttcatattgtttcaagcatttataatcataaccaacttataaa

SEQ ID NO: 412251 - DNA, 621 bp, Homo sapiens
cagagcctttgctgatgcctgccatcaatctagatcactgtccccactggacagcctgcacaaactaggagcaatggtagcacacttgtcttcaaggtgttcactcaggctgggtgcagtggctcacacttgtaatcccagcactttgggagggtgaggcaggaggattgcttgagcctaggagttcgaaaccagcctgggcaatatagagaagccctgtctctaccaaaaaataaaataaaataaaataattaattagctgggtgtggtggcatgcacttgtggacccagccacttgggaggctgaggtgggaagatcacttgagcccgggagattaaggctgcaataagccatgattgcactactacattccagcctggaagacacarggaaaaaaaaaaaaaagaaaagatgttcattcagctcagcctgaaaatatcctctcactagtaagagtgaagcagctgcaaagaataccaggagaaatgcaaagttctctctaaaagcaaacaggcctaaaccactcaaagcactctgcactgaatggtactatttaaataaaaaataaattatattcttcatattgtttcaagcatttataatcataaccaacttataaa

SEQ ID NO: 412252 - DNA, 586 bp, Homo sapiens
aaaggacaggccaactctcttattaggagggaaagcagctgatgacttgaagtcaatgctcatctgtgctgctgaaaatcctagagtccttgggaattataccgaatctactcggcctgtgccygacaaatggaaaaataaagcctggatgacaacacatctgtttacaacatggtttactgaatatttcaaatccactgttgagagctaccactcagaaaaagatgattcttttcaaaatattactgcttgttgacaatgcacctgattatccaggagctctaatggagatacacgaggaggttaatgttgttttcatgcctgcaaacacaacatcctatctgtagcccatacgtcagagaatcatttgattttcaagttttatttaagaaatacattttgtaagcctgtagctcgatagatagtgagttctctgaggatctgggcaaagtaaattgaacaccttctggaaaggattcagcatgctagatggctttgtaaaacaaagtgtctgagataggtctcaattaatttagaagtttattttgctaaggttgaggacatacctgggagaagacacaaaatc

SEQ ID NO: 412253 - DNA, 586 bp, Homo sapiens
aaaggacaggccaactctcttattaggagggaaagcagctgatgacttgaagtcaatgctcatctgtgctgctgaaaatcctagagtccttgggaattataccgaatctactcggcctgtgcctgacaaatggaaaaataaagcctggatgacaacacatctgtttacaacatggtttactgaatatttcaaatccactgttgagagctaccactcagaaaaagatgattcttttcaaaatattactgcttgttgacaatgcacctgattatccaggagctctaatggagatacacgaggaggttaatgttgttttcatgcctgcaaacacaacatcctatctgtagcccataygtcagagaatcatttgattttcaagttttatttaagaaatacattttgtaagcctgtagctcgatagatagtgagttctctgaggatctgggcaaagtaaattgaacaccttctggaaaggattcagcatgctagatggctttgtaaaacaaagtgtctgagataggtctcaattaatttagaagtttattttgctaaggttgaggacatacctgggagaagacacaaaatc

SEQ ID NO: 412254 - DNA, 466 bp, Homo sapiens
agcatccgccaccatgactctggtgctgtagagcctgccccttctcaccctctctctaaggacaggatctgttcaggtatrttaaggtattctcttgcttgagagttcacctatcctcataaggggacttcgtatatctctggacctctcaattttgaatttatcttatgacttctttaaaaataaataagtattaagccccaatgtcgtgactgtaggtgccaggctcacagctagcaatgtacaccacgggagacgaagacacagcttctgttcatgtagttagagatggaccggggaggagggagagggaacacattcatcgcctaattaaacaacaatgcaaaaaactagcacttaacgctggtccacagaagaatgggggatttggtccagctgcagtggtcatggagggattccccagggaagtgaccactgagctgggttctgaaagaagaacaggtct

SEQ ID NO: 412255 - DNA, 610 bp, Homo sapiens
ctggtctggcaggtcgtctatttctatttccagcgggtaattacactttaatgtgtgatatatccttttcggggtgaggtgtattaaatccctgataactgcgtatttacctcccgtgttatgtatgcatacagccattaatatacatttccaagtttcaagcacccactttagcatgccaaagatccctggctctttctgaagttcaggactgaatggcacctcataaaacgccacttcattaagaatcaacaggaataacccaaccagaaacattttttattgatgaaggttgaacagagaaatatcaagttcactcatcacttttcacagaggaaggagacaatgaaatctttattggaaagttctgtgtgtcaggaatgcacttcatcttgtcggggaagcgcagccaggaaatatatggcccgataggaatcatcagcacaggaggaagccccaaccaaacacgccgtctcagcagcwtccagggctctgtgtccaatggcttcgacatttccattccttggtggcttgtttttgtcagtcagtctgacattcagtgccttccagaagcccttggatgctgagagagttgagcctcttgagtacc

SEQ ID NO: 412256 - DNA, 593 bp, Homo sapiens
tgtccgcccaatttcctgtccttgcagtaaaactgtaaagggagacatttagctcggcaggaaactcagagctaaattttgcaatttaattttgcaatttaattttaattaaaaacaaaattatctttttttaatatgtgtatatatatagagacagcaagcgaactgatttgggaactttatatatatacatatatacgtatatgtatatacatatgtgtgtgtgtgtacatatatgtatgtatatacgtatagctgatttgggaacaaatagctgctcacygtgtggaatttctgaacattcacaaaagttatttaaagaaagtaaaggccgggcacggcggctcacacctgtaatcccagcactttgggaggccgaggctggcggatcacttgaggtcaggagttccagaccagcctggtcaacgtggtgaaacaccttctctaccaaacaaacaaacaaacaaacagaaaacaaaaattagctaggtgtgatggtgcacacctgtaatcccaggctgagggaggctgaggtaggagaatcccttgaacctgggaggtggaggttgcagtgagccgagtgggatcacacc

SEQ ID NO: 412257 - DNA, 603 bp, Homo sapiens
tatatgtataaatttatatatccccaccatgaccatgatggttaattttagatgttctcttgactgggttaggggacgcccagttcgctggtgaagcacgatttctgggtgtgcctgtgaaggtttgcagaagagattagcctttggatcagtgggctgagtaaggaagacccacctcaccaatgtgggaggcgccatccaatctgacggaggacctgggtagaagcagggccaatttatcccctattctggctttggacgtcagaacggcaggttctccagcctttggactctgaggtttacaccagcaaccactcctcttcccctcaggccttaggactcagactgaattatatcacctactttcctggtgtctagctttcagatggcatagtgtgggacttctcggtctccataatttcgtgagctaattcccgtagcaaatcctctatctatctatctatctatctatctatctatctatcttctatctratctacctatcagctgttatctgtcatctatcatttctatcaatcatgtatcatctattacctgtcatctatcaattatctatcaatcatctatctattgatcgatcga

SEQ ID NO: 412258 - DNA, 603 bp, Homo sapiens
tatatgtataaatttatatatccccaccatgaccatgatggttaattttagatgttctcttgactgggttaggggacgcccagttcgctggtgaagcacgatttctgggtgtgcctgtgaaggtttgcagaagagattagcctttggatcagtgggctgagtaaggaagacccacctcaccaatgtgggaggcgccatccaatctgacggaggacctgggtagaagcagggccaatttatcccctattctggctttggacgtcagaacggcaggttctccagcctttggactctgaggtttacaccagcaaccactcctcttcccctcaggccttaggactcagactgaattatatcacctactttcctggtgtctagctttcagatggcatagtgtgggacttctcggtctccataatttcgtgagctaattcccgtagcaaatcctctatctatctatctatctatctatctatctatctatcttctatctaatctacctatcagctgttatctgtcatctatcatttctatcaatcatgtatcatctattacctrtcatctatcaattatctatcaatcatctatctattgatcgatcga

SEQ ID NO: 412259 - DNA, 550 bp, Homo sapiens
tttttgacatcttatctttttactatgtcctcggatcatttggcttttctgctcacatacctgagatggcaaatgcccctaaatatactgtacaatcatgcaaatttatgttcttctatatcagtttttaaaatttggaatcacttaggactgtgttctgtgtaacacccataatacttactctgaagtttcattcctatcctctcttcactaccaactcagcatatttccttgcctcctgctttataatggagttataccctatctcctaaaccaccatctctacacataaacctacccactctgctttctataggattatactcttttcaagtgcatttgaagattcaccaagataaaccacattcaggatcacaaaacaaactttattaaatttgatagaattgaaatcactctaagtaaaatttctggccataagasaattaaactgaaaaacagtaacagaagataacaggaaaagcagtagtctgctgttgttgagtggaaggctctataaatgtcaattagattcatatagttgatggcatca

SEQ ID NO: 412260 - DNA, 550 bp, Homo sapiens
tttttgacatcttatctttttactatgtcctcggatcatttggcttttctgctcacatacctgagatggcaaatgcccctaaatatactgtacaatcatgcaaatttatgttcttctatatcagtttttaaaatttggaatcacttaggactgtgttctgtgtaacacccataatacttactctgaagtttcattcctatcctctcttcactaccaactcagcatatttccttgcctcctgctttataatggagttataccctatctcctaaaccaccatctctacacataaacctacccactctgctttctataggattatactcttttcaagtgcatttgaagattcaccaagataaaccacattcaggatcacaaaacaaactttattaaatttgatagaattgaaatcactctaagtaaaatttctggccataagagaattaaactgaaaaacartaacagaagataacaggaaaagcagtagtctgctgttgttgagtggaaggctctataaatgtcaattagattcatatagttgatggcatca

SEQ ID NO: 412261 - DNA, 596 bp, Homo sapiens
ccatggttgtcttaagaaagaacacctgtgtgatggtttgtgttgcaagctgaactagccacttttttcatgagccaccacttttacttgaaagaacaactaatagacaaaccayggttattcagatttcagtacctggtagacattttttttttaaaatgaaccaagcgagagcctgtcacttgaaagtaaacaactgacagtatttattgccaaaataacatattgcaacagatcgaatgcaaaacagctacgagaaaccagctgtcttctagtaagctagacattaaagagatctgcaaaatatgtaaaacaatatcactcttctcactatatttttgaagttgtttttcctacattaaaatgtttatgttaacatatgagtttttaaattattgttttaaaacagactaatatctttaaattctcagttttaacttctaatatggtaaatacataacatatgtaaacaaaatatcttttggatcctcaataactttcgacaatgtaatgggatcacagaccacaatgcttgaaagccactgttaacagcaaaaaaagtgaattaactaggactacatacaacatagatgaaa

SEQ ID NO: 412262 - DNA, 596 bp, Homo sapiens
ccatggttgtcttaagaaagaacacctgtgtgatggtttgtgttgcaagctgaactagccacttttttcatgagccaccacttttacttgaaagaacaactaatagacaaaccatggttattcagatttcagtacctggtagacattttttttttaaaatgaaccaagcgagagcctgtcacttgaaagtaaacaactgacagtatttattgccaaaataacatattgcaacagatcgaatgcaaaacagctaygagaaaccagctgtcttctagtaagctagacattaaagagatctgcaaaatatgtaaaacaatatcactcttctcactatatttttgaagttgtttttcctacattaaaatgtttatgttaacatatgagtttttaaattattgttttaaaacagactaatatctttaaattctcagttttaacttctaatatggtaaatacataacatatgtaaacaaaatatcttttggatcctcaataactttcgacaatgtaatgggatcacagaccacaatgcttgaaagccactgttaacagcaaaaaaagtgaattaactaggactacatacaacatagatgaaa

SEQ ID NO: 412263 - DNA, 584 bp, Homo sapiens
aagccccaactctgtaatcacagttattctttctggtaagcagttcccctcctgagtcatctccttagcataaactcgggtatgaaccaaggatttagagtctgcttcctaggacccagggacaaaggccaaattctttataatatggcactgctacatacgaaaccaagctaggagtttggaggagggagagagattcctgacatgggtggaaatataaaaaatttaataaattttagaggtccttaaagttaacagagaagtcaagatgaatgtgttgattggatgatttagaccrggagaaactagattattactaaaataagctacttggtgtcagtaaggatctgggctctgtcatttattagttctgtgaccttgggtgttacttatccactttaagtctcagtaaaatatgcataatgaggattgtttttagaatgaagttattatatgagcctattgtcaaacccatagagggcacccaataaaagctagctttgatttttcagtcttacactgtagctgagtttaagttagaacagatgaggttggaagacatggaaacagttaaaatggagaaa

SEQ ID NO: 412264 - DNA, 615 bp, Homo sapiens
gcattggtaggaggaggaaagagaaaaggagaattggactccttgggagcctgcagtggacaggtgcaaagaaaggtaagcaagggagaaggaaaaagggcgttacctggggcttacagacctgcccagacacacatgaaagaaaaatcaaagctttgacagtttaactcactaattttaaaacactaataaaatgtacaagcattgctcctttcttttatcatttagatgggggattttctttacataatcaaggttaggtaaggaacaccctccctccccctctttacaatttctctttaatgtttacctttactcagcacataatataaccaaaattgccatatatatatatacataatacacatatgtatttttaattgtgtgctaaggtcatgaacttctaattagtgtaaaataaagcaaaatataatcacgaatcaaaggatttacagtaaatccaaataggctggaaagaaatgatttrcatctctatattttgccgtgaatagaaaatgaatatctggaatattgtcataaatgatgagtggcttcttgggcccttatacaatctaagagcactttcctgtttttcttagttgcgtttttctaaaa

SEQ ID NO: 412265 - DNA, 593 bp, Homo sapiens
ctttgttacagagttcatactcaaactcatgttaataaattttaattatatcatgaaaaccatacgttgctaagcctctagtgcattctactactgtaattgttaaatagccaatgtgagtgtgtttataaacatatatgcatgtttccccactttaagctgtaatatttttatatgawtaaaaaagtttcaggtaaactttaaagaaaattatgtgctcatcattttttggaagttagttgaattttgagtttttgagataatttctttttctctcttatttttaaaaatttctcttggaaatattatcatttgttcttttcttgattgtcccaggatatttaaagtaaagcaacatgttaatacaaagtatatattttttgataaataaaatcaaatacatacattacattaaatcaaagacacacaataaaataaaatacattacatttttggtaaataaaatcaaatacatcaagtacatataaaacatcatatgtatgtttctgcgtatatggtacaatggaaatgcctttaggtattatgtaaccagtttttttctgttgttgttttactttgtttttgttttttgt

SEQ ID NO: 412266 - DNA, 570 bp, Homo sapiens
gtttccttaagacaaagcacagaggaggaaatattttgtaaagagtttaagaacttctagagagtatatatttatttcatataattagttataaatctattatatgtgataaatacacattaaatatgtatttatattttatatataattttatatatttatattttatatgcaaatatatatttatatatcacatataattatatataaatatatratatatgatctaaatatacagttatatacatttataactttcaaatatataaatacttcatatatatgtgtgtgtatatatatttaaaagagttgttccagtttttattgccgtcattaaagtttgaagtgcccatttctgcttgctataagagttaacttacatgcttcacgatacaggaccatcctccagttctcgcatttaaacgttgtcccaatttatacttcctcagtcctgtttagtgctggtctattgtttaccttccctatatgccaaacaccacactaacagtaatacgaaatacaaaaaaaaaaaaaagaggtctacctcatcaaggagttcatagtgtagaa

SEQ ID NO: 412267 - DNA, 604 bp, Homo sapiens
agtggttaaagtggttaaccttttagtctctgaagtgttgacaaagtgaagcagaaggcacaagtctaccatattgtgtctgtatgagcttggataatttaaatatcttaggcatgttctaggcttagtttcttatcagtaacataagaattcatcactactttacagcattatagtgaggactaaatatgacaatacttaggacaatacttcaggatattaccatgtacctgaaacagagtaagcactcattacaaaataagtgtgcattgagagttagttggtttcttaccactgtaatcatgatcattaccatcatcttccttgtcatcaaggcaataaagaacacaaagccttgtttaagaagaacgttggaatgctgtcacattacaactataccactcataaatgaaactcagctttttgtcctattgtgrgaccgtcaaggcttgccatttcattcattatctaaatcgacattatctgtagaactgtttagctctctgatatccagatgtaattgatggtattgagtaattatgtcacacattttttgctgatttgctctcataaggcattgagcatagccaagtccaagtcagtt

SEQ ID NO: 412268 - DNA, 489 bp, Homo sapiens
acactccccctcccccacaccagatcaccacactaataaggatctataaactggaatttatttcaccgagtacattacatccacatttcaacaaaaaattgcaagtcatactaaaaggcaaaaaaaaaaaaaaaagcgttttaagacactgaacaagccagttcaaacgtggcagaaatgtcagaactatagatgggaaatktattacaactatgataactatgatatgctaagggcttgatatggtttggctgtgtccccaccccacatctcatcttgaactatagcacccataattcccacgtgttgtgggagggaccgttgggagataattacatcatgggggcagtttcccccatactatccttgtggtattgaataagtctcataagatctgctggttttataaagggtttccactttgacttgactctctttctctcttgcctgtcactgtgtaagatttgccttttgcctcgacaataattg

SEQ ID NO: 412269 - DNA, 551 bp, Homo sapiens
attcgcaaattaaattcaacaatgtataaacagaagctgggcatggtggctcacacgtgtactctcagcactttgggaggccaaggtgggtgratcacttgaggtcaagagttccagcaccagtctcgcccaccagcgcacgaaaccccgtctctactaaaaatacaaaaattagccaggtgtggtggcatgtgctgatagtcctagctactcaggaggctgaggcaggagaattgcttgaacccaggagacagaggttgcagggagcccagatcatacctctggactccagcctgggtgacagagtagaactctgtctctcaaaaaaaaaaaaaaaattatatactatgacaaagtcatatttatgccagttatgcaaggctggttttaacattcaaaaatcaattaatacaatccaccatatcaacaagcttaagaagaaaaatcgcatgctcttatcaacagatgcagagaaaacatttaactatttccaatactcattcatcataaaacgtgctcaacagaatagagggaagttctttaactaaatt

SEQ ID NO: 412270 - DNA, 558 bp, Homo sapiens
tttagcaaggactgaatgttgttggattaaagtggcagttatgataccatggtgatgtatacgaaattttataatttcacgagttygctaaattatagggagacttctgcatcctcgtgtgtttctgtgtatgtgtacatgtgtttgtgtatgtgtacatgtgtatgtgtatgtatatgtgtatgtgtgcttacagtgataacaccaaagggagatgggtttcaagcatctagtaaagaataaatacatgtaggtaattaaattaacatatactctaaattacacctggttttaaccaggtagcaaaaacatatatttttttttaagaggtagtctcatgctttcactcaagctggagagcaatggcaagatcatggcttactgcaggcttgatctcctggactcaagcaatccttccacctcagcctcctgagtaggtaatagctggtactacaggtacacaccaccaagctaaattttaaaagtgatttgttgaaatggggtctctgttttgttgcctaggctggtcttgaagtcctggctttaagccagggtgtc

SEQ ID NO: 412271 - DNA, 558 bp, Homo sapiens
tttagcaaggactgaatgttgttggattaaagtggcagttatgataccatggtgatgtatacgaaattttataatttcacgagttcgctaaattatagggagacttctgcatcctcgtgtgtttctgtgtatgtgtacatgtgtttgtgtatgtgtacatgtgtatgtgtatgtatatgtgtatgtgtgcttacagtgataacaccaaagggagatgggtttcaagcatctagtaaagaataaatacatgtaggtaattaaattaacatatactctaaattacacctggttttaaccaggtagcaaaaacatatatttttttttaagaggtagtctcatgctttcactcaagctggagagcaatggcaagatcatggcttactgcaggcttgatctcctggactcaagcaatccttccacytcagcctcctgagtaggtaatagctggtactacaggtacacaccaccaagctaaattttaaaagtgatttgttgaaatggggtctctgttttgttgcctaggctggtcttgaagtcctggctttaagccagggtgtc

SEQ ID NO: 412272 - DNA, 554 bp, Homo sapiens
ttaagcaggagagtgacaccatttcatctatacatttaaaagaccacattggtgcaggatctgtggctcatccctgtaaacccagcactttgggaggctgaggtaggaggatcgcttgagcccaggagttcaaaaccagcctgggcaacatggtgaaactccatccctataaaaaaaaatacaaaagttagctgggcatggtggtgcatgcctgtagtctcagctacttgggaggctgaggcaggagaactcattgaactcagaagttctgggttgcagtgagyggagatcacgccactgtatttcagcctgggcaaaagagccagactgtatctcaaacaacaaaaacaaaaacaataacaacaacaaaaccccaaaaaacacattggctgcaaaataaacattggattagactgaggtaaaagtggaagaaaatagaaattgtttggagaaaattgcgttagcctaggtgaaagagttgcaacagtttggactggcatgttggctatgagaagggagagtaatgggtggacttggggtattttgacggtaaa

SEQ ID NO: 412273 - DNA, 564 bp, Homo sapiens
taacttccttgttaaacctaatctccaactctgggcatttatcaccacattgagcaaaataaggattttttgcatgttcttatttgtgtgtggctctctcacattagactgtaaattttacagagctgaaacaaagtcttttttgcttattgcatcttcattgcctrtcacaccgttcttagttcataataaacgttcagtaaataattgttgaataaatagaaccgatgacagtttttatttgtgccaaaaaatgctttagtataactagacatatctgaattccggtgatgagcacagcgtatgttcacatatgatctcttcttctgcttccatacacccatgtcagaaaataatacacatgtgaagtaagaagggctgggacacattaaaggtgagctaatggggggcacagcttctttaattacaacaatttagaacagaaacaatccctaccgtaagagtattgctaacctggcaggaggcagcagaatcagcaaggtgtcgtggaaagtgtgatcactggctaagactcaacctccagctactccatttagtgaatac

SEQ ID NO: 412274 - DNA, 508 bp, Homo sapiens
aactattaatatatttacactgcaggagctatgacaaacgcagaagagatacaggtagaattcttgcccagggctaacctcaaagccagtcctctgaactactctgttcaggtttgatataagaatgaakaggcagaatatgagtcttttataaagagtatcaaaagtaagatggtgttaagctgagaaagatggagcaattgaaagtttctgaaaagagaagagatgtgagtaagagtttgtaagaaatatcagtctgtaacactgaatagcacaatatcatgtgaaataccacattactcagttcttctaaaaaacttatactgctccatccattcacaagctagagataaaaaaattatacaattattaagataatttcaaaagtgtacttacctttgggctcatctgttgtaacagccaaaataaaatcatacggagtcatgaataactgcccttcacattctatagaagcaaataaacgaaatcgcctctcccgagatgtggc

SEQ ID NO: 412275 - DNA, 546 bp, Homo sapiens
agactatacacaataaattcaaaattgatttagcatatgagtaatgattcaaatgtctaaattctccagtagtttccgagcagcagtgatagtttgagttttttaaaaaagaaaaagctaagcagcagttgaagtctgtgttctttaatatttaagttaaaattagaaacaaattgaaacagtgaccacaataactcagtacccttgtctttctgcttcatccawtgttatcattctctaagtcactaaccgttaaaatactcttcattcctttctaacataattctttgttcatttacttcctctacacaaagttctctaattccaaatgtgttacaaagaagagacattacgtgaagccgggtgatgtgaccatctccgaccttgatatggaaatccatgtttttccatgattttcctaaaacgattcctttataactggctccaggacttaaactcactgttttatcttgatttggttgtcttatgtataacctcccgttattcaacttatctgaaattttagttagctctaattaaatttaa

SEQ ID NO: 412276 - DNA, 503 bp, Homo sapiens
ttcgacgtgagcaaggcacccaacctgtctttgaacctggcctgggtgcatatactctgtaatatgctgggaatttatgagcttattatggatccatgcaaataaacagtacacagttctgtatttcggggatggataacttactccatttctttgaacgtcagccgttttctcttctttcataagtaactgaatatttcagactgggaacatttcagacttttctcttcgatgatgagactaaatttctaaacaatactcttcaagtaaaaattttaacccatttatgcctagtgttccattgtatcctgggacactgagccaggaagaccgagggaagggtggtagagcatgaggcagtgaaacccacaagaaaaagccagacagtargaatagttttatctccttggacatatttggagaatatctaacttatagtgccacagaggttctagatatttataaactttgtgcctggagttgagtagccaaacactatttct

SEQ ID NO: 412277 - DNA, 576 bp, Homo sapiens
aagatctaaagaaaaaccacataaacaaatcttgaacttcaatgagaaagattgttttcctcagtagcaggggttagagtagtgtattgtagaattgaacaaatgaataaatatattgaagctaatgagagctaggggtttcattattaaagaatagagttytaatatgaaaagaaggaagactggaatgaaccttgtagtgtgaaattggaattgccgctatcagtattaacacttggtgcctgtgtgtgtgtgtatgttcatgtgtatgtgcatatcttagccctgtgcactaaaagggcctagaagcaaacatatcccaagtcaatgagcatatctagcatctaagccttggtttctcaattcaaactcctactaaaatgatcaatggaaccttggagaaatgtctggttccaggactggggcattattttgtgtgccagaaggcaaggaagtactaaaaaaaaaaaaaaaaaaaaaaagaataaggacatgtccaggggacataagccaaatctgggacaatttgagcatcaaaataaataatgataggaacaagttatttatgaaataaat

SEQ ID NO: 412278 - DNA, 592 bp, Homo sapiens
acagaaactctttactgtttctcaaatcttctgtcttagggctttgtatatgttgtcccctctgatgagaatgttcttcccttaatagccacatggctcgttatgctatttctcaatkatgcctaccctttctaatctaatatataaataatagcctattatatgaataatatataacctattatataaatgatactccctctcctggctgtccttattccttcctaccttaatctgtttttatttccatagcataatcatattctaacatactgtataatttgcttatttcctaacaaatatgttttatgtatatgtatgcaaatatatatattatgttgaactcttgttaattgatggatagatggtattttaaaatgtagaacttgaagcttttttgttttatgaattttacctacagatttattcactcatgatgacatggcacatgtacaaggttactaattataatgttgtttgtaatagcaacaggctggaaatggcctaaatgtctttcagtaagtcactgatcaaatatatcatgatatatctatagaatagaataaggtgcagctgaagagagatgaaaaaa

SEQ ID NO: 412279 - DNA, 592 bp, Homo sapiens
acagaaactctttactgtttctcaaatcttctgtcttagggctttgtatatgttgtcccctctgatgagaatgttcttcccttaatagccacatggctcgttatgctatttctcaatgatgcctaccctttctaatctaatatataaataatagcctattatatgaataatatataacctattatataaatgatactccctctcctggctgtccttattccttcctaccttaatctgtttttatttccatagcataatcatattctaacatactgtataatttgcttatttcctaacaaatatgttytatgtatatgtatgcaaatatatatattatgttgaactcttgttaattgatggatagatggtattttaaaatgtagaacttgaagcttttttgttttatgaattttacctacagatttattcactcatgatgacatggcacatgtacaaggttactaattataatgttgtttgtaatagcaacaggctggaaatggcctaaatgtctttcagtaagtcactgatcaaatatatcatgatatatctatagaatagaataaggtgcagctgaagagagatgaaaaaa

SEQ ID NO: 412280 - DNA, 540 bp, Homo sapiens
actttaaatatgtcatgtcactcttgcctgtcctgtaaggtttctactgaaaagtatgctgccagatgtattggagttccattgcatattatttgttcttctcttgtgccacttttagaatcctttctttatgcttgactttgggagtttgattattaaatgcccagaggaagtctttttggggttaaatctgcttggtgttccataaccttcttgtacttcaatgtggatatctttctcttggtttcggaagttctctgatactatccctttgaataarctttgtactcttgttcttttctctacctcctccttttggcccataactcttagacttgctcttttgaagctattttctagatcttatagatgtcttgtcttttgtctcctctgtgtattttctaatagcctgtcttcaagctcactaatactttcttctgcttgatcgattccgctattaataggctctgaagcattcttcagcatgtcaattgtatttttcaactctagaatttcttcttgatcctttttaattatttc

SEQ ID NO: 412281 - DNA, 540 bp, Homo sapiens
actttaaatatgtcatgtcactcttgcctgtcctgtaaggtttctactgaaaagtatgctgccagatgtattggagttccattgcatattatttgttcttctcttgtgccacttttagaatcctttctttatgcttgactttgggagtttgattattaaatgcccagaggaagtctttttggggttaaatctgcttggtgttccataaccttcttgtacttcaatgtggatatctttctcttggtttcggaagttctctgatactatccctttgaataaactttgtactcttgttcttttctctacctcctccttttggcccataactcttagacttgctcttttgaagctattttctagatcttatagatgtcttgtcttttgtctcctctgtgtattttctaatagcctgtcttcaagctcactaatactttcttctgcttgatcgattccgctattaataggctctgaagcattcttcagcatgtcaattgtatttttcwactctagaatttcttcttgatcctttttaattatttc

SEQ ID NO: 412282 - DNA, 584 bp, Homo sapiens
ttctgtgttgtgttatcttggatttctttgagtccttaaaacagctacttttgaattatctttctgaaaactcatatatctctcttcctccaggattggctcctggtaccttatttagttcatttagtgaggtcgtgttttcctggatggtgttgatgcttgtagatatttgtcggtgtttgagcattgaagagttagatatttattgtagtcttcacagtctaggcttgtttgtgcctgtccttcttggggaggctttccaggtatttgaaggaacatgagccccaagcccaatattgctgtggtttttgcagactcataaggtaccaccttggtagtcttggataagatccgggataattctctagattaccaggcacaggctcttgctcttttctcttactttctcccaamtgaacagtgttcctctttgtgttgagtaacctggaactggggatgtggtgatgcaagcacccctgtggtcaccactactggggctgcacttggtcagacctgaagacagcacagcactgggtttttcccaaggcccttcccttcagggcagcgaactcccccaagcccgg

SEQ ID NO: 412283 - DNA, 590 bp, Homo sapiens
acccattttcatccctcatcccatcccactctcccaccttctaagtctccaccgtctattattccactctccctgtctatgctacacctcattaaaataatgaaattttggactttcagatgttgcaatgggttgatactttggagaaacttgggagacagtgaatrtacttttcatgcaaaagggacacgaatcattggagctaggagtcgactgtagtggacagattccaaagtgctcctccctacaatccctgccttctggtgctcatgcttttgtgtaatttcctgtgaggcacttgtgacttacttctacaaatagaatatagcaaaggggagggctgtcatgcctatgaccatgcagaataagactctactttgctagtagatttgctctagagactcattgctcagttgatgaagtcagccgccgtgctgggaaaaccaggagtggtgacgaactgcaggcggcctctaaggtgtgagcagccttcagtcaatagtcagccacaagctggggagctcagtcctacaacagcaagaaattaaattctgccaacaatctgagtgagcatcggggtggattcgtca

SEQ ID NO: 412284 - DNA, 617 bp, Homo sapiens
tactatcagctcttctttttaaatgatcctactcaatcatctgaccccttttccctactctaaccctggtccaagccttgcttatctatttcctgggcacctataacagtctcttaacctgtctcttcctttcaaagccaggccacctaaaatctattctgttatgtagcagccaagatatctcttgaaacatgaatcagatatctggcacatgaattagaccacatctgagtgtcacagttgattgtcaatacttgttgaatatttgctgaatgagcatcatgcctatgctaaagcaaggttcacaaactttttctgtaaagggccagagagtcaatattttcatttttactggctacatggtctctgttgcctcaactttaccattatagtgtaaaaacagctgcagacagtatattaaatgaatgagaatggctgtgttccaatacaattttacttacaaaaataggtgcagtagtttgctgactcctgmtttaaagtttaaatactatagtggcttcccatcactcttacagtcactctttgaataactaaacttcttaccttagcctacagagtcttaaaagatttgacccatatctacctctccttactca

SEQ ID NO: 412285 - DNA, 617 bp, Homo sapiens
tactatcagctcttctttttaaatgatcctactcaatcatctgaccccttttccctactctaaccctggtccaagccttgcttatctatttcctgggcacctataacagtctcttaacctgtctcttcctttcaaagccaggccacctaaaatctattctgttatgtagcagccaagatatctcttgaaacatgaatcagatatctggcacatgaattagaccacatctgagtgtcacagttgattgtcaatacttgttgaatatttgctgaatgagcatcatgcctatgctaaagcaaggttcacaaactttttctgtaaagggccagagagtcaatattttcatttttactggctacatggtctctgttgcctcaactttaccattatagtgtaaaaacagctgcagacagtatattaaatgaatgagaatggctgtgttccaatacaattttacttacaaaaataggtgcagtagtttgctgactcctgctttaaagtttaaatactatagtggcttcccatcactcttacagtsactctttgaataactaaacttcttaccttagcctacagagtcttaaaagatttgacccatatctacctctccttactca

SEQ ID NO: 412286 - DNA, 584 bp, Homo sapiens
cacatttgttactaaacaaataggcaatcagttgtcccaggttcttaaccattcatgacatccaaactctttgaaaaacttcacttcagctgatgataagatcactcactcatcaatggtggtcttcaaatgaccttttattaagggtgttacggaaaggaatagagtgtgacagaaatgatgtcaacataaactgttttttatgaggtggtatttaggtagtagtcaaagcatagagctaagtggaattctccwgaaaaatgatattgttaatttgaatgagacaattggtagtagcctaaaggagttttgaaatacctaagaatgatgtggatatctaaccagaatatacaattaatttatttttaaaagtgtagccagagcattgaggacacagaatgatacacatccaagatatctttgtaatccacagagaagccatagaactaacaaaagggcaatgtgttttagaggcacgtattgcaacacagtaacataaccaactaaatatgaggattagatacctattcagcaggtatactgtaacgcacattttctaaaaatactgatgtattttccacatt

SEQ ID NO: 412287 - DNA, 367 bp, Homo sapiens
ctgcaaactgttgagcacaatttcttctccttttccataatagttagggtatagatgtccagctcttcttcattttccatccttacttgcacttaagtgtggttgtgtgacttaagttctcttcagttgaaggtgagcagaagtgatttgcaccacttctaggcctggcctataaaagcttctcacatgaacttctcccatactttatttccctctcccttcrttgataatgacagagtcatcatctgcctgggtctctgaatgactatataaagcagagctccttgatcccactcccagcccctgtcctagtacgttctcttggggctcttatgtgagaaagaaagacacacacttgtgttgtgtt

SEQ ID NO: 412288 - DNA, 482 bp, Homo sapiens
gagtatactcagcagaacttcatggactgctccaagccaatctcctgtgcactctgaggtgtagcttggtcagaactgtatcatagtaacaaacgacaaattattcatcttatgccattagatcattctctaagtaaactgtctrttgataaactccagagaaataagcatatggattcttgaagtgtttgaaagtagttaggtgtatgtaggcagaacatgattaaaccaagtttatttgttttgtcctaaaacagttttagttaatgttggtaatcttccaattgactaattattttataatatttcatttgtatgtaataggcacacagcaagtacctgttgaatgagtcagtgaatttacatttgtcatttgtggacattaaatattcatcttggaaactatataagcttaaaagactgcaaataagagagtttcatccaatacagtttgagttcccgtctggggattcccattgatg

SEQ ID NO: 412289 - DNA, 482 bp, Homo sapiens
gagtatactcagcagaacttcatggactgctccaagccaatctcctgtgcactctgaggtgtagcttggtcagaactgtatcatagtaacaaacgacaaattattcatcttatgccattagatcattctctaagtaaactgtctgttgataaactccagagaaataagcatatggattcttgaagtgtttgaaagtagttaggtgtatgtaggcagaacatgattaaaccaagtttatttgttttgtcctaaaacagttttagttaatgttggtaatcttccaattgactaattattttataatatttcatttgtatgtaataggcacacagcaagtacctgttgaatgagtcagtgaatttacatttgtcatttgtkgacattaaatattcatcttggaaactatataagcttaaaagactgcaaataagagagtttcatccaatacagtttgagttcccgtctggggattcccattgatg

SEQ ID NO: 412290 - DNA, 465 bp, Homo sapiens
atatttctacactatattatctgggcaagaatcttatggacttgcatgggattctattcaagtagctaaaaaagatgttcatggaagtattacatttggttttcccaaatggcttcaggcttatttaaaggcatcttgaagataaaagaggtagcattttctttgcttgctgggtggtcgaaaggttaaacctcaaattcccagtgtgggaaaatcccaagtactctaagtgaaatgttttgatgcttagtaaatgygtctgtgtggaaatacacacagctgaagacaagctaatagtacttccctggctgagatcaaagtttttaaaagttgctagataaagcaactgaccatttataatttttaaggcctctaattgtacaacgatagttaccagactatgggaagggtgagtgggggttggggaaatgaagacagattggttaatgagtacaaacacagtaa

SEQ ID NO: 412291 - DNA, 500 bp, Homo sapiens
tgtacaacgatagttaccagactatgggaagggtgagtgggggttggggaaatgaagacagattggttaatgagtacaaacacagtaagatagaagaaattaaattctagagttcaatagcacagtagggtgactgtaattaataataaaattcaaatatttcaaaatagctagaagagaagatttgaaatgttcttgacacaaagaaatgataaatgttcaaggggatggataacctaaataccttgatttgatcattacatactgtatgcatgtatcaaaatatcatacayaccccataaatacatacaaatattatgtatcatgataaaaaacaaaaaaaaatttaagtctctacttgtattattatagtagcttacattatagggttctttacaagtttataaagtactttcacatacatcatctcattatttgattgaaagatgacataaatgaaagtctttttctctagaggcagtatagcatagtggttcagc

SEQ ID NO: 412292 - DNA, 500 bp, Homo sapiens
tgtacaacgatagttaccagactatgggaagggtgagtgggggttggggaaatgaagacagattggttaatgagtacaaacacagtaagatagaagaaattaaattctagagttcaatagcacagtagggtgactgtaattaataataaaattcaaatatttcaaaatagctagaagagaagatttgaaatgttcttgacacaaagaaatgataaatgttcaaggggatggataacctaaataccttgatttgatcattacatactgtatgcatgtatcaaaatatcatacacaccccataaatacatacaaatattatgtatcatgwtaaaaaacaaaaaaaaatttaagtctctacttgtattattatagtagcttacattatagggttctttacaagtttataaagtactttcacatacatcatctcattatttgattgaaagatgacataaatgaaagtctttttctctagaggcagtatagcatagtggttcagc

SEQ ID NO: 412293 - DNA, 591 bp, Homo sapiens
gatcagcttaattaattagagagataaatgctgtataatttgccaaattattggcatttgttgagccacatggcctcttccctcgcctaatagaaatgttaactgattgttttcataaggaacatgggacattgaaaatgtttcagaaaatctctgttgtcacaggttgacactatggagtcttggaacccttcctgatacatttccatgagaagcaaatacaagaattatttttccttttggatcatgctcagacatgaaggtaattcaaagcatgatagatatatttttcacctagatttttaaatgacaataacatatttgggtataaaggatacaaagtcaatattatattagtttggctatttcagaaagaaccaaaaaagcctgcagtgacctccagcaataatagattttttaaatcgacagctggttaacattatcagaatgaatcatggagcagaastgacagctggattccagccagggaggccaaaagataccaaaggtaatttctgtgtttttaaaggagaatttttttttagtgcctctgacctggtgctacatacatcttaatttaaggggacaggt

SEQ ID NO: 412294 - DNA, 549 bp, Homo sapiens
aagcagtatattttgcaactagagcaaggcctccactctgcccaagaactcctggctaaatgctggaaatacctactgttctatttagagcagtttaacgttttttttaaataaggaataaactgtatctgtttttatggtcaagttaaaacaagactcctacctgtaagcttgacaggtaaagccacaccaatcttttcagctttaaaacaagaaaaaaaaaatctgtttcatgcttctcagcctagacaacacaagttatgtaggttttttcccttcagatttagtgtaaatgtccccacctgacacacgcaaaaccaaactatcaaacagaatgatgacgccgatgtgcaacacctgtactttcagggcctccaacaaaggaagacagaaatttctccatacacacctgctgggtggstggatgcctttaacctcttcttctcctgatgggtccccacaaggcagaaatggaaaagagtacttgtcagagaggcactaagaaggacaggcaaaccaaactgccctatattacaagatttaaatgtt

SEQ ID NO: 412295 - DNA, 589 bp, Homo sapiens
ttcaacataataaaagccacttataaaaaaaaactacatctaacatcataatcaatggggcacaactgaaagcttttctgctaagatctggtaaaaggcagagatattcactttcaccatttctattcattatagcaccattagtactagcaagtacagtcagacaagaaaaaaaataaaaggtatccaaataaaaagaaacaagtaaaattatctctatttgcagatgacctaattcyatatgtcagaagttaatctagctagaactaactagaaccccaaagattctaccacaaaaagtgttagaactaataaatgaattcaacagttacaaagtacaaaaataacataaaagatcagtagcatttctatacacaaataacaatctaactgaaaaaaaatcaagaaaatcatattatttatgacagtatacaaaaattgagaaataaatttaacaaaggaggtaaaataattttatactaaatactgtaaaacattgatgaaagtaatcaaagaagacacaagtaaatggaaagataccccacattcatagatggaacagattaatatttttaaaatgtccatacta

SEQ ID NO: 412296 - DNA, 483 bp, Homo sapiens
ttcactttcaccatttctattcattatagcaccattagtactagcaagtacagtcagacaagaaaaaaaataaaaggtatccaaataaaaagaaacaagtaaaattatctctatttgcagatgacctaattccatatgtcagaagttaatctagctagaactaactagaaccccaaagattctaccacaaaaagtgttagaactaataaatgaattcaacagttacaaagtacaaaaataacataaaagatcagtagcatttctatacacaaataacaatctaactgaaaaaaaatcaagaaaatcatattatttatgacagtatacaaaaattgagaaataaatttaacaaaggaggtaaaataattttatactaaatactgtaaaacattgatgaaagtaatcaaagaagacacaagtaaatggaaagataccccacattcatagatggracagattaatatttttaaaatgtccatacta

SEQ ID NO: 412297 - DNA, 598 bp, Homo sapiens
attatttgtataagatagcagcttatccgtactgaatgaaaggtatatattttaaaattaaagcctgctgcgaaagaataaatgtggcataccaatgttgtcctgttcattaatccacaaatactgcacagggaaattgcttgagtccagaaagtaacctttcacctatttcaaacccatgtattatgtgcagcccctgagttagacttaggtgtggaaggatgagcaaaacagacaagctctttccctaagtctcttatctcacaatatacaagataaccaatttaaagcgtcaggagcagaagacagtggatttgaattgttttgccgttcacttccttttgcatttgtgacagggctaatcagagtgcgcatgtcccttagccagtgtttcctatggccatttctgtaccccatttgaggagtcagaagtagtataaataattgctcctttctctgggcactgttgaatgagtacattcaatttgtttttgtgacctcartttttctgtggttctcactaaccatccactgcttttgacatttgatttctatatagattttaatgccacttgtcaggcaggatagtaatatgaag

SEQ ID NO: 412298 - DNA, 598 bp, Homo sapiens
attatttgtataagatagcagcttatccgtactgaatgaaaggtatatattttaaaattaaagcctgctgcgaaagaataaatgtggcataccaatgttgtcctgttcattaatccacaaatactgcacagggaaattgcttgagtccagaaagtaacctttcacctatttcaaacccatgtattatgtgcagcccctgagttagacttaggtgtggaaggatgagcaaaacagacaagctctttccctaagtctcttatctcacaatatacaagataaccaatttaaagcgtcaggagcagaagacagtggatttgaattgttttgccgttcacttccttttgcatttgtgacagggctaatcagagtgcgcatgtcccttagccagtgtttcctatggccatttctgtaccccatttgaggagtcagaagtagtataaataattgctcctttctctgggcactgttgaatgagtacattcaatttgtttttgtgacctcagtttttctgtggttctcactaacyatccactgcttttgacatttgatttctatatagattttaatgccacttgtcaggcaggatagtaatatgaag

SEQ ID NO: 412299 - DNA, 557 bp, Homo sapiens
taagaactggtaaaaattcatatgctattgttattgtcattatctggttcttctgaagagtgactgttctgaattctctctaggtcaaatactaacaatgacttgggaatagtatttcatcacttttaccacagtttactcatctataggaagaaaagtcttactaartgatttttgcagagtttctagctctagacttctataatattaaaaaaactcttgacatatatctattcgtatttaatgtacacacaccacggtttgtggtgtgtgtgttggttgagagggctatgtttgtatgtatgtgtttgtgtctgtgtgcgtatataaatactgtttttgctttttaagtaaattgttatttctgagaattcaagtattgtacacgaaatgtgacatctactagaaaattacagtgacaatctaagtgttaatatctaaaatatagcttaatagactttgctaagacactttaattcaataatgtcctttcttcccaataataccccaaactatcaattctggattttttttcacttttttggccttaaacatat

SEQ ID NO: 412300 - DNA, 525 bp, Homo sapiens
ataatgctgacgtaaatactaggaaatagtacctggttcttctaggagggrgacataatttatcattgtaaaggtaagtcctgaataccatgaaactgtaccttttatatttataattaaagctattattacatgtggatttatggtgtgaatatcattaggcaatacagctatcaatgtggtattattatcaaatatggctatgataataatattatcattattatgatctgcatagtgctggttaatccataaagcagtttccatatgctagctgaattttttctcaaaacaaacctgtgagaaaagtagggcaggtatttccataactatttaacaaatgaaaaacgagttacatattagaagaaaaaataacctcaaaactaggatttttgtttctgaatcccaagcactttttaactaggctaaccccatgccatatctgttcaagtgtgaattaggtgatgcctttatactggcagtgcataaaccagttaatctctttataagttggcagcttattag

SEQ ID NO: 412301 - DNA, 525 bp, Homo sapiens
ataatgctgacgtaaatactaggaaatagtacctggttcttctaggagggagacataatttatcattgtaaaggtaagtcctgaataccatgaaactgtaccttttatatttataattaaagctattattacatgtggatttatggtgtgaatatcrttaggcaatacagctatcaatgtggtattattatcaaatatggctatgataataatattatcattattatgatctgcatagtgctggttaatccataaagcagtttccatatgctagctgaattttttctcaaaacaaacctgtgagaaaagtagggcaggtatttccataactatttaacaaatgaaaaacgagttacatattagaagaaaaaataacctcaaaactaggatttttgtttctgaatcccaagcactttttaactaggctaaccccatgccatatctgttcaagtgtgaattaggtgatgcctttatactggcagtgcataaaccagttaatctctttataagttggcagcttattag

SEQ ID NO: 412302 - DNA, 525 bp, Homo sapiens
ataatgctgacgtaaatactaggaaatagtacctggttcttctaggagggagacataatttatcattgtaaaggtaagtcctgaataccatgaaactgtaccttttatatttataattaaagctattattacatgtggatttatggtgtgaatatcattaggcaatacagctatcaatgtggtattattatcaaatatggctatgataataatattatcattattatgatctgcatagtgctggttaatccataaagcagtttccatatgctagctgaattttttctcaaaacaaacctgtgagaaaagtagggcaggtatttccataactatttaacaaatgaaaaaygagttacatattagaagaaaaaataacctcaaaactaggatttttgtttctgaatcccaagcactttttaactaggctaaccccatgccatatctgttcaagtgtgaattaggtgatgcctttatactggcagtgcataaaccagttaatctctttataagttggcagcttattag

SEQ ID NO: 412303 - DNA, 525 bp, Homo sapiens
ataatgctgacgtaaatactaggaaatagtacctggttcttctaggagggagacataatttatcattgtaaaggtaagtcctgaataccatgaaactgtaccttttatatttataattaaagctattattacatgtggatttatggtgtgaatatcattaggcaatacagctatcaatgtggtattattatcaaatatggctatgataataatattatcattattatgatctgcatagtgctggttaatccataaagcagtttccatatgctagctgaattttttctcaaaacaaacctgtgagaaaagtagggcaggtatttccataactatttaacaaatgaaaaacgagttacatattagaagaaaaaataacctcaaaactaggatttttgtttctgaatcccaagcactttttaactaggctaaccccatgccatatctgttcaagtgtgaattaggtgatgcctttatactkgcagtgcataaaccagttaatctctttataagttggcagcttattag

SEQ ID NO: 412304 - DNA, 509 bp, Homo sapiens
gtttaggtagcctaaaatgcattgtcattacatttgtctggaaggcaaagcctgggctggagatctaggcgggatctggcacatcatcaccacctttcctggtaagttattatctttctgttttcttccrtttgctttcatgactgggctgctagcgtgttgatgttacttatccaatgcatcctcaaaggatttctgtagcctgcttgagagagaattttgacctatgctacgaagtactgtagaaaggtttcacagcaaatagactgttctaaggcatatgattcaatcccacaaccgtgaaccttcttccatgatgagaagtactaagtcctcaagaattaatcattctccttgtacatttttaacagactaaagtttcacctttatgaactccatttattatgttactcactgactgttctctgttgttgacacatgatttctatacagattttaatgctaccttttagagagagaagtagtggaaggagaatgggctttggatt

SEQ ID NO: 412305 - DNA, 509 bp, Homo sapiens
gtttaggtagcctaaaatgcattgtcattacatttgtctggaaggcaaagcctgggctggagatctaggcgggatctggcacatcatcaccacctttcctggtaagttattatctttctgttttcttccgtttgctttcatgactgggctgctagcgtgttgatgttacttatccaatgcatcctcaaaggatttctgtagcctgcttgagagagaattttgacctatgctacgaagtactgtagaaaggtttcacagcaaatrgactgttctaaggcatatgattcaatcccacaaccgtgaaccttcttccatgatgagaagtactaagtcctcaagaattaatcattctccttgtacatttttaacagactaaagtttcacctttatgaactccatttattatgttactcactgactgttctctgttgttgacacatgatttctatacagattttaatgctaccttttagagagagaagtagtggaaggagaatgggctttggatt

SEQ ID NO: 412306 - DNA, 647 bp, Homo sapiens
gttctactggtattctttaaactgtttctgaagtgagaatccctctgtctggtttggcttctgactccaagwcatcacacactgtagagaaatttttcacttatcatcacataacaaactgaatgttagagtaggggttgagcctctgcagatattctcaaaactgttagcccacgtgagccctaaacctgcaattttggttaacctaaaaactggaggttatgaaaagatgatgatgggctgtgtgtgtgtatgtgtgtaccaggcagtaattgataataacctaattaatctaagcatcttaattccttgtgtcacatgtctattcaaaacctcataaaatcaaattatataatgtcaggtttgaaaggtagctaaagttacaggggctaagcaatcaccttgtgctgggtgttcttatctaataataagtcccttacatacaaaagggaatgccattttttttcttcctaacctttgggcccttctatatgcctgcctcattaacttttcagttgtgtttctgctgaaactcccctggtactgccaatctgctcctctaaaacattaagctgctctcccttctggaatagccctgtttctctcttctcttccaaacctgccccattccttttgtgcttccagac

SEQ ID NO: 412307 - DNA, 647 bp, Homo sapiens
gttctactggtattctttaaactgtttctgaagtgagaatccctctgtctggtttggcttctgactccaagacatyacacactgtagagaaatttttcacttatcatcacataacaaactgaatgttagagtaggggttgagcctctgcagatattctcaaaactgttagcccacgtgagccctaaacctgcaattttggttaacctaaaaactggaggttatgaaaagatgatgatgggctgtgtgtgtgtatgtgtgtaccaggcagtaattgataataacctaattaatctaagcatcttaattccttgtgtcacatgtctattcaaaacctcataaaatcaaattatataatgtcaggtttgaaaggtagctaaagttacaggggctaagcaatcaccttgtgctgggtgttcttatctaataataagtcccttacatacaaaagggaatgccattttttttcttcctaacctttgggcccttctatatgcctgcctcattaacttttcagttgtgtttctgctgaaactcccctggtactgccaatctgctcctctaaaacattaagctgctctcccttctggaatagccctgtttctctcttctcttccaaacctgccccattccttttgtgcttccagac

SEQ ID NO: 412308 - DNA, 606 bp, Homo sapiens
ttcattaaacctctttttctttataaattacccagtctcaggtatttcttcatatcagtatgaaaatggactaatacaatacttgtattaaaagatcatcttgtgtaccataaatatgtacaatttttgtcatttaaaattaaaagaagcagcatagaaatggcattattgtgcaactattgaggactttatctgagaaaagcaaaattatgaggagagatttttattctttgccttcactacctttgatcatctagaatcactgaggacagtaatctgctgttactgaaattctaacagtaaacagattcgaatgggttctgacccagatctcgtgaagacaataaattccttcagttattttctctggcaatatccaaaacaagtatatctggtgtatttgtggcaacacagtagaaaacaccaaacaaaagctttgaaaatagatgggaggagtataaattcaaaactactttagtagtatcaggcaggtttattcatgtttttaaaactgtastttccttatttccaaaaagggagtaaataaaccctgctcccagtgttattgtaaagattcagtaagttgcacaaaatacctgacataat

SEQ ID NO: 412309 - DNA, 637 bp, Homo sapiens
ctagttgtctagtctcctgaattttattctgatccttttcaatctagtgagaccactgtgatctttttgggatccttttccatgaaccagagtctaacaagtaatcataaggttctcttaattttagttttctttcccccaaagtcacagttytgccttgattgttcaatttttaaaaactattatttcatttattttgtccaattttctaatagttcatgatcgagggtaaaactggtcttagctagtttattattgccagaagcagacgttccctgtagcttttctgattgtatcatttttattttgtcagaacatatagcattcatatattatacttgcatcctcattcccagctttattttcttagatctataattaaatttattaaatgctttccacttagctttttgcccaagtttctttatctttttttgtttgagtattttctcatcaactccacaaagggattgtgagtatagcattccttggatcttgcacttttaaacatattttaatagcattgatatttgaaggacaatttgaatggataaaattttttggtatgtgttttctgagtgttttgaaaatgcactacattgtatgattattttgagaagtctgatgctgaattaag

SEQ ID NO: 412310 - DNA, 670 bp, Homo sapiens
ttaatgttcattggcaacatgtatgtccttttttgagaagcatctgttcatatcgcttgtctatttttaatggggttatttgactttttcttgtaaatttgtttaagttcctgatagattctggatattagaccgttgtcaaatgcacagtttgcaaatattttctcccattctgtaggttgtctgtttactctgttgatagtttcttttgctgtgcagaagctctttagtttaattatgtcccacttaatcaatttttgttttgttgcaattgctttcaagtgcttagtcataaattcttttacaaggccagtgtccrgaatggcgtttgcttcaaggtttcttatagttggaggtcttacattttattttttcaaagatcctccattgcaacaggattttcaaattaattaatacacactgtatttataacattttctcattctaaaaattatatctttatatgtcattctactgcttgtattgctcacaatttaacacatttctattttttctttttattttaaatgagctaactaaaatttcatttactgttaattttttacgaattcacctgagttaaattttttgttttctaatatctgcttttggttcatttgacaaatatttatttaaggtacttttaaaatcttcagcactgttgaagaaa

SEQ ID NO: 412311 - DNA, 554 bp, Homo sapiens
tatatctgagcaataaagacagagacattgagattcttcctgccaattttatgaagaagcagaaaattatgcccttagtgtgtgccagaaaactcagaaattgtcctcttgacattacctaaacaatcacaccacccttttctctgctaacgttactttgcaataaaactgtaaataaaaaggtcaaaatcttgaaaactgggcattttgctttctaaaattcaggaccatgtagacaaataacgtttatattcagaaggaattctagcattctggtactctccatttaaataaattaactcatatatggaatgkcatccgggtgtaaatcaaaaaagttgtgaagatcaggaaatataatcttatatttttattggccacttataaattattctatagttctttttgagaaaaaatacatatagtttatttggaatatgattcaaatttccaaggaattctgtgtgatacacatagtttctattttatctctttctctcttttttttttttcacacctcggctggcagaaaaattccctattttaaaataaga

SEQ ID NO: 412312 - DNA, 554 bp, Homo sapiens
tatatctgagcaataaagacagagacattgagattcttcctgccaattttatgaagaagcagaaaattatgcccttagtgtgtgccagaaaactcagaaattgtcctcttgacattacctaaacaatcacaccacccttttctctgctaacgttactttgcaataaaactgtaaataaaaaggtcaaaatcttgaaaactgggcattttgctttctaaaattcaggaccatgtagacaaataacgtttatattcagaaggaattctagcattctggtactctccatttaaataaattaactcatatatggaatggcatccgggtgtaaatcaaaaaagttgtgaagatcaggaaatataatcttatatttttattggccacttataaattattctatagttctttttgagaaaaaatacatatagtttatttggaatatgattcaaatttccaaggaattctgtgtgatamacatagtttctattttatctctttctctcttttttttttttcacacctcggctggcagaaaaattccctattttaaaataaga

SEQ ID NO: 412313 - DNA, 562 bp, Homo sapiens
atccacagaccctttgaaggaggcagattgctgttgcaggcccctggaaatagcaaaaaaaaaaaaaaaaaaaactgagtgtccaaagtgtgaaactgtgaaaggggaggatcatccacccccaaacacacaccctcactagggaacctgaaggtccatatcacagaaggatttgaccttacctggagctgagacaaatttagagagccgagcaaaacacaacggtaaaagaaacagtgggaagagccctgtgggcactctttgtcccctggaaaaccatttctgactttgtcttacaggggttcttgaggagggctgcagaggaactaggaaaagatcacagggagaaggaaacttccagatgatctytgtaacaatttcaaccaagcgctaagttttctggacagaacctgaggcaggaggtgaattggaagtgcagacatagcacagaagctgcagcaggcagggaggtgcaaaacctgaaagccctgcttactttctccccccgcctcccctccccaaggctggtagcctggggcaagttctcagcccttctcaccca

SEQ ID NO: 412314 - DNA, 561 bp, Homo sapiens
gaacttttgctccaagaactaccacaggaacataccgggaaagccaagaggatccacagaccctttgaaggaggcagattgctgttgcaggcccctggaaatagcaaaaaaaaaaaaaaaaaaaactgagtgtccaaagtgtgaaactgtgaaaggggaggatcatccacccccaaacacacaccctcactagggaacctgaaggtccatatcacagaaggatttgaccttacctggagctgagacaaatttagagagccgagcaaaacacaacggtaaaagaaacagtgggaagagccctgtgggcactctttgtcccctggaaaaccatttctgactttgtcttacaggggttcttgaggagggctgcagaggaactaggaaaagatcacagggagaaggaaacttccagatgatctctgtaacaatttcaaccaagcgstaagttttctggacagaacctgaggcaggaggtgaattggaagtgcagacatagcacagaagctgcagcaggcagggaggtgcaaaacctgaaagccctgcttactttctccccccgcc

SEQ ID NO: 412315 - DNA, 563 bp, Homo sapiens
aatcagcatcttggaccctcaccttcacacccctatgtacttctttctggggaacctctccttcttggacatctgctacaccaccacctctattccctccacgctagtgagcttcctttcagaaagaaagaccatttccctttctggctgtgcagtrcagatgttcctcggcttggccatggggacaacagagtgtgtgcttctgggcatgatggcctttgaccgctatgtggctatctgcaaccctctgagatatcccatcatcatgagtaaggatgcctatgtacccatggcagctgggtcctggatcataggagctgtcaattctgcagtacaatcagtgtttgtggtacaattgcctttctgcaggaataacatcatcaatcatttcacctgtgaaattctggctgtcatgaaactggcctgtgctgacatctcagacaatgagttcatcatgcttgtggccacaacattgttcatattgacacctttgttattaatcattgtctcttacacgttaatcattgtgagcatcttcaaaattagctcttccgaggggagaa

SEQ ID NO: 412316 - DNA, 563 bp, Homo sapiens
aatcagcatcttggaccctcaccttcacacccctatgtacttctttctggggaacctctccttcttggacatctgctacaccaccacctctattccctccacgctagtgagcttcctttcagaaagaaagaccatttccctttctggctgtgcagtgcagatgttcctcggcttggccatggggacaacagagtgtgtgcttctgggcatgatggcctttgaccgctatgtggctatctgcaaccctctgagatatcccatcatcatgagtaaggatgcctatgtacccatggcagctgggtcctggatcataggagctgtcaattctgcagtacaawcagtgtttgtggtacaattgcctttctgcaggaataacatcatcaatcatttcacctgtgaaattctggctgtcatgaaactggcctgtgctgacatctcagacaatgagttcatcatgcttgtggccacaacattgttcatattgacacctttgttattaatcattgtctcttacacgttaatcattgtgagcatcttcaaaattagctcttccgaggggagaa

SEQ ID NO: 412317 - DNA, 613 bp, Homo sapiens
aactaaagcaagaagaaatttaaaaacacacatttctcctcacaggagaatattaggacagtttttctctcacaggttgtagaatcaagatctgaagaaaatamaggcatgttacctgtcttgatatatttatgtgttcaaatttgctgggcaaaatacacaatcattataatactgacataatgctttattttaatatttgggcctctagaggagttttcattcagaaaatttatttcaaaagcttaaggaggatgattttgttgttagcaacctgtttttttctaatttggagacaaggtaagataaacttatctgatataccaggcatgtatctgtgtgcatgtgtgagtgtgtgtgtgtgttcagtttgtgtatgtgtagtgtgtgcatgttcctggtgatttttctaccagatagcaaaatctacaaaggtaagtatttctctatattcttaccatctttactcccattgcactcaatttagagcatgacatttataatatgattcaatatacatttatatccatgaataggaaaattatatggaaggaggtgcaactggagcgaagcacatacttttatatcccgctgaagtcccaagacaggttca

SEQ ID NO: 412318 - DNA, 613 bp, Homo sapiens
aactaaagcaagaagaaatttaaaaacacacatttctcctcacaggagaatattaggacagtttttctctcacaggttgtagaatcaagatctgaagaaaatacaggcatgttacctgtcttgatatatttatgtgttcaaatttgctgggcaaaatacacaatcattataatactgacataatgctttattttaatatttgggcctctagaggagttttcattcagaaaatttatttcaaaagcttaaggaggatgattttgttgttagcaacctgtttttttctaatttggagacaargtaagataaacttatctgatataccaggcatgtatctgtgtgcatgtgtgagtgtgtgtgtgtgttcagtttgtgtatgtgtagtgtgtgcatgttcctggtgatttttctaccagatagcaaaatctacaaaggtaagtatttctctatattcttaccatctttactcccattgcactcaatttagagcatgacatttataatatgattcaatatacatttatatccatgaataggaaaattatatggaaggaggtgcaactggagcgaagcacatacttttatatcccgctgaagtcccaagacaggttca

SEQ ID NO: 412319 - DNA, 613 bp, Homo sapiens
aactaaagcaagaagaaatttaaaaacacacatttctcctcacaggagaatattaggacagtttttctctcacaggttgtagaatcaagatctgaagaaaatacaggcatgttacctgtcttgatatatttatgtgttcaaatttgctgggcaaaatacacaatcattataatactgacataatgctttattttaatatttgggcctctagaggagttttcattcagaaaatttatttcaaaagcttaaggaggatgattttgttgttagcaacctgtttttttctaatttggagacaaggtaagataaacttatctgatataccaggcatgtatctgtgtgcatgtgtgagtgtgtgtgtgtgttcagtttgtgtatgtgtagtgtgtgcatgttcctggtgatttttctaccagatagcaaaatctacaaaggtaagtatttctctatattcttaccatctttactcccattgcactcaatttagagcrtgacatttataatatgattcaatatacatttatatccatgaataggaaaattatatggaaggaggtgcaactggagcgaagcacatacttttatatcccgctgaagtcccaagacaggttca

SEQ ID NO: 412320 - DNA, 562 bp, Homo sapiens
atgtttacttttccacattgcttgtcatgacatctaacaccagtatttcttggcagcatatctataatgaccaaagaaactattacctgcttctcaactttcatagcaagtatataaaatttccggaaaataacttaaaaaagaaaattaatttaattatttataaaagaaccttgacaccatcacatgttgtgtccaaaaatgatgcttaatcacaattgataggaattaaatcttaaattaggggaatacctgacattaattgagatatgagaaggggaggaatttgatattagctctaatcttccagaaaagactataaaaaatagatttttttttttttagtaaagataacactcactttacaaaaacaggggctcctaatttatggtgtgtaagtaaaattttatctttgaaattatgaaattttttatgctgtttttggatgacaaatacctttaatttatttatatatctaaaattccaaaggaaatatgtgcttattgtaaaatagtcaaatacaaygaaatgtgcaaactagagaattataggtcatgttttc

SEQ ID NO: 412321 - DNA, 543 bp, Homo sapiens
tttgagtattaagagctcgaattctgaagccatactgcttgggtttaagtccttgctctttcatttatctgtctttatgaaattgaccttaagcaaattacttaacttttctgtgccttattttcccctctacacaataggcttggtgatactaagagtaacagtattacctcataggcttgcttttcagactccattatgtaatgcacagagaaaacaaataatagaggrttggcgcagagtaagaaatatagcaattgttttgcctttgattttgtctgtgcatccaacaaatgtttttgaacatttacctcggtgtctgttctattctagctacaggggctgtggaaataagcaagaataagtacctgcccttatgaagtttacattctactgggaaagacagacaatatacgtaacatagtataatttcaaggagtgacaagagcattgatctattgtgtggtgatttatagccaataaaatagtttagtgttcagttttacataatacaatgctcatttctattataaccttcagttt

SEQ ID NO: 412322 - DNA, 543 bp, Homo sapiens
tttgagtattaagagctcgaattctgaagccatactgcttgggtttaagtccttgctctttcatttatctgtctttatgaaattgaccttaagcaaattacttaacttttctgtgccttattttcccctctacacaataggcttggtgatactaagagtaacagtattacctcataggcttgcttttcagactccattatgtaatgcacagagaaaacaaataatagagggttggcgcagagtaagaaatatagcaattgttttgcctttgattttgtctgtgcatccaacaaatgtttttgaacatttacctcggtgtctgttctattctagctacaggggctgtggaaataagcaagaataagtacctgcccttatgaagtttacattctactgggaaakacagacaatatacgtaacatagtataatttcaaggagtgacaagagcattgatctattgtgtggtgatttatagccaataaaatagtttagtgttcagttttacataatacaatgctcatttctattataaccttcagttt

SEQ ID NO: 412323 - DNA, 630 bp, Homo sapiens
tgtgtggtgatttatagccaataaaatagtttagtgttcagttttacataatacaatgctcatttctattataaccttcagtttactatgtgatgacaaatatgacaaaaagttcagacttcaacaggaatatttmggtttgaatcttagctctgctatatagtatgtacctttggtcaagtttacttaacatatccgctttgatttattcatctgtaaaatatggatactaatacccctttcctagaactgtgatgatattaaatgaattaagtggctgtagcatgaaacatgttacttttatctttccttccttctctccattcattcattcattcattcattcccttccctctctccattcataattccctcttttctgtagacttttctttatgctctctcttctttctttggtcttttcccattttatttttctttttccttgggaattatggcacatattcattgacacatgcttgaaagtaatcagagtaagataaatatttgtcttaacatgctctgtcttacaagctaaagagggagtaaaatggaatgggaaaaccacaccattctggtggaattttttctgaagggactttctggtcacccaagacttgagttactctt

SEQ ID NO: 412324 - DNA, 630 bp, Homo sapiens
tgtgtggtgatttatagccaataaaatagtttagtgttcagttttacataatacaatgctcatttctattataaccttcagtttactatgtgatgacaaatatgacaaaaagttcagacttcaacaggaatatttcggtttgaatcttagctctgctatatagtatgtacctttggtcaagtttacttaacatatccgctttgatttattcatctgtaaaatatggatactaatacccctttcctagaactgtgatgatattaaatgaattaagtggctgtagcatgaaacatgttacttttatctttccttccttctctccattcattcattcattcattcattcccttccctctctccattcataattccctcttttctgtagacttttctttatgctctctcttctttctttggtcttttcccattttatttttctttttccttgggaattatggcacatattcattgacacatgcttgaaagtaatcagagtaagataaatatttgtcttaacatgctctgtcttacaagctaaagagggagtaaaatggaatgggaaaaccacaccattctggtggaattttttctgaagggactttytggtcacccaagacttgagttactctt

SEQ ID NO: 412325 - DNA, 568 bp, Homo sapiens
gggcgtgatggcctttgaccgctatgtggctatctgcarccctctgagatatcccatcatcatgagtaaggatgcctatgtacccatggcagctgggtcctggatcataggagctgtcaattctgcagtacaaacagtgtttgtggtacaattgcctttctgcaggaataacatcatcaatcatttcacctgtgaaattctagctgtcatgaaactggcctgtgctgacatctcaggcaatgagttcatcctgcttgtgaccacaacattgttcctattgacacctttgttattaattattgtctcttacacgttaatcattttgagcatcttcaaaattagctcttcggaggggagaagcaaaccttcctctacctgctcagctcgtctgactgtggtgataacattctgtgggaccatcttcctcatgtacatgaagcccaagtctcaagagacacttaattcagatgacttggatgccactgacaaacttatattcatattctacagggtgatgactcccatgatgaatcctttaatctacagtcttagaaacaaggatgtgaag

SEQ ID NO: 412326 - DNA, 601 bp, Homo sapiens
gatgcctatgtacccatggcagctgggtcctggatcataggagctgtcaattctgcagtacaaacagtgtttgtggtacaattgcctttctgcaggaataacatcatcaatcatttcacctgtgaaattctagctgtcatgaaactggcctrtgctgacatctcaggcaatgagttcatcctgcttgtgaccacaacattgttcctattgacacctttgttattaattattgtctcttacacgttaatcattttgagcatcttcaaaattagctcttcggaggggagaagcaaaccttcctctacctgctcagctcgtctgactgtggtgataacattctgtgggaccatcttcctcatgtacatgaagcccaagtctcaagagacacttaattcagatgacttggatgccactgacaaacttatattcatattctacagggtgatgactcccatgatgaatcctttaatctacagtcttagaaacaaggatgtgaaggaggcagtaaaacacctactgagaagaaaaaattttaacaagtaaatgagaaaggtgagagtaattttataatcacaatatggaaatcaattagagaaaccaa

SEQ ID NO: 412327 - DNA, 601 bp, Homo sapiens
gatgcctatgtacccatggcagctgggtcctggatcataggagctgtcaattctgcagtacaaacagtgtttgtggtacaattgcctttctgcaggaataacatcatcaatcatttcacctgtgaaattctagctgtcatgaaactggcctgtgctgacatctcaggcaatgagttcatcctgcttgtgaccacaacattgttcctattgacacctttgttattaattattgtctcttacacgttaatcattttgagcatcttcaaaattagctcttcggaggggagaagcaaaccttcctctacctgctcagctcgtctgactgtggtgataacattctgtgggaccatcttcctcaygtacatgaagcccaagtctcaagagacacttaattcagatgacttggatgccactgacaaacttatattcatattctacagggtgatgactcccatgatgaatcctttaatctacagtcttagaaacaaggatgtgaaggaggcagtaaaacacctactgagaagaaaaaattttaacaagtaaatgagaaaggtgagagtaattttataatcacaatatggaaatcaattagagaaaccaa

SEQ ID NO: 412328 - DNA, 601 bp, Homo sapiens
gatgcctatgtacccatggcagctgggtcctggatcataggagctgtcaattctgcagtacaaacagtgtttgtggtacaattgcctttctgcaggaataacatcatcaatcatttcacctgtgaaattctagctgtcatgaaactggcctgtgctgacatctcaggcaatgagttcatcctgcttgtgaccacaacattgttcctattgacacctttgttattaattattgtctcttacacgttaatcattttgagcatcttcaaaattagctcttcggaggggagaagcaaaccttcctctacctgctcagctcgtctgactgtggtgataacattctgtgggaccatcttcctcatgtacatgaagcccaagtctcaagagacacttaattcagatgacttggatgccactgacaaacttatattcrtattctacagggtgatgactcccatgatgaatcctttaatctacagtcttagaaacaaggatgtgaaggaggcagtaaaacacctactgagaagaaaaaattttaacaagtaaatgagaaaggtgagagtaattttataatcacaatatggaaatcaattagagaaaccaa

SEQ ID NO: 412329 - DNA, 601 bp, Homo sapiens
gatgcctatgtacccatggcagctgggtcctggatcataggagctgtcaattctgcagtacaaacagtgtttgtggtacaattgcctttctgcaggaataacatcatcaatcatttcacctgtgaaattctagctgtcatgaaactggcctgtgctgacatctcaggcaatgagttcatcctgcttgtgaccacaacattgttcctattgacacctttgttattaattattgtctcttacacgttaatcattttgagcatcttcaaaattagctcttcggaggggagaagcaaaccttcctctacctgctcagctcgtctgactgtggtgataacattctgtgggaccatcttcctcatgtacatgaagcccaagtctcaagagacacttaattcagatgacttggatgccactgacaaacttatattcatattctacagggtgatgactcccaygatgaatcctttaatctacagtcttagaaacaaggatgtgaaggaggcagtaaaacacctactgagaagaaaaaattttaacaagtaaatgagaaaggtgagagtaattttataatcacaatatggaaatcaattagagaaaccaa

SEQ ID NO: 412330 - DNA, 631 bp, Homo sapiens
gagggttcaaaacaaaacaactctacattttttgctggaacatgttagctctcttattagaaaattatgtttattggcttgtattttgtgagatgaggggtatatagtgatgagtctattttgagcttgtacaccttggcctataacttattgttaacattaaaatgtaatgggataatatctatagacaaatagaaaatttcaaataatcccttattccccatcattgctagggattcgacagttctcttaaaattgcctcatagctatacatttgcacatatacttctttttgttctatggatttgtatatgccattgctttataagacatccttgatatactttttgcaattagccttttcaggctcttacagacagcctctattatactaaaagctacgtaaaatgaaatctttaaaaatgagatgttattctcggtccctaaatactggggtagtttgaagatgtcaggatgtgttgtctgccatgattctgaaaagactaacattaaaagccatagttttcattctccacyggcctggggaaactgatgttctgttatctatgaaaacctgggggaaaatatattatttaatattatcttgagttatcatagccatgaactacct

SEQ ID NO: 412331 - DNA, 545 bp, Homo sapiens
aaaagctacgtaaaatgaaatctttaaaaatgagatgttattctcggtccctaaatactggggtagtttgaagatgtcaggatgtgttgtctgccatgattctgaaaagactaacattaaaagccatagttttcattctccactggcctggggaaactgatgttctgttatctatgaaaacctgggggaaaatatattatttaatattatcttgagttatcatagccatgaactaccttgagttctaaagattaagtctccagsgtttccatatatagttcattaagtgtcttctttatgtgaagacactttgttgctcagaccaatgtcatggaaatttggaggttctggggaaattctggaggccatgccctgcatacagaatgaatgctgatctaaggtaaactagagctacaaggaactaaagtcatgtgccatttaacaacgttttgatcaatgacagataacatataatggtggtctcaggagattataattttatatttttactgtgacttttcttgttattttagatacacaaatac

SEQ ID NO: 412332 - DNA, 545 bp, Homo sapiens
aaaagctacgtaaaatgaaatctttaaaaatgagatgttattctcggtccctaaatactggggtagtttgaagatgtcaggatgtgttgtctgccatgattctgaaaagactaacattaaaagccatagttttcattctccactggcctggggaaactgatgttctgttatctatgaaaacctgggggaaaatatattatttaatattatcttgagttatcatagccatgaactaccttgagttctaaagattaagtctccagggtttccatatatagttcattaagtgtcttctttatgtgaagacactttgttgctcagaccaatgtcatggaaatttggaggttctggggaaattctggaggccatgccctgcatacagaatgaatgctgatstaaggtaaactagagctacaaggaactaaagtcatgtgccatttaacaacgttttgatcaatgacagataacatataatggtggtctcaggagattataattttatatttttactgtgacttttcttgttattttagatacacaaatac

SEQ ID NO: 412333 - DNA, 560 bp, Homo sapiens
tctcaggagattataattttatatttttactgtgacttttcttgttattttagatacacaaataccattgtgacacaattgcctatagtgttcagtacagtagcatgctgtacagctttgtagcctaggagcaataggctatgctatgtagcctcagtgtataataggctatatcatctaggtttgcataaatataccctgtgatgtttacaacataataagatttgwcaattatgcatttctcagactgtacccctgtttttatgactgtaatattttttcatgctgaaatctccatgagtctaaagaacattactctctgtaatactctttaaatttgcagacatgtagatttgtgtctagttttcctagaccccatggaaaatgttggtcagaaacatacagtttttaaagtatttagctgctgttacattttggcagaatatttaataaatagatccatacttattaaaaaaagaggtatgctcagtttttaatgtttggatccagttagaagggatgtcagcttattgttaataacactgactcaattagtatag

SEQ ID NO: 412334 - DNA, 560 bp, Homo sapiens
tctcaggagattataattttatatttttactgtgacttttcttgttattttagatacacaaataccattgtgacacaattgcctatagtgttcagtacagtagcatgctgtacagctttgtagcctaggagcaataggctatgctatgtagcctcagtgtataataggctatatcatctaggtttgcataaatataccctgtgatgtttacaacataataagatttgacaattatgcatttctcagactgtacccctgtttttatgactgtaatattttttcatgctgaaatctccatgagtctaaagaacattactctctgtaatactctttaaatttgcagacatgtagatttgtgtctagttttcctagaccccatggaaaatgttggtcagaaacatacartttttaaagtatttagctgctgttacattttggcagaatatttaataaatagatccatacttattaaaaaaagaggtatgctcagtttttaatgtttggatccagttagaagggatgtcagcttattgttaataacactgactcaattagtatag

SEQ ID NO: 412335 - DNA, 641 bp, Homo sapiens
acattttggcagaatatttaataaatagatccatacttattaaaaaaagaggtatgctcagtttttaatgtttggatccagttagaagggatgtcagcttattgttaataacactgactcaattagtatagataaccttttcatcttctcaaaaaaaagaaagctttatcctcaagtatattttttcaccttaagttttcaaatgcttcgtgatatgagttccaattactgggttccaggcagaatgtaagttggaacataaaatattcaggacaattgaccctggtctgtgctaaaataggtgaagctttccactgaggtttgggcctccatctcttagtctcccaggcacaagaaatcctgtctcagaatctactcatactgcagttacgttggccacatcaagatctaccaagagactctattataatgatgttttccacaatttactttgatatttgtaatttcctttatatttattatacaccagatwgtgtccaggtgtttttttacttatttgcatttcttctgtgctgccttactaatatcattagaaaaatgttttataggattcctgggagctcatttatacacttcgtatgaaattggctttacatttgctataatattttggtgctaaa

SEQ ID NO: 412336 - DNA, 641 bp, Homo sapiens
acattttggcagaatatttaataaatagatccatacttattaaaaaaagaggtatgctcagtttttaatgtttggatccagttagaagggatgtcagcttattgttaataacactgactcaattagtatagataaccttttcatcttctcaaaaaaaagaaagctttatcctcaagtatattttttcaccttaagttttcaaatgcttcgtgatatgagttccaattactgggttccaggcagaatgtaagttggaacataaaatattcaggacaattgaccctggtctgtgctaaaataggtgaagctttccactgaggtttgggcctccatctcttagtctcccaggcacaagaaatcctgtctcagaatctactcatactgcagttacgttggccacatcaagatctaccaagagactctattataatgatgttttccacaatttactttgatatttgtaatttcctttatatttattatacaccagatagygtccaggtgtttttttacttatttgcatttcttctgtgctgccttactaatatcattagaaaaatgttttataggattcctgggagctcatttatacacttcgtatgaaattggctttacatttgctataatattttggtgctaaa

SEQ ID NO: 412337 - DNA, 606 bp, Homo sapiens
tctgtactcctcttttattctcttgggacatttgctgattcttaattgttgcttgataggctgagaaactgggcagagggctgctactaagagacagaaaaagtgaaaatagattttggcattgtcatgggtctaggaagacaaaacatgaactttggaccagctaagacaccctgttcttgagaggccaaggtcccaaactgaagggatgtgcrgatgagtggtccccaccgttgtcattggttttccacatcaggcatttgctgactctagcctagtcagaacaagaagccaggattgtacaaaaaataactaagaatgttagttgagattgtgactgcctcttgtgtttatgagatcaaaattggagtctgggacctaaggaaaaaaaagctttttaatgaaatctccagaatctcagttgggactctggagactctggagaaaagaatctaagaaaaggaggtgaattagattttggcttatatttacaaagtctgaaatccaactgtaagttatttcaacccgtctttgacctaagacaatctcccctactctgggtttctactagagaataaagtaaatcctctttggataaataaaaca

SEQ ID NO: 412338 - DNA, 557 bp, Homo sapiens
cacctataagagccttgttataaaatttcagagaccaactctaaasagaaaatataaaaagcaatgaaaagaaaaaaaagacacattttttcaaagaagcagcaacaaaacagaggcaacttctcagcagaaacaatggataccaaatataaagaacagcattttttaagtgttgaaaaaaaattgccaaccaacaagtgtatactcagtgaaaaatcctttaaaattgagaacaaaatgaaaacatttccagactctccccctaacttccctccatctacacaaataattattctttagtagtcttaccttgaaagaaatcctggcttggtatggtggctcatgcctgtaatcctagcactttgggaggccaagacaggttgatcactttagcccaggagtttgagaccagcctgggcaacatggcaaaatcccatctctacaaaaaattacaaaaattagctgagtgtggtggcatgtgcctgtagccccagctactcaggaggctgaggtgggagtatcacctaagccagtgaaggttgaggctgcagtgagct

SEQ ID NO: 412339 - DNA, 448 bp, Homo sapiens
agagctacgtggaatataatggaagtctaacatatatataactagttgctcagagggagaggagaaagagaaatgtaatagaagaaaaaatggcaaatgtcaaatgaaattgttaaacttataaaagacatcaagccacagatttaaggagatctacaacatcaaggaggatgagttaaaaaaaagccacctataagagccttgttataaaatttcagagaccaactctaaagagaaaatrtaaaaagcaatgaaaagaaaaaaaagacacattttttcaaagaagcagcaacaaaacagaggcaacttctcagcagaaacaatggataccaaatataaagaacagcattttttaagtgttgaaaaaaaattgccaaccaacaagtgtatactcagtgaaaaatcctttaaaattgagaacaaaatgaaaacatttccagactctccc

SEQ ID NO: 412340 - DNA, 543 bp, Homo sapiens
ctacacaaataattattctttagtagtcttaccttgaaagaaatcctggcttggtatggtggctcatgcctgtaatcctagcactttgggaggccaagacaggttgatcactttagcccagsagtttgagaccagcctgggcaacatggcaaaatcccatctctacaaaaaattacaaaaattagctgagtgtggtggcatgtgcctgtagccccagctactcaggaggctgaggtgggagtatcacctaagccagtgaaggttgaggctgcagtgagctgtgattgctgacattcttctcaactggcttgggttccaacacttcaggcaaagctgtttccttcaagaatgcccacttcaccctaatctgtttctcacacaccttgactcttctcccctcctcaggtgagctcttttcactccatttaggtctttcttcagggattctctcttcacccctttcagacttggacacccatattctgaacctccccatcccaccacggatgcttttcttaccccatgaggactctgacaactcac

SEQ ID NO: 412341 - DNA, 595 bp, Homo sapiens
atcccacttgtgttctaatatcttctatcactcagcttttctttgcatgagtggtcctcaaccaggtgctaggatccacaccttcctcttgtgtgtatgctcctttcatgctgcttggactttgacaccctgaactgagcctctcttccacgttgacatcttccttattctggacaggctccaaaacmtcatactgggcagagcaagtaaggatgcctttctcaatgccattgggttataaaaatctttactggttttactgaacaagtaagttcatagcctcagctcatagcctgagctgagttcctcacccagctcaggctatgatagtgtaccaggcagctcaactatatattatgcaaatatatattttctaaaaaatacaactatatattattcactagccagtccaaggttttttctaatgaaaggaaaatattttaaatgagactgtaatgaaaatattttaaatgagactattgcttttgaaagaaattgaaattgtcagtgttccataagaatttatacaattgatatattttcctcagcaattgcttatttgataataataagcagtaggatttttggtcttacc

SEQ ID NO: 412342 - DNA, 553 bp, Homo sapiens
ataaattgccgtgtgttctttctccatgttactgttacttaagacttagtggaccagatacttgagtacaataaccattagcctattatttatgagtctgttgcattgtaaacaactttcttttcctcacatgaattaattctgtgatctcaaaagagactgcacgccactggattattttggaattaaagagaaaaatttaaataaaatctcctggtctggtaggtgatgactgagtttttgcatttttttccttgatatatatattaaatatttatatttttgaaataccacaagcaatgaccatgtcaactcaaaaatctttgttgataagatgtttttcttttgaaataatcataataaaawcttctctctttatctttcctcctgactgggttttaaaatcatccataccattccatgctgttaagtaatagaaaaaattcccaggaatttgaatttcatttgtacgtttcagatgataccagaagattctcaatttggatacggtgcctcctctttcctaaaaagaaatgtgaggaagagtaggcac

SEQ ID NO: 412343 - DNA, 553 bp, Homo sapiens
ataaattgccgtgtgttctttctccatgttactgttacttaagacttagtggaccagatacttgagtacaataaccattagcctattatttatgagtctgttgcattgtaaacaactttcttttcctcacatgaattaattctgtgatctcaaaagagactgcacgccactggattattttggaattaaagagaaaaatttaaataaaatctcctggtctggtaggtgatgactgagtttttgcatttttttccttgatatatatattaaatatttatatttttgaaataccacaagcaatgaccatgtcaactcaaaaatctttgttgataagatgtttttcttttgaaataatcataataaaaacttctctctttatctttcctcctgactgggttttaaaatcatccataccattccatgctgttaagtaatagaaaaaattcccaggaatttgaatttcatttgtacgtttcagatgataccagaagattctcaatttggatacrgtgcctcctctttcctaaaaagaaatgtgaggaagagtaggcac

SEQ ID NO: 412344 - DNA, 595 bp, Homo sapiens
taaacattttccagaaaaagttactttttctgaacctggtaaaggttaatatgcattattcaagtacactttatttcttagcaggattaatagtgaatgtatttaacaaagactatggcatagctgccacccgatcagaatggacaccaactataaacaastaatacagctgtactactggctgcagtcttaagcatggttttatgagattttaatttgggggttgtaattttaatttttttgtttgtaatttttttctcttacctatgagcaagggctgacactgctggcacacactaattactatggccacactggttgtttatggcaaatatttattctaatttactagaacacttgccacagaagttaaatattttgaacatcgctgctactcaatcacttagaagtgcgttttaattgtctcaggttatggaacttttaaattaattaattacctttaatttaatcatatataggaaagagaatatgactgtttaatattgcttccttaaaatttactgattcttgctttcagcctaacataatatcaatttttgcaaatgtctcaaatgtgttttagaagaatctatat

SEQ ID NO: 412345 - DNA, 595 bp, Homo sapiens
taaacattttccagaaaaagttactttttctgaacctggtaaaggttaatatgcattattcaagtacactttatttcttagcaggattaatagtgaatgtatttaacaaagactatggcatagctgccacccgatcagaatggacaccaactataaacaagtaatacagctgtactactggctgcagtcttaagcatggttttatgagattttaatttgggggttgtaattttaatttttttgtttgtaatttttttctcttacctatgagcaagggctgacactgctggcacacactaattactatggccacactggttgtttatggcaaatatttattctaatttactagaacacttgccacagaagttaaatattttgaacatcgctgctactcaatcacttagaagtgcgttttaattgtctcaggttatggaacttttaaattaattaattacctttaayttaatcatatataggaaagagaatatgactgtttaatattgcttccttaaaatttactgattcttgctttcagcctaacataatatcaatttttgcaaatgtctcaaatgtgttttagaagaatctatat

SEQ ID NO: 412346 - DNA, 631 bp, Homo sapiens
gctgcatttctagcttctctcagctcagtaccataaacttagcatatatgataacagttaaactcagagcaagctaaccagcctctgttagccccactacacaagtttatggtagagagtaggaacttaaaacacattagcttcttttttgggtcataattagttacaattaaaagtgtatgtgaatgaaagctacattcttaggcaaagaataaacaggcactggtcactggtaattctggtccaaggagcgtccagaaaaggttagtggaagaggtaatttacattccttcatatttacagaaaattatatgcaatttgaattacgttcatatttagttatagaaaacgtattttttgtcttatataatttgaacccaacaattattytgaatataaccacacaggtgatatgatgtcttagctattttaaaaatactttcaaacatagtgggcacagcagctgctgaaaatggtcaaattatagtattgcagttctacacatttggaacacagaattaattttttttagcagattataggtccaataatagtgttcaaattgcctggctcttgaaaatgggagagaatacatctgtcttgcaatgatgtttctaggttagagcaccag

SEQ ID NO: 412347 - DNA, 631 bp, Homo sapiens
gctgcatttctagcttctctcagctcagtaccataaacttagcatatatgataacagttaaactcagagcaagctaaccagcctctgttagccccactacacaagtttatggtagagagtaggaacttaaaacacattagcttcttttttgggtcataattagttacaattaaaagtgtatgtgaatgaaagctacattcttaggcaaagaataaacaggcactggtcactggtaattctggtccaaggagcgtccagaaaaggttagtggaagaggtaatttacattccttcatatttacagaaaattatatgcaatttgaattacgttcatatttagttatagaaaacgtattttttgtcttatataatttgaacccaacaattattctgaatataaccacacaggtgatatgatgtctyagctattttaaaaatactttcaaacatagtgggcacagcagctgctgaaaatggtcaaattatagtattgcagttctacacatttggaacacagaattaattttttttagcagattataggtccaataatagtgttcaaattgcctggctcttgaaaatgggagagaatacatctgtcttgcaatgatgtttctaggttagagcaccag

SEQ ID NO: 412348 - DNA, 552 bp, Homo sapiens
agggtttcactgtgttcgtcaggctggtctcgaactcctgacctcaagtgatctgcccgcctaggcctcccagagttctgggattacaggcgtgacccatcacacccagttcatttatatatattcttttgagaattgtctagttatgtcctttgcccactttttgatgggattgttttttttttttttttttttttggcaaattcacccgaattccttgtagattctgtatattagtmatttgtcagatgtatagatggtgaagattttcccccactttgtgggttttctgtttactctgctgattgtttcttttgctgtgaagaagctttttagtttaactaaatcctatctatttatctttgtttttgttgcatttgtgtttgagttcttgttcatgaagtttttgcctaagccaatgtctagatttaaatccttaatccatcttgagttgatttttgtataaggtgagagatgaggatcaagtttcattcttctacatgtggcttgcaatttatcccagcaccatttgttgaataggttgtcttttcc

SEQ ID NO: 412349 - DNA, 585 bp, Homo sapiens
gacttaaacccaagcagtatggcttcagaattcgagctctaatactcatttggcaaagagaatttggctcacagactagaataccttgtattctaattaacaatactaatatttcaaaagaaatatcagataaaaactgtgatcagataaaaaaaagaagatttcaatatggtaatttgatagcagttgattttatactttatattttgctagaaaagtactcatttctataacaaatattttgtcacagagttgcatttgatcattataattcttgtgtcctcccttacatgaaaagttctcattttcattatgatgcctgtttgacttttttttttcctttattcgactcacaaggggttttcctatattacaggtctttaaaaaaaaaaaaaaacagctttaggttagatttatcctcgtgactttttgmgtttcattaagtttctgtcttcataagtttcttgtttattcggatctatttttctaagtttctgatttctaatttctatgttctctattctaatactatttatctaatttcttgaaataagaagaaaaattcttatttcctcctccttactc

SEQ ID NO: 412350 - DNA, 585 bp, Homo sapiens
gacttaaacccaagcagtatggcttcagaattcgagctctaatactcatttggcaaagagaatttggctcacagactagaataccttgtattctaattaacaatactaatatttcaaaagaaatatcagataaaaactgtgatcagataaaaaaaagaagatttcaatatggtaatttgatagcagttgattttatactttatattttgctagaaaagtactcatttctataacaaatattttgtcacagagttgcatttgatcattataattcttgtgtcctcccttacatgaaaagttctcattttcattatgatgcctgtttgacttttttttttcctttattcgactcacaaggggttttcctatattacaggtctttaaaaaaaaaaaaaaacagctttaggttagatttatcctcgtgactttttgagtttcattaagtttctgtcttcataagtttcttgtttattcggatctatttttctaagtttctgatttctaatttctatrttctctattctaatactatttatctaatttcttgaaataagaagaaaaattcttatttcctcctccttactc

SEQ ID NO: 412351 - DNA, 633 bp, Homo sapiens
ttcttttagtttgcttttgtctgctatctctttgtacaacttcttatttttaacttctctttttcactttgtttaaagtatactacttttaaataacaaatatcagagtatgttttaactactttttaaatgtttgggtcatttatgagaatattcagactattctatttactttaacataattattaatgtactacatcttattctttccatcatactttatttttattcattatttgaattattgcattctctttttcccasttttttatttttgctaattgacgaagttgtcattcactatttgttttcattaagttgaacactactcatttttttcattcaggaagtgattgccttctttttctctcctcataatttaacttctaaggccataaactgttttctccaatagggtgtgctctaatcaccttaattatccctgaaatctaaatgaagccaaaactcaaaatacttttactccacttttattctaatctcctaattcctaggttttactggtataatacttacaaagtccttacaatctgcctttttaagagttccttttcagcctttagattatacaagcttggatagtcaatatgtctaactatctatacatatattcat

SEQ ID NO: 412352 - DNA, 623 bp, Homo sapiens
aagtatcatttgtaacagcagatgtagcaaacaatttaaatttccacaagaagaaaacatagaaataatgcaatattgtactgccgtcacaaggagtaaggatgttttgtgcactgatgtggaaagatcttcaagaaacattaaatggaaaagtaatagaacagtatatatggtacactatcatttgtgtaaaaaagattatatatatatgtgtatgtgtatatatacatgcatgtatttttgytcacacatagagtatctctagaaaaataaacaatagtttttatccccagaaaagggaatatatagcttattaattggggcgggactgttaacagtataccctttagcacatttttaaaattttgaaccttgtgaatgtatttcctattaataaaataatatttaagctaaagagttcttgtttgtgggattcctagcctttctcctttcacctttccaatagcatactacattaaagccatccgttgccataggacatgaccacatgcatttgaaaactgttctaacttgttcaatatcacacactaaatggtaattgctgaggatgaacaggtactttatagtcacattcccaatacttaagataatttatttagtat

SEQ ID NO: 412353 - DNA, 623 bp, Homo sapiens
aagtatcatttgtaacagcagatgtagcaaacaatttaaatttccacaagaagaaaacatagaaataatgcaatattgtactgccgtcacaaggagtaaggatgttttgtgcactgatgtggaaagatcttcaagaaacattaaatggaaaagtaatagaacagtatatatggtacactatcatttgtgtaaaaaagattatatatatatgtgtatgtgtatatatacatgcatgtatttttgttcacacatagagtatctctagaaaaataaacaatagtttttatccccagaaaagggaatatatagcttattaattggggcgggactgttaacagtataccctttagcacatttttaaaattttgaaccttgtgaatgtatttcctrttaataaaataatatttaagctaaagagttcttgtttgtgggattcctagcctttctcctttcacctttccaatagcatactacattaaagccatccgttgccataggacatgaccacatgcatttgaaaactgttctaacttgttcaatatcacacactaaatggtaattgctgaggatgaacaggtactttatagtcacattcccaatacttaagataatttatttagtat

SEQ ID NO: 412354 - DNA, 587 bp, Homo sapiens
tgctagggaaccacagtcaaggatttgtttaatatgaattctatactaaagaacacacaatctgctatttactgtgtartaagctttaattagcttaagtagatgatacagtgtccaaatactttgtaatgtcataaaaaactgcacactgacataaagtaattcacaagggctgggcaaattcagtttttgttcaattgcctttgcatgcagaactgctcttttggtctcatggtttttattttgttcctactacatcccagtgaatagacacttaaattccatttccaatattcaaagtcactctcaaatcagaaaaaaaaaatgtcattttcaaactgatttaaccaatcagtccaagtctctcttacagttgaaacattgttcttgtttttgcaataacttacctccaaaccagaggttgcctctctttatagggtgcaacagcaacagacaattttgtcttacttttctacttgcagccagtcttcatagccactcattagtagctgaatctccaaagaggcaagacgagtgagtaatcattttgtcatagaaattgattgactagttgatgtttacagaaa

SEQ ID NO: 412355 - DNA, 594 bp, Homo sapiens
attggtatactctttgacattgatatattttcatttattctaacggtgatatatactgtaaaaaaaagaatgaaaggacagaaggaagagaaggatggaggaatgggaaaaggataaaggaaggaagagagggaataaaagaggaaagaagacagggacagaaagagaaggtaaaagaaggcaagacaagaaaagatatcctcaagcagtatataatggtgtaaaaaacaaagccaagaataaactataattaaatagcctggcaaaaaccacagttcagaaagaaggctgatmctaatcataaaacaatgtaataacttaggctaaaataatttgcctttctctaatgagagcaaactgaggcatcttaaggctgaacacttctgaatgattgttttcattttttctcttctttatttttaaaatttatttttatcaaaataatttcaaaatttattcagacagaattctaaaagtgaaatgagtgggtcaaaatcaatgaagattttttatgaatctaaaaggataatactaatgtagtgttatggtgtcgctaattttatcttcctcttatcaacactggatgttgtcaat

SEQ ID NO: 412356 - DNA, 594 bp, Homo sapiens
attggtatactctttgacattgatatattttcatttattctaacggtgatatatactgtaaaaaaaagaatgaaaggacagaaggaagagaaggatggaggaatgggaaaaggataaaggaaggaagagagggaataaaagaggaaagaagacagggacagaaagagaaggtaaaagaaggcaagacaagaaaagatatcctcaagcagtatataatggtgtaaaaaacaaagccaagaataaactataattaaatagcctggcaaaaaccacagttcagaaagaaggctgatactaatcataaaacaatgtaataacttaggctaaaataatttgcctttctctaatgagagcaaactgaggcatcttaaggctgaacacttctgaatgattgttttcattttttctcttctttatttttaaaatttatttttatcaaaataatttcaaaatttattcagayagaattctaaaagtgaaatgagtgggtcaaaatcaatgaagattttttatgaatctaaaaggataatactaatgtagtgttatggtgtcgctaattttatcttcctcttatcaacactggatgttgtcaat

SEQ ID NO: 412357 - DNA, 594 bp, Homo sapiens
attggtatactctttgacattgatatattttcatttattctaacggtgatatatactgtaaaaaaaagaatgaaaggacagaaggaagagaaggatggaggaatgggaaaaggataaaggaaggaagagagggaataaaagaggaaagaagacagggacagaaagagaaggtaaaagaaggcaagacaagaaaagatatcctcaagcagtatataatggtgtaaaaaacaaagccaagaataaactataattaaatagcctggcaaaaaccacagttcagaaagaaggctgatactaatcataaaacaatgtaataacttaggctaaaataatttgcctttctctaatgagagcaaactgaggcatcttaaggctgaacacttctgaatgattgttttcattttttctcttctttatttttaaaatttatttttatcaaaataatttcaaaatttattcagacagaattctaaaagtgaaatgagtgggtcaaaatcaatgaagattttttatgaatctaaaaggataatactaatgtagtgttatggtgtygctaattttatcttcctcttatcaacactggatgttgtcaat

SEQ ID NO: 412358 - DNA, 642 bp, Homo sapiens
aattttgactttcaattcttcttattaaataaatacattcacaaggctgccatagatagtgattcctctgacggatctaagcaaagcaaactgaaaacctactggaaaggaatcaccattccagatgccaataggaacatttgtgattgggggaggaagtcaaaatattaacattagtagaagaagttggtttcaaccttcayggatggtttgaggggtgcaagtcttcggtagagaaagtaagtacagatgtggtgagtaatagaaggagagctggaattagaagtggagtctgaagatgtgactgttgtaatttcgtgataaaacatgaacaaataaggaactgcttcttatggatgagcaaagatagtagtttcatgagatggaatctactcccagtgaaggtgctgcgaacattgttgaaatgacacaaagggatttagaatattatataaattagttgataaagtaacagcagagtttgagaggattgactccaatattgaaataaattttactgtaaataaaatgttactcaacagcatctcattgccatagagaaatatttcattaaaggaaaagtcacttgatgagacaaacctcattgtcttaagaaattgcccccagccacctcagtcttca

SEQ ID NO: 412359 - DNA, 511 bp, Homo sapiens
tgaaaaaaaaaaaaaaactcaacatcactgatcattagtgaaatgcaaattaaaaccacaatgaggttggacgcagtggctcacatctgtaatcacaacactttgggaaatcaaagagggcaaatcaattaaggttgggagttcaagaccagcttcgctaacatggcaaaatctcatttctactaaaaatacaaaaattagccaggcatggtggtgtgcacctgtaattccagctactcaggaggctgaggcacgataatcacttgaatccacgtggcagaagttgccgtgagcagatagttccactgcactccagcctgggcgacagagagagactctgtctcaaaaacaaacaaacaaacactgtgagataccatctaacaccagtgagaatgactattattaaaaagtcaaaaaataacagatgytggcaaggttgtagagaaaaaggaatgctcatacactgttggtgggagtgttaattagctcagctatggtggaagacagtgta

SEQ ID NO: 412360 - DNA, 511 bp, Homo sapiens
tgaaaaaaaaaaaaaaactcaacatcactgatcattagtgaaatgcaaattaaaaccacaatgaggttggacgcagtggctcacatctgtaatcacaacactttgggaaatcaaagagggcaaatcaattaaggttgggagttcaagaccagcttcgctaacatggcaaaatctcatttctactaaaaatacaaaaattagccaggcatggtggtgtgcacctgtaattccagctactcaggaggctgaggcacgataatcacttgaatccacgtggcagaagttgccgtgagcagatagttccactgcactccagcctgggcgacagagagagactctgtctcaaaaacaaacaaacaaacactgtgagataccatctaacaccagtgagaatgactattattaaaaagtcaaaaaataacagatgttggcaaggttgtagagaaaaasgaatgctcatacactgttggtgggagtgttaattagctcagctatggtggaagacagtgta

SEQ ID NO: 412361 - DNA, 559 bp, Homo sapiens
tccatatggaattgatttttggctatttgcattcagatgtctctggctccaatttttggttttcaagaactccgagtgttgtcctttatacacgcatgaagttacttgcacatggtctgtgctgctggaccatgctcttttgaatctttgtccaacatgcctgtctagacattcctattccctttctgtggtattggtatctgctgacaaaagtcttaaatatcctgttaagatttcttsccttcagtttttaaatcatttttaatttcaccataggtggtgctatgggccgaattgtgttcatcaaaatttgtatgctgatgccctagcacctagtactacagaatggactgtatttggaggtaggggtttttaaagcagtaattaggttaaaatgagattattaaggaaggctctatttcagcgtaactgtacctattttcagtacaactccttaaagaaaagatgaggacacagacacacacagagcgaagaccatgtgaagacataaggaggagaagacagccatatgcaaaccaaagaaagaggcctcagaaga

SEQ ID NO: 412362 - DNA, 594 bp, Homo sapiens
tccctttctgtggtattggtatctgctgacaaaagtcttaaatatcctgttaagatttcttcccttcagtttttaaatcatttttaatttcaccataggtggtgctatgggccgaattgtgttcatcaaaatttgtatgctgatgccctagcacctagtactacagaatggactgtatttggaggtaggggtttttaaagcagtaattaggttaaaatgagattattaaggaaggctctatttcagcgtaactgtacctattttcagtayaactccttaaagaaaagatgaggacacagacacacacagagcgaagaccatgtgaagacataaggaggagaagacagccatatgcaaaccaaagaaagaggcctcagaagataccaaccctgtggacatgttgatctatgactttttgcctccaaaactatgaggaaatatatgtctattgtttatttcactcagactgtggtattttcctatggcggccctaacaaactaatacgggtgagttcaccttgttaaatatggaggattaagaacacacattgatctctgctccacccctaccttccattaaactcaaacatcaga

SEQ ID NO: 412363 - DNA, 560 bp, Homo sapiens
gtgtcttcaaacttctccaggacttaattctgaaggatatactcaaggatattaataatcttcaaggattattatttcaaatctattaattacatacccagccaaattatcttataatgactcatcattgaaatgtaatccaatatcaaagtgatgatgattatcaaagcacaatgttagaccaaactatagaatttaccraggaaatgtgaagtttcccttaccaaggaaaatgtgaaaactagcttcacattgactatattactccaagtgcaaagtgaaagaggagatgctataagaaggttgtctttagagaaagctctattgttatcccctcaactcccttatccagggagaaagatgtgcaacacctgctcaaactcaagactcattactgggggattcaacttgaccattgcagagattaatatatgccccgggtggtaggaagtcatggtaccatggaatctgactatcactcagaaggtagactatagacagaaattttatctgaaggttcacccaagtcatgacagattttctaaagaaaactagaaatt

SEQ ID NO: 412364 - DNA, 538 bp, Homo sapiens
gaaggttgtctttagagaaagctctattgttatcccctcaactcccttatccagggagaaagatgtgcaacacctgctcaaactcaagactcattactgggggattcaacttgaccattgcagagattaatatatgccccgggtggtaggaagtcatggtaccatggaatctgactatcactcagaaggtagactatagacagaaattttatctgaaggttcacccaagtcatgacagattttytaaagaaaactagaaattctcagaatcttcttaatcttcttactggtgcttcttacggaagcaaaatcattttatcttgaggaataaactatcttctattattaacatcagtgttataggtgtttccagctatccctcaggtaagaggtttcctgacatgttttcattcccccagcatacttacgaattcctaaaatttggaacaaacctttttttggcaaaaaaaaaaaaaaaaaaaatctgaatataaacgtaattaataggacattagtgcttaaattgccactcacatcc

SEQ ID NO: 412365 - DNA, 538 bp, Homo sapiens
gaaggttgtctttagagaaagctctattgttatcccctcaactcccttatccagggagaaagatgtgcaacacctgctcaaactcaagactcattactgggggattcaacttgaccattgcagagattaatatatgccccgggtggtaggaagtcatggtaccatggaatctgactatcactcagaaggtagactatagacagaaattttatctgaaggttcacccaagtcatgacagattttctaaagaaaactagaaattctcagaatcttcttaatcttcttactggtgcttcttrcggaagcaaaatcattttatcttgaggaataaactatcttctattattaacatcagtgttataggtgtttccagctatccctcaggtaagaggtttcctgacatgttttcattcccccagcatacttacgaattcctaaaatttggaacaaacctttttttggcaaaaaaaaaaaaaaaaaaaatctgaatataaacgtaattaataggacattagtgcttaaattgccactcacatcc

SEQ ID NO: 412366 - DNA, 407 bp, Homo sapiens
tatatgccccgggtggtaggaagtcatggtaccatggaatctgactatcactcagaaggtagactatagacagaaattttatctgaaggttcacccaagtcatgacagattttctaaagaaaactagaaattctcagaatcttcttaatcttcttactggtgcttcttacggaagcaaaatcattttatcttgaggaataaactatcttctattattaacatcagtgttataggtgtttccagctatccctcaggtaagaggtttcctgacatgttttcattccyccagcatacttacgaattcctaaaatttggaacaaacctttttttggcaaaaaaaaaaaaaaaaaaaatctgaatataaacgtaattaataggacattagtgcttaaattgccactcacatc

SEQ ID NO: 412367 - DNA, 407 bp, Homo sapiens
tatatgccccgggtggtaggaagtcatggtaccatggaatctgactatcactcagaaggtagactatagacagaaattttatctgaaggttcacccaagtcatgacagattttctaaagaaaactagaaattctcagaatcttcttaatcttcttactggtgcttcttacggaagcaaaatcattttatcttgaggaataaactatcttctattattaacatcagtgttataggtgtttccagctatccctcaggtaagaggtttcctgacatgttttcattcccccagcatacttacraattcctaaaatttggaacaaacctttttttggcaaaaaaaaaaaaaaaaaaaatctgaatataaacgtaattaataggacattagtgcttaaattgccactcacatc

SEQ ID NO: 412368 - DNA, 429 bp, Homo sapiens
cttcttgtaaacatatgaattatgaatgtctttggtaacacgctaatggcatttgtttgtgttagaataatcatttatgcaatactttcactatgatgaacctggttgtctacgattgattatggtacataaatctagaatatatagatttattggtaaagttccctggackatatcacataagcgatttagcttattttacattagacatgttttataatttaaatgtataactgcacacatgtttaaaggatatgacaacctaggtccagaatatataaaatggtaagaaaagaagtaagtagctacattggagctcccagacaactctctgattttcctttgccttgcattccttctattattgaagttattagtaaagattggtgtcaggtaagatgatattggttaagatttccagtgcatgta

SEQ ID NO: 412369 - DNA, 503 bp, Homo sapiens
aatctacattcagaatctctattcccaacttttaattacccttcaacagattgcaatctgatccatggaaatcaccctttccaaagtgcttgagcagtatatctttctgaaagccaaatccgacagtcctaatttcatcttcctttgccttgctggacatctttcaacctcttcttaagactcagttgtttctttgcatttttttttttttggttstacacatacaccatggaatactatgcagtcataaaaagaataaaatcatgttctttgcagcaatatggatgcagctggaggctattaagtgaattaatttagaaacagaaactcagaacatattctcataagtgggagcaaaacaaagggttcacatggacataaagatggaaacaatcgacactgtcaattcccaaaggaggaagggaggaaggggagcaatggttgaaatctacctatcaggtactatgttcattatttgggtgatgcattcaacagaaacccaa

SEQ ID NO: 412370 - DNA, 586 bp, Homo sapiens
tgttttcattgttcaaaatctctcaaatttgatgataatatttatctgcacatacaaaaagttcaatgaaatccatttagtataaattcaaagaactacacacctactcacatcacaatcaaactcaaaaaacagagataattttgaaagcagtagaagagatccaactcatcacatataagggatcctcaataaaattaacaatttttttgttttttttttgagacggagtcttgctctgtcacccaggctggaatgcagtggcgcaatctcagctcacttgcaagctctgcctcccgggttcacgccattctcctgcctcagcctccggagcagttgggactacaggtgcccgcgaccacacccggctaattttgtgtatttttaatagrtacagggtttcaccatgttagccaggatggtctcgatctcctgacctcgtgatccgaccgccttgcctcccaaagtgctgggattacaggtgtgagccactgcacctggccacaacaaatatttttaattcaacattgtactgaaggtcccagctagaataatatgacaagaaaaataagaaaaagacacctag

SEQ ID NO: 412371 - DNA, 586 bp, Homo sapiens
tgttttcattgttcaaaatctctcaaatttgatgataatatttatctgcacatacaaaaagttcaatgaaatccatttagtataaattcaaagaactacacacctactcacatcacaatcaaactcaaaaaacagagataattttgaaagcagtagaagagatccaactcatcacatataagggatcctcaataaaattaacaatttttttgttttttttttgagacggagtcttgctctgtcacccaggctggaatgcagtggcgcaatctcagctcacttgcaagctctgcctcccgggttcacgccattctcctgcctcagcctccggagcagttgggactacaggtgcccgcgaccacacccggctaattttgtgtatttttaataggtacagggtttcaccatgttagccaggatggtctcgatctcctgacctcgtgatccgaccgccttgcctcccaaagtgctgggattacaggtgtkagccactgcacctggccacaacaaatatttttaattcaacattgtactgaaggtcccagctagaataatatgacaagaaaaataagaaaaagacacctag

SEQ ID NO: 412372 - DNA, 446 bp, Homo sapiens
cgttaggtttagggtagacacataaactgagtgtagatttatcttccctatcctcagtgcttctgccagctccaccagtttktggactctcagaatactttatccaccaccctcatatcccgtgcaacactgcctaagacgagggcatgaattttatggcaaaggaagtggaacaatgaacccaacatctgtgaacttcacttatcttaccacagacctcactacacaaaagtagttggtttgatagaacagtagaatgaatgctctgctgaaatcctaatgtcagctgggagaaaataccctgtaagggtgggcttctgacctacaaattgaggtatgcttataacccagtgaccagcacatgatgtcctcattttcctagcctgaatgcatgagcctaggaaccaaggttggagatggcagtgatccctctcactatggcacca

SEQ ID NO: 412373 - DNA, 578 bp, Homo sapiens
catacacgtgtgctctgtaccattccaaagggttaaacttggagcaatggttcgaaggtggattttggtcacaatatgaagaattctaacaatttgggatattgaataattcaacgaccttaaatatttctgtaaggctgcatgctttaaaaagataaattttcacttaatccttgaaataatccagaaaaacaagtgtttccctgttacagtttaggaaactgagtcttcaaggatcttgctaaaacactcaagtcccaaatctagtgaacaggttgcctctaactaacgtgcttcccacctctagatgtatttcaggcacataccaaatggccatctgtcagsaatgttagccaagacaccctaaagttccttccaaattcaactctttagaaatactggtggtcaatgtaaacaccatgaaaagattatgtgttgaacggtcctccagaatgcaagctctatgagggcaagtaactttttctttcctgctacatcccaatacctaaaacagtatatggcatacaatacagggtcaaaaaatacttgctaaatatgaatagtcctagtcatacata

SEQ ID NO: 412374 - DNA, 607 bp, Homo sapiens
acttttatattcaactatatataacatttagcataaccaaatattactttttctttcagtttgaaaaatatctttcttggtacttacttttttttctttctctttttcacattgatatattctttctttcaaattattacatacattgattaagtccttgtttttctcttctagcagaagactgtgcatttcactcccagctagatttttttacaacagcatggatttgatcttggatagtactgattgtcttttcttgattgtcagctttcttgtgggcatcatccagttgctgtcgaagcaacctattttcactttgtagttgagcacatctgtcctctatagattcctgcttcttccrcgtatttatttactttactttgttcatttttatacattcgttcaatttctttcttttgacactgtgtttggcctaggtctctttggaaacattctaaaactgatgtcttttctctgagtgtttctcttgctgatgaaacttaatttttaggctgttaattttactgtcagcattagagagtttttcagaaagaatctaactgttatcttttaggttagacatatcagaattcattttctcctgtaa

SEQ ID NO: 412375 - DNA, 503 bp, Homo sapiens
atttcaaaaaacccagcggcataaaatatgagattgatacatttgactaaatttttaaaatttaaaaattttaaaatctgatatctaacctatacaccaccctattgtaagactcttagttctgcatttatttggactgaagaaattcctcaaagttctctaagttcctttttcctgataatgttctataaatattctacttttctaacaattttattgtaagttataaagattacacttattcataaatgttaaatctaagcattgtacatttctacattttacacttctacatctaagcattgcacttttacatacattactgaactcatttaaggtctcaattctgaagaggagagattgaaatatatgcaagatgcaggattttcccyaggtcttctgattctacttctagtcctcctccatcaaattgcagttacttctgtggtgtaaatatataaatacaaaagaagcctcttatttaaaaataccaatggtaaaat

SEQ ID NO: 412376 - DNA, 331 bp, Homo sapiens
gagcagcagcctacatcattaggcaggcagaaaactgaatctccaagagtgagagaaggagagactgcctctgtgatrttcactcccactgggcaacccggcaatccaggccctggggcaaggccttaactctacccagtgctggagctgatttagtgagctgtggggagtatgtgagaaggagaggcattaggatgtgctttgtgtgcactcccagactccagtggagacggtgggaagccattcctgatcctagctcataggggacctcatggaagtcagccagctatctcaggcagcattcacaggttgagagaagctcgcaaatgag

SEQ ID NO: 412377 - DNA, 513 bp, Homo sapiens
aggcacattgaaagagcagggagagtttaggaaatttttaaacagaaaggataaaattgtggtcagaacattctcctggagataatatgggatctaggaaacaagatagcaataactaaagtagattaacacccactttttgttgaattagttttagctatggctcaagttttgctttatttttttttcccaggccttatttatgctcagtttccatataaaccctataatctttccttgcttacagtttcatgagattcatattccttttcctaagaatggggaacaaaamcacgtcaaaaggaaaagcattactaggctaaaactactaggaaccgctacattcacaaaaatctagacctttactagcaaggatataataataaaacaagagctacattttactaattagcgcacaggccaaaaagcctctgaatatttatgctctcagaaaccattttctcatcaatttacttctgtgtgattgctatttggttactactgcagggagca

SEQ ID NO: 412378 - DNA, 395 bp, Homo sapiens
catcggggattcctctaaaccagactctggggccaaatgagcttaggaaactaaactctatctccccttctgggaaagccagaatatatttgcatattaaagactctgaaaagtttttcagtaaaaaacctgaataactttggttaattccagatttccatgatctgattacagaacatgtcttcctttccttctttaaatttttctccctgttttttagggtagcattggataataacctgggaatgaatattccatggggcacactttggaaaacagagccttaatccatgatctcacatattcccagctgaaaagatgcctggaattgaaaagttgtttttccccctctcaggaagaaacgtctyacataagaaaatattttggtttcaagt

SEQ ID NO: 412379 - DNA, 465 bp, Homo sapiens
gtataagtttatcattgactgcttagtatgcttaaaggaacagttaattcagggcaaatgtcattaatgtctcccagttcaattacttctttccctttctattgcccctcttgttttgtttcactcaggtcaaaatgagctgccagcttttgcttattgctcctagacattcacagattccccctgggcatcagactcttttaatttttccttttggtgaggttgtacagtttttaatcttgcgttacttaataaaatgtttagggaaataaatgaacagaagcgttcaattccaggcaagtggctttcaacattaagataggctgatgaaatcagacacaacataaaaagctgaaaagaaattaaatttagatatawcgacaggattaataccaaaatactggttggggataaatagactaatggctaccatttatcgtattcctaatatgtttccctatatgt

SEQ ID NO: 412380 - DNA, 354 bp, Homo sapiens
actttatagtacattaccaaactaacacatgaaattatacatttaaaagtatgtgtatatagatatcttaaatatatacacacacaatacatatgttttaggaagcccaggagagaatgtcaggacagggaacagaaagagacmtggaagacaagattgacaatgaagttttatttccctataaaacaattaagaggatcttgaattctcagatacaaaactgatatcaacggagcattggggattgcgttttgttactagaggattggaattattcttattaatagtgttacacacactgtattgacctcagatgaaagtatgactcccacttcacaagtccatatgcagtta

SEQ ID NO: 412381 - DNA, 354 bp, Homo sapiens
actttatagtacattaccaaactaacacatgaaattatacatttaaaagtatgtgtatatagatatcttaaatatatacacacacaatacatatgttttaggaagcccaggagagaatgtcaggacagggaacagaaagagacctggaagamaagattgacaatgaagttttatttccctataaaacaattaagaggatcttgaattctcagatacaaaactgatatcaacggagcattggggattgcgttttgttactagaggattggaattattcttattaatagtgttacacacactgtattgacctcagatgaaagtatgactcccacttcacaagtccatatgcagtta

SEQ ID NO: 412382 - DNA, 354 bp, Homo sapiens
actttatagtacattaccaaactaacacatgaaattatacatttaaaagtatgtgtatatagatatcttaaatatatacacacacaatacatatgttttaggaagcccaggagagaatgtcaggacagggaacagaaagagacctggaagacaagattgacaatgaagttttatttccctataaaacaattaagaggatcttgaattctcagatacaaaactgatatcaamggagcattggggattgcgttttgttactagaggattggaattattcttattaatagtgttacacacactgtattgacctcagatgaaagtatgactcccacttcacaagtccatatgcagtta

SEQ ID NO: 412383 - DNA, 513 bp, Homo sapiens
aatgtttacatgtgttcacagtttcagcttacagactgcattatttcagaaccacccccccaccaaaaaagtgcaaataaccctttatttatcaagtggcaatctgagtcacaacarttgattttcttattactcaaattaaacaaaatatttgaacttgttttccagtaattcttcaaatccaaagatataaaactggacaaagtactacaaatgctaaggtgaaagacactctcctactgacctcaacagccttaacactaaaacttttcaattcccaaggctgaatggagatccttaaccatcaaaagggggaaacttagccagaagcttctcgtaactattatcatcccaactgcataaaatttgatgtgttcctttgaacttaggaaccacgtaatggttacagttctccatgagggtcaatttaccttactggcaaagttttatatgtatgccataccatatatacacctgtcacaatatgattggagaaggaactcaaaaaaccac

SEQ ID NO: 412384 - DNA, 513 bp, Homo sapiens
aatgtttacatgtgttcacagtttcagcttacagactgcattatttcagaaccacccccccaccaaaaaagtgcaaataaccctttatttatcaagtggcaatctgagtcacaacagttgattttcttattactcaaattaaacaaaatatttgaacttgttttccagtaattcttcaaatccaaagatataaaactggacaaagtactacaaatgctaaggtsaaagacactctcctactgacctcaacagccttaacactaaaacttttcaattcccaaggctgaatggagatccttaaccatcaaaagggggaaacttagccagaagcttctcgtaactattatcatcccaactgcataaaatttgatgtgttcctttgaacttaggaaccacgtaatggttacagttctccatgagggtcaatttaccttactggcaaagttttatatgtatgccataccatatatacacctgtcacaatatgattggagaaggaactcaaaaaaccac

SEQ ID NO: 412385 - DNA, 625 bp, Homo sapiens
caacacaagctgaatatttgaccaactgtagatattattaataaaaagtgaatgagagatttttttaatatgtaaaagacctgtaaatgcacagaagaatgatttttccaggcttaaaaccatgaaataaccttctgaagatttattttggatcacctctcatgactgccccaatcatcattatattaaaattaaccctgattggttacttcattccttaaaaatcctttagagtttcccacttccctattggataagacacaatgttctaaacagrccatacaaaacccaaaataatttcaacctatgcctattttagccctttcaatgtcagcattctatgctcagtcataaagactggtgtgtgaagtgggtcatgacccataaatattgttgaaaaaatgaacttaagaatgaaccaaaaaagaaataattgagtcaatgagtgaagaagtaaaaaggaacttcaagtcccatgcagtcccatatactacttaatgtcttgtgtgtctacttctatcatagaacttacaccgttatagtcaatgattttttttttttttttttgcccagttcccaaataaactggacgttcatttatggtaggggcagtgtcttattgata

SEQ ID NO: 412386 - DNA, 527 bp, Homo sapiens
taacttcacaaagtggagttactgcatttatgttctttcccagacaaatgtgccatastgatgtaatgactgtttttttaattttaggttacctcgcacctcgaaaccttcctagtactggattctttccattcctgcagaccctactctgtgacacagactctaaatgcaaagacacaccctatggcccacaagatctgcttcgtaggaaaggaattgatgatgcactatttaaagacaggtgggggcacttctcaagtgtgttcaattgttctgagagatcaaatcttgtttccttctgagatagccaggaagccatgcaagcttagatatgcaattttgttttctctgtctataaatgtgatgatctaaatatgaaataacaaagtaggtataaactggaataactgtttatgtgagattgagtacaatctactttgggtgaatgtctcaaatttgctttataagatgggtgactaaagtagtcctcctttacatccctcaaagattctctatccaaccttaaa

SEQ ID NO: 412387 - DNA, 616 bp, Homo sapiens
taaacatcctactatctgccaacataatacactgtaggcttttcttaagaaccttacactctaaaaagggggaaattggtaaacactactggtggaatatttatctcataaacagataaaagttacataaactcataaaatgaggaaggggttacacggctctgggtgagggcctgtgcctcattccatatcactagtaaatacttgtaggttccagatctataaaataatgggatacatccatttggtatccggagcttttgaagtttctaggattctaaagggattacatctaaartatgggcctccagctccatattgatggtgaaggttgcatctttgcaacatcttcttttgtgggtactctgaccaagagctaatattgatgagtacctatgatgacagggcccagagagactcttggtacacacacctcatatcatactcataacaaccttgcaaagtaggtgttattattgctaatttgctggtgagggagatgatggctgagatcttttaggaagagagagctgaaattctgaagatatcttctaactctataaagtactttctgccataccccaacaatatggtctctttttatttaatcagccat

SEQ ID NO: 412388 - DNA, 557 bp, Homo sapiens
actaaacaaaaagcgaatttttagaaaagagggggttactaattgtgggaaggcccagcaatgtcttcttcyaaaacctagtgtgatcatgttgcacagggattcctggcaccacaatgtaattattactgccttgacacattcaatgcaatggaaaatttattttaatgttattccttttatacttggtgccatctgtgatgacatcaaccacaattcctggcacatactgggtattcaataaatgtttggcctttctcttcttccttgaacctgtgttgaaaatctttaaaaggccatctataatttaacatagaaaacttatttttcttttaatgttgacaaataagcagacctttgtttcagtccccaaagcactcttggattctcatttgtttgggacctatcaactttttaaaagaaaaatatatatcatacatattttaagtatttatctctaatgtcttttaaaatgtcctttctacaagattaaagtaaaaataactattttaaacttcatctaggccattttctctgaataaaaatatactttgtag

SEQ ID NO: 412389 - DNA, 300 bp, Homo sapiens
acaatattctcccccttccagctgtagcaaactcagaagtacatttgacagggaagatcactctgcatcattcccctaaaaaattcaatctttatacactaatctccatctctatatctgtccatgccaatgcaggcacgctcatctcttattcaaatttttagaawcgttcatagtagattcggactatcacatctggcaggcatttgcctaattctcatttccttaactgactgccctgcactctttcttgaagcatggaacttaccaactccctcagtctcagacagaccatgagaa

SEQ ID NO: 412390 - DNA, 300 bp, Homo sapiens
acaatattctcccccttccagctgtagcaaactcagaagtacatttgacagggaagatcactctgcatcattcccctaaaaaattcaatctttatacactaatctccatctctatatctgtccatgccaatgcaggcacgctcatctcttattcaaatttttagaaacgttcatagtagattcggactatcacatctggcaggcatttgcctaattctcatttccttaaytgactgccctgcactctttcttgaagcatggaacttaccaactccctcagtctcagacagaccatgagaa

SEQ ID NO: 412391 - DNA, 537 bp, Homo sapiens
tgactccccagcgtgctagtaaatgtggccatatgacatggcagcagtctatcactggtggagaggcaagtacatggagcttsccttggatgcatcggtacacagggaaggttaaaggttcacaatgagacaacagcattgaaggaaaaacctgcagcaatcaagcctccatcctaaccacaggtaatgctggaaaaactgatagtggatgcatagaagttaactgtctccactcaaatatcaaagccagctcaactctggaatagactgattcagtaacgcacattaaaaatctaggagaggaagagatacacccattttcatgcacagatgctgcataattcagtctccattgtttttcacacaatatccatcatttaataaaaaaattatgagacaaacacaaaaaagcaagaaaatgaacagcccactgtcaaaagacagaccataaacacatactcagagaagagccagatgttgaatatattaggtatgttaaaaataatagtggctaatatgtaaaggggtctagtgtga

SEQ ID NO: 412392 - DNA, 537 bp, Homo sapiens
tgactccccagcgtgctagtaaatgtggccatatgacatggcagcagtctatcactggtggagaggcaagtacatggagcttgccttggatgcatcggtacacagggaaggttaaaggttcacaatgagacaacagcattgaaggaaaaacctgcagcaatcaagcctccatcctaaccacaggtaatgctggaaaaactgatagtggatgcatagaagttaactgtctccactcaaatatcaaagccagctcaactctggaatagactgattcagtaaygcacattaaaaatctaggagaggaagagatacacccattttcatgcacagatgctgcataattcagtctccattgtttttcacacaatatccatcatttaataaaaaaattatgagacaaacacaaaaaagcaagaaaatgaacagcccactgtcaaaagacagaccataaacacatactcagagaagagccagatgttgaatatattaggtatgttaaaaataatagtggctaatatgtaaaggggtctagtgtga

SEQ ID NO: 412393 - DNA, 576 bp, Homo sapiens
aaattgtcttcaaagctaagaaaggaggttctcagtgtcaaatagtactgaagaataagtaagataaattaaccaggtgaggagtgttccagacacagggaggcaatagaatgtatgagtgttccaaacaaaaaacagtctatcattttcaagaaatctaaaaagcttcctggagaattgaacctagtgagaaaaaggatgagctacaagatcatggcaagccttgtggcccaggttaagggagactgtgtgttcccattaaaggtttttgagcaggataaacaattgataaaatcttccttttgagatcacttgggttgttttagggaaagtgaattggaaggttcacaaatacatgtttaaaagactatttcaatagttatgggtaaaaatggtggcagcgtgaactacagtgrtagccacataaataaatagatttggttttaaaatattctgtaagtagtatagtagtgacattatttggtgatagatttaattttaaaagtgaagaagaaaaataaaacagagtgaccccgttttttttttcttccaaaatcaacacagttgattattttg

SEQ ID NO: 412394 - DNA, 562 bp, Homo sapiens
tgtcttttataaatttttcccacatgatatgtctacataaatgtcctatagccctctcaaaactaacgtggctaaaattaaatgtttgacttataaacaaaktcgtggaagtcttgaagagaaatgagtcaccttggattaagttactagaagtgaaacatgaggtttgtcagatttgagatatattttgaaggcagagccaacagaatttgctaaagtttagttgtcgtgggagagagtaaaatgagtagaaatgctttatattttgtctgaacaaacagtgaatgggagtgtcgttcatgtcatagtttaggggtggtgattgtgtgttgtcagccctagacatatcagaaaatataatttaatgcatatgcataccactgtgtatattggacttaaatttaacagtaatctatgcattcaattgtacgagaaatattcactgaaggcttaccctgagccatgccatagtgaaattgttggagatagcacaataaaaaaaaaagaaatattaaacaaaacttgctgttatggtacttagcttttaatgaaggtaggaaaa

SEQ ID NO: 412395 - DNA, 492 bp, Homo sapiens
atacaataaataaatgtatggtgttttaaaccaccagatttgtggtaatttgatacaacagcaataggaaactaatagaaatgcaaatctaggtgtcataccccgatttaaatttttttaatggctcctcatttcacatatgattaaggaaatagagtgctattagacacataacaattggatctctgggctaaaaagccctggtttgtagtgtttgccaattcttgtagtataattactccagttatgttgaatttcaagctaccaacattacctaattaaaggccaatttggaaagacatgcacagagttgaatttcacaagctggtacaagcaaactgctagacaaattccattcctagtgatgtggcttttaagaccgtctttattctaactctaagttggcaactgcagttcayacatctttccctggtctctctcatgttctttgaatacactggctttttccctgggatacctttttttgtctgt

SEQ ID NO: 412396 - DNA, 603 bp, Homo sapiens
ccacgctgtttgaatttctgtagctttgtaataaaaatgttgatattagaaagaatatgtcctctagctttgttcttcttgttcagtatttctttagctatttgggtcttcttgcaatttcatgtgaatctgaggattgactctttcatttctgcaaagagaaaaamcttattgagattttgattggaatttcagtaaccctgtaggccactttaagtagcattgccatcttaataataaatcttctaactcataaatatatgttgcctttccacttatttggatcattaattcttttcaaagttgttttgcaattttcagtgtaacagttttgcacatccttggtcaagtttattcctagaaatttcgctcttttggatgtaattgaaaaaggaattgtgttctcgatgttattttcaaattgttttattgttacagtttaaacatacaactgaattttatgtgttgattttgtacattctatctttgctaaattttgtttattaggtgcaatcatttgtgaaggttttttttggtggactctttagaaattactgctgatttttaattcagtagattattttgactattttcgagcaatag

SEQ ID NO: 412397 - DNA, 543 bp, Homo sapiens
aggttgttatgttaagttattgtaaaccacggagttaaccaaacttctttgtcaattgtgtttctaactgtaactaccatggacattttgttattcacagacaattgttttcttgtttggatccttttaaaargatggtttataataaactatagaacattgacaggtgctctcaaacatggatttctgataactttgaaggttataacattggaatgaagaaaaaatatacaggactcatgaagagctgaaatgttcaagaatatcaagcaaaataagagttatctaaatggactgaactcagaaagccaaagcaatctttttgacatttgtttggaacattactgatcctgttttgtttttcagagtcaaaaaaacttattttgaacaatttatggcctttaataattaagtaagttatattcctgtgaaaaaaatttggatcatgtttttttctgtctgcctggttcctctagaatttgaaaactaaatgtgagcattcttaacttatggcaatagagttgtttgccacgagtgcagtaa

SEQ ID NO: 412398 - DNA, 613 bp, Homo sapiens
ttcccaaaccttaaactggttggcttaggattgggctcaggggaagggaacccagaagcatgatatgccagcaaaaggataaaatttttttttttttaaccaatcgggactttggcctccctctccctgtgtaaactggtaaaaggcctggggatctttgagctgtcctcacctcgcccttgtttcattttgatacatgttttctaataatccagttagtcacttctgactttcaggccatcaggttccaaagggtcatgcaactggagctttggacaatggccccttttgcctgagatccttaaataggcctcttagagaactatgactgctcttttcccaaaacagtgccccttgtaagcaggaagcagttaagattggtctttgtccttatccttgtttgtacttctttagagtggggaatgagacagccaagcagaaagggctccccagagaacctctgactggtcttgccctgggagaatggggtggagccagggaagttcacaccgtttgcagaggagagaagcttggcctcatgcattcctgcatggtgaggcagaagccagttaacaggcttccctctcactcygctgaaagtttttcccttttt

SEQ ID NO: 412399 - DNA, 469 bp, Homo sapiens
ccccatttgtctatttttgcctttgtttcttgtacttttgtgatcataaccagaaagtcattaccaaaatcaatgtcataagactttttccctgttttcttctaagagttttgcaatttcatctcttacatttacatctttaatccagttggagttgatttctgtgtaagttattagggcacattttattcttttgcatgtgaatatccagtatctaaatatttgttgaaaagattatmcttttcccattgcatgttcttggctccttgttgaagatcattggctatggagtgcagtaaataatgcactgggctttcagaagcttgctgtgttctaagcatagaaagaacattccctctagtgtacagatgtaccataattacataggatattttgtaatattacatagaagacaaaaatattacataattacatagaagagaaaaactaagaaatgacctaggtaaat

SEQ ID NO: 412400 - DNA, 469 bp, Homo sapiens
ccccatttgtctatttttgcctttgtttcttgtacttttgtgatcataaccagaaagtcattaccaaaatcaatgtcataagactttttccctgttttcttctaagagttttgcaatttcatctcttacatttacatctttaatccagttggagttgatttctgtgtaagttattagggcacattttattcttttgcatgtgaatatccagtatctaaatatttgttgaaaagattatccttttcccattgcatgttcttggctccttgttgaagatcattggctatggagtgcagtaaataatgcaytgggctttcagaagcttgctgtgttctaagcatagaaagaacattccctctagtgtacagatgtaccataattacataggatattttgtaatattacatagaagacaaaaatattacataattacatagaagagaaaaactaagaaatgacctaggtaaat

SEQ ID NO: 412401 - DNA, 582 bp, Homo sapiens
aatgaagggatctattactaactcaattttacaaaataaaaatatgaagatagaagaaactaatgctgttgttcaggattaaataattaggaagyggtaatactgtgatacaagccaataaaattagaattgataaaaagtaaaactttaggcatattgatagttgtggagctccacaagcaatcccaaaatactgcatactattttcacttacctttactatgttccactgggagatttcttacattaattcccagattgtcggttgagaccaaattatatttgtttggttagagaatttgacaagcacataaataattcaaaatatttcagttaatagcatagcaatgtataaagaattatgaggccaaaagaagaaagatcatattttattgagcctagaaaagtacacacagtagttatacaatatcttacaaatcaatactggggagatcaggaaagactcatgataaagcaatggtgttagcaccacatcagtatgttccaaaaattcctggcaactctggaatggaaatgtggtttggattgtggtgttgagatcagttacactgaaagacagag

SEQ ID NO: 412402 - DNA, 582 bp, Homo sapiens
aatgaagggatctattactaactcaattttacaaaataaaaatatgaagatagaagaaactaatgctgttgttcaggattaaataattaggaagcggtaatactgtgatacaagccaataaaattagaattgataaaaagtaaaactttaggcatattgatagttgtggagctccacaagcaatcccaaaatactgcatactattttcacttacctttactatgttccactgggagatttcttacattaattcccagattgtcggttgagamcaaattatatttgtttggttagagaatttgacaagcacataaataattcaaaatatttcagttaatagcatagcaatgtataaagaattatgaggccaaaagaagaaagatcatattttattgagcctagaaaagtacacacagtagttatacaatatcttacaaatcaatactggggagatcaggaaagactcatgataaagcaatggtgttagcaccacatcagtatgttccaaaaattcctggcaactctggaatggaaatgtggtttggattgtggtgttgagatcagttacactgaaagacagag

SEQ ID NO: 412403 - DNA, 561 bp, Homo sapiens
atttttctttaaaaataaagctatttgacagtttttctcaaggaccatgtctatataggcaatggaaactggagaactggactactatccactgaatataataaatcataagtcaaggccagctctatgcaaattgaacaatttgtccatgtttctccatgaagcccctgatctcctcttaaacaaagagcccactattttagtggaaggtctcttctatctttaatcaaaactgatttcactgagccccaaactatccaaggatattatatttaaaaaagaaataaagtgttaaaaattacaagataattatttgcattttaactaaaataaagtgtgagaatgtaggtacattttaacctgctagaaagtggtttgagtggtcagattttgcctgaataatttgcctaacataccctcatttccctaatttgcagtattttaacctgaatcacttaatttcttatattagaaacaaayggtattcaataaatgcttcttcctggagcagaataagcagatgactgccttagagtcagtccagggctggtttctccagca

SEQ ID NO: 412404 - DNA, 543 bp, Homo sapiens
agtaggagaaatagtaagaagtacatctattccatcgtttccaataatggaaaatttcataaaacaaatgttaaatacctcaccaaacaacacccagtgaaaatagttttaaaaattaaatagcatataaagattccatctctgaattttacctaaggtaaactgattcagctaataaaacattctcaggataaatagagttaattatttgcatttaatgatattttaaagtcttttggttgttaatttctttctcaatgctttctttgcttttcttctgttaagtctctgactcaataacaatattgtgctaacaatttttgagttgttaaaaagtggagcttgttaaaccaaaattgctattactgtcatgaatcatagtctgcaacactttaagaattatccaaataatggccaatgtaacccttttctaatawcacgttttatcttttgtgtataagatagggaaagaagaaagccctattataaatttgtagtaacttaactagttattaataatagaggaagtctttcccaaaacac

SEQ ID NO: 412405 - DNA, 436 bp, Homo sapiens
ctttacatatatatactttaaagtttaaattgtacatgtataatctggagaaaacacctattcacaactgtgtcatatgtccttattgaattagtagacttctttccacataaactaaactttctgtgatctccataggcagcttttggagatgtgrtaagaggatgagttgcaatgaagtgtatccattagttaagtttgctttatttcgagaatgatatgaaactcacatggtcgtagtttatctcctcctgatcaacacatctaattaatacttgtgtatgtgattaagaaaaatgaaaaaagtaaatatacattaaagttgagtctgtcatctaaaagtttcaagtgtataggcaaaacaaatattaaatgtggatgctgtattttgggaaacttatctattactttccttatagttgccaaggaggtaaat

SEQ ID NO: 412406 - DNA, 540 bp, Homo sapiens
gtctgatatcctgaatctataaggaacttgaacaattcaacaagcaaaaaacaaatatccccattaaaagtaggtaaaaaacatgatcacacacacacccctcaaaagaagacatacaagcgaccaacaatcatgaagtaatgctgaagattgctaatcattaaataaatgcaaatcaaacctacaacgagataccatctcacactaattgaaatggctgctattaaaaagtcaaaaataacagatgctgatgaggcttcagagaaaagggaatgtttgtacactgctgggaatgtaaattagttcagccactgtgggggaaccaytttggggatttctcaaagaactaaaaacagaactaccattcgactcagcagtcccattactgggtatgttatccaaaggaaaacaaatcattctagcaaaaagacacctgcactcacatgttcatcacagcactatccacaatagcaaagacatggaatcaacctaggtgtccttcattggtgaatttagagaaaatgtgatatatatatacac

SEQ ID NO: 412407 - DNA, 540 bp, Homo sapiens
gtctgatatcctgaatctataaggaacttgaacaattcaacaagcaaaaaacaaatatccccattaaaagtaggtaaaaaacatgatcacacacacacccctcaaaagaagacatacaagcgaccaacaatcatgaagtaatgctgaagattgctaatcattaaataaatgcaaatcaaacctacaacgagataccatctcacactaattgaaatggctgctattaaaaagtcaaaaataacagatgctgatgaggcttcagagaaaagggaatgtttgtacactgctgggaatgtaaattagttcagccactgtgggggaaccactttggggatttctcaaagaactaaaaacagaactaccattcgactcagcagtcccattactgggtatgttatccaaaggaaaacaaatcattctagcaaaaagacacctgcmctcacatgttcatcacagcactatccacaatagcaaagacatggaatcaacctaggtgtccttcattggtgaatttagagaaaatgtgatatatatatacac

SEQ ID NO: 412408 - DNA, 603 bp, Homo sapiens
actgttattaaatatagtcacaatgctgtacaatagatttccagaacttattcctcctgtctaactgaagttatgtgtcctttgaccaacatctccccttccccacccctacctcttgccagccctggtaaccaccattctgctctctactcctatgagttcaactttttagattccatgtataattaagatcatgcagaacttttccttctgtgcttggctcattttaccyaatataatttcttccaaatttgttcctgttgttgtaaatgatgggattatcattttttaaggctgaatactattccattatgtatgtgcacgtgtgtatctgtgtgtgtgtggatgtgtgtgtgtaatatgttgttcatttatctgttgatagacacagattgattctatatcttggttattgtgaatgatgctgcaataaacatgagagtgcagacatctctttgacatactgatgtaatttcctttagatgtataagcagaagtgaaattgctggatcctatggtagttctatttgttaagtttttaagcaacctccatactgttttccatagtggccacaacactttacattcccatcaacggtatat

SEQ ID NO: 412409 - DNA, 606 bp, Homo sapiens
tgtcctcatttaataatatatgttaatattcttaaaaccttcaatttatcacccccactgtaagaatttagtctgacaaaccagaaacatgcaaaaagatttctgtacaaagatgcttattgcagtattgttcataatatcaaaaaatgaaaccaatataactgccccaaaattaaaatatgaaataaattatggtataactataaagcaatattaaaaatcgtgtttgcagatcatatgctgatagttaataaaaagagcaggaaaaacctacatagtgagtctgatcaaaacaatgaacaggtacagctcccagcctgagcgacgcagaagatgggtgatttctgcatttccatctgaggtactgggttcatctcactagggagtgccagacagtgggcgcaggtcagtgkgtgcgcgcaccgtgcgcaggccaaagcagggtgagacattgcctccctcgggaagcgcaaggggtcagggagttccctttcctaatcaaagaaaggggtgacggacggcacctggaaaatcgggtcactcccacccgaatactgcgcttttccgatgggcttaaaggtgcaccacgagattatatcccgcacc

SEQ ID NO: 412410 - DNA, 622 bp, Homo sapiens
taacagtgttagtaaggatttttcagagaaatagagttaatagaaaaaaacatatataataaatatatatgaagattcattacagacattggctcacttgattatgcagccaggaagtcccaccatctgctgtctgcaagctggagaaccaggaaagccaatgttgtaattaagtctgagtctcaaacctagaaccgggggrgaaaatggtataagtcctggtctgagtctgaaggtctgagaaccacggactgtaatgcctgagggcagtagaagatggatatcctagctcaagaagagagaaaaaattcactgatgcttgtccacattggtgagggaaaatctttactcagtctactgaaaacattcttacagacacagcagaagtaatattttaccagctatcagggcattccttagcccaggcaagttgacacacaaaattaaccatcatgattattattataatggttattatttaaaaactggggcaggctctattgtgtgtaagtaggtcttatagctcgaaggaatcaggcagaattgtgcaacttgcttcagtatatatttctaacttttggtttgtgcattggttagctattgttatgtaacaaataactag

SEQ ID NO: 412411 - DNA, 576 bp, Homo sapiens
ttgttgtgcttctgattagttgccctctcaaccataagcagcctataaacagggcctggctccatccttgttacttccccattgcactgaattcagtatttttccctcaaggtagatagttgtggggcagcatccctaaaaatgtccagttatataatggcatccagtaaatgttttcttaattacttacctccattaacaagctttatgcaaaaaaaaaaaaaaaaggaatgctgactttagacttcatctccacttaaaggaagatttctgttgcttttcacaatagatatgttggatattttgcacaagtgaaacatctstacaactggaatctccctccaagacggatactctttataaaaagattcattatttattcaattcgtggttaagtgctttatgtgtaattgaagaattgggcaggagggccaatgtccccactctgggagagttttgctcatagttatatatacagatgagcctaactcatacctgtctttttacatattgtcacacaggaactcctccttatttatgccgctcctcctgcaattgcccattgattgccagccc

SEQ ID NO: 412412 - DNA, 576 bp, Homo sapiens
ttgttgtgcttctgattagttgccctctcaaccataagcagcctataaacagggcctggctccatccttgttacttccccattgcactgaattcagtatttttccctcaaggtagatagttgtggggcagcatccctaaaaatgtccagttatataatggcatccagtaaatgttttcttaattacttacctccattaacaagctttatgcaaaaaaaaaaaaaaaaggaatgctgactttagacttcatctccacttaaaggaagatttctgttgcttttcacaatagatatgttggatattttgcacaagtgaaacatctgtacaactggaatctccctccaagacggatactctttataaaaagattcattatttattcrattcgtggttaagtgctttatgtgtaattgaagaattgggcaggagggccaatgtccccactctgggagagttttgctcatagttatatatacagatgagcctaactcatacctgtctttttacatattgtcacacaggaactcctccttatttatgccgctcctcctgcaattgcccattgattgccagccc

SEQ ID NO: 412413 - DNA, 629 bp, Homo sapiens
ataaacatattttccctgcatctccatgaaccaatcttttgattcaaaggtaaagctctgggtcatagtattcagctaaggagatatttgaaaaaagatctttcaagttcaattttgctaatatctttatctttaatatttcagaattaccagatttctactgaatccaggctggttgcagtggggagttggggtgtgggagaggaccttttaaaaaatgtgtttctgtagcctggggctgtttctgactgttgatttgatgattgatcttggttcatctctatggttgcactaaggaaatcttacatactaatgttaatctgtcctatggggccatattgacaatgtcctagtcctatatttaaaagtgcatattctaagtcaataagccattgcatagatttttaaatgtcataaaaattgtgtgtgatgatcaatgataataattatggtaacctaactttgcaagatagatgaactaaattagccagtgtatttaaagttggagtgcatattgtattttatatttgtattttrtttgcattgtgattatttcactgatgcatgtacatccagtgtcttggggtcatttgaaatatatttgcacaatagtggctaatcacttacac

SEQ ID NO: 412414 - DNA, 575 bp, Homo sapiens
gccaacattaagaaacatgaactaaatatatatattttaagttttcttaaatgtcattgagaatttgtgtctattatgaagtaatactgtagtcattgtacactggtacatttctacatcctaattcacagggaagttaaatttgccctcattataaggttggtaagttttttccttaaataatccacaagtcccccttggagtcttcatgagaagtgctagggagaatgtctaaggtagagagaggtacctgtccaagctaccagataggttatatgaccatttcatgaatacttgctattaaatatttgtatgttaggcagtatttgcttttttgatacctaccacctggtactaaggatctgaaagaaaggaagtatagtccccacctccctctcaaccccaragactatgaatatttatcaacagatccctgacatttgctgaatggtcaaaagggcttaggtcagttctcaacagtgaagaatagtaatgttcaattttagaaaatcacagaccttttatcaggaaaaatttcatatctgcttcatgggaagatgtcccattttacacag

SEQ ID NO: 412415 - DNA, 496 bp, Homo sapiens
gtcacaaatactctttttggattacaaaattcaaaaagtgagtaagccataaagaacgcagagatcgagaaagaaattttgttataaacagaaaagaagttttaaacagatggaatctttaatgagtaggatgatagaatctaatcaagttttgctaaacaagattgagtggttaaaaaaccraagttgattgtgtattgctagactccagggtcagtgaattctaaaggagaagatgatttgattgcatttatggaaatacggattcctaagttactggggactgatactgagaatgatcaaattagagtaaaagggcattttagatgccatggagaacattaataatgtaagaaaacaagcatctccaaatctctgataacaaaaagtacacagacatttccataaagggatatagataaattactttttaaaattattattcattctgccaatcttatcagagcaaagaaatgaaagataactcttccactta

SEQ ID NO: 412416 - DNA, 564 bp, Homo sapiens
tgctgtagtgcatcacattagggattctttgctagcttttggtcattcatctgtttgattcaagtaacctatttagagcatatggtaaagagaaattgatcattatgtctatattccaagcattgtgttaaaaatgcatagagctttttctaacatatctaatccctctgccatcttctctggagttcccatgattttgaaaagccatctatgtctttatataattactgagtaaaacaggacatttttgcacaattctgcaaggtatcccaccccaatgatgatcagacattccttgattcagtaaatatttaataaacactgtatgccagtaggtgtagagtcaaagttattacattaaaaacaagtcctgatatttgtggtagagacaaataacttcataatggtagatactgtctagtgctgtgtagaaataaaaatctatggtaatgcaaattgagcataagtgtgcgtattytaaataagtgatcagggaagaccttcctaaggtaatatttgagcaaagacttaaatgaagtgaaaaaaaaaaaaaggtgttacaat

SEQ ID NO: 412417 - DNA, 643 bp, Homo sapiens
cacaacatcgtagtgagaattaaatgagtgcctacagagcacttggatatttaaaatcttaaatattatccccctttctcttctaatacattttcctctttgagtctagcaaggtatcttgtacatgtcaggggatcacaggcatccactagtgcacagagcacagtctctgcaacatagtagataatcaataagtgttactgagtgataaatggacagataaaacactgcctttctacaagtaaatttcacagaaattttactgaagggaaaacttaaaatcccaggtataaagtaacttgtctgaaaatataaagccagcaagtaaagaccagagctcaactttttaccactctrtttttataaagtactcctcactacactgcattttcacaactgatgtgtgtgtattataaataaatacaaggaatgaaggaaaagtacaaggaaagaaggaaaagtgaaagagtagggggaaagaagaaaatatgttcactttaattacagtttattttccatggcccctgactaattgcgggaactttataaagtttgcgatcttttgaccaaactcatatttgtgatttggagatttataatgcttcccttgaccactgctgtgtctacactgccctgttttttc

SEQ ID NO: 412418 - DNA, 643 bp, Homo sapiens
cacaacatcgtagtgagaattaaatgagtgcctacagagcacttggatatttaaaatcttaaatattatccccctttctcttctaatacattttcctctttgagtctagcaaggtatcttgtacatgtcaggggatcacaggcatccactagtgcacagagcacagtctctgcaacatagtagataatcaataagtgttactgagtgataaatggacagataaaacactgcctttctacaagtaaatttcacagaaattttactgaagggaaaacttaaaatcccaggtataaagtaacttgtctgaaaatataaagccagcaagtaaagaccagagctcaactttttaccactctatttttataaagtactcctcactacactgcattttcamaactgatgtgtgtgtattataaataaatacaaggaatgaaggaaaagtacaaggaaagaaggaaaagtgaaagagtagggggaaagaagaaaatatgttcactttaattacagtttattttccatggcccctgactaattgcgggaactttataaagtttgcgatcttttgaccaaactcatatttgtgatttggagatttataatgcttcccttgaccactgctgtgtctacactgccctgttttttc

SEQ ID NO: 412419 - DNA, 544 bp, Homo sapiens
gactgtcttaagccaaggtaagataaataattataagcttttacttcccctcttgcactcttggattcacatgagaaggcagctgacatcttytgattcaaggagaatgcagagatatgtggagtagaattaattcaccctcaggcctggaaagtccagccattcttcagcttgaagcagagcttctcccagtgagctgcagacctctgagcaagaaaaataattaattattgtaactgagattctgggatggtttgttacacaacaaaagttgactaatacagaccacaatatcctctttaaaaatgtctccttctcccttcattttacaaatcaaatgtgcattttccttccactgaaactttataaccttcctactgcattcatacattaggccctcctagctaaattccccattattattttaaagttactctctggaatatttttgcctctctcactactttataagtactaagttatatagtatttgcaacatacaccttcactctattggctagcttagtaggcaagtgcctgaaga

SEQ ID NO: 412420 - DNA, 497 bp, Homo sapiens
attaatacattttgaattaagaatacttttaaaaatatattttcccctcagatattagcctatttttcttagttcatcaaccttgttcctgacatggtcactaacactacatgatgctgtataatgctacataagttttggattatttaatggaagtgaaaataattttgaagtatattttcaaatataagaaaatgttcaatgtctcttgcagtcaagtgaataagaatgctcargccaaagctgagattaactggcttgtaacatttttggtcctctttataggtctcaaagaacattcaataaattatttcaaagtcaatggcattaaattgcatgtacaatacaataatgtaaaattttaaattcattattattgtttttaataatctgttgttaataaaatgaaatgattttacataagcatgcaggttatttagttgtatttaaataattattgctctagtctgaatgttcatgttcctcaaaattcatat

SEQ ID NO: 412421 - DNA, 617 bp, Homo sapiens
tagtgacccatagtcaatagcctagcagtattttactcagcttgattgttgctaagcaacaaatagggggataggggttaagcttctagaatcacttacacattaattataagccagtaacattagaatratgtaagttttagtaatgaatagtattatatatgttgtcacagtatgccttttttcctacacaagaagaaaaagatctgtgtgctacttgtcatggggaaatgacatttcattaacatttgaaggtactaagggagtaggttttaagagaaacaattaggtgttttattactatctttccctttctcagaggttttctttcctaattgctattgactttgcattctttgaactactgaagctaacaatagtgtaagtaggtgttaagtttcctagttaagaagttgctgaagtgttttgatgattgcatggttgccaaagacttttagacgcaagggagttaaagaccattaaatgcaaagaaatcaaagaccaatttttgctccctatacttagagatcattaccagaatttaattttcccaggaggaaaaagcaatgttctgaaatcacagaacatctctatccacatctctgaaagcagttaca

SEQ ID NO: 412422 - DNA, 324 bp, Homo sapiens
aaccactactaaatcactactttgtcttaaaatgaaagtataatagactgtaaggttataattgcttttttaagttaaactttgttttacatttacagaaaatttgcaaaaatggagtccccacacmcccttcatccaatttcccctaccattaatatcttacaataccatggtatatctgtcacaataaagaaatcggtattggcactattacctaaattccacactttgttcagattcgctagttttccattaatgtcctttttctgctggagatcccagccaggataccacattacatttaatcattatgcatcattttct

SEQ ID NO: 412423 - DNA, 627 bp, Homo sapiens
ttgtaggggggtaaatatcattgctttagtgttttgcatacaataatttttttattaatattgttgcactgatttgtaagaaggaggaggaggggaagaggagactgccctggaaaaggaagatgctaaaggggcaaaaataaacacttctttagtttctaatgacaacagaccaaccatgtaaacatcagtctaaatcaattgttcatataatgcctatttactatgcagctaaggagagaggcttcaaaggactgctttctttaaaatttaattcagggggaaaaaaccttcaaaattagaattaaatcatataatcatgtttacttaataaatgaactaacttcagcattctcatcaattatggaattattcatttcagatataaatgcgtcataatatttgcctgcaaatagcatcttaagacaaggaaatatgctttgtcaaccaaaccagagtctaaatgttattcatccagatatgactaaaaaaaaatgaatgtaacattttacagcactttataaattacttactgttattttttaattgcattaagyttcccaaatataaggacaagtcccaaccatactccttagcaaacccttttggttctgatcaacaactacc

SEQ ID NO: 412424 - DNA, 538 bp, Homo sapiens
tgatatgcagaagcttctaaagtatttcagtattttaaattaaagactccttataaaaggcaaataaaaatcttaaatgactaataagaaaaattaaatccgcttatctttttgcttagttacaatactgccccaaagacaaaaaagamagctatcctggataaaaagtttatataaggtaggccctacagctgggtagaaaaccaagtaggctctcacggtacctgatttcaggacttggtttttagatggcatttctggacttgccttaggccagaagggacctcactgctctaaagggtgagtcccaggccaggcagcattcaacacaagctgactgaagagcccttgagcctaaagggaacatggtggtagtctggcagtactccctgtgggcctgaggtggccgtggccatggggtgaggctcgctgcatttggaaaggggagggaagcatgggaagcgctgcgtcttgtggtttgagtgccagcttagccacagtacaatagaacaccaggtagacttctaagatttttgac

SEQ ID NO: 412425 - DNA, 538 bp, Homo sapiens
tgatatgcagaagcttctaaagtatttcagtattttaaattaaagactccttataaaaggcaaataaaaatcttaaatgactaataagaaaaattaaatccgcttatctttttgcttagttacaatactgccccaaagacaaaaaagaaagctatcctggataaaaagtttatataaggtaggccctacagctggrtagaaaaccaagtaggctctcacggtacctgatttcaggacttggtttttagatggcatttctggacttgccttaggccagaagggacctcactgctctaaagggtgagtcccaggccaggcagcattcaacacaagctgactgaagagcccttgagcctaaagggaacatggtggtagtctggcagtactccctgtgggcctgaggtggccgtggccatggggtgaggctcgctgcatttggaaaggggagggaagcatgggaagcgctgcgtcttgtggtttgagtgccagcttagccacagtacaatagaacaccaggtagacttctaagatttttgac

SEQ ID NO: 412426 - DNA, 547 bp, Homo sapiens
aattttgttaaaatgtcaatatcacccaaagcaatctacatattcattgcagtccctttcaaaataccaatgacattcttcacagaaatattaataataaaaaactatcctaaaatttacatggtacaacaaaagatccagaatagtcaaagctatcctgagcaaaaagaacaaaactggagagaatcacattacctgacttcaaatcatactacagactggcagaggtgctccagcctccatgtggtccgcagtcagcaccacagcacctggcctcctgcacaccctgaaggtagcacccctgcctttggctcagagtatgctggtgccggtgccagctcccagaaagggtgcgctgcrtggagatgacagttgaggagatgaaggagactgagaatgggacacagttggcgcctcttcccatggagggagtggacattcgcccaaacaggaggaaggcatgctgaaggtcatcgagagagggcacaggtacagagatgcccatgattggggactgaatctttgtccactacactggctggctgtt

SEQ ID NO: 412427 - DNA, 536 bp, Homo sapiens
caattttgttaaaatgtcaatatcacccaaagcaatctacatattcattgcagtccctttcaaaataccaatgacattcttcacagaaatattaataataaaaaactatcctaaaatttacatggtacaacaaaagatccagaatagtcaaagctatcctgagcaaaaagaacaaaactggagagaatcacattacctgacttcaaatcatactacagactggcagaggtgctccagcctccatgtggtccgcagtcagcaccacagcacctggcctcctgcacaccctgaaggtagcacccctgcctttggctcagagtatgctggtgccggtgccagctcccagaaagggtgcgctgcgtggagatgacagttgaggagatgaaggagacygagaatgggacacagttggcgcctcttcccatggagggagtggacattcgcccaaacaggaggaaggcatgctgaaggtcatcgagagagggcacaggtacagagatgcccatgattggggactgaatctttgtccactacac

SEQ ID NO: 412428 - DNA, 547 bp, Homo sapiens
aattttgttaaaatgtcaatatcacccaaagcaatctacatattcattgcagtccctttcaaaataccaatgacattcttcacagaaatattaataataaaaaactatcctaaaatttacatggtacaacaaaagatccagaatagtcaaagctatcctgagcaaaaagaacaaaactggagagaatcacattacctgacttcaaatcatactacagactggcagaggtgctccagcctccatgtggtccgcagtcagcaccacagcacctggcctcctgcacaccctgaaggtagcacccctgcctttggctcagagtatgctggtgccggtgccagctcccagaaagggtgcgctgcgtggagatgacagttgaggagatgaaggagactgagaatgggacacagttggcgcctctkcccatggagggagtggacattcgcccaaacaggaggaaggcatgctgaaggtcatcgagagagggcacaggtacagagatgcccatgattggggactgaatctttgtccactacactggctggctgtt

SEQ ID NO: 412429 - DNA, 563 bp, Homo sapiens
gtagaaaactgactaaggacattgtgataattaataagataaattactatttagccattaaatatatatatatatacacattttaaagtatttttaacaatgtataaaatgctaaagatatattgctaagcagcaaacactatgcatcaagttataccatacattaacatacacatacaaaattttatataaaaataatttatacataatttataatatatacttttttatataaatcctatatataagatttttaaatatgaaaacaattcagaatttttttcttttttgacattttctgttttttaccttgactgtataatttttaaaagcaaaaagatcacttatgatatagacttcaattcaacaaatacttttcagtagcctattatgtaattaaattaagtttaacaaacatttctttaatgaaccatacacatgactgtagatataataaagagtacaacctgatccctgctcttgatgagctcacagtttagcargaggaacgtataacaagtcaaaacaactaatcctaatagttgttatgaaagagcagtgga

SEQ ID NO: 412430 - DNA, 604 bp, Homo sapiens
tttgtagaaaagaaattatttcacttgcaataaagtaaaaaatattttctctaaatccttttaaaatgtctgaactgaacatatcgtctgttttaatacgattttctttttgagtacttgaatttttctctgtacagtgtttctacattgagacacatttgatatagttaggtcgatcactgttgcagtttgatcactctgtgtctacatttttgttattgcttatattttttcctgatattaagcaaaacataaagmaaatgtacttagaaaaacatcttccaaacacattattagtgttctagatatttttctcttcctaactatggaggacaaatgctgtaaagaaaaagccttttatttaggaaacacatgaatttgtgggacacttttaacatctttggtcaccagaatgagtataaaccagaatcttattttgagaaaaatattccttttctaggtatatggatttcttcccagtcccatctaatgtcactaccgactttttgtttgagaagagtgccaattacttccactcagaggaagcccctaaaagagctgcttctctggttcccaaagccaagattatcaccattctcattga

SEQ ID NO: 412431 - DNA, 478 bp, Homo sapiens
tcactaccgactttttgtttgagaagagtgccaattacttccactcagaggaagcccctaaaagagctgcttctctggttcccaaagccaagattatcaccattctcattgacccttcagaccgagcatactcctggtaccaggtaaggaaaatgcaaataaaatccaacagggagaagtggagtatggacaatggagcattgtttttagcaatacccactagctcaggttttcacaaaagagatttgctagttgtttgatatctacagaaaaatggacaagtttttcttgatttctattgagaaatttcctccactaagtttttgttcttattttattaacttaatcaattaatttaataaaatgtattaatgcaataaaagaaactaaaatataacaaaatattatgtacttttttatatctatgcytctatatatctgcattttaaggtaataatttaaaatcattattttttca

SEQ ID NO: 412432 - DNA, 579 bp, Homo sapiens
gatagggctgtgctatgttttaacaagcccccagatgaatctgatacatgctagttagaggaccactgttttaaggcaagcttgtgaagcacatttttactttgtatatcatagattactgttttattccctataatgatctatgattacagacaaactgttcattgtttggctcagatataatctaggaagactacctctttcaattcattttttaagacaatattgctgttgacagagttattttaacaatttttctattgtatagatatggtagatttaagtaaatattaaagaaagcttaatttataaatacttaaatagtatttatttacttaaatattgccatatttgtaccatttaagtaaataaacactaaaatactaccttacttccatattaatactatttaagggcggggcacagtggctcatgcctgtgatcccagcactttgggaggctgaggtgggcggatcacctgaggtcaggagttcgagaccagcctggccaacatggtgaaaccccgtctctactaaaaatasaaaaattagctgggcatggtggcaggtgcctgtaatc

SEQ ID NO: 412433 - DNA, 637 bp, Homo sapiens
gtgaggcacttctttctttagctttgagacttgtcacaaagattggtttttaattatttatgcctacggttcagattagtttaattatccaccttttcatcatagcatcagcgatcacatgaagaccctgcagctctgaagtttagcttctacgaagtgatctcagcagggccccgtgcaccctcggagctcagagccttgcagaagagatgtttggtcccrgggtggtatgccagccacatcgagagatggcttgtttatttccccccatttcaggtatggagtaataaggatttacatcatgttagaatctcattaagttgatgactttgccttaaggttaagaaaattttcaattgttaaactattactagtttttcctctttagttgtaaataatgaggctatggcaaagagaaataggcagaagtagaaaaactttaattttctaagagtatttcagaataattctccctgctctatttgctgtgcgtacctttcctgattgtaaaaagctttgaaagctttagatacgattcttatcctgagaataaagtttgaaagagaacctcttaaccaaacaagacaaataatgttttgcttaattaagtgccattatttcctttttgaaccacctt

SEQ ID NO: 412434 - DNA, 512 bp, Homo sapiens
acaaaccacaaaccttaaaagaagttatctgaaataaattcgtaaagcctgagcctatttaacaggcaatatggggcttcttggaagtatgaacaggtgagtaactaggtagtttaggaactgactcttctctcatttgtgtaattttcagaaacaatgtcatacagcaagaaatagtccataggtgattgaataagcagagagagatgtactattatcgctccyaaacaaacgtccttttttattttttcatctttgtctttatccactatttgaccctgtcatctctgcttcagagtcctcagcagttaaagcactggtttgatttttctgtttgtttgtatggttttttgctggtttcctccgattttcttaggtaactgactctgtaaggtccatgaccagggaccagtaaggaactagggctgaagaaggcagtcactctcggaggtgtgcccatgcctgagactgagtgctgtgtcctaggtgcctctcttacctcaccctagtgc

SEQ ID NO: 412435 - DNA, 562 bp, Homo sapiens
gggtttgtttgtttttttaacctttattttagattcaggggatatatgtacaagtttgttaactgagtgtatttcctgatgctgaagtttggggttcaaatgatcccatcaaccaggtactgagaataggacccaacagctagtttttcaactcytgcctctctcccttcctcccctctctggcagtccccagtgtctactgctgccatctttatgaccatgagtatccaacgtttagcttccacttataagtgagaatatgtggtatttggttttttgttcctgcattaattcacgtaggataatagcctccagctgcatctatgttgctgcaaaggatatgatttcattgctttccatggctgtgtaatattctgtggtgtccctctttgagtggtacaaagaagtacacagatcaacttaggagacaattcagtagcctgttcaaaataacccactaaatgccaggaagtaacagtttggagacaaatttggttagataggtgacttttcaatttagctttggtttaatcttgagtcttctcagagcctagataaaagc

SEQ ID NO: 412436 - DNA, 614 bp, Homo sapiens
ttgggtgcaatatgtagcaatgatatacaactacagtttaggaaggagtagtttctcaaatttactaacatttccaaaatgcargttttttcaggtgccttcacttttcaaatttgggatatctcacagaattatgttcctggaattaactggttatatcaattatttaattaattttacctgccagagagggtctttctgatcaggaaacagctcaaaatacttgtgggccagttgtactggaggcagagtctgaagtcgcaggttggtccagctcttcacaaagttggccagattaacaaatgtatataatcccagtcggtcattcccatagttggacaaatgggtcatgaaaatgctgatctgaaaaaagcaaatgaacttcagtgtaaataacatttattttgacactagagggcagtataatcacagccatgctagtttttttccttaagtagtctgcacagggtttcagttgatggcgtgtttttggatttgggacatgtccctcaaaccctcattatattaatacatactggaggatgtgttatcagcaagacttgagcattttttccctgaaattttcttatatttcataacaaaaaaatacattc

SEQ ID NO: 412437 - DNA, 588 bp, Homo sapiens
attccaacttccatgtgtctgcgggtattttatttccctagagtatgctatacttcttctcttccttcaaacctgtacttacttttccaagaaaaagttatgactaatctcactatatttaaaggaaccatataaattgcattgttatcatgtcctttcattcatttagtagatattcaatgagcatctacaaataaaccaggtactgtaattaagttctgtggagtgtaagatgaatataacatggtccttacacctcgcattcaagaagctcaaagccttgaggaaacatcacaaatataaacaattacagtgcaatactaaaagtataataaaggtacatggcaagagttatatgttcacaaaggaaagaaaattacctggaggatccagacatttcacataacaagtaatgytttataaatgtgctcttcaactgtcaccaatgacactataaatttttaaggggctaacaccaggtcttcaaattttgctactcctaaagcaactaacatagtactgtgaatacagctgatactcagcaaactttactatacacatatactctaatagaaaataggtattatt

SEQ ID NO: 412438 - DNA, 584 bp, Homo sapiens
accttgatcctttttgcttccataagatatcaccctggtacattacattgatgacattatgctgattggatccagtgagcaagaactggcaaacacactagacttattggtgagacatttgcatgccagaggcatgggaaataaatccaactaaaattcagggaccttctacctcagtaaaatttctagggatccagtggtgtggggcctgtcaaaatatttcgtctaaggtgaaggataagttgctgcatttggcccctcctaccaccaagaaagaggcacaatgcccagtgggcctaaytggattttggaggcaacacattcctcactggggtgtgttactccggcccatttattgagtgacctgaaaggctgccagttttgagtggggtccagaacaggagaaggctctgcaacaggtccaggctgctgtgcaagctgctctgccacatgggccatatgacacagcagatccaatggtgcttgaggtgtcagtggcaagcagggatgctgtttggagcctttggcaggccctcataggtgaaccacagcggaggcctctaggattttggagcaaggccctg

SEQ ID NO: 412439 - DNA, 598 bp, Homo sapiens
gagctatgatcacaccactgcactccagcctgggagacagtgcaagacctcatctccaaaaactccctttttaattttaaaaaataaaatataatttattaaagtttcactatactaatatgtaaaatattggacaaaaaaaagaaaactgtagttgtaatacaatgctcagtaatgtttctttttcatcttttattttttaccaggttactgaaattgaagagaggttyggttagaggtttcccagagcaaggaaggctttcatatgtgtgtcagtataagctaacagtattttagttccaaaagataagccctttgcaattggtggtctgcacataggcagttattgcctcttgaacatggaggggctcctagtttcctgtagaaaaagtttatcctgtcaaattggtagatgatggcctggctcccaatagttctccttacttttaagtaggcattgaaatcctctctccttatctttagcagtcttttctcagtaacttcagaaaaatttcttgtgaagggtagcatatataagaggtttttttcttgaagaacaagaaaatgagccatgggcccatgttacactgtcctattt

SEQ ID NO: 412440 - DNA, 585 bp, Homo sapiens
ttaaaataacttattataaatataagagggtttttgtaagcctcacgttaaccataaagcaaaaacctacaatagatatataaaaataaatagcatgaaataaaaacgtactaccagaggaaatcacttaaccacaaaggaagwgagtgagagaggaaaagggaagaattcacaaaacaacaagaagtcaagtaacaaaatggcagtagtaaacccttactgtgaataataactttgaatgtaaatggatcaaattgtccaaccaaaagacatagagtggctgaatggatttaaaaaacaagatccaactgtatgctatctacaagtacttcacttaatctatgaagacattcacagactaaaagtgaaggaatgaaaaaagatatttcatgcaaatagaaaccaaaaaggaacagggataggtttactaatatcagataaactagacttgaagccaagagtcatttttaaaatgacaaaaaagaaagccattatataatgatataggggacagtacagcaagaatacataacaattgtaaatatatatgcacccaatactggaacacacaaatatgtaaaaaag

SEQ ID NO: 412441 - DNA, 413 bp, Homo sapiens
agcggaggagggaggacagcgtggcgaacgcaaggcagcagccggcccgcctctccggttcagcgcgccgcgctccgcgcctccccgagccgggtctgcggcggctgccggtcacgctgcgcgggctggcgcgaggtgcggaggtgggggcgggcacgcgcaaggggtcgtagtcatacccctcggtgcggcaccggcgccagagcgcgacgcttcactgcgtgcsccgcccagggatgcagctaccggggaccaggtggccaagggaacagggtcggggtctgtaggaacctgcgaccgtttcgcttctccggaccttgtacgcacacagacacactcgcacgcacatacacggttacctccgggtctccgaggaactcccaggaaaaacctaatagtcacaggatttatca

SEQ ID NO: 412442 - DNA, 474 bp, Homo sapiens
ggcgccagagcgcgacgcttcactgcgtgcgccgcccagggatgcagctaccggggaccaggtggccaagggaacagggtcggggtctgtaggaacctgcgaccgtttcgcttctccggaccttgtacgcacacagacacactcgcacgcacatacacggttacctccgggtctccgaggaactcccaggaaaaacctaatagtcacaggatttatcatttattcctaaggttacggatctttmactatagggagctgtggggaagggggaaaaggggattcatggtgtggaatccaacccttcagataatttttagatcttgagtatctctatccttcaggaaagttttgctagctggtttcgaatttttaccctgtcggtgtcacaaatctttatagactttaggataaggccttagtgtgagcctgaaatcctaatcaactgaaggactaataagtagtcaactagttaat

SEQ ID NO: 412443 - DNA, 548 bp, Homo sapiens
tacctatgtcacatgataactaagtgtgctggctgagaattatattgtactacactgcaagtagtaatggacttagtttcttggcctgaactatattgccagccagagattcagagatacttggtaagcagtttaaactgggttttattaaaattaatatatctaatttttataatgtttatttytttatagcaaagatgtgtatatttagagcatgtatattgagagatggagcaagaaaatagtattttatatttctcttaggtgatttaaagattgcatgctttatagcaatctttggtacttttcctttaaggtactgaaacaggtgataaggaactatacagtgtgacatacagttgtaactactgtaattgctatgcataagcaaggtattttaaaagcttatatctaactaaagggaaagctctaacttatgctttaaaaaataagtgatattcacaatgatttctcttttgcatgtaaaaacactgatacgtatcttctaaatcatagaaaatgattaaaattaatcttgtatggtttta

SEQ ID NO: 412444 - DNA, 581 bp, Homo sapiens
gtcacatcccatatcgaatccattatcaaacatgtcttcagaatataacctaaatacaactgatttttatcacctccaccatcaacagcctggtttttatcacctccaccatcaacaccctgatctaagccaccatcatctctctctggatcattgtaatagcctcctggtttctctgcccttgatccctagactctgtgctccaaacagtagccatagtcaatctgtaagtcagatcatgtcattcctctgctcaaaacactccaatcacttccatctcacccagagtaaaagctaaagtcttcagagtgacctacaaaggcatatcaaacaaatatttgcagtaagtaaatatttgttgaatgaatgaacatgtatgcataagggaccattcaaaaactcatccatagcatctggggatgccttctctgtgctctcytcccttcaaggctaagaactgcagactcaaaatgcatctgacaggctcaaaattgacatctgatataccctccagaccattagtggaatttttttttttttaattcgacttgaactctgtgaggtcaagattcaaatgttta

SEQ ID NO: 412445 - DNA, 475 bp, Homo sapiens
acagggcatacatactatatcagctggatttacacttttcttttcccctagaataacacacagaggggaaggtcaaactctcattcaatggtgccttttcccattaaatcctcacagcaggtgtgcagaggagctcaatatcatccctcccagccacacttagtggtcacttctgcttctcagcctgcatgtccttgctatctgaamtcctcttctcctgctaaagcccctgcctagagttctcttcaatttgggaagaaagttgtattatttgtatattttgaaaatagcttaaattaagaaaaatcctgaattaatctttatagaaattctgcagatgtactttgtttctgtgttgccttgtccactggtctcactgaagccacttcacaataataataacagctaacatttaatgaacaccaattcaagctttgcatgtattaactcattgaatactcacaacaactcacta

SEQ ID NO: 412446 - DNA, 569 bp, Homo sapiens
gaggttagggaatagaccacatggtaatttgagggaagagcagtccaggcagaagaaacagcaagtgagaggccctgagaaaagaacatacctggagggamctgggaatcacagggaagcagaatgaagaaggcagagaaggatgggaatagtaggagataggtcatgaggttagaacaaaggagtggagaagtatagttgtgtgtgtgtgtgtgtgtgtgtgtgtgtgtgtgtgtgtgtgtgtgtgtgtttaagggtgggttacatagggcacttttggccactgtaaaataattttgggtttttctctgatgtgtgatgggttttgagtaaagaatgacaggattggacttaatttttgacagcaccactctagttgctgagttgagaatagaggcaggcagcagaaagtgaaagcagggagaccagcaggaggctactgcaaaaatgcaggtgagaaatgatggtatttggatcaaggtggtggtaatgatgatggtgaagagaagttagattctggatacgttttgaagctacagtcaacaggatgtgagtgatgaaagaaagat

SEQ ID NO: 412447 - DNA, 581 bp, Homo sapiens
ttttgacagcaccactctagttgctgagttgagaatagaggcaggcagcagaaagtgaaagcagggagaccagcaggaggctactgcaaaaatgcaggtgagaaatgatggtatttggatcaaggtggtggtaatgatgatggtgaagagaagttagattctggatacgttttgaagctacagtcaacaggatgtgagtgatgaaagaaagattcaagaataaccccaaacttctggcctaggcaactggcagaattcacttgccattaacagaggtggaaaaaacttcataaggactaggagaagaggggatgatcaggaasttgatttaggaatattaaattggaggtgccaattagactttagagtggaattaacaagtaggcattgtatacaagagtttctgtagtttgagtaaatgtctaggctgaggacataaatttctaaagactaagggcatatagatggcatataaagccatgaggctggatgagatcacaaagggagtaagtccatacagagaaaaacaaggtgtccaagggctgagtgctggtgcctttcacaattagcagtcagggaga

SEQ ID NO: 412448 - DNA, 617 bp, Homo sapiens
ggaatgcaaaataggacagtcattatagaaaacagtacagaggttgctcaaaaaattaaaaataaaactaccatatgatccagcaatcccacatctagctacatatccagaaaaaaggaaatcagtatactgaagagttatctgcactcccatgtctattgcagcagtattcacaatagccaaggtatggaatcaagatgtgtccatcaacagattaatggaaaaggaaaatgtatatatacacaataaaatgttattcagccacaaaaaagaatgaaatcttgttattygtaacaacatggatggaactggaagttattgttaagtgaaatatgccaggcacagaaagacaaatatcacatattctcattcacatgtgggagcaaaacgagtggatgtcaaggaggtagagggtagaccagaggctgggtagggaaagtgtttgggaggagaatgaagagaagttggttaagcagtataaaaatacagttagaagatataagttctagtatttgacagaatagtagggaaattattaacaatttattgcatatttcaaaatatccagaaaaaaatagtaatgtacccaacacaaagaaaagacaaatgtctgaggt

SEQ ID NO: 412449 - DNA, 585 bp, Homo sapiens
agtctacttatattaatttgaagtcaatgaaaatcttccatttcttaacgctttatattgcatgagacgagtgtcaaaatcttgcattgagctccatgtgttgatttccttgtaatttctgttttagccgtccaggtcttctcaatgctggtgatcccagctatccatggcttgctgattcttggccagccacgagcttgccagtaaataatagcaacagtggcccaaatgagattggaaattttggccgtggaggtaagttgtgttttttaaaatagtgttatttgagttctctctctctttttttttttttgaccttcctggatttttttaaagaaacatatcagagagtatttactcycataattaaaatcaatgaaacatatgcactaacagtgttgtacatttgctaaatattttaatataaaacgattgtatcttcattaccttgagtaaaaccaaacttttaaggaagctattactaaccaagatgataaatatttataatatatatgctttcaggattactagtacaagattactgaactcagagactattttgttaactagggcttatggttttgg

SEQ ID NO: 412450 - DNA, 654 bp, Homo sapiens
actttctcttcctgttttacaagtccccatgtctgtagtctctgactatagcttttaaaatgcaggtttctaagctctgtattaatctcttgtggaatacacatctttggtttttctttgctyatgatttatgtgacactgacacatttataacattaatataaattaagatcatatacagaattttattttttatgttagagaaggaggacacaggatatacttttagtttcccatttcaaatgtgaacttaaaagaagtaaaataacaatatatgcatatataataagtgctacagtctcagagagacaaatgaaggcttttggagggaaaggaagacatagacaaaaaatattcgcgtatgtgtgtatacatatataatgcatatatagagcatatatgtatatatattttattttataaaaaaaggcaaatgatatcattaaaggaagccaatgttatgacatagaaaattctagttagaaaaattaatctgaagacttcaaagacaggagttatgtacaaagaaaagaggatgaagaagaaatttataaacatgtatatgtgattttttaagccaagataataaataaacaaccattatagaaataaatagatttattttaatatctaactatttctaagtgaaaaaaa

SEQ ID NO: 412451 - DNA, 553 bp, Homo sapiens
ggaaccaaaacaaaatctatgcaaaacgaaatttaacaaaaacctgtatattaaccaattacttatttaattcatgacagaaaatgaacataattaattaaagagagataaagaacctgtgtcttccaagaattactcaaagaaacacagaaacaatttaaaacaaataacttaggcawcgtctaaatgaaattatatacaatgaaatctctcttttaaaaacgaaaaaagggttacaaaggctaaaagacaagtaaagataaagaattttatattagagcttaacaagaaaataacaaaaaacaaaaaaattagaatatattttagaaataagaaatatataatgattgcaattttaaaagttagagacgcggtatattgtcattgagaaatcatacaatatgaaataaaaatgattgaaattattatagagaagttgataaatgtgaaattgagactaaggaaagccaatataactaagaagaaatataatttgaagaaatgagaaagtaaaacagaaaaaaaattcaaagataaaacagaagaaaaggtt

SEQ ID NO: 412452 - DNA, 620 bp, Homo sapiens
tgcttagtggatagaaggatggctacttaccaacagggcgagctgtagacattacaatggtgtggtgagaacataaaaaagaaattaaaaaaaagaaagaaaaattatcagaatgcatgatgtgtaatgttacatttaagtatggacaatagagtgatttctagtctcacaattcaagtatgaccaagatgtctgagtctgataaagttgagagttataaatataattctaggaaaataattactttgagaactgactgtaagcaatttgagagatattttaggtaaagtcttatcatcatcacttactgcagttattatttcaaagatcttgagttaaacagycttgtgttaccccaaagttaaaaacctgatgaatataactattcaagtcacagactagcaaatgtcatgtcaataaaagaaggcctcgctgtctgatttaaatagcaattggattttaagcatggttagtcagaaccattacaaggactgcagaaaagcccctgacgctgcttttcagtcagtaataagttgagattacatcacttttcatccatggacagggtggatgaaaatataacagataggttggaacatccttagagatttcaactcagt

SEQ ID NO: 412453 - DNA, 582 bp, Homo sapiens
aaatgtttttaaacagtattttactctacattatattgcattaaggagatttttttaaacccagtttttgwggtttcagtcttagagaggtgataaattcataccacaaagaataaacactctaatccatctacagtatacagattaggggagaggctatttaaggtttgctgatttaagaaaaaaaaaactattgaaaacaaacaatgctctctattagttttgtaagttagcttcaaacatccccgcatgaggagcatgctttgttaaatgaaatgttaagcctgaaactttcagcaaattatgaaaacaattagctgggaaaggtcttaaagcaaacagaccacttcaagtctcactcatccaagcattcaagtataaaagaaaccctgctgcttctacaaacaaacaactcctcacgttttctcaccatttgtttagtcagcaaatatttttcggatggagcatttattggttggttgtttattattattttccatttactttagaaaaaaagaaaaagaaaacttcggggataatttggtctagtgaattgtttttgcaaaaagctgcctagcaaac

SEQ ID NO: 412454 - DNA, 287 bp, Homo sapiens
agttgagttttgtatgatttgaagcccaaatcataaacctggtaaaaatcctttttcttaccacgcgaaggactaacctgagaatccctcacacctttcctgcaacttcaaacttctccgaacctttttcctaaccttctgaawctctttgggagcaaagctgcacaagggtcagaggtatgactaaatggggtaagatgtaactgagacttggatgaaaacatgcagccaatctctttatcacgaaggatgagagaaggaggcacagttagcagtgggagaaagga

SEQ ID NO: 412455 - DNA, 637 bp, Homo sapiens
ttttccaacccgattctcagcaatacacatataggtgccttcatctgtactcatggtctttttaattcttagtgtgtaatcgtctttgatgtcatacctgtgtagaaaatgaactggttttattaaatagtagtagctatacggataataacattaagtattcatcttcatttttctttttatactgtattttacctaaacacaaatacacacacacacaaatcagccacaaagtgcaattacttagattaaagatattgctaataaattcaatttcatatctgatctttagctgtttgtcagttacctatacttcacatatgtatagaattctttccacttcgyaactatcaaaggcataattagcactttgacctttatttggtagctcttgactgctaaagaaaacagtatacatctcagtttcttggtgagttttatttcattagtttgttagtcacattgtgttcaatactatgatttatttttaggcaccttggctattagagagccgaaatatattaaagaacaaaatttttctcttatttgttggcaaattgacaaaatgggcattagttaaaagaattaagggtatgtaatcaatttttaaataaggaatattaactcctgaaacatc

SEQ ID NO: 412456 - DNA, 637 bp, Homo sapiens
ttttccaacccgattctcagcaatacacatataggtgccttcatctgtactcatggtctttttaattcttagtgtgtaatcgtctttgatgtcatacctgtgtagaaaatgaactggttttattaaatagtagtagctatacggataataacattaagtattcatcttcatttttctttttatactgtattttacctaaacacaaatacacacacacacaaatcagccacaaagtgcaattacttagattaaagatattgctaataaattcaatttcatatctgatctttagctgtttgtcagttacctatacttcacatatgtatagaattctttccacttcgtaactatcaaaggcataattagcactttgacctttatttggtagctcttgactgctaaagaaaacagtatacatctcagtttcttggtgagttwtatttcattagtttgttagtcacattgtgttcaatactatgatttatttttaggcaccttggctattagagagccgaaatatattaaagaacaaaatttttctcttatttgttggcaaattgacaaaatgggcattagttaaaagaattaagggtatgtaatcaatttttaaataaggaatattaactcctgaaacatc

SEQ ID NO: 412457 - DNA, 538 bp, Homo sapiens
tattctgaggctctggcctcaggggaattaaagtagaaatcagaaacaaaaagatatctggaaaagtccctaaacatttggaaattaaataatacacttataaataacctctatgaaagaaaaacatatggaaataaataagcctcattcctttaaccacattgcagttaccatcagatgaattatagacctccgcataaaagctaaaattataaagcttctagaagaaaatatcctcagtatctagaggtaagccacaatttcttaggaagcactaaatatcaaagaaaaatgataaattgtacttcattaaaatgtaatrcttttgttcatcaaatgacactattaagaaaatgaatagggaagtcatggactgggagaaaatatttgtaacacatatacatggaaaagaatttgtatccagaatgtacaaataactcctactaatcagtaacaagagacaacccaatttttaaaaggcaaacatgtggtcaattcacaaaagaaattatgtgaatggccaataagcacatgtaaa

SEQ ID NO: 412458 - DNA, 635 bp, Homo sapiens
gcagttaccatcagatgaattatagacctccgcataaaagctaaaattataaagcttctagaagaaaatatcctcagtatctagaggtaagccacaatttcttaggaagcactaaatatcaaagaaaaatgataaattgtacttcattaaaatgtaatacttttgttcatcaaatgacactattaagaaaatgaatagggaagtcatggactgggagaaaatatttgtaacacatatacatggaaaagaatttgtatccagaatgtacaaataactcctactaatcagtaacaagagacaacccaatttttaaaaggcaaacatgtggtcaattcacaaaagaaattatgtgartggccaataagcacatgtaaagttgcttgacattattagtcataaaagaaaatttaagttaaaatcacaggttatcccaattagaatggctaaaatcacaaaaactggaaacatcaaatgttggtgacaatgtagggcaactagaagtcatttttcttgctggtgggagtacgaaattatataacaatttgaatattgtttagcagtttctcataaactcaaactatacaactcttttacccagacattagaccctaggtatttctccaaaaggacacaaa

SEQ ID NO: 412459 - DNA, 652 bp, Homo sapiens
ttttaatttgttattttctttcataattttttatttttattttttttgagacagggtctcactttgtcacccaggcctagtgcagtggtgccatcacagctcactacagcctcaacctcccgggctcaggcaatcctcccacctcagcctccttttatctttaaattattgtttatctttaaattattgttcaatctagctaagctttcacttctttttttttttttttttttttttttttttgagactgagtctcgctgtctcccarcctggagtgcagtggcgccatctcggttcactgcaagctccgcctcccgggttcacgccattctcctgcctcagcctcccgagtagctgggactacaggtgcccaccaccacccccggctaatttttttgtatttttagtagagacggggtttcaccgtgttaaccaggatggtctcgatctcctgacctcgtgatctgcccgcctcggcctcccaaagtgctgggattacaggcgtgagccaccgtgcccggccaactttcacttattatataaaaaaaccctacaaatattttggtgaacttgaataaaaagaaaaaggataaaatagtctctattggacatattcacgtataaaagagctaaaattgtgtttgtgctaatt

SEQ ID NO: 412460 - DNA, 592 bp, Homo sapiens
ttctgtaaagcaaatgctaacattttgataatttaaataacacatgcatttagtaaatcaaaaatattacatcaataaaagagttacacaaattatttgaccactggacacaccccagtctgactttatttcacttaatttatctctttcaaatgcatacttatgtcatgtgcaactacaaagtcatagagaacaatatgccgtgatattaactgaattctttcttctattaaaaaaagtgtaaaatgtatgaaaacaactgatttgatcattcaacaaacagttattaaaaagagtacttcataatagacactctgctctgaaaaaaacagaaatgaaagaaattggctgtagcctcacagaagttacagcccatgacggggatagatgtgcaaactagtaatgatagcttcttggggtacagagatgaatagacaacgtccccctcctggaagaactcccagtctgctgtcatgcaattttgatctaatgctatttactcttgaaactaagtgactttaaagtgattaacttcatmaacataatgactttgattcttacccaaagacttcccacatttagatgcagctta

SEQ ID NO: 412461 - DNA, 278 bp, Homo sapiens
gccttttaaacttttaagtattaacattatgtgttaaatttttttctcttttctatgttaaatgcattattcagtttctttgaayttttctatcaggatacattttggattcccctcaccattcttgtgactttacttcaaaaaacgttttatttattggctttgttaagtaagggaactcttctcaaaattatgaagcaatactatggttctgacatttgaaatacggtttgatatttgaaaatatcaaaatatattcagaagtctgcaaggtcaaa

SEQ ID NO: 412462 - DNA, 476 bp, Homo sapiens
gcctaataaatttgttataaaatgttacagggtttttttttttttaagaccatcacttaggcttagattaacaataaaaaagcaggagcttttcctaaggctctaggtgaacaatggcacttgaaaatgaaacactggcaaattgcccatctcctgtgggaaaaggaggaaggcagcggcagcatctttgcaagcaatcacactatagaaggcaggctccttcstgggacataacaacatctcaacaggactcagagatttttgtcaagagccacaatttacacaataattacactcattggagcaaatactgatcccaaattccctcctacttcttgtcctttccacaaatcaaatgttttgtccatgtccccaagttgttttgaagaattagttttattcttgtattcatttaacaaatcttagcttgcgtgtgtgtgttgtgtttttccaagcagtcaattcagagagctgac

SEQ ID NO: 412463 - DNA, 472 bp, Homo sapiens
gtttctaaatctctgtgctcctgacatctctaacattccaagactatatccaattgtctgttggttagatgcagacagcattattgatgcttaatgatttcattaacaamagaagcctcattaaagtgctaaaaataaaatgcactattccttaataaccagtaaaataatcggaaataggcttaattcaatttagctttaaggaattgtagggctgtatagcgagctgtgaataatctgctttagatcactgtaaaagtgctgtgtattcaaatcggggagagagaacattttagtctcatcagtggatatagattagcgtggtcattagcatggctttataaatccactggtttagagttacagaaggctagaaggtcacacgttgaaatttctcggagtccagcccatcagagccattgcagaaacagtttcggagtttcccattgaactcatgtgccttctgcattag

SEQ ID NO: 412464 - DNA, 523 bp, Homo sapiens
ttaagctccttgaaaattccctatttgtagatccactccccttcccaacacacacacatacgtacacacgatcaccacttaaataaaaagaacattcaggagaaagacattatttgtgtattatgtccatgcctgtctatagcagaacatttcataatatggatggaattttatataccatctctgcaaaggtgactttctatatgcaagttggcaagagtggatttaggaagaggtaaaggacataagaataatttatgatttccaatgatcttatcgattttgttgactctcctttgttctatgatattttctagtctttatttctaatttagatcttatccaaaggtaatacaaacgagaccaatgacattgtcttcagaatcagargagtgcaatactaggcacttggcaattcatctgtagattatttttgcacctgcacaattcctttctgaattacgcactcacaggcctaatgccatgcctcaagggtagatcaaggtgtgctctggcagcagtc

SEQ ID NO: 412465 - DNA, 555 bp, Homo sapiens
cattttggttatttacatttttaaactgatttagttccttttgtcaaagtcttcattcaccccctttcttatctcaggtctacaaccaagcctgagaaggtgacgatgacatgctctacatactccacctgtcagtgtgacacgagagcatcgtggccccattgaaaatttccatgttatgatgtctaattcttyggggtttactgctaatgatcaagttttgcattgaaaatgtaagctagtttcttaaatagatcagaaatgggctaaaacagctgtctgaatgtcacatatggtcagtctcgtggagattaggctcctaattctaacaatggtttcactttaagaattaataagcttttactgtgaggactaatgtttgctgctttctcttcagacacatttttctcccttcattcctcaatggctgcatttctttcacttttttgtttattttaaagaacacttgtcattacactttatagtcttgtagttaccatcctaagcaatataaattagtcagtaaataatggctattattgtaaatttgtaaaa

SEQ ID NO: 412466 - DNA, 555 bp, Homo sapiens
cattttggttatttacatttttaaactgatttagttccttttgtcaaagtcttcattcaccccctttcttatctcaggtctacaaccaagcctgagaaggtgacgatgacatgctctacatactccacctgtcagtgtgacacgagagcatcgtggccccattgaaaatttccatgttatgatgtctaattctttrgggtttactgctaatgatcaagttttgcattgaaaatgtaagctagtttcttaaatagatcagaaatgggctaaaacagctgtctgaatgtcacatatggtcagtctcgtggagattaggctcctaattctaacaatggtttcactttaagaattaataagcttttactgtgaggactaatgtttgctgctttctcttcagacacatttttctcccttcattcctcaatggctgcatttctttcacttttttgtttattttaaagaacacttgtcattacactttatagtcttgtagttaccatcctaagcaatataaattagtcagtaaataatggctattattgtaaatttgtaaaa

SEQ ID NO: 412467 - DNA, 601 bp, Homo sapiens
ttcatcacttaaacttcgctttgtttctattgacagatcattttaataaccacaattctccagttgatgtaaagtattccatatttttgtgcttgtgcaatttattatttgactgcctaaaataggaagttttattttctgcactccttcttggtaattcttcttccttgcagtacatttcttttttctctttaaagtgcacttgaataacaatgattgccttttcaaaaaaaaatttagtctgccattttagcgagacttgacagataatatgaagctatttaaatagaagatagagtcatgtgacctaccatacttggtttctattttctatgttggttggctgtaattttgatcttttctgtctgattttatagaatgtttgagctaagtaatttttgtaaaaagatgaaaaaacgaacacagaaatcagggacaatgtctagtgttgtataggatrgaaaaactaatgtgtgcccatttgattccgtttaccacttttcagttgtccctactcactcccaaactctctatcctttttgcttaacaaaaggtgacaaacagtgctaattcttttggtcatggttggtctaagaatcaa

SEQ ID NO: 412468 - DNA, 559 bp, Homo sapiens
caaaacaaaagtaatttcacctctaaaataatgtggaaagacatgttgctttagaacagttcttgccatgtaattccataaacaatatacagaagcagatgaacaaattagtgaatattatgtttctgcatatctttaatactgatgcacagttgcttcccagtagtgaagataaaccacagtttagagttcaatggtactgttatcattatattgtcaatggacaattacataagtttattgaatagaaattgagaggtgttccatcaaagcacattacaaactttcaactcaaatcctgttgaaaacatatttaaatayccagagcattaaactatgacatagaacaccattaaatctgttttgtactcaacgcaagtaaacttgcaatggttttacttttcttggttgtgtgataccttatatgttggttttgaattttctacattctcccttgaactggattcaaatcctgtgaaggaatcaattcttttcatgcccctgtactatcccatcttattttaaaaatctcacaggacatgtttggaagaggggtagg

SEQ ID NO: 412469 - DNA, 612 bp, Homo sapiens
atcatattcattgaatcggctatgaaaygagaaactgctgtggctctcataggtatttgtatttttctgttgacatctgactcaacactgattagtagctttttactactttgtcagtagcaagctgacaaaggctttgctttccagtaatgtttctgaattcctttgtatagctacatacagcattttatcttgccctcaatctacctgagggtgatattttgggtgcataaattgactgcccaatgtgtttaaaactaggtttaataggcaacatggactattctgaaagaacattccaagtaaccacaagctctgcactgacataattttaactacaacagttaatttttatatgctgaagacaatcaggaaggtatgatgctatgcccacgttattccaaaagtcatctgcacacacatacttcactttgaagccttggtttattaatcaccaacacctgccagttaccagggatcaaaggctatgtgttgtatatgtaatgaactaaggttttagactaaactgggtcatagagaaacataaagagggaacacaaaacctcttcgaaatttgtttgcctttaaatagaaagaggttaggcagggaac

SEQ ID NO: 412470 - DNA, 524 bp, Homo sapiens
cttccaaaattaagtagataaagcttcttccttaaaagtggactacagttaaatgaggaatgagtacttcttggagcagaataacaaaggacatttcaggggacactatataacttctgtggctcccaccacagcctacagcaatatctgccaaaaatcttactgattctttcgacttcatctttctggaaccgcaagttgtgagcaaaaactatttgtagcagggctatttagcaatgtattataatatcactagaagcctactattccccttacttctaccaattactcatctgcatcagccacgttgaatatkatgtaatttaataggaacatatttgagcaccaggaagtgataaaactgttaaactggatatatactttattgccagttataaaatagtgtgtgttttccacatagcatgcacaccttcacacatatttcaaagaacatccctgcacacaaattgctttcatcttgccttgtagtatacttgtttggtagaataaaagattttaagagg

SEQ ID NO: 412471 - DNA, 560 bp, Homo sapiens
actacatgttccagaagaatttccttgggaataatggaaatcattattaaacatctctggaaatctaaaaccttggccagagatgggaaatgtaagttgcattagaagactctgttgattaaagcttacatgtgwttatctgcaacatacatgtgtgcaaggaagcctgtagaagttctgtgcagccattatgtctaattgttgtgggtttctataaattcctgtaccagctcatagtgagcagttctaacagctcagtctggatggacaaatggccttttattcctcactcagctctccttggtggagtcattcctcttgtgatttgtggaatgtaaacgtagtgacgggaatgtaaggaaaggtgatggccactgccttatcccacatcagaactgttccaggccttaactctcaaatcttctttctaatttagtaattacaaaacaggtttctacacatagagttctttaactgtttgctttaaaattcttttcagatgttagcgtctcagactctaaagtaagtgtaaggcagcatgacaattaaacacatacaca

SEQ ID NO: 412472 - DNA, 603 bp, Homo sapiens
tgacattttataaagacttaattgtataaaaaggcttagtcgtattaaaattaaaatttgaatagcttatggcagtcagtcacctatgaaatgttcattttatctcatatgcatatttaagaaagtgtgtgaagtatcatatgagtacagccaattttcacttttgcatttatcataaatatagtacataatttcccccttatggcaccagttatgtgctgtatttatacaggctaaaatatttctgctgatgttaaaatattagattataaataatttccttccaaaattgtgacatgagctcatcaaattacagtcatatcatttggatgatttgatttaattagtgcttataattgatcaaaggaaagtcatctagattatatttatcatatgacaaaaacagtgcttgtgcaaaatcagtgtttacatgtatatcaattgttgtgttcatttggataaattttccataatttctaaatgtttagcttagtattgctttttatttatgaaatactgtatttgtagtagcatttcrgtagtacaatacaactgtatcgtagtagcatttcagtgcttttagaagtatttaatgattattta

SEQ ID NO: 412473 - DNA, 603 bp, Homo sapiens
tgacattttataaagacttaattgtataaaaaggcttagtcgtattaaaattaaaatttgaatagcttatggcagtcagtcacctatgaaatgttcattttatctcatatgcatatttaagaaagtgtgtgaagtatcatatgagtacagccaattttcacttttgcatttatcataaatatagtacataatttcccccttatggcaccagttatgtgctgtatttatacaggctaaaatatttctgctgatgttaaaatattagattataaataatttccttccaaaattgtgacatgagctcatcaaattacagtcatatcatttggatgatttgatttaattagtgcttataattgatcaaaggaaagtcatctagattatatttatcatatgacaaaaacagtgcttgtgcaaaatcagtgtttacatgtatatcaattgttgtgttcatttggataaattttccataatttctaaatgtttagcttagtattgctttttatttatgaaatactgtatttgtagtagcatttcggtagtacaatacwactgtatcgtagtagcatttcagtgcttttagaagtatttaatgattattta

SEQ ID NO: 412474 - DNA, 565 bp, Homo sapiens
tatattgaaactcaagtatattgaaacatattagcttaatctatgatcagtaaaattgttgctcaacatagcactattcagcatcattagcaatttcatcttttatgaatgtttgaattataaatatttccagaaaatgagtctaagcgcaaaaatgtgacaacagatacactgctctaaacggaatacaggcatatctcaggggtattgtaggtttggttctagaccacaacaataaagcaaatattgcaataaggaaggccacacaaattttttttcccagtgcgtataaaagctatgtttacactattctggagtctattaagtgtagaataatactatgtctaaaaaaaagttcataccttaaaaatactttattgctaaaaaatgctaatgatcatttgagcctagagtggtaatctttttggtgayggaggatcttgcctcagtgctgatggttgctaactgaccagggtggtggttgctgaagattggggtagctgtgccaatttcttaaaataagacaataaagcttaccatattgattcactattcctttcaggaa

SEQ ID NO: 412475 - DNA, 530 bp, Homo sapiens
tagtaaaatggcaccaacagacttgtttgacccagggttgccataaaccttcaatttgtaaaaaccatggtatctgcaaagtacaacaaaggaaggtatgcctgtaatcacttctttctctgaacatgacatacgttttcattctaccatggaatttcaaatggctctayaattccctgaattatatcaaaataaatgtgttcaaaatgaaataatggctcagatagtattaaatcattaacctgtatgaaaaatcaaaactatgggtagaagcttaaggcatcagccaatgtggcaacttcatatttagagacagattaattgataacatgtgtgtacatatttagttcttatagtttcatttctttactgtcaaaatcaacaacactgtaacttctaatcaatgtctctgcaaaaggatcttgactttgtaattgcttactcaagtaaaaatcaatataggaattaatactcaagccagttgtaacaaaatgtttagagcaatctcagttggcagaagatttaacatt

SEQ ID NO: 412476 - DNA, 556 bp, Homo sapiens
tgatttccttaactattaggaattatcagaaagaaaacaaataacttcttgaacaaagagaaaagaaaatttggccttcatttttgtaaaggatccataatatttcatttttattaagrtgcaatatttatgttactcaaggtgtattgctattttttatgctgctggtatttttgaaacaatgttgtcagttggactaattagagcatagacaagggatgtgtgtgacctgtaatgctccattgttcttgcagacaaaaaaatataatgaaatataatgtcttcatcccattggagagtaatgaagaacaaaactaatttgttggactaaaaattaattagacacatcagattcgattgtacctattaccgtgaaagtttgcagctgttccacatattataaccaactatgtaatgtaagcgtgaaaagccaaatgattagagaagcaataactatactattaagcaagataactaaaactcttaagtcaatgtaaattggttatatgacacgctgcttaatggatatatatctgaatgtatttgattgcatttt

SEQ ID NO: 412477 - DNA, 556 bp, Homo sapiens
tgatttccttaactattaggaattatcagaaagaaaacaaataacttcttgaacaaagagaaaagaaaatttggccttcatttttgtaaaggatccataatatttcatttttattaaggtgcaatatttatgttactcaaggtgtattgctattttttatgctgctggtatttttgaaacaatgttgtcagttggactaattagagcatagacaagggatrtgtgtgacctgtaatgctccattgttcttgcagacaaaaaaatataatgaaatataatgtcttcatcccattggagagtaatgaagaacaaaactaatttgttggactaaaaattaattagacacatcagattcgattgtacctattaccgtgaaagtttgcagctgttccacatattataaccaactatgtaatgtaagcgtgaaaagccaaatgattagagaagcaataactatactattaagcaagataactaaaactcttaagtcaatgtaaattggttatatgacacgctgcttaatggatatatatctgaatgtatttgattgcatttt

SEQ ID NO: 412478 - DNA, 588 bp, Homo sapiens
atactattaagcaagataactaaaactcttaagtcaatgtaaattggttatatgacacgctgcttaatggatatatatctgaatgtatttgattgcatttttgtgtctgtaaatgcaatgatgcagaattatggacactatgatgtaaaagtcatcttaccataggaaactgcacagaaaagaacaacaccaatgttacgccagtgtaaggcagygtgttacatttttacaatgttttaattaatggttccttaatggaactttctggaaggaaggctaaactgagaaggaatagatgaaacaatacatggtctggcatagtacaaatctaaaattctcaaccataaattacatcaaatgccaatacatgatttaattaaaacaaaggggaaatgtgatacagtttgagtcacttcaagtgccgtttccagttctgaatagacaatgggaaagtgtaaattgaaacagaaaagaagattagccatcactaaatcacttctcaactaaggaataacagttgtgtagataagggcatcagacaagatgttaaggtagatacgaaggagtaattaaagaaacaattagaag

SEQ ID NO: 412479 - DNA, 588 bp, Homo sapiens
atactattaagcaagataactaaaactcttaagtcaatgtaaattggttatatgacacgctgcttaatggatatatatctgaatgtatttgattgcatttttgtgtctgtaaatgcaatgatgcagaattatggacactatgatgtaaaagtcatcttaccataggaaactgcacagaaaagaacaacaccaatgttacgccagtgtaaggcagcgtgttacatttttacaatgttttaattaatggttccttaatggaactttctggaaggaaggctaaactgagaaggaatagatgaaacratacatggtctggcatagtacaaatctaaaattctcaaccataaattacatcaaatgccaatacatgatttaattaaaacaaaggggaaatgtgatacagtttgagtcacttcaagtgccgtttccagttctgaatagacaatgggaaagtgtaaattgaaacagaaaagaagattagccatcactaaatcacttctcaactaaggaataacagttgtgtagataagggcatcagacaagatgttaaggtagatacgaaggagtaattaaagaaacaattagaag

SEQ ID NO: 412480 - DNA, 588 bp, Homo sapiens
atactattaagcaagataactaaaactcttaagtcaatgtaaattggttatatgacacgctgcttaatggatatatatctgaatgtatttgattgcatttttgtgtctgtaaatgcaatgatgcagaattatggacactatgatgtaaaagtcatcttaccataggaaactgcacagaaaagaacaacaccaatgttacgccagtgtaaggcagcgtgttacatttttacaatgttttaattaatggttccttaatggaactttctggaaggaaggctaaactgagaaggaatagatgaaacaatacatggtctggcatagtacaaatctaaaattctcaaccataaattacatcaaatgccaatacatgatttaattaaaacaaaggggaaatgtgrtacagtttgagtcacttcaagtgccgtttccagttctgaatagacaatgggaaagtgtaaattgaaacagaaaagaagattagccatcactaaatcacttctcaactaaggaataacagttgtgtagataagggcatcagacaagatgttaaggtagatacgaaggagtaattaaagaaacaattagaag

SEQ ID NO: 412481 - DNA, 588 bp, Homo sapiens
atactattaagcaagataactaaaactcttaagtcaatgtaaattggttatatgacacgctgcttaatggatatatatctgaatgtatttgattgcatttttgtgtctgtaaatgcaatgatgcagaattatggacactatgatgtaaaagtcatcttaccataggaaactgcacagaaaagaacaacaccaatgttacgccagtgtaaggcagcgtgttacatttttacaatgttttaattaatggttccttaatggaactttctggaaggaaggctaaactgagaaggaatagatgaaacaatacatggtctggcatagtacaaatctaaaattctcaaccataaattacatcaaatgccaatacatgatttaattaaaacaaaggggaaatgtgatacagtttgagtcacttcaagtgccgtttmcagttctgaatagacaatgggaaagtgtaaattgaaacagaaaagaagattagccatcactaaatcacttctcaactaaggaataacagttgtgtagataagggcatcagacaagatgttaaggtagatacgaaggagtaattaaagaaacaattagaag

SEQ ID NO: 412482 - DNA, 609 bp, Homo sapiens
tgaatacacacacatgtaagttaaatcctttttggtatacctgtatttctttcttattccaatttattttagaaaatctcagaaggacaagattgtagktttccctcaggttaaggaattaattcagtctgaatgactaattaagaaagagaagacaatttaaagaaaagttaatactgtaactttttctctacaatgcttttaatatataaaagaaagaaaacctagagaatctaaaaaattttaacgctatgactgaatgttaaatctgtccatatacaatacttatttgtaatagaaagaattctctagaagctggcagtcagctttatatgcatcattttagcaaataaatagaaaaaaatgagaacggcttatatcaaacactttaaaaacatgtaaactctaggaagaagatttcttatttgtttatttttctttaaaggcactggcaagcaaataaaagcagggaaaactgaaggggatgcatgtattgaatgaacggcgctttaccagaggaaatctgcaggggtgaggctttctttcccttagggagcaccgcaatccatacagtgtgaggcagttaggacctcagctgaaaaaactcaa

SEQ ID NO: 412483 - DNA, 609 bp, Homo sapiens
tgaatacacacacatgtaagttaaatcctttttggtatacctgtatttctttcttattccaatttattttagaaaatctcagaaggacaagattgtaggtttccctcaggttaaggaattaattcagtctgaatgactaattaagaaagagaagacaatttaaagaaaagttaatactgtaactttttctctacaatgcttttaatatataaaagaaagaaaacctagagaatctaaaaaattttaacgctatgactgaatgttaaatctgtccatatacaatacttatttgtaatagaaagaattctctagaagctggcagtcagctttatatgcatcattttagcaaataaatagaaaaaaatgagaacggcttatatcaaacactttaaaaacatgtaaactctargaagaagatttcttatttgtttatttttctttaaaggcactggcaagcaaataaaagcagggaaaactgaaggggatgcatgtattgaatgaacggcgctttaccagaggaaatctgcaggggtgaggctttctttcccttagggagcaccgcaatccatacagtgtgaggcagttaggacctcagctgaaaaaactcaa

SEQ ID NO: 412484 - DNA, 556 bp, Homo sapiens
atctaaaaaattttaacgctatgactgaatgttaaatctgtccatatacaatacttatttgtaatagaaagaattctctagaagctggcagtcagctttatatgcatcattttagcaaataaatagaaaaaaatgagaacggcttatatcaaacactttaaaaacatgtaaactctaggaagaagatttcttatttgtttatttttctttaaaggcactggcaagcaaataaaagcagggaaaactgaaggggatgcatgtattgaatgaacggcgctttaccagaggaaatctgcaggggtgaggctttctttcccttagggagcacygcaatccatacagtgtgaggcagttaggacctcagctgaaaaaactcaatcttattgatatgaggtgtctcagggtggagttcagggaggccagagtgacttaaaatagagaggagaaccatatgaaagagggagatggtggagagtgatgctctcaaatttgtgtatactctccccttacatccaaaggtgaaccctgaactgtgcatgcaaagagaagattgtag

SEQ ID NO: 412485 - DNA, 592 bp, Homo sapiens
tctctcacatcaaggctggaaggctatttccactttcactataacccagtttagggtaggcacaactaatttgtgctctagtagctatttatgtatctgtctcacccaacaaagtcttaaactcctcaaaggcataaacaattcatctaaggattctctgtgtttggaacactagtgtgttaaataaaccttttgcaatgaataaataattctaatctcaaccttatgaaataaatagatcatgcattatcaaccctcatttatttatttatttatttatttaattttttggagagaaggggtcttgttctgccacccaggatggagtgcagtgatgcgatcatggctcactacagccctgacttcccaggcgtaagcgatcctcctgccttggtctcccaagtagctggcattacaggtgygcttcaccatgcccaattagtttttaaatgttttgtagagtgggattctcactatgttgtctaggttggtctgaaactcctgggcttaagcaagcgtcctgcctcagcaacccaaagtgctgggattacaggcatgagctatcatgcttggcccaaccttctttagaatt

SEQ ID NO: 412486 - DNA, 589 bp, Homo sapiens
gtttgtaataatctttaagtaatactcttccttttggtatctctttctatgtatagttagctgtattttaataatacatacttcattaataatgagaataagaattatttatccccatgactagaacaatttaaaaaacaaaacaaatactatttaaaaaatttactcagacttcaagcacaaagggtaaatcaacagaagaaawttggagtatgacatggagctttaaaatagtgatataaaagcctgggcttttgaaaattaaaatagaaagattgaataacaaaaatcctgtataaaactgttagcgttagtcccatttatatatctgtgttaattccacaggatacctaggtaaactgacacctgtagtttacaaaagtttatagattagaaaaagaaatgtgaaatttttgatttactcctgctttttatgcacttactgatactagtattgtctttttttttctgttgcacttaactcaggtaaagagagtcttttaataactaatactgaccatatgtgatttgcagaagctcacatttacatattgacaaccacatacagaattaatcacaggcactttga

SEQ ID NO: 412487 - DNA, 622 bp, Homo sapiens
taactcaggtaaagagagtcttttaataactaatactgaccatatgtgatttgcagaagctcacatttacatattgacaaccacatacagaattaatcacaggcactttgaggaatctaaaaggagtcttttattacatcatgggatgtgagttcaatgataagctaattgaagataaaccataaattagaaaagattctggtgtagccaagagcactttagcctgaaatacagcagatttgaattcttgctctagttctagttttagttctagttctagttacagttacagttacagctccagttccagttctagttctagttctagttctagttttggccaaattatttaacatttctcagtggatacatttatctaaatgattaaggagtyatacaaaatcacttttaaccctagctgtgtagttctatcagaatctcttgtgaatttattctgaaaaaaatttccatgtgttgaaagcatgggtctcttgacttaatgaagatatttaccatgtttgttttgctatatcaaactgataggctcttgtcaactcatccaggtgagcctgcagcatgggttgcatctcttcccgtggggatggagtaagagttgcagtgg

SEQ ID NO: 412488 - DNA, 580 bp, Homo sapiens
gagacattatattcaatcttgtattcctaatattaaatttggtaggaagcataaatgtcttagtaactgattttgacagaggcgtcattgrttattaagcttttacgatgctgtggcttgtaggctcctaaactgctgagaatgtggaaatagtgcaaaatgctaagtatagcactgacttggttgccttgtttgttatttgatgcatttatatgtttatgatcatttgattatagcattgtagcttgtgtctatatcttatgaagttaaaatttattagttacttgttagaagacatttccaggactagagaaagtactacagcatatccattgacaagaggcttccatgtttggtgacatgccatcattttgccattctcatttctcattggttgctgcctctctgcttcctcataatttgtcacccaagtgctatatcacttcaacagtgaaggattctttgcagaaaggggtgctaggcagtaactgagtgtcagagtctggaaaattaatgatactttaatgtaccttcttgttatgcagtccggttctctgccttcatcgctgaaggtattgcc

SEQ ID NO: 412489 - DNA, 580 bp, Homo sapiens
gagacattatattcaatcttgtattcctaatattaaatttggtaggaagcataaatgtcttagtaactgattttgacagaggcgtcattgattattaagcttttacgatgctgtggcttgtaggctcctaaactgctgagaatgtggaaatagtgcaaaatgctaagtatagcactgacttggttgccttgtttgttatttgatgcatttatatgtttatgatcatttgattatagcattgtagcttgtgtctatatcttatgaagttaaaatttattagttacttgttagaagacrtttccaggactagagaaagtactacagcatatccattgacaagaggcttccatgtttggtgacatgccatcattttgccattctcatttctcattggttgctgcctctctgcttcctcataatttgtcacccaagtgctatatcacttcaacagtgaaggattctttgcagaaaggggtgctaggcagtaactgagtgtcagagtctggaaaattaatgatactttaatgtaccttcttgttatgcagtccggttctctgccttcatcgctgaaggtattgcc

SEQ ID NO: 412490 - DNA, 603 bp, Homo sapiens
tttatactgttagtaaaattacaccagagagacttttcttcttttttttaacagcaattctttgcacaacctatgcacttaaattgaaaatatatgttgatcattgagcttgacaagaatagtgcatttcctgttacaattttttattgttattgctactcatctgcttgtagacgaactgctaactcagaaggtgctatgcccttcaggtgttttggagtaaggccaagccagagagaagcctttcagaagttttttacttaactgatagatggctcactatgaagataacagattttatgaagctcagtaaatataaacaatttaatatgagtgagcaaattatgtgaaatgctaaacacttcacacataggtcttaaaatcrtcagtgaaatatacattattagacaaaaccatccaaggcacttaaaagatttgatggattttttatactctgattatctgggctgagttagtgcttattaaaaaaggattaatctgcattcatatttgagaaacagcttatcgggaaagggaatgaggcttgcctgcaacagtaaagtttctatttggagtaggaaaatgtgacctactaaagatagg

SEQ ID NO: 412491 - DNA, 532 bp, Homo sapiens
tggctttcatatgagaagactttttactgaagatgtgttgatggtattggctgcataggtcacttcattttagctttgtttttttatttattygactatacacagagtcagtggtgtccatgatttcctcagtgtgttagtctgtggttttcattggaggctgtggtgaggttttgctggggatggggatatcatttgggccaatgttcaggccccagtggtggcagcagtgggccaatcatgcctatccttgggaccctggatggtgaatgtgggcaccagtattagcagatctgagctagttgattcttggatattcatgcagcttgctcagatgccagcagtggaagtggttggccaggcagctgtgtgggtcctaggtcctctagacagtgtatgtggcatgggtggtggcagtagcagagacaggacaaactttgggctccctagtgactcatactgttattaatggtgtttgcagtgggctgggtgggccggtccccagacccccaggaggcatattctactagat

SEQ ID NO: 412492 - DNA, 560 bp, Homo sapiens
ccctgttgtgaggggtagcaggattgctgtcaatggcagcagtcacagamaggcaggttttatagggagcacatgctttggctctctttatctcaggggcagcctactcagtgcactgcaccaccttttctctggggttcaggacactgtatgctagagtgctaaatacccaactgggtccaagcagcatcatcccactgtagtcctctgggtgaacacaggggaatatcactggggctccaggaatatggaaaagcagggtctattgggccccagagaagaatgcagtctggtgagggctggattcttaaaatggcaacatagtgcagctgcttaggtttggggactcagcatgaactctctctttggagtaatcccatcatgtggtctccaggcaggtccctagtctagtcagaggccctgtgagggttgagagactctcctgtcactagggttgtaggagttcacagtggaatgtggacttctggggatctctcaccatttcacacaccggggagccactcctggctcccagccaacaccaactgagtgagctgcct

SEQ ID NO: 412493 - DNA, 607 bp, Homo sapiens
tttaattcaacatatttcacaaggaaggcatgacctttagagaatagggtggtttaactgaacctactgaataatagattgcataccgttgtttaatttatttgccacctgtytcattcttatagtataataggaaaattaggattccttcaccacatatgaaacattttatactctgaatgttcaaaggaatatctcaaatcagatgaaatctcaagagttgaaattaaggattaacaagtgttcataactttcaagaagattagatataaattccatgttagatattttcctttaccattctctttattatagtcgccttttatcacaaaaatctaaactgaatggagaaaagtcatgccaagaattgctcagatcttcagttgtcttaaaaacagtaaaaaaaaattacttcaatacttgaagttacgttttatctgtctcaattaaaagccactgtgcacttcaatgataattgtaattttgaatgaaaacaagaacatctgttggtatccagggtaaaggacagtatctttgtcagatattactcttgacttttttgtaagacagtgctcataccccaccccagtcactcaaagtgcaccca

SEQ ID NO: 412494 - DNA, 607 bp, Homo sapiens
tttaattcaacatatttcacaaggaaggcatgacctttagagaatagggtggtttaactgaacctactgaataatagattgcataccgttgtttaatttatttgccacctgtttcattcttatagtataataggaaaattaggattccttcaccacatatgaaacattttatactctgaatgttcaaaggaatatctcaaatcagatgaaatctcaagagttgaaattaaggattaacaagtgttcataactttcaagaagattagatataaattccatgttagatattttcctttaccattctctttattatagtcgccttttatcacaaaaatctaaactgaatggagaaawgtcatgccaagaattgctcagatcttcagttgtcttaaaaacagtaaaaaaaaattacttcaatacttgaagttacgttttatctgtctcaattaaaagccactgtgcacttcaatgataattgtaattttgaatgaaaacaagaacatctgttggtatccagggtaaaggacagtatctttgtcagatattactcttgacttttttgtaagacagtgctcataccccaccccagtcactcaaagtgcaccca

SEQ ID NO: 412495 - DNA, 621 bp, Homo sapiens
tacagtaagtcagagatcaggtacawcacctgctggtaaaagtggaacactataatttgcctatttcatcctctgtgataacagtaaatccatcaatctgtgattcaaaactcatacatgatatggttctctctctttgtattttataaaagattttaaatgtttagatattctagtatctttaaagtactatatgagatgtagagagaacattgtataatggtgagttttatgaaatatcgattttttactactctttttcatcccagagtcctggtttcctgttacagtaactgttcaacttagcggcatcccagataatctgggagggagaaaagcaccagcctatttccaagacctgagttaaatatatgggcctttcctctcaaatgtgtgacaatgaaaaacatgattcttttctgcattaatttctctgcctataaaataaatattccatgtagctcatgtagtaagagatctctgagacattgagctctttcagacaagttttgtaaaaatgcaatagaattatgattcctggatctcattcttgctaagaatgaaaataaaactttcgtaagcacttcagaacagtagaagaaataacagtaaactccccaa

SEQ ID NO: 412496 - DNA, 565 bp, Homo sapiens
tgtgtgtgcatgacatttatcatgtacatgtccatttatcacgtatgtagtgtcaggtaactatcaccacaatcaagatayacaactatcatcacagtcctccctcctaccacttcatagccacactgccctcctccaaatctctaagccctggcaaccactaatctgttttccatatctgtaattatattatatcaagaatattatatgagtggaatcatacagaatgcatccttttgaaataggcttttcagtctgcatagtgccactttgttcatttttattgctgagtattatcacaacacattcaaatcaatgtattttattttaaatatgctgccattgtgtatattatgctgaattgtctttctacatattcatatgttgaagtcacaacccctaggacctcagaatgagattgcatttagaaatggggtctctaaagagtaattaaggtaaaatgagatcatatgagtgggtcctaattcaatatgactaatgtccttataagaagagaagattaggagattagacataaggaggacagaccttgtgaaaccaaggg

SEQ ID NO: 412497 - DNA, 609 bp, Homo sapiens
tagtgaactatcccagatttcatactgttgttataataatgattcatgacagttgctattaaggtgggagacaaaaaaattccccaaggccatttgattctcctcccaattaatacaaatatgttaaatctttaatttgtacaccagtgcaataattaaaatatttacatagatctatcagaatagtaaattattaaaaattgaattatttagttctagagggataggtatatacattcactatataactgacatcttgtattttaacatttttctggtttatgtgtttagcatttaaatggtattggaactagtagttttgggaaattttgactatacrtgtgtcaaaaacttgttcagcctctggaataccgccatctgataaacttctgctgataggcattgatccagacacacagtgaaatttcaaataccacgactcttcatcttttaaagataaatttaagagccattgatgatgattaaatattgttattttgttaaatatttaattagaaaaatgactgatagaagtggaagacattgcatttgtaagatattttgtttggcatatttatggtttttggtcatgattcatagatgcaatgt

SEQ ID NO: 412498 - DNA, 605 bp, Homo sapiens
agatgatttgattctttttcatgactgcttagtattccattacatatacatcacatttttctttgtccagtccactgtttatgagcacccaagctgataccttatcttgcagttttgaatagtgctgcaatgaacatgtgagtgcatgtatctttttagtagaatgaattttgggggaatatgtacacgttaatgagattgctgggtcagatggtagttctaagttcttcaagaaatctccaaatttctttccacagtggctgaactaatttacattcccaccaagagtgtataagcatttcctgtactatgcggcctcactagcatctgttgtttcttgactttttttataatggccattctgactggtgtaacatagtatctcattgtggtttttatttgcatttttctgatgattactgatgttgagcactttttcatatgtgtgtggggccacttgttacatcttcttttgagaagtgtctgtccatatcttttgcccactttttaatggggatttttttttttttttttttgcttggtgatttgkgtaagtttcctatagattatggatattagacttttgtcagatacataatttgcaa

SEQ ID NO: 412499 - DNA, 408 bp, Homo sapiens
atcttccaaaggtcatacaaggtaatcactttatacattttcttctagatatttctctatgactttacaacatgtataatttttcaaaccagaaatggaatcacattatacagaacgttctttttattttatccctttttttttttttttttttgagataggatcttcttctgttgcccaractagagtgcagtggcatgatcacagctcactgcagcctcaaactcctgggctcaagtgatccttctgcctcaggctcctgagtagttaagactacaggcacatcctaccacacccagctaaacttaattttttgtagagatgttgccttcttatactgcccaggctcagaatgttctgaagcctttttttttttccactttaaaataggccaagcgcagtggctca

SEQ ID NO: 412500 - DNA, 408 bp, Homo sapiens
atcttccaaaggtcatacaaggtaatcactttatacattttcttctagatatttctctatgactttacaacatgtataatttttcaaaccagaaatggaatcacattatacagaacgttctttttattttatccctttttttttttttttttttgagataggatcttcttctgttgcccaaactagagtgcagtggcatgatcacagctcactgcagcctcaaactcctgggctcaagtgatccttctgcctcaggctcctgagtagttaagactacaggcacatcctaccacacccagctaaacttaattttttgtagagatgttgccttcttatactgcccaggctcagaatgttctgaagsctttttttttttccactttaaaataggccaagcgcagtggctca

SEQ ID NO: 412501 - DNA, 544 bp, Homo sapiens
tggctttgaagcaaggcagacctaggtgggattccttcctctgtcatggcctccagcaacttccttagcttctctgagcctgtttccccctttgtggagttaacacagaggttctcaaatgaagcaattttgcctgccaccccaagggacacttagcaatgtctggagacatttttggttgtcacactaggagtaagggtactggtggtatctggtgggttggggccagggatgctgccacatgtcctgcaatgcacagcacagccctccacaatagggacctgtcggcttcgattgtcactagggctgaggttgagaaagcctgagtcaaagcaatgacacagacctcagagttgttgagaagatcaagtgagatcatctatctgtactgcctgacacagagtgagccccagataaatgggataaatggaagtttaaaaagtggctgctaragtcatttctccaaaaggttataaggccaccagtctggggtagttctgaaggagagatgccagccgggaagagaagaaggctaaccagacct

SEQ ID NO: 412502 - DNA, 570 bp, Homo sapiens
tttggtgaatgagtcaaaggaatattcatacatatatttttataaatatatatctagaaaatatctataagcctgtataaaaaaagtgttaatagtggttgcctttggggagaacttggtcatgacaattagaagatttagttgtaattttattatccttcagactctttgaattttttaaaccatattcatgcatttctttttgatygaggaaaaaagatttcattaaaaaacgtttgtgcttgctccagcagcacatttattaaaatgagaacaatacagagaagattagcatggcccctttgtaaggatgacatgcaaatttgtgaagcgtcccatattttgggggcttaattcctgggtgatgaagtaatctgtaagacaaacccccatgacatgagtttacctacattaactaactttcaaatgtacccccaaacctaaaataaaactaaaacaaaaataggaatatatctttatcatcttggattaggtaaggatttctttaatagtacacaaaaagaactaacccttaaaaaatcgacatactggtttttgttaaaattgaga

SEQ ID NO: 412503 - DNA, 570 bp, Homo sapiens
tttggtgaatgagtcaaaggaatattcatacatatatttttataaatatatatctagaaaatatctataagcctgtataaaaaaagtgttaatagtggttgcctttggggagaacttggtcatgacaattagaagatttagttgtaattttattatccttcagactctttgaattttttaaaccatattcatgcatttctttttgattgaggaaaaaagatttcattaaaaaaygtttgtgcttgctccagcagcacatttattaaaatgagaacaatacagagaagattagcatggcccctttgtaaggatgacatgcaaatttgtgaagcgtcccatattttgggggcttaattcctgggtgatgaagtaatctgtaagacaaacccccatgacatgagtttacctacattaactaactttcaaatgtacccccaaacctaaaataaaactaaaacaaaaataggaatatatctttatcatcttggattaggtaaggatttctttaatagtacacaaaaagaactaacccttaaaaaatcgacatactggtttttgttaaaattgaga

SEQ ID NO: 412504 - DNA, 570 bp, Homo sapiens
tttggtgaatgagtcaaaggaatattcatacatatatttttataaatatatatctagaaaatatctataagcctgtataaaaaaagtgttaatagtggttgcctttggggagaacttggtcatgacaattagaagatttagttgtaattttattatccttcagactctttgaattttttaaaccatattcatgcatttctttttgattgaggaaaaaagatttcattaaaaaacgtttgtgcttgctccagcagcacatwtattaaaatgagaacaatacagagaagattagcatggcccctttgtaaggatgacatgcaaatttgtgaagcgtcccatattttgggggcttaattcctgggtgatgaagtaatctgtaagacaaacccccatgacatgagtttacctacattaactaactttcaaatgtacccccaaacctaaaataaaactaaaacaaaaataggaatatatctttatcatcttggattaggtaaggatttctttaatagtacacaaaaagaactaacccttaaaaaatcgacatactggtttttgttaaaattgaga

SEQ ID NO: 412505 - DNA, 570 bp, Homo sapiens
tttggtgaatgagtcaaaggaatattcatacatatatttttataaatatatatctagaaaatatctataagcctgtataaaaaaagtgttaatagtggttgcctttggggagaacttggtcatgacaattagaagatttagttgtaattttattatccttcagactctttgaattttttaaaccatattcatgcatttctttttgattgaggaaaaaagatttcattaaaaaacgtttgtgcttgctccagcagcacatttattaaaatgagaacaatacagagaagattagcatggcccctttgtaaggatgacatgcaaatttgtgaagcgtcccatattttgggggcttaattcctgggtgatgaagtaatctgtaaracaaacccccatgacatgagtttacctacattaactaactttcaaatgtacccccaaacctaaaataaaactaaaacaaaaataggaatatatctttatcatcttggattaggtaaggatttctttaatagtacacaaaaagaactaacccttaaaaaatcgacatactggtttttgttaaaattgaga

SEQ ID NO: 412506 - DNA, 649 bp, Homo sapiens
gccaagaggaagagcaggtttggggatgaaaaggatggctccaatttggacaagtatgattgggatatgcaagcagaggtggtagatggaaatgtgggtcagaagcccaggagaatgatctgctcaggatgtgtagatctgggagttgtcagaatagagatgcacgaatttctcagaagcacgtgtaaagtgagtgaggggagatagtcaatggtaggatgcatagaamtgtttagggatggacacaggaaggagaacctgaaaagacaatggtgaaagaggtctcagaagggaagaggaaaactaagagagtattttctgggcaaattatgtgaggcaaagtgaaattaaccaccaatgtcctataaagagaatgcggggtaggtagtaatttggggcaggaggaagaaggggtgaaagaagagtgatttgaagcagctgaagacaaacaaaataaggaagaaatagcctccacttactgcccactgatgggccagataccatcccaagtgcttacttttgtgagttcatttcatccgtgcaacagcctttcaaggtaggaatagtcatttccattttccatgtgaggaaactgacgtgtttcctcatgcagcaactcattctaggttatgctgctagcaaatggcag

SEQ ID NO: 412507 - DNA, 570 bp, Homo sapiens
gaggggagatagtcaatggtaggatgcatagaactgtttagggatggacacaggaaggagaacctgaaaagacaatggtgaaagaggtctcagaagggaagaggaaaactaagagagtattttctgggcaaattatgtgaggcaaagtgaaattaaccaccaatgtcctataaagagaatgcggggtaggtagtaatttggggcaggaggaagaaggggtgaargaagagtgatttgaagcagctgaagacaaacaaaataaggaagaaatagcctccacttactgcccactgatgggccagataccatcccaagtgcttacttttgtgagttcatttcatccgtgcaacagcctttcaaggtaggaatagtcatttccattttccatgtgaggaaactgacgtgtttcctcatgcagcaactcattctaggttatgctgctagcaaatggcagactagggattctaacttccaaatccatgcccctgaatcctgccagaaaactcattgatatcagcaacacttctctctgcccagcttcttataaatatgaactattgccaaagccca

SEQ ID NO: 412508 - DNA, 424 bp, Homo sapiens
taaaggcaaatataggtgcttatacagacacgaaagaaacaaatatgaagtgtctatttccccccctggaataatctagattctcatggggtttgactcaataaagtatattaaaaaataaaagtaatggcccttagctccaagaaaattcataaaaatctaaygctagataaagaaaaaaatacgaaacgctgactagttccaaggtgagacacctaggcatggcagctaaggatgcactgtatttcaagtgagtggggggtcggtcttcaattgatcttaaagtatgtgttaaataaatgatcacaaatagaccttgggacaggtgtgaagagttgtagcacttccaacactgggacctcacaattccatctcctaatcttgccagcagtgtctaaaggactctgctatgggaaagtctcat

SEQ ID NO: 412509 - DNA, 469 bp, Homo sapiens
ttacagtgagaacagattctataagatagtgataaaatatttatgagaaaggagactcacagccatagaattgtaagtaaaagttgaaagtgaaaaatcaaacagaaagcacccacgggtatacagtccatcagtgcctatgcagttgtgggagttaaatgttaaattaggcccccagttttctggccatcaaagtgaaaaaggagatagggtcaaatacgctgttcttattttcaaagaggaaaaaacctgctggatgggacractgtctctctaatagagatttttcatatggaaaggaatggatttcatcccactgaatgatgaagttgatcatgtgcttaattgcgttaacaccacaaatgcagaaactggtttcctgggattgttctcaataaaaagcaaaggcaaaatattaaaatacaactcagttccaaaaggtcagattgacacagctagaccgtaggtg

SEQ ID NO: 412510 - DNA, 560 bp, Homo sapiens
gcgcccctgcactccagcatgagcggctgagtgagactccgtctcaggaaaaaaaaaaaaaaagataaaggggaaaaaaactcatgccttttccacttctcctctaaccttcttttaaaaccacattttatcactgtgtataatacaacatttttattccttttgtttgtctccatatttagagaacactggtctacctgctcactctctttacctagccacsgggattcagacacacacagcacagaggtctgctgttagacaagaagctgccacacgtagcttggagattggctggccaaggtgtcactatcactcaggctgctgctgaaggggccccaagaaaaggaacaattcaacataatctcaagataaaacaaagtaaccttttaaatacaaactttagaaacattacagtactctttttatctatgcaaactcacttaactggagttcataactttttgttctactttttaattttactaagtctaaatcagagattggcaaactttttctgtcaagagccaggcattaattattttaggctttgtaagcca

SEQ ID NO: 412511 - DNA, 542 bp, Homo sapiens
  misc_feature (1)...(542): n = A,T,C or G
nnnnnnnnnnnnnnnnnnnnnnnnnnnnnnnttatctatatgtcacttaaagactatcttgagttaatttcttccatgcaaagaaataatttgcattaatgtatctgtcttttaagtttctgttgtaaattctcttatgcacagcagcatctgtacatgcacacacatgcagacactcacaaagggactttcaaggaccacaaggtgtcctaaacctcacagacagtcccattttccctttttgtcactgtgtagtgtttaggcccagtataagtcccagagccactaattcttatccctctccaccctctcctgaaaggtagaatgcactgccatataactcatatcatgtcttcatgccaacagaagaaaaaaggataaaaagaaacggcgggatgcctggaaatctatgccaagttgagggaaggaagaatyaaataatggttaaaaattaattacatcacacacaagaatgatgtttaaacaggatgaagttcaagagaaaagacacaaaagaagtgaaaatgaaaggccattaaaca

SEQ ID NO: 412512 - DNA, 536 bp, Homo sapiens
gagttttcagtaatgagtctaacaccgacctgtaccagtactcctagtgaaatagttttaacatgaaaattctgctcagcagttgatcttctgatattatttctgaatgagtatatctaacagttgagggcttactatcaatatgtttagtctgctagagctgtttattaaggctgggaaccacattatcyttatattactcagaaagccaagtggtattcattctttcatttgcaaatgttcctgagcagctacttgacccacagtgagtatgatacccagtccctcacctccacaaactcactactgagctcggaagaacaagaggaacattagctagcatggattggtctcagccatggactcagtcccgggcctgactttaactgcttacgtgatttggacaattattttcatctcaatgggcttccgtgtcctcttgtaccaataggaagggtagcatatgaatcctaaggttctctgcactccaagaagagagaatagaggaaataatttaacaaaagaaaacaataatc

SEQ ID NO: 412513 - DNA, 566 bp, Homo sapiens
atggataagtaaaatactgaagtattttcaacaggggaatggataagtagtatactgaagtagcagcatgcataattactgacactgtactgtatattctctgctctggaataattttcattaattctactmcaatatctaaaagtcttagagatgggtataacatatcttttatatgacagtctctttcatgaccaatattcagcttccataacttctctctcagtttccaaaagtggaaaaccgaatgcttaatattttatatttttaccaaaacatttaaattatttttgtcacagacaaattttgagctgtttgatatttaaataaaatggcaatgattttagagcttatggccttcattttaaacatctgcacagttgcatgtttctaaaatgcaatctttgttgagttgggaattatgaagtggggccgattggagaggacaatctttccattttaaattttcgtgtgaatcattacttctctgcaacagctgagcctgcaaaacaaaaatgagtcagtcagatgtttatttcatggaacatgattatataaagtacacc

SEQ ID NO: 412514 - DNA, 586 bp, Homo sapiens
tgtctaagtgtgcactttaattcacaagaggcacataaacataaatcattcattacttccttcattcaaatctacttgaagaatatagtgacgtacagtgaaccataatcagagatacttgtgtgttatttcaagtccactatattgacaattttttttacttttctcagtttctattatttatttcttatttcctttttttctcagttttatatttaagttgaggcttataggttcttataggaaataaataagatggcctgtgtataacacttgamcctgttctggttcttttggaagatgtcttgagggcatgagctatagtaaaattaaaaaaaaatatttaagttagcataggaattttggggaggttgaaaatttattttctttaagatattaaacatagaattataactgtccctggcacatagtgataggcttttagtacctttatttacttattttatcttgacagcaatcacaaggtttctgaatcagtggcagactatttattcacaaaaatgttttggcattgtttccccaagttccatttctccaccaagtgacatatcaaggcagatgtcaa

SEQ ID NO: 412515 - DNA, 538 bp, Homo sapiens
cagtatattattataaaaatagcaaaataaaccaacaaaacagtagagagtgtcaggaaatagaccaatggatgtaaagtcacatgatttatgttgagagcatcagtacaatttagtggttgatatgatggtcttaaatttaaaagtctgggctcaactatatagtcataaggaaaaatgtaattttaacaattatctcacaccaaaccaaaataacttcaagcaggtaaataaggccaggtacggtggctcacgcctgtaaccccagcactttgggaggctgaggctgrtggatcacttgaggccaggagatgaagagcagcctggccaacgtggtgaaacccatctcaactaaaaatacaaaaaaattagctgggcatggtggtgtgcacctgtaatcccagctacttgggaggctgaggcacagaattgcttgaacccaggaggcggaggtcgcagtgagccgagatcgtgccactgcactccagcctgagcgatagagtgagactccatatcaaaaattacaacaacaaaagat

SEQ ID NO: 412516 - DNA, 581 bp, Homo sapiens
ttattttatataatgaagggttaaattacttgagctaataccgaaaattgtgttcaaagacagtttaaaaaatctatagatgctatatcaagggagtattttcctacggggagttcttatttgatgttccttctttgtactttgacattggcatcatacatatcaggaccagttacatggtgtctgtgaataaaacttcagagatgagaagtacgatgtggctcatatgcctaacacttccgtgtgtattattggtggtgtttcacaacatggattaagaaaaaaattggccagccatataatgttggttaatagtattaaagatggacacactcctggtgagttaatgaaaacacaaagagaaaacttccacatatgacctagctagrgatgactacagaaatgccaactatttctgttgaccttaagtttcaataacttaaagtcttaatttatttctttaaaattatttgagccacctgctatattctggcacttatactagatggtggagatataaatgtatttaaggcaaggaccctgctcataatgagcctaagaatgacaggtgcatgtgtgtg

SEQ ID NO: 412517 - DNA, 526 bp, Homo sapiens
ggatttaagttgctgatgatactactgtcaaatagaagggatttggataagctaggaaatgcttgatatatttagaattctgtaatcattaagtgattatgygtgtgtggttgtatatgtatataatttataatatgcaatcattgtatgagggcacaagtttcacataagaggacataacacatttgaaatactgcatggtcaattccctcttaaaatctgttaattaaatctttttgtacttttgattcccttgataattattctcaactattttataaagtagtcaactagctggaggctaagggcctgtattgatgtgacattagggagaggcatgggaaaaagaagcccattaaaagctagaatttcttttgatatctcctgtctatatgaaaaaaataaggaaattttgtattctagtttatatgtagattcttctgggaagctgctagctaccatggtttgagaagaccactatatcaaaatcttcaaaagtgcttttttattaaagacatcctaagac

SEQ ID NO: 412518 - DNA, 526 bp, Homo sapiens
ggatttaagttgctgatgatactactgtcaaatagaagggatttggataagctaggaaatgcttgatatatttagaattctgtaatcattaagtgattatgcgtgtgtggttgtatatgtatataatttataatatgcaatcattgtatgagggcacaagtttcacataagaggacataacacatttgaaatactgcatggtcaattccctcttaaaatctgttaattaaatctttttgtactyttgattcccttgataattattctcaactattttataaagtagtcaactagctggaggctaagggcctgtattgatgtgacattagggagaggcatgggaaaaagaagcccattaaaagctagaatttcttttgatatctcctgtctatatgaaaaaaataaggaaattttgtattctagtttatatgtagattcttctgggaagctgctagctaccatggtttgagaagaccactatatcaaaatcttcaaaagtgcttttttattaaagacatcctaagac

SEQ ID NO: 412519 - DNA, 600 bp, Homo sapiens
tcaactgatatgtctcttcaagggaattcatgaagcaattatgaaggtaagtgtttaaaacagcaattgtaaaatatcataccgacaaaaggtacttaacattataaggttcttattaacctgagaagtcaacaaaagaagtgacaactgaaaggagattaaatggatgtgtagtatttaactaccaaaagcaggaacaaagttatctctagtgaataaaaaacataagcactgtccagtgacagaaagcagacctatayggcaaaggcaaagaaagcatgttagactgtaggattgaagaaaaaccagctttcaaagcctatgagtcaattaaagattgtgctgttggtgaagaaggaaagccattcaacaaatatttagaagaggaataaaatgattctattcttgtgttaagaatagcctgggtgcagagaaaagactagaactaaactagagatatcctgaataaactagacttaagagaacaaggtcacaaatgttctgaggttgacctgttcttttagtgatggagatggaatagattcattacacacttaggtaatagaataaatgcagagaaaagcaggtagagaataatga

SEQ ID NO: 412520 - DNA, 579 bp, Homo sapiens
gccatgcagaaggcataagcaaaagactctatgttgttagagatatcactaatggaaaaacatataccatttatagtttgcagcaaatgtcagtgacagaattataacagagagcttttggtctctggagcaaggtcatttcttctgcagcatagaattatttgtcctttgacaaatagctcccggcatgctaactgggccatggcagagatgttatggttcattgtgagaccaagaatttgcagatgaaacttgcctttctgagatgagtcctgtcatattcatcaagtgataatactggaagtgtccaacaacaaattataagatggaagagttacatgggaaacagaggatgaccaaaaccagaaggcataagayggatgcatgggaaggtgtccaggacactattggtacccataactttgcacaaatatctttcccttatctcatggctataccttaatgcagcataccctgtagccagatgaaagaggatgaaaatgcatatgctgagtttatggctaggttagcatggctgtggatacaagctgaaatagttggcaggtattctataacctc

SEQ ID NO: 412521 - DNA, 590 bp, Homo sapiens
tattgcagatagccagtaacatttaagcaatattaaaacagaaaatataaagctaaaaactgggaaacattaattcatttcctactaatgctttcctaagggacagctccagggccagtggggatttatttttaaatattacttttccactaagcractttgcttcgtccaaattatataagaaagaatacttggaaaaaaaaaaagtatttttgaggaaatggaaatctttgcaaagtctttctgaaaatgttctaaactgataccatgattttaaaatggtctatgtattaaagcaattttaagatatgatgtgaaggcaaccacttagtatacctgttctgaaatgggtgacagaaagtttctgagctcatgctggcacttcattaattctggaaatccattgtaattgcagaagccggtagtacaaataaaatctctgtaaagtcagtaatataaataaaagtacatctcctacagtgtacaagagcaatttacatcacccaaatatttttaaaacatcatggcttactgaatttatgaactcaatgcatttattttgataggagagaatatcctcatagggggcc

SEQ ID NO: 412522 - DNA, 590 bp, Homo sapiens
tattgcagatagccagtaacatttaagcaatattaaaacagaaaatataaagctaaaaactgggaaacattaattcatttcctactaatgctttcctaagggacagctccagggccagtggggatttatttttaaatattacttttccactaagcgactttgcttcgtccaaattatataagaaagaatacttggaaaaaaaaaaagtatttttgaggaaatggaaatctttgcaaagtctttctgaaaatgttctaaactgataccatgaktttaaaatggtctatgtattaaagcaattttaagatatgatgtgaaggcaaccacttagtatacctgttctgaaatgggtgacagaaagtttctgagctcatgctggcacttcattaattctggaaatccattgtaattgcagaagccggtagtacaaataaaatctctgtaaagtcagtaatataaataaaagtacatctcctacagtgtacaagagcaatttacatcacccaaatatttttaaaacatcatggcttactgaatttatgaactcaatgcatttattttgataggagagaatatcctcatagggggcc

SEQ ID NO: 412523 - DNA, 590 bp, Homo sapiens
tattgcagatagccagtaacatttaagcaatattaaaacagaaaatataaagctaaaaactgggaaacattaattcatttcctactaatgctttcctaagggacagctccagggccagtggggatttatttttaaatattacttttccactaagcgactttgcttcgtccaaattatataagaaagaatacttggaaaaaaaaaaagtatttttgaggaaatggaaatctttgcaaagtctttctgaaaatgttctaaactgataccatgattttaaaatggtctatgtattaaagcaattttaagatatgatgtgaaggcaaccacttagtatacctgttctgaaatgggtgacagaaagtttctgagctcatgctggcacttcattaattctggaaatccattgtaattgcagaagccggtagtacaaataaaatctctgtaaagtcagyaatataaataaaagtacatctcctacagtgtacaagagcaatttacatcacccaaatatttttaaaacatcatggcttactgaatttatgaactcaatgcatttattttgataggagagaatatcctcatagggggcc

SEQ ID NO: 412524 - DNA, 586 bp, Homo sapiens
caaacctcttctacaaaacccagcatggatgatccttacaggaataattttaactaaaaaaatgtgaggcaaggcgcagtgcagtgcctcacactgtaatcccagcgctttgggaggctgaggcaggcgggtcacgaggtcaggagttcgcgaccagcctgaccaacatggtggaaccccatctctatccaaaatacaaaaattagctgggtgtgtggcaggcacctgaaatcccagctactcaggaggctgaggcaggagaatcgcttgaaccaagggggcrgaagttgtagcgggcgcgagatcctgccactgtgctccagcctgggcaacagagtaagactccatctcagaaaaaaaaaaaaaaaaaaaagtgaggcaaaaaaactgtattgcataacttcatttaaataaaactctctgtagtgatagtgatcatgtttgtgaggagagttgactagggagggatatcttactggtaatgtatgagagggagcatgttgggactggaaataatataaaccttgatatgagaggtaattgcatgcatatataaaaatgtaaaaattttagctacatccttatt

SEQ ID NO: 412525 - DNA, 593 bp, Homo sapiens
ttggcgggactgaactttttgtggaattagctttaattacaattcaattactttacttatagattcattcaaattttgtatttcttcttgaatcagttttagtaatttgagtctttctggaaatttgtcaactgcatctaagttgactattttgttagcaggaagcacccaacaaaggaacttgattatcccatatataccatttgaatttctgtaagctttgctgtgatgaatcttctttctttcttgattttattaatgtgtgtgccctctttctatcaatctatctctcctttttctcattactctattttttctatcaattttatctatcaatttagaataccaattttattaatcttttcaaagaatcatattttagtctcatgtattgtttctatttttccattttattggtagtttccagttgtcttatgtacacatgacccacatctgayacaatatgctgccagaatctcactgctaaaatttataataaaaacgtgtccagacaagaaagaaaaccaaaaatatgtctatacaaaaacttatgtataaatatctataattaccttattgataaatgccaagaa

SEQ ID NO: 412526 - DNA, 575 bp, Homo sapiens
tattcgttgggcaacttccatggcgtgaaccagcctttccttcagctgaktcagactttctcaggtaaataatatgttttaaatttgtcagttaagggttgaacacacaccttgcactgtctgcattccagaagaaatatgaagcattttcactgaaatggacgtgaggtccaccacctctcctcactatggtgacggaactctaggcacaccacaaactctctttatggaggtctcttgaatagtcactgccatcttggcgactcctggaagaactcctagcagaacttaggtggtcagctaagaattgaattgttcttggcaacttccttagcaagttttcctttggttgtctaatacatctttgtggaataataaagtactatttggagcttcagatacaccgagaaaaagagagcaagggagagaaagagagatttaaaaaatcatgttacatgtcctatgataattttgagtaattaaagtttataatgaataacactttatttggtataaacatggtgtctgtggtacatttgaataatatattaatgacagtttcaggcacatatttt

SEQ ID NO: 412527 - DNA, 575 bp, Homo sapiens
tattcgttgggcaacttccatggcgtgaaccagcctttccttcagctgagtcagactttctcaggtaaataatatgttttaaatttgtcagttaagggttgaacacacaccttgcactgtctgcattccagaagaaatatgaagcattttcactgaaatggacgtgaggtccaccacctctcctcactatggtgacggaactctaggcacaccacaaactctctttatggaggtctcttgaatagtcactgccatcttggcgactcctggaagaactcctagcagaacttaggtggtcagctaagaattgaattgttcttggcaacttccttagcaagttttcctttggttgtctaatacatctttgtggaataataaagtactatttggagcttcagatacaccgagaaaaagagagcaagggagagaaagagagatttaaaaaatcatgttacatgtcctatgataattttgagtaattaaagtttataatgaataacactttatttggtataaacatggtstctgtggtacatttgaataatatattaatgacagtttcaggcacatatttt

SEQ ID NO: 412528 - DNA, 579 bp, Homo sapiens
aggcagtttataaggtagatactgggacacagggaattcaatgacaaaaactgagatacacacaaaaaagcaaggactgggtgaccaaagctgaatgtctttttgggaataagtttgagaacaagctagaagggagattactagagctgacactcacaaaatcacattcagagaaacactaatggtaaaaatactaaatctcaaagtgagggatttgctgttcacattactcttgaccgagattaaaattggtcctagaattctggtgagaataaactttcaagttggctrgatgtttctccaatggtaatatagacaggagaaactgaagagcaataaattggctaatcagggcttccacaaaattctcttgaaaaatttaattctgtacactgaagttatcaaaaatcattttatttaaattatttttaaagtcagtttgaatcaaaacagtagcattaagtataaaaggtataaattgcttagattttttctgtaacctcaaataaactaagtttaaatataatagtaagtattcaaaaacttaaaatgtagtcatattctaaatttgtcataaag

SEQ ID NO: 412529 - DNA, 557 bp, Homo sapiens
gattcaaattaaaaaaccggcagacaaaatacaaaaaaaacggtctgctctgttgcgcattttatgctgcctctttgacccagtttatttacctggtcaatctttcacgaaaggtttattttctagtaatcacttaaaaaaacataaatacaacaactaaacatgaaagttatcaaatgaaaacataaataaatacacccccaaagaatcatttggtgatcttcttttygggtgctgtatttgcattcaaaataagacggagcaaaatttatctgtgacatttggtatgcttaaaggtaattcaaaaatatctctgctataaaatatctcttaaagtgtatagatagggtaagatcatgtcagtggttgggagaggtaaggattggagaagaacactgcaggtctaaagcagtgaacaatggtagtcaaccaggagcccatatcctaacatcacaatctggttgcactttgtgctaagaacaatcataattgtgtagtcacaaagctaaaatcaccataaatatagctgttccctattaatcactatgaacatctgc

SEQ ID NO: 412530 - DNA, 494 bp, Homo sapiens
ttttagtagagatgagaacatttctcgacctattttcacagcacagaataagctctgttctttaccaagaaatctcaaaaagccaaagatggctttaaaaattcaaactataaggtcttctgatgtctacttcagtaaaaataatgaaagaagccatgaaattttcttaaagcaaaagaaactctagtattcaaacatttctgattcaaagatagcttttggaggaaatataaagactaataaaataaagtccagaagaacttaactataacttgaaataaacttttattcaaaacctcacattttaatgttgttttcaattttagttcatatcaaaacatactataagatatattttctcctaaaggtgattaagataaccatccycttgtacacggcttcatgtaagatacacgttatcaaaatgaaatcagtttgggtaaggtaacagttaatacaagattagacttatgctttattaattctggccacca

SEQ ID NO: 412531 - DNA, 546 bp, Homo sapiens
acttctggtgtgtcaggcattccagaagccatcatggtactgattgatatttcataaattacacttattagagtatttttaaaggacaaaagacttacatgatgcatctgtggggcctgggtccacaacatatgctgtacttccaatgcatttatatcagtccagacatgaaacttcattgaaacttgtatgtgagattaaatttgccaagttggctatcagtcagtgtcagaaaacacaatgatgcatgaggcgtagaaatacaagcaaaaaaaaaaaaattagcctgcatgattaaaaatgtcaattaaaaaaatctcatttaaaattgttattttaatagcttgtgtgcttcactgtgttcagcagaaagacccagtaaakttcaagtaagctcttcaaatactaagatgtcgaaagttaaatctaaatatacagtcatttttttgaactcactttagtcaatataggaaagttgtttataactacaactctctagtggtatttgtttctagtaactgatgaaatgaaaatagattcatattt

SEQ ID NO: 412532 - DNA, 546 bp, Homo sapiens
acttctggtgtgtcaggcattccagaagccatcatggtactgattgatatttcataaattacacttattagagtatttttaaaggacaaaagacttacatgatgcatctgtggggcctgggtccacaacatatgctgtacttccaatgcatttatatcagtccagacatgaaacttcattgaaacttgtatgtgagattaaatttgccaagttggctatcagtcagtgtcagaaaacacaatgatgcatgaggcgtagaaatacaagcaaaaaaaaaaaaattagcctgcatgattaaaaatgtcaattaaaaaaatctcatttaaaattgttattttaatagcttgtgtgcttcactgtgttcagcagaaagacccagtaaatttcaagtaagctcttcaaatactaagatgtygaaagttaaatctaaatatacagtcatttttttgaactcactttagtcaatataggaaagttgtttataactacaactctctagtggtatttgtttctagtaactgatgaaatgaaaatagattcatattt

SEQ ID NO: 412533 - DNA, 546 bp, Homo sapiens
acttctggtgtgtcaggcattccagaagccatcatggtactgattgatatttcataaattacacttattagagtatttttaaaggacaaaagacttacatgatgcatctgtggggcctgggtccacaacatatgctgtacttccaatgcatttatatcagtccagacatgaaacttcattgaaacttgtatgtgagattaaatttgccaagttggctatcagtcagtgtcagaaaacacaatgatgcatgaggcgtagaaatacaagcaaaaaaaaaaaaattagcctgcatgattaaaaatgtcaattaaaaaaatctcatttaaaattgttattttaatagcttgtgtgcttcactgtgttcagcagaaagacccagtaaatttcaagtaagctcttcaaatactaagatgtcgaaagttaaatctaaatatacartcatttttttgaactcactttagtcaatataggaaagttgtttataactacaactctctagtggtatttgtttctagtaactgatgaaatgaaaatagattcatattt

SEQ ID NO: 412534 - DNA, 512 bp, Homo sapiens
ttaatatttgcctattataaagtagctttaatatattgttgtagtaagcagaattctaaacagctctcaaagctgcttttgcttctrggcattaatcttgtaattaaatgactttacatgatgaaaagcgtttttgcccatataattcaggttactaaccagttgcctttaagacaaggatataagctggatgggcccaatttaatcccacaaacttcttaaaagcagaggagtttcctccaactagtagaagaatagaaaatcagagagatatactcaggtaggcctgaaagaaagtaaatgtgcagattttgagctgctgatgggtccacatggcaagaaagtgtggaaagaatctaggagaagggagaattacctggtcaagagctagcatgaaaacgtgggcctctgtcatctaattgcagaatttcaagtttgtcacaaccagtgaatttcaaggaaaagaaccccaggaatctcattaaaacttcagacctgaccagcaccttgat

SEQ ID NO: 412535 - DNA, 496 bp, Homo sapiens
gttggaggcgaggccgctaggaggtgtttggatcatggagcggatcttccatgaatgacttggtgccctgctcctggtaataagttcacacaagatccggttgtttaaaaacatgtgacacttccccccatctttgctcccactttcaccatatgatgaacccactcccccctcatcttctgctatgattgccagtttcctgaggtcctcaccaggaacacatgccagcacaatgctcactgtatagcctgcataatcataagtcaaaataaacctcttatctttataaattgttccatctcaggtattattttatagcaatgcaaatggactaatgcagaaaattggtacccaggaargaagttttgctattaagttacctaaaaatgtggaggcagctttagaaatgggtaacaggcagaggttggaagagtttgaagggctcaaaagaagacagaaagacaggagaaactttgtaacttcttaggaacttatt

SEQ ID NO: 412536 - DNA, 563 bp, Homo sapiens
taaggacttcttaatattcaatgctcaattaaggctgtgagaacattcctaaaaattgtcaaaatcaacttttttcacaaatctggaaattaaagttttgtgacagtacaaagaccatttattcaataaaagtagctaaatttccatgagaacagtgagatttgtagtattttaatttgctctattcctaccttcctcttcctatctcctcaatatccctgaaaaccaatgactctacaatttcaacataaatgatcaggctagcagtcactgcaggtgacaaaaggattttgggctttccaaaaaccctactcccagaaaactgacattttctgattcatctggaagttctctaaaaatgcccactcccgggacttaataaaaattgaaccagatctcaacattcattttaagaaactagaaaaagagaaaactaaatctaaagcatggaaaaaggaagacaattgtaaatattagaggggwgataaatgaaaaagatgttagaaaaacaagaaaatcaattatgttaaaaatatttctttgaaaagatcaaaaattgacag

SEQ ID NO: 412537 - DNA, 579 bp, Homo sapiens
ttactacttcgtctctatctggataagattcttatgttttcactatgtcagacctgaagaaagcatttctccaaaaggccatgattcttcttatcggagactgacatttaaatgccaagatctgagcagtaggtgtgttcattgtattggattgtctttgcttctgggaccgttggacagagctaagaaatatatctatatgttctcaaatacatccatatacacaaaacttgttatttctatagctatctaatagrtatttttctcttttgttatatacttttaatttaatttcactatgattaaagagcacaatttgtgtcctatgatttgttgttgttcttagaattgctatatggcccagaatatggtatctggaatatatctattctggtatatagtttcaaaaaaggattagtctgttaaataagatatttctcttttccatcctttattttcttcatctgtagagagtagtgagctgcatttatggctctgccatttaataactatgtaaatctaaatattttacataatttctcatgaagtttctgcatcttaaaatgatgattataatga

SEQ ID NO: 412538 - DNA, 579 bp, Homo sapiens
ttactacttcgtctctatctggataagattcttatgttttcactatgtcagacctgaagaaagcatttctccaaaaggccatgattcttcttatcggagactgacatttaaatgccaagatctgagcagtaggtgtgttcattgtattggattgtctttgcttctgggaccgttggacagagctaagaaatatatctatatgttctcaaatacatccatatacacaaaacttgttatttctatagctatctaataggtatttttctcttttgttatatacttttaatttaatttcactatgattaaagagcacaawttgtgtcctatgatttgttgttgttcttagaattgctatatggcccagaatatggtatctggaatatatctattctggtatatagtttcaaaaaaggattagtctgttaaataagatatttctcttttccatcctttattttcttcatctgtagagagtagtgagctgcatttatggctctgccatttaataactatgtaaatctaaatattttacataatttctcatgaagtttctgcatcttaaaatgatgattataatga

SEQ ID NO: 412539 - DNA, 574 bp, Homo sapiens
ttctactatttctttattaaaatccacaacgataccaaacaacttttgaatttttttcttctcctacatttttaatttggctgatgctctgctttagttatctattttttgaagtaaattttgttaatttactgtttgtaattgatattacattgtttgttcatttaaagatgattagaatgaaactataagaaattttcttatttctttaatgtccttcatatttgtggttagctcttctttctcttgcttcatgatatttttccccttcaagatatattgcatatttccttcaagatatattgcaatagtttgtgaaattactcattgctaaattccaattattcacttttcttttgatctctgcatgtttttgatgttcatgtatcttcttttaagagtttattgagctatattttaaatgcaataaaacaaaaagatcttaattgttagatgagttttagctattgcatataatcaaataatcactaataaaatcttgaaataaaataacataattwaaaaaatttcaagctatatttgtctattctacagtctttacattttcataaaa

SEQ ID NO: 412540 - DNA, 617 bp, Homo sapiens
gtttattttcattcttacaagaagtcaggacttaacaaatgtatgagccataaaattataatcagacttaggatttataatgtacgtcctaagcattctcagcaaagacactgctaccttagaattgcatatttgacaggtagttttatctttggttcttttacacttgttgccctggtttttaaatagaatttgtccattcattttaccaaagaaactctccttgagtttgacaacatggtggtgatggtgggatgggatggcataaataagtaaataaaaatacagrtcctgctctcaaagtatttaaaaaccagttgggaagagattagcataaagagtcttgatacaagaagaaatgctcagttttcccagagagatgtgaaggcagagtctgggagaatgctgacggatacaattctattgtcccagggagccagataagcgggcattctataggactttaaatgttgaatgggattacacttatattttccaagaaaatagatgtttgtaaatgtttaaaataatacaaagaaaaataaatttctatagacaagtaacactgccttaaaatagttaaaatttcagagctgcaggaatcacaataattatgt

SEQ ID NO: 412541 - DNA, 579 bp, Homo sapiens
taaaaatagaactagcatatgatccagaaatctcactactgtatgtgtgtatatatatatatatatatgtatccccatatatatgtgtgtgtgtgtgtatatatatatctatatataattctatttttctttgaatatatatttcttatttgtatatatatttttttcaaagaaaaggaaatcagtatggtgaagagatatctgcactcccatgtttattgtagcactgttcacaaaagccaagatatggaatcacctaattgtccataaacaaatagataaggaaaatgtggtatgtatctatatgtatatgtgtgtgtgtgtgtatatatatgtgtgtgtgtgtgtatcacatatatatatatacaatgtgatactattcaactgtaaaaagaatgaaatcctgtcatcctgtcattctgcagcaacatggataaacctggaggacgttaagttaagtaagttaggcaccaggcacagaaagatgaataccacatgtatattattgtccgaaaaatcamctgacttgattcattatacattgaagacttacaagacgtatcttctctctctctccat

SEQ ID NO: 412542 - DNA, 610 bp, Homo sapiens
atacatattaattttaaaacataagacttatgaacattttctaaatactagaaatacttgaaataaacttttgaaaacaaggttgaaactattaaaactaaaattcctatgataaagaagaataattttcaaaggcctccaggttagcaattcattttctgcacagaaaccatgtttaatttataaattaaaaaaagtaaaagtggctgcagaaacaaataatattttaatttatttggagckctctaaatcctcttacggaactggttgattataatatatgagcacaggaggaggtcaatataaattaacttatgataagttttgaatttttaaggataaattattttctgagttgagtattttcttttcaaacataatattttagtagtagaatttttacagtagaaaaacatatcaaaaatatgtatgtattattttcaagatactctctatttatatcctagaaaatattcagctataaaacttcaacagtcttgattgaattcaaggtaacaaagcactgaatagaataataaattagtgtctaagtgtttagacctcataaaacgtattttgaggcatttaaatattatacacattgttatta

SEQ ID NO: 412543 - DNA, 623 bp, Homo sapiens
ttacaatgtgcatataacaggattctgatataaagaagtttattggtgtctttctatatttcaaagactgttaatttttattatatctattatgccatttaatttaatcctcccaacaaacctggatgaatttcattatcctgtctactttgcagattaaaagccagatacagagattagatctgtgactaggtcatattcataattttatttaaatagtcaactttaaactttkctcctctgcccaccattctcactatacaacagtaacaacacatatgtataaatacagtttctattagattaatattaagttataagctataataaattgatattatattgatgttatgtttaagcacatcatctaaaaattttacatatttttgcaattttttgaatctatggtacagttattaaaactcacctgtgttgggagatgtttcctctaaattgtcaatctcagttttcattataatcctcttcaaaaatgtactgttcacaaacacttcatagctttctggaaaagatatttgttgtcaggttttgtttcttttatgatgtcagtactatgatgagtatatctatatctcatcactgtatgttctgaaaatagcataaat

SEQ ID NO: 412544 - DNA, 588 bp, Homo sapiens
tctgtttatgaattttcttatcctgaatatttcatataaaaggaattacacaatatgtgtttgtttgtgtctggattttttcacctaacttaacgtttttgaggttcatccatgtagtggcacatatctgtacattgttccttttaatggcttattatcatatcacactggaagctggctattgcaagattggttattacagaaatctagtgttgtcatcaagggcccaggttctttccagttttctgacattttgatatggtgactttcaactccaggcttgactgtccttgtaraaagatagttgctacagctcttgatattatgttcccatacaaatgcttctgaaggcaaagcaaaaggagaatttctcctcctacttctttgtaattggggaagcaaacgatttcccagaagcctcagagagcaaagtttttcttcctccacctcctgagaaagtccttcctcctaaatcactcagtgacaaagagaaattagaattatcctattgtttgcaaataatataattcatttccttgtggtggggagagatcatcttccaaatatactgctgccccacatgataga

SEQ ID NO: 412545 - DNA, 608 bp, Homo sapiens
ctaattatttagaaatttcattttcagaaccttggattttggacatagagctttgaaaaatattgtactttattttgagatgaaaatgtggtcattcacattttcacagacctgcgtggagcaatctgcagggtgggggtgagatttgggagtagaggggaggtggtaatagacacacacaaaacttgttaattgctatacaagaagcatgtgctttaaaaatgacaataacaatcacaaaaccagtttatcattgttttacatatttatttagttcactactatgggctttttgttggggtttccagagggaaactaaggtagaatcaggaacaacactgcccacatacaaagggggagtcttccaagtagtaascccctgcctcttgatctcaactctagcacacacattggaaggcaggccctttgtctaatttgctcaacactgtacctctatcatctagagcaagaaatgaaggaatggatgaataataaagaataatgattcctttggataccttttaaatcatgttaccaagttaacattaatactcatagatagactgaaagtgttgtcacggatcagtgagtgacgtaggaagtctaca

SEQ ID NO: 412546 - DNA, 611 bp, Homo sapiens
agcagagagcaagtcctcaccagacaccaaatctgtcagaaccttaatcttggacttcccagcctcaaaaactgtgagaagtaggtttctgttattatatatcacccagtctsaagtattttgcaatagcaacaggaatagactaagacaatgagttttgcacaatctaacttttaaaacctccagataagcaaagcatgagttttatttcaatgaattaaaaggacaaagtaagaaatttctcaattaactgacattattgagttctgtataacctgaaacatacatatttaacatttagcccatttctaggcttgataagtagagtacaatacagacagtgaagagtattgtgcctcattatacatattctcgagaaagtatagacttttagaaatatgaaaagagatgtaagacatgggaattaattatactgattccaaaatatattctggaagttgcaaattcttaacaaaaaccaaaatcaatcctgtgtaaaagattgcattgggttcttatatttgcatgccaaaaaattcttaatatgaggttcttatgcttaagatgagcttcttataagaacaccacatattcccccgtgagttattact

SEQ ID NO: 412547 - DNA, 611 bp, Homo sapiens
agcagagagcaagtcctcaccagacaccaaatctgtcagaaccttaatcttggacttcccagcctcaaaaactgtgagaagtaggtttctgttattatatatcacccagtctcaagtattttgcaatagcaacaggaatagactaagacaatgagttttgcacaatctaacttttaaaacctccagataagcaaagcatgagttttatttcaatgaattaaaaggacaaagtaagaaatttctcaattaactgacattattgagttctgtataacctgaaacatacatatttaacatttagcccatttctaggcttgataagtagagtacaatacagacagtgaagagtattgtgcctcattatacatattctcragaaagtatagacttttagaaatatgaaaagagatgtaagacatgggaattaattatactgattccaaaatatattctggaagttgcaaattcttaacaaaaaccaaaatcaatcctgtgtaaaagattgcattgggttcttatatttgcatgccaaaaaattcttaatatgaggttcttatgcttaagatgagcttcttataagaacaccacatattcccccgtgagttattact

SEQ ID NO: 412548 - DNA, 611 bp, Homo sapiens
agcagagagcaagtcctcaccagacaccaaatctgtcagaaccttaatcttggacttcccagcctcaaaaactgtgagaagtaggtttctgttattatatatcacccagtctcaagtattttgcaatagcaacaggaatagactaagacaatgagttttgcacaatctaacttttaaaacctccagataagcaaagcatgagttttatttcaatgaattaaaaggacaaagtaagaaatttctcaattaactgacattattgagttctgtataacctgaaacatacatatttaacatttagcccatttctaggcttgataagtagagtacaatacagacagtgaagagtattgtgcctcattatacatattctcgagaaagtatagacttttagaaatatgaaaagagatgtaagacatgggaattaattatactgattccaaaatatattctggaagttgcaaattcttaacaaaaaccaaaatcaatcctgtgtaaaagattgcattgggttcttatatttgcatgccraaaaattcttaatatgaggttcttatgcttaagatgagcttcttataagaacaccacatattcccccgtgagttattact

SEQ ID NO: 412549 - DNA, 616 bp, Homo sapiens
tgtgcatccttgcagttttagccccctgttgataagagcaccccgattccgaagtggtagagggtagggaaagaggaagggctatctcctctccagtggccttgaggcaggaaccagcattcaagaatgtgagtgaagtcgggtgattaaaatagccacactgcttcaaactttgaaatcttacttaaaacacagtcttcattttatttcaatgagagacayacactttaaggaaacatttaacattatttttccaggttcttgaagaattttgcatttcttccttccttctgagacatggtttctagtaatttccccatacaatttgggcttcctgtgactgagaatttattgcaacgcctgtcacattttatggtgctattacgaaatttaactgaaatacatgagaatggtgtgtttacaaaggttgtgcaatcctctgagttaatagaaacaaagttcctttggaagagttaagtgggtcttaagctatagtactgagagagggatacagagagagaggaggaaatttagcccttacagtcttcacctttgcttcactccatcattatttgcttttctctttaccatcattgatagttgaattcagcattca

SEQ ID NO: 412550 - DNA, 557 bp, Homo sapiens
tgtgagactaacttcaatggagcattcattmtgtttaagctttgatgtttaaaatttgtataaatcatgtgctttagtggtgatgttgcacaacagtgtgcaacttcatgccactgatctggacacttagaaatgactaaaatgatgagttctatgttaaatatgttttaccacagcaaaaaaattatatgctttggtttttaaaatttggcttgattgtgattttctttggttaaaattccctctgccacaggcattgctgaggatctggtgctgcatgttcctggctgcagcgtgtttctctttggcgacgtgacctgcctgagaagcgcagtcttgtgcagagaaggaagcagctgggctggttcacgaggagggatttcagtgctcttcagcctgacctgggagctgccccttcccaaagatgtggtttaacaggttctgagcatggtttttgctttgctctgttttttttttttttttaaacttgaggtcccctttatgagccacaccctgttaatgcaggaagagttataggggtggctgcttcttgaaat

SEQ ID NO: 412551 - DNA, 564 bp, Homo sapiens
ttgtctattttcttccctccttcagcaagccctcgctcaggggctcactttttatcctgggatcttattaaccgatttaaactgacttccttttagggacagttctcagttgaagaagaattctagtatcagctatcaagattctaatwctgccttcccccatgctctactataaatcacttacaatctattagaaagagtttttaaggtgattttttaaagttgtgcatcaactacaaatcaaaacttccatggtaacttttttttttttttgagacggggtcttgctctgtcgcccagactggagtgcagtggtgcaatcttggctcactgcaacctctgctcctgggttcatgccattctcctgcctcagccacctgagtagctgggactataggctcccgccaccatgcctggctaattttttttgtatttttagtagagacggggtttcactgtgttggtcaggatggtctcgatctcctgacctcgtgatccgcccacctcagcctcccaaagtgctgggattacaggcgtgcagccaccatgcccagcctggtaaca

SEQ ID NO: 412552 - DNA, 525 bp, Homo sapiens
ttttctttaaaagaatgtatggtgcagtagaaaaggcactagaccaacaattttgagatcttggttttagttctaactccttcactatctagctgtgcatctttcagcaagtctttgggcctcacttggcttctttatctatgactgtagctctttaaattagattattgctaaggcccctgaagtcgtagcattctatgaacttgaatcatcagtaaggaaaattctcaaaaatagtctcttcctgagaaagtcttctctttgctttagtgcaaaccatcctgctccatatgaggaattagggtggcaataatgaccttacaataagacaagaagtgagtgctatgttctatagagtgccacagagattaaataaaatgcactgatttttttttaatctgggaatttttcccaggaaaagagttgctcatgactttgaaagtgatatcaaartaacagtacatgtcacattaagaaatagatattaataaggaattttacaagaaaacagccacagtaggcttc

SEQ ID NO: 412553 - DNA, 525 bp, Homo sapiens
ttttctttaaaagaatgtatggtgcagtagaaaaggcactagaccaacaattttgagatcttggttttagttctaactccttcactatctagctgtgcatctttcagcaagtctttgggcctcacttggcttctttatctatgactgtagctctttaaattagattattgctaaggcccctgaagtcgtagcattctatgaacttgaatcatcagtaaggaaaattctcaaaaatagtctcttcctgagaaagtcttctctttgctttagtgcaaaccatcctgctccatatgaggaattagggtggcaataatgaccttacaataagacaagaagtgagtgctatgttctatagagtgccacagagattaaataaaatgcactgatttttttttaatctgggaatttttcccaggaaaagagttgctcatgactttgaaagtgatatcaaaataacagtacatgtcacattaagaaatagwtattaataaggaattttacaagaaaacagccacagtaggcttc

SEQ ID NO: 412554 - DNA, 591 bp, Homo sapiens
ttcctgggtttccacatcctggaattagagagtcatgatgagaaggtcacattgagaggagcagtgatgtttagtcaatcctcagccagcccaagaaaagtctaggaagagaactaaaggaaaatacctcaaccatctgatggcttgcctgtgttccccactgcccaaccagaagccagacagtaagatgcccaatgatgtagaccagataggagaatccaaaaagcttctatgcagatttagaggtaaaagtacccctaccttcaaggtagaggtactctgaatgcacgtattggtcaaaaaaacaaatggccaagagtaaaaatcaatacccagccaaagctaaaaatcatcatcatggaataaacttcagggatataagaacaaatataaaattttattcamaattgattaattttcaaattcagtgttagtcaaattttaatagggcaagacagacaattttttcagaactgtcagctgctaacttgctcctgctgtcactgcaccatttgggatattaaatagacattaacttcaactggcacttttaataatatcactaatctttttatgtgcaaaaatatatag

SEQ ID NO: 412555 - DNA, 606 bp, Homo sapiens
ggagcatagtaaaaacactgcagattaatggaggcttctgattatttaggagctgcttaaataggaccttactataacgctatttacaatgaggcctgggaaaattggtgggcttacggttacagccttaataatttgccttaatagatttaacctaaaataacaggctgaaaggacaaataaaattagcagtttcctggataattcctggataaatgtaagtgttaaatccttttgaaaaaagatacaagttagtagctatggttcaaaagagacatagatgggaaatggctaaggttactctgcccctaattaagggcttggcaaagttctgactcctgtagcctgcctcactctgggctgttctgcttcgtttctyggagtgttaggtgtcagagtgactaatgtctttctttgtgggcaatctctcccagatggaactttgccaagaatccagaaataggcaaaaagggggaaaaaaattctctcaggagcccaaagagcaatagagaatatgaacatggcttgtgtccttaatacaatctcattcattcatgcaagtgcctccttttttgctgactgtggaacacaaaaagaattagaagc

SEQ ID NO: 412556 - DNA, 444 bp, Homo sapiens
acttgtatatttacttatttttttggttgtctattaatgtctcattcaccagcatgtggactctgtgaggacaaagacttggactgatgtgatcacttgtacaccttgaacagagactgacatacatagttactccatcatatttgctaaatgaatgattgaattcatgtgcatgttttccattctatcatataatccttttttttttttcattcctctctgaggaggaaatgcattttccattcctttctctmtgggggatgttttctgccacttgtggctctttattagctgtttgttggggatttggttttgaaaaacatttgatgcatccatttaacttttggacaaatactagatttgagcagcagattttatttctatggtctcttaaattagttttttagcttgtgcttctttattaagcccaggctagataatagc

SEQ ID NO: 412557 - DNA, 493 bp, Homo sapiens
ccatctttccttctccaagatttgacttcatccctcatttctctttctcttcatatacaatttatcaggaaatcttgttggctctactttcaaaatatgcaaaggagaaacctttaaaaaaactgattttttcaagtgcctatgacaatgtctggtatagagtagttgctcattcattatgtgttgagtgaatmgtctagcctttcaagtggttattgtcagaagtaaattttctctgtagaaaactgtcatcaacctcacacttcaagtcaattaattaacacttgggtatagtagccatatcttgcttcccaaggactgattttcttgaatatttgataaagtcagtttcctaggtttgtaaagctgcacaggagacggtgagcccttaatgaccaccatacaggcaggtatgttgtgaggatcagcttgaaaccagatgaacagcctctctgtcttaaccacaagcatcatatccctatatttaaatagc

SEQ ID NO: 412558 - DNA, 547 bp, Homo sapiens
ttcttcacttaaaccctacatagtaatcagtcagttccatcttcagttgtttgaggggaagttctccctgccccaattccactccaccaagactgggcctctcatrcacatttttataacaccctattccttcccttatgggaactttgcagcccattgttatacatctatacatgactatttgatgaatgattctcttctcatgactgcaaactgcgttaacacagagatgatgttttctcttccttttctactgccaaggctcaccatactggtgcacagtaggcactccataaatgtttgttgaagaaaggaagggagggaagaaagacaagggaaggaagaaagataaagttagaaatactaatatcttttgtagggaaaatgtgcttcagtggaaaactatgcattgtctagagctgggattgatggatgttttctgtaagggccaagtagtaaatattttcatgtttgcaggccatatggtctctgaggcaactactcaactccatgaatatagtgcaaaagcaaccacagacaacacata

SEQ ID NO: 412559 - DNA, 547 bp, Homo sapiens
ttcttcacttaaaccctacatagtaatcagtcagttccatcttcagttgtttgaggggaagttctccctgccccaattccactccaccaagactgggcctctcatgcacatttttataacaccctattccttcccttatgggaactttgcagcccattgttatacatctatacatgactatttgatgaatgattctcttctcatgactgcaaactgcgttarcacagagatgatgttttctcttccttttctactgccaaggctcaccatactggtgcacagtaggcactccataaatgtttgttgaagaaaggaagggagggaagaaagacaagggaaggaagaaagataaagttagaaatactaatatcttttgtagggaaaatgtgcttcagtggaaaactatgcattgtctagagctgggattgatggatgttttctgtaagggccaagtagtaaatattttcatgtttgcaggccatatggtctctgaggcaactactcaactccatgaatatagtgcaaaagcaaccacagacaacacata

SEQ ID NO: 412560 - DNA, 612 bp, Homo sapiens
ttgtcacatgttcacatagaaattataaaggtctatttccagcaaatcatcaccttcaaaaaggcttacacttcctgtttggtcacaatctgcacacaggatcaactaccctctaagtacaggctacctgtcatagccatgccctcagcaattttgaaagaatgaagacccccaacccagggtaggaagtcatatgagaatgactcaaggtccaagctgcttccaagtaaaattctgagtaaagtcacagcaaaataatgtccatatattcccccagatttggtgttattgcataatcactgactttctgaccatatttctaagacattttgttacagtcctacaaaaatgttaggtaaatgtgggcccaaggaattcaacaggaactaccccatggtgaattaagccccctgaagatttgttggggcatgtcaaagtaatataattttacagctatttatacctgcctgccagaattcattcttttatgtgatttaataataaatttaaaaaawtttttttttgagacggagtctcactctgtcacctaggctggagtgcagtgatgcgatctctgctcacggcaacctccgcctcctgggttaaagcgat

SEQ ID NO: 412561 - DNA, 565 bp, Homo sapiens
cttggtttctctttcttgcttcctccctcacaatgttatctgtcttctgccttactgactgtccctttgtctccaatcagcaaatacacagcgttgggcgattccaagaaagtacgttgtatgtaaatgcaattcatcagtgcctggctgatagcaagttctcaaaaaatgctaattgttattattattwtttttttgagatagtgtttctctctacattgctcaagctgtttctgaactcctgggctcagcccagcaagtagctgagattacaggtgtgagccattgtaaatagcctggctgtcattatcatcaccactctttttttgatattttgatttttaattgttgtgggtacatagtaggtgtgtatgtttatggggttcataaaatattttggtacaggcatgcagtgcataatagtcacatcatgcaaaattggatatccatccattcaggcatttctattttgtattacaaacaattcaattatatactcttttagttatttttaaacgtaaacttaaattattatggactatagtccccctgttgtgctatgaaa

SEQ ID NO: 412562 - DNA, 558 bp, Homo sapiens
aatcaacataaccaaaaatatgcaacacctccatgaaaaaatcttaaagctctatctctatttaagaaaaggaaagaaaatccaaatagttgtggagacattctttcctcttagaaaatattttatgtgtkttctatggctgttttcaggcaaccatggaagagtttagtagttttaacagaaactctatggtttctgtatgatagaaaataattgtttaatgagaacacatggacacagggaggggaacatcacataccggggcctgttcagggggtggggggcaaggggagggagagcattaggacaaatacctaatgcatgtggggcttaaaacctagatgatgggttgataggtgcagcgaaccaccatggcacatgtgtacctatgtaacaaacctgcacattctgcacatatatcccggaacttaaagaaaaaaaaaaagaaaagaattgtttatattcactaattacgaaatgtaacaaaaatctagagtgcatctagatttttgagacactcaataactttactttaaaattaatatgaaataaaattct

SEQ ID NO: 412563 - DNA, 558 bp, Homo sapiens
aatcaacataaccaaaaatatgcaacacctccatgaaaaaatcttaaagctctatctctatttaagaaaaggaaagaaaatccaaatagttgtggagacattctttcctcttagaaaatattttatgtgttttctatggctgttttcaggcaaccatggaagagtttagtagttttaacagaaactctatggtttctgtatgatagaaaataattgtttaatgagaacacatggacacagggaggggaacatcacataccggggcctgttcagggggtggggggmaaggggagggagagcattaggacaaatacctaatgcatgtggggcttaaaacctagatgatgggttgataggtgcagcgaaccaccatggcacatgtgtacctatgtaacaaacctgcacattctgcacatatatcccggaacttaaagaaaaaaaaaaagaaaagaattgtttatattcactaattacgaaatgtaacaaaaatctagagtgcatctagatttttgagacactcaataactttactttaaaattaatatgaaataaaattct

SEQ ID NO: 412564 - DNA, 434 bp, Homo sapiens
tagggttttgttttaacaaacaaattgtactccttatatgaaagataaaattctatttggtggttgattggttggattttcaaataagcagttgctttctggtttgccttgacattttataaacataactacagatggaagctcaaaagagaggcaacatagtgttatagtggaaagatttgattcagagttaaattttagatggttgttgactgttaactcctccccagacagacttcacaaatccctcaatcagtgatcgtgttaattctatatatggttcttcctctgcttttgttatattgaagtggcatgtcatctccctttagagagtcttatttaataggtaggaaaatctcatmcctgattatgaaattttgactaagctggggatctgattctacctttttggtggaaggaaacttttgtaattt

SEQ ID NO: 412565 - DNA, 551 bp, Homo sapiens
agtgcctcaggtcaggattttaattcagagagtaagataagaataaatatcttgtggtagtgctcttttttgttgaagggtagactttactacagagtacatgttgaggtctgatatatttggcagtgccaccatcttcaatgtctctgatttgcttcccaaagtagagaagkgaacacaagtgaaaaggaagttgggatttatttggatcccaggtttccaaagacagcatttacacctcttactgcctcagttagccatagctcaaagctagagagatttttgtttctcctccaaggtagcaaggaagcaaataacttcagtggtatcttttgtgctacattctgagatagacgatgattgtgattataggaagtcttgttccattttaatttattcaaccatcacttcataaagcatcccctaggttggccataagcagctcagagttccacattcctgctacctttgctcttccctcaagaacaccatcaagggcaagaagggtcactgaacccttcttggggtttacagtcttagtggaaaacatt

SEQ ID NO: 412566 - DNA, 617 bp, Homo sapiens
ttcatggtgataatgcctacatttaaaaaggaatacactggctgggtacagtggcttatgactataatcccagcactytgggaggcaggagaattgcttgagctcaggagttcaaaatcagccagggcaacccagcgggaccgtgtgtctacaaaaaattttaaaaattagccgggtgtggtggcacatgcctgtagtctcagctacctgggacgttgaaacagaaagagtgcttgatcccaggagtttaaagaagcagtgagacatgatcatgccactgcattccagcctgggcaacagaatgagactttgtcttaaaaaataagaaaaagaaagaaaactcaaataacctaccattatacttcaagtaactagaaaaagaacaacaaactaagcccaaaattagcagaaggaaagaataaaaattagagcagaaataaataaaagggagaatagaaaaacaatacaaaaaggagttttttgaaaagataaaatcaacaaactcttagctagactaagaaaaaagaagattcacataaaatcagaaaaaatagatattacaactatgaacaactatacacatgatgtatacttaataaaatattggcaaacagaat

SEQ ID NO: 412567 - DNA, 546 bp, Homo sapiens
actctaaaactcacagacttaataactatgtgctgttcctcatgagttctgtgagtcaaaaatttggacagggtatactggggatagcttatctctgcttcataatgtctggggtctcagaaagactttgtaggccatgggtgactcaatagttagggactgtaatcacctgaaggcttatcacttacatatctgatacctggtctagggtgaccgaagractagaactgctaatctgagcacctgtatacatggcctttccatgtgacttgatttcctgacagcatgacagcctcaaagtagacttcttacttggcagttgagggtttcaaagtgcaagtgccccagtgagcaagacagaaactgcatttcctttccatgacctagcctgagaagccaaattatatcacttccaccatcttctattatttggagaattgtaagaccacccaaattcaaggagaagaaatatagaccccacttctcattgggagagtggcaaggtctccttgaggaagagtatgtgggctgaaggggagagggtac

SEQ ID NO: 412568 - DNA, 557 bp, Homo sapiens
tagcgcctttgttcctttcctcttcctttatggtaaagtgatttttcattagcatttcttataagacaggtgagatgatgaactccctcagattttgtttgtctgggaaagtctttgtctctgcttcatttctgaaggaaagctttcctggataccacagtcttgaytggcaccttatttttcagtatgttatatatatcattccattatctcctggcttgtaggatttctataaagaagttggcttgtagttgtactaaaactgccttatatgctatttgcttctctctgctttcatgattctttgttttgatttttgacagttttattataatatgtcttggggtagtcttatttagattgaatttgattgaagacttcaaactttcctgtgcctggatatttatatctttcttcagttttgaaaagttccctattatttctttaaataaggtttctacacctttatctttcttctctctcttgaatttcaataactcataaaaattgctcttttgattctgtcacataaatcctgcatgtctgctttattcttt

SEQ ID NO: 412569 - DNA, 470 bp, Homo sapiens
atggatgaaaaccagtgtatatcataatactacaaaaaaacaaggaaatttatcagttaacgatattgctgggcatggtggcttacacttgtaatctcagggctttgggaggcagaaatgggaggattgcttgaggccagaagtttgagatcagtctgggcaacatagtgagatcccatctttacaaaaaataaaataaattagccaggtgcactagtggtgcctcatgcctgtagtcccagctacttgagaagctgaggtgggagaattgctggagtccaggggttccaggctgcagtgagctgtgatcatgccactgcactccagcytgagtgacagagcaagaacctgtcttaaaataaaaacaattaaaaaaaagtttcataataacattttttcttgtcattctgctaaaagtgttacgatctactatcaggtaggataataatgagtcaataatgcatgtttgc

SEQ ID NO: 412570 - DNA, 568 bp, Homo sapiens
ctgtcacattttatagtttattcatgtaacactatgttattaaatgtctctgatatggtttggatgtgtgttccctctctatctcgtgttgaaatgtgattcctaatgttggaggtaggccatagtgggaggcattccatcatgggggtggawccctcatgaatggtttagcaccattcctttggtgatgagtgatttcttgcccagttcatgagaaatctggttggttaaaacggtctgggacttcttccttctctctcttgctcctcctctctccatgtgatatgtgggctgccccctttacctcccaccatgattgtaagcttcccgagaccctcaccagaaactgagcagatggtggtgccatgcttgctgtacaacctgcagaaccatgaaccaagtaaacctcttacctcaggcattttttatagcaagaaaaatggaccaacacagtctctgagagtactgttacaaccaatctgttagcagacttattatgaaccacctccccactacagaatgcttttcattctggttccatcatgtttatggtaaaaacactcaaaga

SEQ ID NO: 412571 - DNA, 568 bp, Homo sapiens
ctgtcacattttatagtttattcatgtaacactatgttattaaatgtctctgatatggtttggatgtgtgttccctctctatctcgtgttgaaatgtgattcctaatgttggaggtaggccatagtgggaggcattccatcatgggggtggaaccctcatgaatggtttagcaccattcctttggtgatgagtgatttcttgcccagttcatgagaaatctggttggttaaaacggtctgggacttcttccttctctctyttgctcctcctctctccatgtgatatgtgggctgccccctttacctcccaccatgattgtaagcttcccgagaccctcaccagaaactgagcagatggtggtgccatgcttgctgtacaacctgcagaaccatgaaccaagtaaacctcttacctcaggcattttttatagcaagaaaaatggaccaacacagtctctgagagtactgttacaaccaatctgttagcagacttattatgaaccacctccccactacagaatgcttttcattctggttccatcatgtttatggtaaaaacactcaaaga

SEQ ID NO: 412572 - DNA, 558 bp, Homo sapiens
ttccacattgtgggaggtttgttctttcactcttcccgataaatcttgctgctgctcagtctttggatcctcactacctttatgagctgtaacactcactgtgaagatttgcagcttcacccctgaagtcagtgagagtacgaacccaccaggaggaacaaacaactctggacgcgccacctttaagagctgtaacattcacttcgaagatctgcagcttcactcttgaagtcagcaagaccactaacccaccagaaggaagaaactccggatgcatctgaacatctgaaggaacaaactccagacacaccatctttaagaactgtaacactcaccgcgrgggtccacggtgagggtccacggcttcattcttgaagtcagagagaacaagaacccactggaaggaaccaattccagacacaatttaatttttttttttttcatattttgttgaacatccctgataggctgttattgacagcttagtgttttgtttccatcctcttatttcaggacttcaggacttggcaaactttttcttaagtatccagatattaa

SEQ ID NO: 412573 - DNA, 543 bp, Homo sapiens
aatgcattgttttgtgctctcactccacagagacaggacaggaaatactccatgtttggaaccctcctggattttaccctatgaaattcttcatttgcctaattttaatctgtatcttttctctgtaataaactctaactgtgagtataatagcttctagtgtgttctatgaattctagcaaattatcaagactaagggtggttttgtaatcccctgacattgcagttgatattagaaagggctagccatctctggaggactctgtgctcaaatgttacagtctggatactgcaggcagggccctgggtttattggatggctgctgtattgcaaggctctccactttggccatacactgggtttaaaccatttttaccttcccccagcaggtttgtgtaccaaaccttttgcctttgacaaatgcacccaggataacaggctgctccagtactctgcttctttytcatgcctgccttcacctggtctctgcctgaaggtatattatgtttttgatggcttaacaatgcttattagaagttttt

SEQ ID NO: 412574 - DNA, 512 bp, Homo sapiens
ggctaaaattgtgtgacagctgctagtgaactcattcagactgacaatatgctaaagtagctgtctcttttagtatagagaagatatctggaaaagtaatctttcattttaattctgagaacttggtgattttgcatgtcctggttcgattttttaaaaattagattcaaaccaggttactttatgtcattcttccctgttacttatttacaagaataacaaagaaccgaaccttgatckcctaaaaaacgttaactcataggatacaacagtcttgaaaatgacagtttgagagaaacaaggccaatgatgagtgaattctgggaacataaagtgctttaaaacccaaatatacattcaatatgacaaaattgacctccagtaaaagaaaagtaaaatctgcttctggtcctgaaatgcgttatgcattttctccagtgaaagttatgttatcctttattatcaggaaacttctgcattttttcctttccccaaaccttaataagatcatg

SEQ ID NO: 412575 - DNA, 355 bp, Homo sapiens
agttcgggagatgaccactggcctctggtgttacattttggacacagcagtaaaggtagctggataaataattgttttatttatcaattgctgtgtaacaagttaccccgaagtttagtggctacaacaataataaacattttgtatctctttccattttcatggttcagaaattctgtctcagggtctctaatggagttgccatcaaatgttggccattactccaatcacctaaagatttgtttggagatagagaatccactcccaagktggctcactcacatagctgttggcaggagctcatttctccatgattttagggtgagtttagggttgcgtttgatttagggcttgt

SEQ ID NO: 412576 - DNA, 591 bp, Homo sapiens
cattgctaatttatagccattaataccaatatgaataacaatataattaaatgaaaacactttgaatttcaattatgtgatatttgaaaatattccattttcaaaatgttattgacagcaatttattggctattttccagacagaccattcattgagaagtgcagaaaaaaaggagagctacacaatttacccaagaggtatttataatcattgggtaacatcaaaatcggcaattatgtaaattggaaaccttggtttttattcagtggagctgtattaaatcttcattggtacaggagaaaagtgagagtttaattttatacattctttcgaattcaatttatgatcrcataaatgtgcttttccatattaactttctcataaagagcacaattttcactttgaggaaaaatagtatttcagtgaacaaattcaagagccctttatatctggcttcagttatgggaaaataaatctagaagtcctgactgtgttgattaaactcttataactttacaagattagagcaagagtctttgaaaataaaaagtcttgattgataataatgttgaaaatattattgttaaaaa

SEQ ID NO: 412577 - DNA, 470 bp, Homo sapiens
tagctttcatctgagattcttacccatattcctatgatttatcatgtagggtatgctggttagtgtttaaaaactgactctctagaaggaaaaaaaaaagaaacacccttatttgcagcatttgcttattttatggttggatattctcgccatggatgatgcaagtagcttataaaattcctgaaaatatacaagcaactctattgagctggtactagctagttccagcacaccactctaagtacactaattttaaagagaaaacatatcttttttgagaattttccaagaaacttcaaagagttaagaacactttctggctccagaatgtagacagcatgtaaggggtgtccctttaaccgttacagcaaaaaggaatgagataaacttcagattcgtaattttttttcaaacccaackagacctaagtttgcagagccaccaactggcccacaatataaggagagaca

SEQ ID NO: 412578 - DNA, 613 bp, Homo sapiens
atatcagtggtgtgggaatgtcaaaaactttatctggactcttctcccctgtctaccatatgaaataaatgccttaatcttcaaggtggagggcataacactgccaacttaggggaacaggtataaactaattgctgctggaggaaggaaacaggagstaaaaaaaaactacccctggaagaagagcaggagcaggaataggcactgggcccaacaaatgaagtctgtgaacagagaacagtgaatgctgcatccccaagaccagcacatcacatctgcccaggatcagccttaggcagcccacagttcgcatttgccagccctgtggagaggtgtgggaggtaatggtgaaaataggtgagtaaaatcattgtcaaaattgttttgagaataaaagcaggaaagagtaaatgttctaaagctctcatatcattggatgtcagtggcaacagtggcataatagatctatttggtgtgagaaaaaaaaactctaaaggtaattagagaaaaattcaatcaaataaaaaatgaaaaggaaatatgaagctcaataatataaatataagtataagcaatataaaatataataagaattatataataaatagaatat

SEQ ID NO: 412579 - DNA, 613 bp, Homo sapiens
atatcagtggtgtgggaatgtcaaaaactttatctggactcttctcccctgtctaccatatgaaataaatgccttaatcttcaaggtggagggcataacactgccaacttaggggaacaggtataaactaattgctgctggaggaaggaaacaggagcwaaaaaaaaactacccctggaagaagagcaggagcaggaataggcactgggcccaacaaatgaagtctgtgaacagagaacagtgaatgctgcatccccaagaccagcacatcacatctgcccaggatcagccttaggcagcccacagttcgcatttgccagccctgtggagaggtgtgggaggtaatggtgaaaataggtgagtaaaatcattgtcaaaattgttttgagaataaaagcaggaaagagtaaatgttctaaagctctcatatcattggatgtcagtggcaacagtggcataatagatctatttggtgtgagaaaaaaaaactctaaaggtaattagagaaaaattcaatcaaataaaaaatgaaaaggaaatatgaagctcaataatataaatataagtataagcaatataaaatataataagaattatataataaatagaatat

SEQ ID NO: 412580 - DNA, 613 bp, Homo sapiens
atatcagtggtgtgggaatgtcaaaaactttatctggactcttctcccctgtctaccatatgaaataaatgccttaatcttcaaggtggagggcataacactgccaacttaggggaacaggtataaactaattgctgctggaggaaggaaacaggagctaaaaaaaaactacccctggaagaagarcaggagcaggaataggcactgggcccaacaaatgaagtctgtgaacagagaacagtgaatgctgcatccccaagaccagcacatcacatctgcccaggatcagccttaggcagcccacagttcgcatttgccagccctgtggagaggtgtgggaggtaatggtgaaaataggtgagtaaaatcattgtcaaaattgttttgagaataaaagcaggaaagagtaaatgttctaaagctctcatatcattggatgtcagtggcaacagtggcataatagatctatttggtgtgagaaaaaaaaactctaaaggtaattagagaaaaattcaatcaaataaaaaatgaaaaggaaatatgaagctcaataatataaatataagtataagcaatataaaatataataagaattatataataaatagaatat

SEQ ID NO: 412581 - DNA, 613 bp, Homo sapiens
atatcagtggtgtgggaatgtcaaaaactttatctggactcttctcccctgtctaccatatgaaataaatgccttaatcttcaaggtggagggcataacactgccaacttaggggaacaggtataaactaattgctgctggaggaaggaaacaggagctaaaaaaaaactacccctggaagaagagcaggagcaggaatakgcactgggcccaacaaatgaagtctgtgaacagagaacagtgaatgctgcatccccaagaccagcacatcacatctgcccaggatcagccttaggcagcccacagttcgcatttgccagccctgtggagaggtgtgggaggtaatggtgaaaataggtgagtaaaatcattgtcaaaattgttttgagaataaaagcaggaaagagtaaatgttctaaagctctcatatcattggatgtcagtggcaacagtggcataatagatctatttggtgtgagaaaaaaaaactctaaaggtaattagagaaaaattcaatcaaataaaaaatgaaaaggaaatatgaagctcaataatataaatataagtataagcaatataaaatataataagaattatataataaatagaatat

SEQ ID NO: 412582 - DNA, 573 bp, Homo sapiens
atgggagaaattggccaaaacaaaagaggccacacgcgtactgcaagtctgaaacccagcagagcatacattaaatcttgaagctccagaatgatctcctttaactccatttctcacatccaaggcacactgatggaaggggtgggctcccacagccttgggcagctccacttctgtggctctgcagggtacagcctctgtggctgctttcacgggctggcattgagtgttggcagcttttccagtgcatggtgcaagctgtcagtggatctaacattctggggcctgaaggacagtggctatcttttcacagctccactacgcagtgccccagaggggactccgtgtgggggctctgagcccacattttccttccacactgccctagcagaggttctccattagggctctactcctgcagcagacttctgccgggacacccaggtgtttccccacatccctgaaatctaggcagaggctcccgaagttcaactcttgccttctgtgcacctgmaggcacaacacctcatggaagccaccaaggcttggggctttcaccctttggagcaacag

SEQ ID NO: 412583 - DNA, 573 bp, Homo sapiens
atgggagaaattggccaaaacaaaagaggccacacgcgtactgcaagtctgaaacccagcagagcatacattaaatcttgaagctccagaatgatctcctttaactccatttctcacatccaaggcacactgatggaaggggtgggctcccacagccttgggcagctccacttctgtggctctgcagggtacagcctctgtggctgctttcacgggctggcattgagtgttggcagcttttccagtgcatggtgcaagctgtcagtggatctaacattctggggcctgaaggacagtggctatcttttcacagctccactacgcagtgccccagaggggactccgtgtgggggctctgagcccacattttccttccacactgccctagcagaggttctccattagggctctactcctgcagcagacttctgccgggacacccaggtgtttccccacatccctgaaatctaggcagaggctcccgaagttcaactcttgccttctgtgcacctgaaggcacamcacctcatggaagccaccaaggcttggggctttcaccctttggagcaacag

SEQ ID NO: 412584 - DNA, 600 bp, Homo sapiens
agaattaacagtttctttttttactggacgagaggagttggagggagagtaggaaacagtaaagattttacttgactagtgctattgtcaggtggcaaagccacccaggtttggaagctgtttaagctctaatgctttctgaccttcttgcatctggttcagctctaatccatagaaaatacttaacgaatcctttgcgctcacacttcggatacaaaaaccatccaaagcaccatctgtgtttctctctattgagagagcatatttgaagccagtgccccccacctcctttatatttmtcagacataaatagaagacaaaggaagctaccctaatgatcccactgaagcccctttccatgactggaggtgactgtgggagccatacaccctctcccttggagacagcactgctttcccctaagaaatcactttaacctgccacaacccaatgacttttatgggctgtaagtagctgttaaaaatattgaaaaatggattttcatctccttatgtaaatagatgatgttagtctcacaattcattttgcaatgtgaaagctgttgttttgcaaactaagcaaaatcagagacaaaaatag

SEQ ID NO: 412585 - DNA, 496 bp, Homo sapiens
tatttttatggacagtcgtagagaagtattattggaggacaaaagggtatgatctctggtaataaactgggaggaacttagcaaggccggcttgttcaaatgcttcttggcatccctgtgtaacattccttccatctgggcaggggaggatacctgtcaagtgaaggtcttcagaagagaagggagggtggaaggttaaagaatgacctaggttttatggcctacttcaaagaagaagggaaaggagaaggtaagtggacatcctgcttctgctgttttcttaaaggccaagctgccatattttggtgtagcatgtcctgaaccccatctgcagcaacgtatgtgcaatatttctgcctaggggagctcattagagactaagcagctaagatttttgttttttaatttaagtagttaagatttttattttttattcataaacgtttaatttgtgaatrtgataattagtagatatattttaatattgtaaaaaaga

SEQ ID NO: 412586 - DNA, 630 bp, Homo sapiens
tatctatttcttcttgagtgagctttactagttggactctttcagggactttttttgtataatataagtcatcaaatttgttggtataacattttaaaaagatttcattatcatctttatcatctttttagtgtctgtaaaatagtatgcattttgttcctttttattaccttattgcagtagttagtatctctgccacaaatttgaatacaaacagtagtaataagcatgcttgttttaaactccagactttargtggagtttaaagacaaacattagggctcctttctctatctctttctcctttccaaaatttcttcattcacttttcagctgtttggcatcctataactttatcctctaatgcctcaaatcagtaaaatgacggatgtctgtttgaatttcagctatcttcatcttgtgaactggtaagtgtcttcaggaaaaaaatttacataagcacaaatgtcactaaatggagtttttatctattttatgctgcagtttctgcctgtttttagtcactcaccagtgcttcaaatagttgtttatagatattttgaataaaatgtataattattatctgtgggagtatatgcattcattaccaaaaatggaactgcaaatatt

SEQ ID NO: 412587 - DNA, 643 bp, Homo sapiens
ctaggcacatagtcatcaggttatcaaagttaagacaaaggaaagaatcttaagagctctgaggcaaaagcatcaggtaacctataaagaaaagcctatcagatttatagcagatttgtcagcagaaacccttcaagctagaagggattggggttctacttttagcctccttaaacaaagcaattatcagccaagaattctgtaaccagtgaaactaagttttataaatgaaggaaagatatagtctttttccagacaaacaaatgctgagagaatttgccactaccaagccagcagtacaaaaacttctaaaagtagctctaaatcttgaaacaaattatcaaaatacacaaaatagaacctccttaaagcataaatctcacaggacttacataacaacaacacaataaraaataggtattcaggcaacaaacagcatgatgagtaaaatagtacctcacatctcaatactaacatagaatgtaaatggtctaaaagtgccacttaaaagatacagaatgacagaatggatcagaatacaccaaccaagtttctgttgtcttcaggagactcacctaacaataacgactcacataaacttaaggtgaaggggtggaaaaagatatttcatgcaaatggacac

SEQ ID NO: 412588 - DNA, 643 bp, Homo sapiens
ctaggcacatagtcatcaggttatcaaagttaagacaaaggaaagaatcttaagagctctgaggcaaaagcatcaggtaacctataaagaaaagcctatcagatttatagcagatttgtcagcagaaacccttcaagctagaagggattggggttctacttttagcctccttaaacaaagcaattatcagccaagaattctgtaaccagtgaaactaagttttataaatgaaggaaagatatagtctttttccagacaaacaaatgctgagagaatttgccactaccaagccagcagtacaaaaacttctaaaagtagctctaaatcttgaaacaaattatcaaaatacacaaaatagaacctccttaaagcataaatctcacaggacttacataacaacaacacaataaaaaataggtattcaggcaacaaacagcatgatgagtaaaatagtacctcacatctcaatactaacatagaatgtaaatggtctaaaagtgccacttaaaagatacagaatgacagaatggatcagaatacaccaaccaagtttctgttgtcttcaggagactcacctaacaayaacgactcacataaacttaaggtgaaggggtggaaaaagatatttcatgcaaatggacac

SEQ ID NO: 412589 - DNA, 640 bp, Homo sapiens
agatgacaacacaataatagtgggggacttcagtacgccaccgacagcactagacaggtcatcaagacagaaagtcaaccaataaataattgacttacactatacactacaacaaatggatttagcaaatatttacagaacattctgctcaacaactgcagaatatacattctattcatgagcacatggaccattttccaagctaggccatatgataagtctcagtaaatttaagaaaaytgaaattatatcaactactctctcagaccacagtggaacaaaattggaaattaactcaaaaaggaacccacaaaaccatgtaaatacatggaaattaaataacctgctcccgaataatcaatgggtcaacaatgaaatcaagatgaaattgaaaaattgtttgcacttaatgataatagtgaagcaacctatcaaaacctttaggatacagtaaaaatggtgctaagaggaaagtttacagctttaaatgcctacatcaaaaagtctaaaagaacaaaaatagacaatctaaggtcacaccttatggaactggagaaacaagaacaatctaaacccaacccagcagaagaaaagaaataaaaagatcagagcagaactaaatgaaattgtaacaaaaaat

SEQ ID NO: 412590 - DNA, 624 bp, Homo sapiens
cccaataacttagaatttttcaaacatgagaaatttatcttttgtgaaagcaaacaaaccaagcgtgaagtctataaacgtgaatgtgaatgcaaagatggataaaaagtattcatgttaactcaatgacttatctggaagagaacgtttatcctgtggtgtggaggctagcattaaggagtcagcccagctgctttcttcaccttacaataagcacatgtcacattatcagctgtaacattccacttccatttctttgcacatactattcccctgtccccagaagtgcagcctctgcgaacctccactgtctccttcttttgcaattactcttgacaccatagaattaatgatttactccaattgtcttattctctggtagtctatactacataatttaatcatttagataactgaataatctgtggacatctggcacattctgaagaagtccaaaggaacgtcagaggaagagaataaaatgactttgcgcrcacacacacacacatacacacaaattttccatctgaaatttgggagtgatgggaaacatatcacttccactgatacccatgccaatattaccaggcaaaatataagggatgctacaattatttgaagaac

SEQ ID NO: 412591 - DNA, 578 bp, Homo sapiens
aaaatattccacatcagcgtaactgattagaatttgtaataatttaktatatattcatactcataatagtcagtcacaaatctctgttaaatgttaaaataaacctaatacataatatgcagtatctgtatgtttaaagttataaaaccttactaaaagacttaaaatgggtaaaggactgaagagcatgattaaatatttaaatttttacaaaataaaatgtagaaagaacaaaaaataagccacaacattcctcaccaatatttctttggcatagtcaagggaaaaaaatattccatattctaactgcttttactttaacataccttaaatagaatcaggagccacaactctgtaagtacacattcatgtgagttcagtttgtcgatttttagtaatataacttgttgaaaggacgagtttacaatacctaaagaatggaagaagagtttacattttattctgtggcttctggaaatgatctaattcagtgtttctcatctctgtctgcatggtagaatcacctgggatctttaaaaattattgatgtctaagtctgtgctgaccaattacatcat

SEQ ID NO: 412592 - DNA, 578 bp, Homo sapiens
aaaatattccacatcagcgtaactgattagaatttgtaataatttattatatattcatactcataatagtcagtcacaaatctctgttaaatgttaaaataaacctaatacataatatgcagtatctgtatgtttaaagttataaaaccttactaaaagacttaaaatgggtaaaggactgaagagcatgattaaatatttaaatttttacaaaataaaatgtagaaagaacaaaaaataagccacaacattcctcaccaatatttctttggcatagtcaagggaaaaaaatattccatattctaactgcttttactttaacataccttaaatagaatcaggagccacractctgtaagtacacattcatgtgagttcagtttgtcgatttttagtaatataacttgttgaaaggacgagtttacaatacctaaagaatggaagaagagtttacattttattctgtggcttctggaaatgatctaattcagtgtttctcatctctgtctgcatggtagaatcacctgggatctttaaaaattattgatgtctaagtctgtgctgaccaattacatcat

SEQ ID NO: 412593 - DNA, 531 bp, Homo sapiens
aatttcatccatattttgatcatgtagagtctctgatcacttttgatgatatactttctaatttatattcagtaaaattatgagatacttacataagtgaatagaaaaggtatatgaagcatgctttggaagccactcatggtgagtcaacctggaagaatctctaagcttggagttaggctttcagagttccaactccagctctttcttacctattatctagctaacaaatttgatccatttatggggctaattttaatatacattcctattctatatattttatacaatttatgtgattataattttaaattatgtctgcaagaaaactttgctaatttaaaagagctatgccaatatgtagtcatattatwattattatctatattatcaaatagtgttttaaaaaaagcaagataagctagaaataagaagagcataatatgtccaataaagtaaatttccatggggaacactaaggagaaaaaccatgagtaatctctttataagggctaagaggtattcttgaca

SEQ ID NO: 412594 - DNA, 594 bp, Homo sapiens
gtagagaaagagctgagaagcaaaatgaaaaactaagtccacctagagcttaggaagaccaagagggataaaaggacaagggacggggtagtgttattggtgtccaagattatagtcacccgggggaagtttgatctgtagtggaacagtctggtggcagctggaaccatagaagagatgcaagtgcacaccagtgatgtcactagaggcagggagagagaggaggaagaaatactctagcttctctcttattccaggctccagtcttctgtgagacctttctgctcgctgatccctgccaaagccagcagacacagtagcttaagagtctgtaggggtgagcctccttgaaatgcaaaatggagcagaagcagggagaatgaatgggccaagcatttgcccccatacttagtattgtacaacttagtttttaaagargtataatttttagtgataatcagtagaaaaataaaattctataaacttaccattctaattttatccctcttccattattttctcctacattcccaaattctactggccaagtaaactctcttctagcataatggcaagagggagaatgaccagtgg

SEQ ID NO: 412595 - DNA, 566 bp, Homo sapiens
aagggctaaaattcccagagaagagaccttatgactctatttgagtaagatgcttgccattcgaccagtcgtctatggacagagaaaagggcacaaattagtatcaccacagctactgcggcaacatgcaggtggaaataaaaaggggaacttaccagacaatccttctgggcccacgattcaaaacctgtccattacacaggaaagacagacaccttttcttgtgtgctgtgttctgtgataaggaaaatgtggagtcattrgaaatatccagtgcagagagaagaggccttatttttgtttagggaaaagtgcacacctcccagttgaagtaatatttcccctaagcctttgagagtaagtagccatgcagatgtcctagctggtgatcagcctggatttttgcagtagaacctctaatttcattcaagtgaaatttgtttttcgagtgaaattagaaaactttgttctgataaagctctagaattaatttttctctaatgcagtaattctcaaacaaactttaatgtgtatataatattttggggtagtcttgctaaaatgca

SEQ ID NO: 412596 - DNA, 549 bp, Homo sapiens
aaaaagaagtaaataaaacacttaacattttaaagtgcttttcatattattctgtgtcattagaaatgaaaaaaagtcttttccattacactgatcttcattttcctgttctgtattctgctatgagttctctgtttttcaaataaaatttatgtgttaaataacaaataaatgttcccctgctttgttatagattatattacagtttaaatatgttacatgtttaatattttatgtatgtttattatatrtaacatatatgatttatgtatatatatactacaaatatattaatgctattatatgactaaatagaaaagcaaattgtagtatctttcttactcaagaatctagacatgttgtcctgggaatgtcttttcagagtaggtgacattagagcatagaatttaatatattgaggacacgggcaagactaccattaatatatatgcttaatttggtgcaaagtctcccttaatataattcaagctccacaaggtcagattatgtttatcttttatgctactcaatagtcagtgcctagcaaag

SEQ ID NO: 412597 - DNA, 558 bp, Homo sapiens
ttgttaaaatggccacactgcccaaagcaacttacagattcagtgctattcctatcaaactaccaacatcatttttgacagaattagaaaaactattctaaaattaacatggaaccaaaaaagggcccaaatarctgaagtgatcctcagcaaaaagaacaaagcatcacattacctacttcaaagtaactttaaggatacagtaaccaaatcagcatggcactggaacaaaaacagacactttgaccaagggaacagaatagggaacccagaaataaagccgcatacctacagccatctgaccatcaacaaagccgacataccaagcaatggggaaaggactttctatgtatatggtgctgagataactggctaaccacatgcagaagaatgaactgggcccctttcttacaccatgtacaaaaattaactcaatgtggattaatgatttaagtgtaacacctcaaactataaaaatcctagaagaaaacctaggagataccctttttgacatcagctggggcaaattatttttggctaagtctgctaaagcaattg

SEQ ID NO: 412598 - DNA, 542 bp, Homo sapiens
aatgaagttaaataaaactctgttaacttgaatttgaattataagtatcagtataaactcatgaactcatgtactttataaataacatggtatacatactctaggtgtcttcgcttcagaggccagggaataataatgaaccccatagcaatgagcattctttcactcaggctatggtctctaaatacattttcacacaaacttaaaataatttttaaaattatttaaaaaatagtcaaagcaggaaagatactacatgagcctggagtatactgttaggctaccaagaaatgtgtctatcaaaggctactggtgtcatgcyaaaagggcacagaagccaaagtttttcccaatcgtcaaaaatggggtcattgattgttaacataaagaatactgcaatggattaaaaaacatcacgcatgtttaaatccatgcatgcatagtaaaacctttattgtaaaaaatcctcatctttgaatgatgagaagaaattgacttattattttaaaaccaataaacagagagaaaacaccattcactgt

SEQ ID NO: 412599 - DNA, 491 bp, Homo sapiens
tttgcctttacttgttaacattgcttcatttccttttcattttgcaactgctgtattgtatgtcaccgtctaatagatgaccagatggtgctatttgaaagcttcaatttgtcctaaaattaaattccaatgaaaagaacatcaggaaaattcacattagtaaaagttatgttttcaaaacttgctgctgctacatttaactcataattatttataaattctctttattattttaaaagcaattgagagaaatcttcttcgctgaatgcattttccttgtaaawtggagctaatgtgcaataatatattccttttaattaaaagagagtgatgcatttaagtcattaattataaattaagttatttttggatattaatgctatgtaatttgtagattgaaatattcattagtatagaacttgggctattttaatgtatctgcactgagttgaagacatattttacttgaatacttgggcacaagaaaacag

SEQ ID NO: 412600 - DNA, 644 bp, Homo sapiens
aattttaaaaatatgcctacttcagtagtatgtttctcttttacatttactgtagttaatgagcccactacattctctgtgtagtattatttaaaagcgtggattgagaatataaaaccacagtatttaaaatcaactagaaagtgtcttctgcctccgctactattgttataccatstttactgtcacaggaatatctaaataagttttctctatttcacaagaactgattctatttaacttttatttcattaaaaaattattgactgctgcttattttgtattttcccatttttactgtatattagtaaacaatgaaggtgtcttctttaaatggtttaataattataaatcctataggatatgttatttctgatatagtctaattgagtgcattcgcctagagaagctaccgttttagtagacttttcactgtcggcattccgtgtacacatcttacggggcttcatttactgatgcctaaatctttaacctgagagataatcataaagataaatactaattcagaacccttcacaatgtaaaaatcatttaagtcctttcatttacaatgtattatttaattaatcaagaatgggttgcccatttaatttatgaagaaaaaaagtgaatgcctttgaaat

SEQ ID NO: 412601 - DNA, 592 bp, Homo sapiens
tgtggtaattatagtggcaacaagaaactaatacaaatagcaataaataatagattgagattaaaaacaaaaccattcataaaggcacgaaaatataaagcattcctacactaaaaattcaaaatgtgaatgcaagaaattaaaaatctaatttaatggcaacacatgtcacctttatggattggaagactcaatattttaaagatatcaattcaccccaaatgggtctatagattcaatggaacctcaatcaaaatttcattaactttttatagaaattgaaaatcttgttctaatatttatatgaaaatgcaaagtacatatagtagcacaaataatttttaaaaagtggaacacattggaggacttatactgtctgacttcaaggcttattataaagctacaggaataaagttaatgtggtattggtgtcaagtcaaatarataaatagaccaaaatgaataattgagaagtagaactacttatatatagtcactttaattttcaaaaataggtaaagtctattcagtggaaaaagaaacgactttaacaaatgcaaaaacaaaatctaaacttgaagtaataccttgc

SEQ ID NO: 412602 - DNA, 604 bp, Homo sapiens
aagtaataccttgcactatatgcaaaaattaactcaaaatgaccacagacctaaattgaaaacatataactgtaaacttctagaagatgwcataggagaaaatattttgagacctaggattatacaaagatttattagatatgatgccagaagtatggtatataaagaaaccaaattgataaattggacattgttcaaattaagatgttctgctctttaaaaaccacagctaagagaatgaaagagaagcctccgtatgggagcaaatatttgcaaatcatatataaaggacttatatccagaacatacaaagaatccccaaaactcaatattcaattaaaatatgaggaaaagacagacatacttcatcaaggaaaaatttgatggcaaataaacatatgctcatcatatttagtcattagagaaaaacaaaacaaaatcacagtgaaatactactttgcactaattagaatgtataaaattgaaaacatctaccattccaactgttgacaaggatgtagagtaagcacactgctttggggaatgtaaaaaatggtacaacatctttggaaaacagtttggcaggttttgaaagttaaaaata

SEQ ID NO: 412603 - DNA, 612 bp, Homo sapiens
catacaattaaaattcctcttattggagtcatttccacctcccatttggcatttttcagtaattatcttagtttatttcctggggcatttgacattgttcccaatgccctcactcccaaaatgcctttatctttcttggctacttgaacaacactttctytgggttttcttcctgcttctttctttggttgctgccccttaagtttccccgagtatattttaaatctgcctgcctctgaaaaatgtaagagttacacttccaaagactagagagaaaaagtgactttatagtggagaacctggcaaacactaccttacctttaaggctaatatccccaatgatgtcatatgggtatcagatacccctggaatgctgtgatgagaaaggctgctttacctttgtgggatattctttccaaaaacccataaccccatctaatgatgagaaaaatacatgaggcaaacccaaattgaggaacattctacaaaatacctggccaggacccttgaaagatgataaggtcatttttttttttaaaggaagattgagaagatgtcagagacaaaagaagactaaagggacatattaactcaatggagtgtggtatcctg

SEQ ID NO: 412604 - DNA, 548 bp, Homo sapiens
tcaaaatcatggtgctgatgttttaggtttaagcataactttagaaatagttttgaaatgattgtatttgtgtatagtttatctcctgttaaaagaatcagatatamtagtttgagtataatctaaattgcttcagggaattaatcaacttgcaattgttgtttaaatgtttggaaaagttggctttttttaattttatgtatttaattcatcatcaaaatgcacagtggttggtgttgctttccattttcagagatctctgggacaaaagacctatcaataagaatttaaaatatatagaaaacttcaggccttaggctgcaattgagtccccacaagaatgtaagtattcatatgcatttctgccatgacttaaaaggttacttcaaccctatattctaagaacactctgccagagcaggggtttaggctttgtagtccaagaactaaaatcaaagatattatgtaggtacttacatgccaagagagaaaattaatttcaaaacaaatttatagataaaatttaaaatataataataattgagtat

SEQ ID NO: 412605 - DNA, 584 bp, Homo sapiens
aactccacctggctcccttgatttacaagacattaaggactccctacccaccccttttcctcaaggagttaacttgtgtaagcagattctcaacatatcaaaagagtccaattaactgataaggtactaaaacaagcaatgtacgaagttcccaggattttgctcaaaagataacaccataaagccttgagtttgtgtccggcatagcacccatatctaacatcttatgaaggatttagagcccccgcacctggtactgttgcttctctgtaaccatttgtcttttaaattgtttgtttctctgtagccatttgtcctttttaatttttttgcatgttttacctctgtagaattattgcatctgaacccccctcccctacctaaaccaaagaataaaagaaaatcaagccccttcctcatggccgagagaattttgagcgttagctgcctctcggtcgccggctaaataaaggactctcaatttcttctcaaagtgtggcgtttctctaactcrcttgggtgcaacaagttcacagaagcttgatccataacatcaaaaaatgaaaacaactcaaccgttcatc

SEQ ID NO: 412606 - DNA, 366 bp, Homo sapiens
acttgaacatgggatgcagaggttgcagtgagccgagttcgcrccactgcactccagcctgggtggcagagtgagactctgtttccaaaaaaaaagaaaaagaagactccatctgtgtttggtacatgggtgcctacttaaaatttttttaaactaaatgcattaaaaatgtcggttcaaatgtgaaacatttggggggttaggtttttcttaaagggtggttgaaagaaaaaacaatctcagaaacagttttaagaaaaaggagaataatctgtgttagatattcaagggactgcaaattggtccatgtaaatttgttacaattgaaaaatattatacaattatctagaactttttttctaatac

SEQ ID NO: 412607 - DNA, 581 bp, Homo sapiens
agatctttttatttgagtatgttgacactgtgaagacacagtgacagatttgcagggctagacagaccatgaagaccgtcttcagggtagaggggtcctgatccagaatcaagggaaaaatttatctgccttataacttccttgttagttcatggagagaaaaatatttttcctcacaaaacataactatccattcaaacttacactgatttcattcagcacatttccatttctgtttccaatatcaaggactctagttagacatgaagagttatataaaatgcaatcataaaacatacagagctaaattgtttcttctaaaaacctaaacaataaacaaggttgtatgtaattgaactctaaaatattacctaaatacaattctttaccaaaaaagaaattcataagtacttaagtagaggccagtctaaaggatttgctagataatttgcttcctaggcctcaactttacttacaagattcacttctgactcccaaagakatgtagaaatatctgggttctgacaaatctagatattacactaacaatcttggcagttaacacaaaaatctacacatca

SEQ ID NO: 412608 - DNA, 533 bp, Homo sapiens
ataaaaaataaaatagaggacaatagagaatgttagccttctttaattttgaccttgaaataaagagatgcatgtcaggggttcttcataatttatattttttaattaagtgtactgaataagagtcaatcaaccagacaacaatcaggcagtgtccctctcttactggctttgccatgacctttcatcatggcacacccatgcacacattcattygtgcatgtactcaataagtgtttgctgagcctttttctatgtcaggcctgtgttaagcccttcataagctttatttttttttttcatttaatctctgcaattgcatttacaagcaggtaatattagtgttcccatttcacacctaaggaaactgagcttctcaggtgtcagaacttgcccaaggtcacacaggcagtgagtaattgagttccagttttcctcctagcaaacttctacttttctttcaaaacccagcttcaacatacatcactgcttaatcgtagcttttgcatgtggccttgggaagcgcttcccct

SEQ ID NO: 412609 - DNA, 555 bp, Homo sapiens
atcaatggtcaaaaatgagccagcagtatattattgcttaaaaaactaaaaaagaaaggaagtaaaagttacagtgattttgtgttataattagaatttacaagtgatgtctcctccatattatccactaatcataaatttatgaaactgctatatttactttggatcactgttcctctgggaaaaaaacaggaagaaactgtagagtccagaaaataatagtgatggctaaagaaatgggaaactattttcattatgtaattaagtagaaactatttagagaaaagcagttaagggatacctttgaatcagagaattgtagagctggtagcagccatgtaacatctggtcccattmctttaacttgcagaaatggtaactgaggcctgagaagtctaaattgcccaggcagcaagtaagatatttgagaccaaagttcaggtcttcccacctccagcccatagtattttggggctagtgtcttcaagtgtgtgaaagattgcttcacaggaagcagaagtctctattagcaaatacaccatcttcaagtgggag

SEQ ID NO: 412610 - DNA, 555 bp, Homo sapiens
atcaatggtcaaaaatgagccagcagtatattattgcttaaaaaactaaaaaagaaaggaagtaaaagttacagtgattttgtgttataattagaatttacaagtgatgtctcctccatattatccactaatcataaatttatgaaactgctatatttactttggatcactgttcctctgggaaaaaaacaggaagaaactgtagagtccagaaaataatagtgatggctaaagaaatgggaaactattttcattatgtaattaagtagaaactatttagagaaaagcagttaagggatacctttgaatcagagaattgtagagctggtagcagccatgtaacatctggtcccattcctttaacttgcagaaatggtaactgaggcctgagaagtctaaattgcccaggcagcaagtaagatatttgagaccaaagttcaggtsttcccacctccagcccatagtattttggggctagtgtcttcaagtgtgtgaaagattgcttcacaggaagcagaagtctctattagcaaatacaccatcttcaagtgggag

SEQ ID NO: 412611 - DNA, 558 bp, Homo sapiens
gaaactatttagagaaaagcagttaagggatacctttgaatcagagaattgtagagctggtagcagccatgtaacatctggtcccattcctttaacttgcagaaatggtaactgaggcctgagaagtctaaattgcccaggcagcaagtaagatatttgagaccaaagttcaggtcttcccacctccagcccatagtattttggggctagtgtcttcaagtgtgtgaaagattgcttcacaggaagcagaagtctctattagcaaatacaccatcttcaagtgggagagacagcttctattacctacaaatcagccagccccagtaccagcactgctgctcctttgcggggcttcccacacgtgggggtgcttgggttccagaggcttctgtgaagaggtggctagagcctcctgagaaaacagttcactattccwgtctagccaagcactcaatgcttgctatttttatttttatttaaaaatttcaatgtagtaaaatatatataacgtaaattttatcattttaaccatttttagatgttcaattcattggcatt

SEQ ID NO: 412612 - DNA, 558 bp, Homo sapiens
gaaactatttagagaaaagcagttaagggatacctttgaatcagagaattgtagagctggtagcagccatgtaacatctggtcccattcctttaacttgcagaaatggtaactgaggcctgagaagtctaaattgcccaggcagcaagtaagatatttgagaccaaagttcaggtcttcccacctccagcccatagtattttggggctagtgtcttcaagtgtgtgaaagattgcttcacaggaagcagaagtctctattagcaaatacaccatcttcaagtgggagagacagcttctattacctacaaatcagccagccccagtaccagcactgctgctcctttgcggggcttcccacacgtgggggtgcttgggttccagaggcttctgtgaagaggtggctagagcctcctgagaaaacagttcactattcctgtctagccaagcactcaatgcttgctatttttatttttatttaaaaatttcaatgtagtaaaatatatataaygtaaattttatcattttaaccatttttagatgttcaattcattggcatt

SEQ ID NO: 412613 - DNA, 576 bp, Homo sapiens
caaaatctaaatagtaaaaaaggtctccaggttgattctgtttttcttcttactctctaatatagtaagataaacatgttttctttcttctggaaaatctgttttaagagtcttgctaccttaatacaaagaagcaagagttagttaccagacaaggccagtgtggactagaactcagaacacttttcagatctcttgtgtcayacaattaatagagcaatatatattccccttaacatcaaacatagcagaggatcatagaagaacctccaatgcaacaacagagccatttagcaaccacagctgaacttctagaataaagtgaaggaatatccacagccttgtggttcctgtcttgagactaaagcaacaacaggatgtgtacatggtatttctgaaagctcctagtcagcttagggaggaccacgagctcaacaaaggggcccaacaaccttcattcatgagttaacaatcaggaccatccacacaatcccttttccaaaaaataacttaggtcatattaactactggaaggtctttgttaatatggatcattagaccaaaacctgtgctgtt

SEQ ID NO: 412614 - DNA, 624 bp, Homo sapiens
tgtatttctcgccttccttaggagattcagataggttttttgttgttgttaaatctctcagagtaacaacttttatttaagatacattcaacacaagcttaaaagcaaaaatgtaacaaaaagatctkgcttgctcttgttggaatgttccttgaaaatttcaaatagtccaaaggaccaagtttctttatgttctttagacctaccagcttcaccaggtaatatatttatttcttcataaacaaggcatggtttagaagattagagtttgggcttcctaaattcattataagtctttctgctaagaggttttagcatttttctaattaagttaacttcaacataacctaaattctacaatgtaaacccatgcaaagttcttttcctctcctggacttaagaaacatcagttgggatgacttttactgcttcaggtatttttgatcacctgcatgttaacacctaaatgtaagacaatggtttctgttcacacaccaactggaaaaacaaacatagaaaaaataataaaaaacagcataagttacatgtctgatgacaggtagccgtagcaagaactacagaaatttagaggagaaagtgtgccttaggagtagtcaggagaaa

SEQ ID NO: 412615 - DNA, 612 bp, Homo sapiens
ctgggtgagtggataaaattaccacactggcagtatggttgaagagtaaaaaagggctttgaattgcatttatctgtaacagtcaccagtggggccatggtgcagttaaaaatgtatggcttggccgggcgaggtggttcacgcctgtaatcccagcactttgggaggctgagtcgggtggatcacaaggtcagaagatcaagaccatcctggctaacacagtgaaaacctgtctctactaaaaaaatacaaaaaaattagctggacgtggtggcgggcgcctgtagtcccagctactcgggaggctgaggcaggagaatggcgtgaaccygggaggcggagcttgcagtgagctgagatcgcgccactgcgctccagcctgggcgacagagcgagactctgtctcaaaaaaaaaaaaaaaaaaaaaagaaatgtatgacttggcttgtgctactgcaatgccctacagaaagtgtctaagagagaatgtgcagtcaacagtcaggtggttgagattaatcatccatggagctcagccatcctctgtctctgttccccccaagtattggcacaatgggtcaataataagaatagatattatggcacgatgga

SEQ ID NO: 412616 - DNA, 597 bp, Homo sapiens
ggagctaaacaaagccaagcacaatgcacccaaatcttagcagcataactatagccacgagttatctggatgtatcacaagacatccttttctctcccttgttggaggactcaattccacagcttcaccttagcatttgtcttatggtaataagtccgtgcaaatccctctgagacatatttctgtcccaaactcaattccaagcttcaggtcaaagccctaggaaggaaaactggatctgagggatccagagrcagatgataacggaaaaggcacaacacaggtgaacgtggctgattcctgtcaattaagccacgcttcccatttcatagataaaggccatgctagtattcatggcataaatgaggtctagggaattcaaggctatggacagcaggggaaacagaacatatgtgggaagagtggataattcccaccccctaggccccgttaacatgagtgaaagtcactttaacatccatggcggtacccgctaaggtcgccaggactcagggatacaaggacgaaagaggagaatgctcatccttctctcacgtaccccgggtatctgctaaaaagagaagggaaccagggatg

SEQ ID NO: 412617 - DNA, 597 bp, Homo sapiens
ggagctaaacaaagccaagcacaatgcacccaaatcttagcagcataactatagccacgagttatctggatgtatcacaagacatccttttctctcccttgttggaggactcaattccacagcttcaccttagcatttgtcttatggtaataagtccgtgcaaatccctctgagacatatttctgtcccaaactcaattccaagcttcaggtcaaagccctaggaaggaaaactggatctgagggatccagagacagatgataacggaaaaggcacaacacaggtgaacgtggctgattcctgtcaattaagccacgcttcccatttcatagataaaggccatgctagtattcatggcataaatgaggtctagggaattcaaggctatggacagcaggggaaacagarcatatgtgggaagagtggataattcccaccccctaggccccgttaacatgagtgaaagtcactttaacatccatggcggtacccgctaaggtcgccaggactcagggatacaaggacgaaagaggagaatgctcatccttctctcacgtaccccgggtatctgctaaaaagagaagggaaccagggatg

SEQ ID NO: 412618 - DNA, 597 bp, Homo sapiens
ggagctaaacaaagccaagcacaatgcacccaaatcttagcagcataactatagccacgagttatctggatgtatcacaagacatccttttctctcccttgttggaggactcaattccacagcttcaccttagcatttgtcttatggtaataagtccgtgcaaatccctctgagacatatttctgtcccaaactcaattccaagcttcaggtcaaagccctaggaaggaaaactggatctgagggatccagagacagatgataacggaaaaggcacaacacaggtgaacgtggctgattcctgtcaattaagccacgcttcccatttcatagataaaggccatgctagtattcatggcataaatgaggtctagggaattcaaggctatggacagcaggggaaacagaacatatgtgggaagagtggataattcccaccccctaggccccgttaacatgagtgaaagtcactttaacatccatggcggtacccgctaaggtcgccaggactcagggatacaaggacgaawgaggagaatgctcatccttctctcacgtaccccgggtatctgctaaaaagagaagggaaccagggatg

SEQ ID NO: 412619 - DNA, 486 bp, Homo sapiens
atttgcaattattttgctcagatttgtctattctcacgccatttattttttagttgatcatttatttatatcagtattgatatttattttatactttgggttataatccaacattgttttatttattttgttgcccaaattgttccagcattacgaaatttaaaaaaaaattagtgatttttaaaacagcaaagtcaatcttacaaagattagtctttcccaatttttaaaaagaaaaactgrgactcagagatcttaaataattttcaaaaaagaatgatttgaacccttaattacaagattccaaggcaaatataaattttatacactattgcctccagtgattagcagaaaaaaactaaagaaaggccaaattcagagtttgccttacatatgcatgaaaaatgaatggcccattaaaacaaattattataggacagaaatgtaaaatgagccaaaacgtaattgtttaatgttattctatct

SEQ ID NO: 412620 - DNA, 486 bp, Homo sapiens
atttgcaattattttgctcagatttgtctattctcacgccatttattttttagttgatcatttatttatatcagtattgatatttattttatactttgggttataatccaacattgttttatttattttgttgcccaaattgttccagcattacgaaatttaaaaaaaaattagtgatttttaaaacagcaaagtcaatcttacaaagattagtctttcccaatttttaaaaagaaaaactgagactcagagatcttaaataattttcaaaaaagaatgatttgaacccttaattacaagattccaaggcaaatataaattttatacaytattgcctccagtgattagcagaaaaaaactaaagaaaggccaaattcagagtttgccttacatatgcatgaaaaatgaatggcccattaaaacaaattattataggacagaaatgtaaaatgagccaaaacgtaattgtttaatgttattctatct

SEQ ID NO: 412621 - DNA, 419 bp, Homo sapiens
gccagtaggttgattgtgaaagcactgtgcgcaacttccaggccatgtccttagaaagaccttaataggatatagayacaatggtgtaccatcttggatcttgcatgcagctgccttgcagtagtagaacaacaaggtggaagtttctctgtccctgtcatgaagaagcaccaccataacagctcagactcttatatggcagagaaacaaacttccactttatttaacccattacaaatgttggttctctgtttccatagctaaacctatatcctaatgaatataacctccagttaattccctcagtaattttttgtattggtggtgtggtacagaattacacaacagagtagtaaaagatactgtgtccttctcaacatcaccatgtcactgatgccaacattatagtagcggcatca

SEQ ID NO: 412622 - DNA, 243 bp, Homo sapiens
attatgtggtgggcacattctatgaagagataacaggtaactttcacttagttttctaatgcattgtcttcctgtcttccttccttccttccygcatgcctgccttccttgtagcttccttctgtaactccaaaaaatttatttgaagcacagatgtaatatgaaataatctgataaccgtgtcatttgcaattatttgtttacaatttttaatatttctatgtaaaatataaatgtaagagg

SEQ ID NO: 412623 - DNA, 546 bp, Homo sapiens
tccagaggattcgccagcccctagtccatactccaccaccctgactccccttcctgctgtcactgcagttacaggaagctctatatcttccgtagcatctaaaatcacaacagccataactgtttcctcccacttcctccaatatccagcttcagtctaaaatttttcccagtgctgcaratgtcaattgtaacatacaaagaagtattcagaaaagaatgcatatttctcttataaatactttctttcataaccgctttgactataacttaaaaatctaagttgactgcattccgataaatattcttcacctttaaggccagaagagtatgttgaaagagtggttagacatcctattaattttcttgatactgcattaggaattgaagttgacaaattcagagagctattagcttttgaatagtgcatgaaaataatgaatttgactagtatttcacaaaaactacagagctactaacatcaactgtgtaccacaaattgtcttggaataaagaaatcttcataaaattgcccaaacttgaattg

SEQ ID NO: 412624 - DNA, 546 bp, Homo sapiens
tccagaggattcgccagcccctagtccatactccaccaccctgactccccttcctgctgtcactgcagttacaggaagctctatatcttccgtagcatctaaaatcacaacagccataactgtttcctcccacttcctccaatatccagcttcagtctaaaatttttcccagtgctgcaaatgtcaattgtaacatacaaagaagtattcagaaaagaatgcatatttctcttataaatactttctttcataaccgctttgactataacttaaaaatctaagttgactgcattccgataaatattcttcacctttaaggccagaagagtatgttgaaagagtggttagacatcctattaattttcttgatactgcattaggaattgaagttgacaaattcagagagctattagcttttgaatagtgcatgaaaataatgaatttgactagtatttcacaaaaaytacagagctactaacatcaactgtgtaccacaaattgtcttggaataaagaaatcttcataaaattgcccaaacttgaattg

SEQ ID NO: 412625 - DNA, 546 bp, Homo sapiens
tccagaggattcgccagcccctagtccatactccaccaccctgactccccttcctgctgtcactgcagttacaggaagctctatatcttccgtagcatctaaaatcacaacagccataactgtttcctcccacttcctccaatatccagcttcagtctaaaatttttcccagtgctgcaaatgtcaattgtaacatacaaagaagtattcagaaaagaatgcatatttctcttataaatactttctttcataaccgctttgactataacttaaaaatctaagttgactgcattccgataaatattcttcacctttaaggccagaagagtatgttgaaagagtggttagacatcctattaattttcttgatactgcattaggaattgaagttgacaaattcagagagctattagcttttgaatagtgcatgaaaataatgaatttgactagtatttcacaaaaactacagagctactaayatcaactgtgtaccacaaattgtcttggaataaagaaatcttcataaaattgcccaaacttgaattg

SEQ ID NO: 412626 - DNA, 547 bp, Homo sapiens
ggcaatgggcgcctcactggatcaggagcacagcagacaccctgctggatccagaggatggaagtcagcggcgggtctgcgacggcggcaaacagcagtggtggacggcgagcaaaagctcagcttgagccgtaacaaacatagaccagaagagagtgcagctgcaagatttaatagagtgaaaacagagctcccatacaaagggaggggacccaaagagggtagccgctgcctgctccartgcctgggtttatatccctatcattgtccctcctgctgtgctctcaggcaatagattcttggctactctttacctcctgtttttgcctaattagaattttagtgagctctccttattacctgattggtcaggtgtgaactaagttgcaagccccttgtttaaaggtggttgtggtcaccttcccagctaggcttagggattcttaatcagcctaggaaatccagctggtcctgtctctaactggctggggctggggaatgccacgagatcttccccttcccctgccaaggggttcaactccaacag

SEQ ID NO: 412627 - DNA, 464 bp, Homo sapiens
cctgctttcccacttccactttgtaaagagctgcaagttcattaaccaagtggtccttctttaacagcaataacaacaaataggaaggaagaatagataggaactcatcagcaactctaaggcaggttgattacctggtgctccttaaactgggggctcttgttaaattcactttgcttcctgaagaaagctgggccaagatggggtctgctgtatcctagatataatcgtccatgtcaagsgtttgcagctgatagtgtaaaccaaaagaagatatgtcagcatctaactacccagatccctgcagaggtcttacaactgtcaaggcatttgcagtactgcacggtacttggctacctgcacagctatgacctcctgcaaatggtcaccttgtgtaccagttttgccttgccatggggagctcatcttttcaactctaagaggtagggagagtctgataacta

SEQ ID NO: 412628 - DNA, 548 bp, Homo sapiens
tccaatttattattcaatcaaatattcattaagaataagtattaatagtgaagaacagacgaataaaagcacatggttatacaggaactccttataagggtaagagtggaaggtagaggccatccttcactccttcacataaaatctcctarccccacaaaaatcaaaagatattaaagtaagtgctccttaaaatgtattagtgagtaaggcatcatgaaaaagggcatcaatcgccatgtcctaattaagggttacaaatgatgttccctaacacaacaggtagaagatttacatttcagtgtttcactacccccatgccttcctctgcacttgcttggcaaaaatcatccttctaggatagcaacatcctaacaatcttccttaaaagggttaaagactatatttgtacacaaatgctcacacacaaacatgacaaagtaaagtctaatccttgaaatataatttgtgaaaaatcacaatgcccttttccgatttattatagctttcacttctaaacacataaaacaagacttttgctatgatga

SEQ ID NO: 412629 - DNA, 548 bp, Homo sapiens
tccaatttattattcaatcaaatattcattaagaataagtattaatagtgaagaacagacgaataaaagcacatggttatacaggaactccttataagggtaagagtggaaggtagaggccatccttcactccttcacataaaatctcctagccccacaaaaatcaaaagatattaaagtaagtgctccttaaaatgtattagtgagtaaggcatcatgaaaaagggcatcaatcgccatgtcctaattaagggttacaaatgatgttccctaacacaacaggtagaagatttacatttcagtgtttcactacccccatgccttcctctgcacttgcttggcaaaaatcatccttctaggatagcaacatcctaacaatcttccttaaaagggttaaagactatatttgtacacaaatgctcacacacaaacatgacaaagtaaagtctaatccttgaaatataatttgtgaaaaatcacaatgcccttttccgatttattayagctttcacttctaaacacataaaacaagacttttgctatgatga

SEQ ID NO: 412630 - DNA, 459 bp, Homo sapiens
ttaaactcagaaactaccttgcaggatcttcatggttttctctgtagcaactgtgcccagaaagccattaggactgagtcattttatgttattaacaactgaagcaaaacgaaaaattcctcccatttgcttctttttgcattaagaagtaaatcacccccccccccccgccaaaaaaaagtttggagataaattacctttccacatccacttaacacatagtgcatttcatttgcattaaaacgaaaatgtggctgtcataatccattataattctgttacaaattctgagtgcactaaaggtaagggcattttgatgcttacaaaagaaaaaggaaaaagaaaccccattagccaacatcctacttagcaattcatacaatcatcataataattaacatttatgcagccctcaccaagaacatgcaattttctayggcttttacatttattatgtca

SEQ ID NO: 412631 - DNA, 459 bp, Homo sapiens
ttaaactcagaaactaccttgcaggatcttcatggttttctctgtagcaactgtgcccagaaagccattaggactgagtcattttatgttattaacaactgaagcaaaacgaaaaattcctcccatttgcttctttttgcattaagaagtaaatcacccccccccccccgccaaaaaaaagtttggagataaattacctttccacatccacttaacacatagtgcatttcatttgcattaaaacgaaaatgtggctgtcataatccattataattctgttacaaattctgagtgcactaaaggtaagggcattttgatgcttacaaaagaaaaaggaaaaagaaaccccattagccaacatcctacttagcaattcatacaatcatcataataattaacatttatgcagccctcaccaagaacatgcaattttctacgscttttacatttattatgtca

SEQ ID NO: 412632 - DNA, 493 bp, Homo sapiens
ctcattggcgtattcagagttcaaattagatatactttgtagagctcaattatggacatgaaatgtgaaattagtgactttttgaaacagaaaaacatactaagatcacttcttttaccaattgtactaatttatactcataatttagggctaaatttaaatatagtgctcagcaaataaaatgtctagaataaaaatttggaaacactgttctcccccaactccagcgtcttataactacatggtgggggtcggggagttcatactatgacatgcttgtatgtgttttccagcagaatttattctctcattcagaacgtttactgagtacttcctatttcccaggcactagtgctgtgctgctagttttaggaaacagaaagtgaacaagacattgtcccagccacaggggagtgttccrtgagtgagacaagtggatgggtcattcttccatggtgtgatgaatgctttgataaagacaagtccagcgctg

SEQ ID NO: 412633 - DNA, 607 bp, Homo sapiens
agaacaagtaggcggaagatagggatatagaaagtaaggatagagaagacttaccattatcaatcarcttgacataattgatgtttatagaacattccgtctaacaatagcagaatattcttttcaaggatatttgtctaatttatgaagatggataatattctgagccataaaacaagtctcaatatataaagtgataaaaatcatacaaagtatcttctctgaccagaatgggatttaattagaaatcaacaacataaatgtctttagcaaaccttcaaatatttggaaactaagtaacagatgggtcaaaaaagaaatcagcaagaaattataaaatattttcaactgagtgaaaatgaacaaacaagataccaaaatttgtgggatatatcaaaagcagtaattagagggaaatttatggaactaaatttctcctttggaaaaaaagaatgatctcaaattaatgaccttagcttccatctttagaaactacaaaaagaagaacaaataaaattcaaggtaagctgaagaaagaaaataatgaagacctgagagatcaataaaatagaaacaaaaattagaggaaatcagtgaaacaaaacca

SEQ ID NO: 412634 - DNA, 593 bp, Homo sapiens
ttctcttacactccttttattttcctgctatatcttcctgctataatatttagtgttttgtctgcctcaagttacagctcgctgatctctctattggatctaatctaccattaaactcattcagtgaatacttagtttcaattacagcatttccaattcataatcttaatatgattctttttcaagtatgttatgtcacctttacagacattttcaagtttgagttttgatctcaataaaaataacaagtatatatttatttttatagagctatattatagtttacatatgattatttaaatattttaagtcckggtgcatctacatttttttaacttttcacttcgaaaaaattttaaaaattacaaaagagatgcaagaataaaaacagaacatagaacactcatataatctttccttgattcaaatatttacatttccctctttgttttaccattttacccatagataattatggaatgatctcattttccctagttcaaactctttatccagatatgcctgaatttgccccttgtattacgcagctttgcaagctatttttaactggatatctatcctttgtaactcaa

SEQ ID NO: 412635 - DNA, 548 bp, Homo sapiens
tcactgatttgtaatgccatttatatcatctactaagttttcgggtattcatgtgtttcttttctgaatgtctaattccagtcatctatttgttctctgaccatgtatctgtttgtcttcaaaattatggaatattcttgacattttactgctttgtatatacttttagtattatgttagtgatccagataggtaaggctacattctaccgtgattaattttgtatgttaatacattygcaccacaaactttgatcatgtatctaatatctgccaagctttgtatgcaagaccaaaaactaagatgactaaaagtctgtttactccagcttaacacttttgatgactgctgtacacttttacatataatctaagaaaataacagatattggctgttgtgtgtgaccattttgaccttattaaattttcctaaaacgagaaattaggacacttccttaaaaattatcttggaaatatgcaatcttatcaccttttcaatctataatattcagtgtttctttcagtcacacagaagaatgtaatggaatt

SEQ ID NO: 412636 - DNA, 652 bp, Homo sapiens
ttgtcttcctgggtaaaccataaaagacttgccaagcatgaacaccaatgcccacaccaatgtccacccaatgaaagggtggggataatgtatgtggttactaaggattccacatcatcttagattacataaaacagtaggattcaggttgatatgtagaaaactacttcaacccaagggtcattacagctgtaaatttgtggaagtagactgaactccactaaggttccctctggaatccccaccaccaagatattagtaatcagtagtccactatctgacaaccataattgagataaagcaagaaaaagcaataatgcatgcaaaatatcgtttttttttaatcaaaacttgcttattctcccatttttactccccagcaatcaaatgaatcagtatctgatactgtcagaggcatctgaaccagaggaattccatcttgaataggggctgggtaaaatgaggctgagacctacttggctgccttcctaggaagttagtcattctaagtcataggatgagattggaggtctgcaaaagatacaggtcataaagacattaytgataaaacaggttgcagtaaagaagccagccaaacccactaaaactcaaggcaacgaaagtgaactctggttgtctcactgctcattat

SEQ ID NO: 412637 - DNA, 567 bp, Homo sapiens
cgtttttttttaatcaaaacttgcttattctcccatttttactccccagcaatcaaatgaatcagtatctgatactgtcagaggcatctgaaccagaggaattccatcttgaataggggctgggtaaaatgaggctgagacctacttggctgccttcctaggaagttagtcattctaagtcataggatgagattggaggtctgcaaaagatacaggtcataaagacattactgataaaacaggttgcagtaaagaagccagccaaacccactaaaactcaaggcaacgaaagtgaactctggttgtctcactgctcattatacactaattataatgcattagcatgctaagagacactcctaccagcaccatgacagtttacaaatgccaaggcaatgtcaggaagttaccmtatatggtctaaaaaggggaggaaacctcagttctgggaactgcccacccccttccccggaaactcatgaataatccaccccttgtttagcatataatcaagaagtaacaataagtttaagcagctgagtggaccatgctgctgctctgcctatg

SEQ ID NO: 412638 - DNA, 567 bp, Homo sapiens
cgtttttttttaatcaaaacttgcttattctcccatttttactccccagcaatcaaatgaatcagtatctgatactgtcagaggcatctgaaccagaggaattccatcttgaataggggctgggtaaaatgaggctgagacctacttggctgccttcctaggaagttagtcattctaagtcataggatgagattggaggtctgcaaaagatacaggtcataaagacattactgataaaacaggttgcagtaaagaagccagccaaacccactaaaactcaaggcaacgaaagtgaactctggttgtctcactgctcattatacactaattataatgcattagcatgctaagagacactcctaccagcaccatgacagtttacaaatgccaaggcaatgtcaggaagttaccatatatggtctaaaaaggggaggaaacctcagttctgggaaytgcccacccccttccccggaaactcatgaataatccaccccttgtttagcatataatcaagaagtaacaataagtttaagcagctgagtggaccatgctgctgctctgcctatg

SEQ ID NO: 412639 - DNA, 529 bp, Homo sapiens
tcattttgcggcagtccagagtgctgtatatagtgcagatttagtaatgcatcaaaattcattgatgacttctgtgcattggcatcagtattacctctgtgtcatccgtagtttcaaatgacaggattagtaaccagagaaatgctggaatatgcccataagacccactgaagctcaatctcagtgacattccacttaaactggtgaaaaatggatagcagctggattgcttggcaaactaacaaacgtaactacaagaaaagaagaacaactgtaaatttattagatgaactaaaaataacctgggagctcctagtaaatctcrgcagtagctagttcaacatacagttaccaaagatggtgtggttttgtttttataaacattgtgtatttcaagaaacaaggacagatccataaatcagaaaaactcattacacatggggctaacctcagaaaagactagtgaacacctcatggtataaggatgtcctttgaatatctagggtgttttgaaataaatttaaattac

SEQ ID NO: 412640 - DNA, 553 bp, Homo sapiens
tatgggggtactgagccagtgtcagccctgagctgggagagtagagaaattttcagctggatgagtcattacatttaactggactgttttttgaaataccaaaaggcaactttaaaaagcagaagggaagaaagatgttaaacagattgtttgaaagggccttggtgagaaagaatctgtggactttctactcgcaatccaccaggaccgatytatgcaataaaccagttaccaataccaaacgtttctccccaaaacaattagtactatattttaaaataaagagctgtaaaaatgcacacaatacattgtcagggacgagcagatgatttccattcaaattaacaaacaatatttctgctcatgatttgttgtcattgttctttgcagcaattagtcccaatccaaagagaggttgtaagtagcctggcaaccaagagcagcacccagaagacttgattgctagatatagcaatccctctaactgctaactagaggccagcctttaattcttggtacttctgtttccacattttcatattggcaatgaaaa

SEQ ID NO: 412641 - DNA, 633 bp, Homo sapiens
ttaacaatgtgaattcttctgatccatgaatataggatgtctttccatttgtgtcctcttcagtttctttcgtcaatgttttatagttttccttagagagatctttattcctcggtgtttttaaaactattgtaaatggtattgccttcttgatttctgttttggctatttcattataggtgtatagatatgctactgatttttgtatgttgattttctgtcctggaacttaactgaatttgtttatcaactcttagagatttttagtggagtctttgtttttttaaaatataagatcatgtcatctgcaaagaaggacagtttgacttcctgttctcccatgtggatgctttttgtttctttctcttgctggattgctstggataggacttccagtactatgttgaataggagtggtgaaagtgggcatccttgtcttgttacagttcttacaggaaaggctttcaaattttccccattcagaatgttgttagctgtgggtttgtcatacatgccatttattattttgagttatgtttcttctgtgcctggtttgttgagaatttttatcatgacgtgatgttaaattcatcaaatactttttctgcatctattgagatgaccatgtaattt

SEQ ID NO: 412642 - DNA, 619 bp, Homo sapiens
gggcttcaattctggatacatacagtagtacagtctggtgttatgatttttttkgggggggtatgtaaatagcctcagaagggtctatgatttccttggtggcttaggctgtgattgttagtagaggctgtggcgaagttattctggggactgggatgacaggtaggccagctttgggccctaatgatcacagcgggctgaacatgcttgcccttgagccccatggcagcatattgctggtgatgatgccagtaggtccaagcaggctgattcttgagcctccaggtggcttgcttgggtgctggggatgatggcagcagtgggctgggtgggcggatggtttcccaagtccttgggcagtggtcatggcatgagcagtagtggtagcagtgttgggacaaccctctgagacccatgtggtccatgctggtgttggcagtgtatgtgatgggttgtacaagctggtccctggacctgcaggtggcatactggagtgggtgccagctgtaatagttgtggcaggttgagtgggcctggcctcagaccccaggaggcatgcttaggtgctaccactagtgggctgggctgagtgatccccaggcttctggatggtatgctg

SEQ ID NO: 412643 - DNA, 569 bp, Homo sapiens
tctaaagttctggcatatattaaataaaatataattctttaaattaccaaaaacttcatcttacaaaaggatttgcagctagctttatttaaatatcaaactcccactagtatgtagtgtttgtttatataccacaatctattcacagtgttgcagacacagaaattcaraattagaataatagaagcaagtgagggaatttagcaaaattttctttatacacttttgtctactatgaaaaacagcatgctttatgctacagtttcaagacaacaataatcacaaaaatcaaataaatacatcgctctaatctgcatcttcatccatccatcattcttcaaattatggccaagggcatatatatgtatttaggatctattatattttcattacttggtgtagttagtataaagtttagttgctgagatacatgcaaaatatctccatttcagacatcactgttcatattgtattataaatgaagtatcaacctaccacctaatcaagagcagttcctgcagtgagcaggggagagaagttagggtagtaactatcttgccagaggagat

SEQ ID NO: 412644 - DNA, 569 bp, Homo sapiens
tctaaagttctggcatatattaaataaaatataattctttaaattaccaaaaacttcatcttacaaaaggatttgcagctagctttatttaaatatcaaactcccactagtatgtagtgtttgtttatataccacaatctattcacagtgttgcagacacagaaattcaaaattagaataatagaagcaagtgagggaatttagcaaaattttctttatacacttttgtctactatgaaaaacagcatgctttatgctacagtttcaagacaacaataatcacaaaaatcaaataaatacatcgctctaatctgcatcttcatccatccatcattcttcaaattatggccaagggcatatatatgtatttaggatctattatattttcattacttggtgtagttagtataaagtttagttgctgagatacatgcaaaatatctycatttcagacatcactgttcatattgtattataaatgaagtatcaacctaccacctaatcaagagcagttcctgcagtgagcaggggagagaagttagggtagtaactatcttgccagaggagat

SEQ ID NO: 412645 - DNA, 409 bp, Homo sapiens
agttatgattattgatgccaaaagcaaagttacaaaatgaaatttgaagaaataatttataataatatcaaagcaaaagaaatctagaaaaaataacaaaaattgtaaaaggcctataaactgaaaactagaaaacgttgctgaatagaattaaggaagacctaaataaatggtgtgatatatcatgtctgtggattagaagacttgttattgttaaaatgtcagctctcccccaaattgatcyacagactcagcacaatctcaatcataaccctaaaagactttgtggaaatttatgagtctaaaatttatgtggaaataaaaatgacctgacctagaataaccaaaacatagatacatacatcagtggaatataatagagaatacagaaataggcctatacctatat

SEQ ID NO: 412646 - DNA, 520 bp, Homo sapiens
tttagttatttcttttcttctgctggcrttgagattaatttgttgttttttgtagtccctctagatgtgatgatagatcattaatttgagatctttctaactttttgaggtaggcacttagcgctataaactttgttcttaacactgtttttgctgcatcccagaggttttcaaaatgttgtgtctctgttttcttttatttcaaaaaacttttatttattccttgattttgttgtttacccaagtcattcaagaacaggttgttaaatttccatgtaattttgtggttttgagatatcttggtattgatttatattttcattccactgtggactgatagtatggttggtataattttgatttttttgaatttattgaaatttgctttaatggccaagtatgtggtagatcttggagtatgttctgtgtgcagatgagaggaatgtatattgtggttgatgggtagattattctgtagatgtctgttaagtccagttggtcaggtgttgagtttaagtcc

SEQ ID NO: 412647 - DNA, 411 bp, Homo sapiens
ctcttggcttataaggtttctgctgataattccactgttagcttgatggggttcccttagtctgtgatgtgccttttttctctagttgcctttaatatttttttctttagcattgaccttaggcaatctggtgcctatataccttggtgatgttcattttttgtagtatctcgcaggtgttctctggatttcttgtatctggatgtcaacctctagcaaaattagggaagtttccttaaattactctctcaaatatattttctgggttgtttactttttctccttctctctcaggaatgtcaagaattcatgtttagttgccttaaataataycatatttcttaaaggccttgtttattttttaaaattcctttttttttatttttgtctgactgggtttattcaaaagac

SEQ ID NO: 412648 - DNA, 504 bp, Homo sapiens
ttccattttggttagggattattgctagagagctagtgcgatcccttggtggtgccactacattcagatttttcaaggtgccaaaatacttgcactggttccttttcatctggagatgctggcacttctaattattcttattattttcatgtagacaggatttttttctttcttcctktaatagtctgttttcacactgctgtaaagaacttacccaagactgaataatttatgaaggagaaaggtttaattgactcacagttcagcatggtgagggagggcctcaggaaacttacagtcatggtggaaggtgaaggggaagcaaggcaccttcttcataagggggcaggaaggagaatgaacacacaaggaactactaaacacctataaaaccatcagatctcgtgagaactctctatcatgagaacagcatgggggaaacggcccccatgattcagttacctccacctgatctctcccttgacatgtggggattatggggat

SEQ ID NO: 412649 - DNA, 580 bp, Homo sapiens
acccatctccccaattttccagcatataaacacagtaatgattgaaaggagaactgtttataaactttcatttatattcctgggaaacatayttcaagtaaaacaaatactacccagtttcttagctcttttaactttttatctttcttcattgtattgcatattgcagttgagaagtcaaaacaggttaattcccttcaaggagatgctaagcctttaagtggcttttgctaactgacatagacgagacttgagattgatacacagtaggaactctggttatcttttcttcagcaggaatttagcaatgcctttcctcagtagcactaatgaagttcagctatggtttgaaactgctctgggtacctgagcaggccttttttttaagattgcactgctcactctttataaagaacgttctttatggtaaaaaaaaaattctgcttcccaaacccaggtgattagattactgcaaatagtggtattaattttatggtgggaaatccaatagaaaatgagtgaaaacacacaaaacagtagtataaataatggttcttaattgaaggtgagcaacagagta

SEQ ID NO: 412650 - DNA, 422 bp, Homo sapiens
tgggtccttctgtcttcaactgccttgagataggcagtgtttctcctttgccagacttctcctgagctccctacagtgtaatatacaggctcttacccttggggtcctctttccctagcaggctgccttctttaacaagacctttttcacaatgaccctcactaattcactgcatccccaactacaggagatccatatcaagttctctgagttatcccatagaattctctgtcacttttgtttgggattagaagtctcagctcyattctcttcaaagaaatccttctttaaaatttcagcagtcatgatgatctctctcagaatcctctttggccagcatcagctatggccttcaagcctcagccaaaaccgtgaagggaagagtcacattttaacagcctgttatgtacaggctaatactt

SEQ ID NO: 412651 - DNA, 570 bp, Homo sapiens
cactgtctttgttacatgttcagacaaagggttttctttgtgtatatatatatttgaagctatggaatgaattactcattagattccttatgccttcccttttcatgtgaaatgtaaaattttaaatatagtacrtggttttatttaatcccatttatcttaaaacttactttgcttttggctgtgatttaaattgaatttccccgtagagaatcatgaaataaacaaatccaactattatccagagaagctcaaaaaagtcatagagaattatatactctaaggactcaaatagagttatattcaacaaatactattgaataaatgaagtatgtaaacatgatagatgggtaaatagaagaaaataaaagaccagagagaaatattagaaaataaagcagctgttgtgtaaggatagatggtatttggggaaattttttttttaagttttaacataattgaaatattttaaagtaatcatttaaaatgggcacccagtgcaatttcttggtaagttgaaaaaacaagtgttttgaccctactttataccatatgcaaaaagcaattcca

SEQ ID NO: 412652 - DNA, 569 bp, Homo sapiens
aataaatgtgaagggcaaaacaataaagcttttaaaaagaaattataggggaaacttttcatgacatggggttatttttaatcagaatataaaaagcactagacttctggttccaaaatggcagtatagaagcaagcttcattcactccccaccacagaaatccagaaacaaatatagagcaccagaatttttcaccagcaacaacccagaactcaaatatgggatgaaacaattcctggagccacaraaaagtggagaaactccaagcagatagtaaaagaatccagactcccacatccacaatgcccctcccccaaattcttcccagcgccaagcacacaggaaatctcccctcaattcacagtttatgtacttgaaaaagtgagattgagatggtcagccggcttccccaccttcttgggttcccagcaggagacttgtccttgctttaacccacaggaatcatcatgactgagtgaaggaagaaatatccctgcggacaggcagagacaaaggagggggcaggactgacattcccagccatggaaactctgtgactcaaccaaag

SEQ ID NO: 412653 - DNA, 569 bp, Homo sapiens
aataaatgtgaagggcaaaacaataaagcttttaaaaagaaattataggggaaacttttcatgacatggggttatttttaatcagaatataaaaagcactagacttctggttccaaaatggcagtatagaagcaagcttcattcactccccaccacagaaatccagaaacaaatatagagcaccagaatttttcaccagcaacaacccagaactcaaatatgggatgaaacaattcctggagccacagaaaagtggagaaactccaagcagatagtaaaagaatccagactcccacatccacaatgcccctcccccaaattcttcccagcgccaagcacacaggaaatctcccctcaattcacagtttatgtacttgaaaaagtgagattgagatggtcarccggcttccccaccttcttgggttcccagcaggagacttgtccttgctttaacccacaggaatcatcatgactgagtgaaggaagaaatatccctgcggacaggcagagacaaaggagggggcaggactgacattcccagccatggaaactctgtgactcaaccaaag

SEQ ID NO: 412654 - DNA, 636 bp, Homo sapiens
aacattgtacattagtgttgtgtagtgttttaattaatgaaacaatagtgataccattgattacgatttcatgaagtctgtagttcatttagagtcctttagtttttaagaagtgtcctttctctgttccaggatctcatccaggataccacattacatttagcagtcatgtctctttagtcgtctctttactgtgagtatttctcacacttctcttgtttttgatgattttgacagtttggatgagaattggttaggtattttgtaatctacacatcaactgaggcttgattgatgtttttctttaaaatatttttcccatttgtatacatgtgtggtatacaagtgcaattttgttacatgcatatattgcacagtggttaactcagggctttagggtatccatcacttaaatgatgtacagtgtacattgaagtaatttctcatttacccccccaaccccctcacccttgtgggtctccattgtctattatccactctacatccatgtctacacgttttataacacccacttatgagcaagaacatgcartatttgactttttgtgcctggtgatgttttccttttgattaaactgggacacacatttatgggaggaagaccagacagataaa

SEQ ID NO: 412655 - DNA, 561 bp, Homo sapiens
gtattccacctacatgcctatttctgagtcaagcacgttgtttatgcccagtgcattttctttatacacagaggctgagaaagaaccaggaagcctctgactgtttcaagtgtgttctctgctatatctatctactgattcaataagcacaagctcattgaatggaaaagggcaatatgcaaagrgagcaaaatgagacatatatgtcaaaggaaagttccactgcaaatgtctttatttgatgtacacagagggatttgaattaggtctaggttttatgcccactttacagaaaaattgaaacttgatcaaacctatagaaccagtaaatgtcaggaccagacctggagacacactcccctcggtgcatattttatatcttcttcattttatcaccccaaatcatttactcctgaagtaaattcatttaatatttaacaaatgtttacaaaagttgactatagtaaaagtattatgttagctgctatgaagtagaaatataatcacacgattatcttaatgaagcatctctactttatagaagggaaattgagattctga

SEQ ID NO: 412656 - DNA, 472 bp, Homo sapiens
tctaatggatgttgctgtatgtaatattttctatatgagagacaagatgtaaggatgaagatgagggacaagttcttcatctagaaagatcaagggtgctgtcaaggaagagttgaatttgattcagaactgaagaatatttgggctttcaactagctcagagaaattctgtagtcactagaagatccttgcatttgagagggcaaatttgaatatgttccacaagtaaaatcagaaattgggctttttattttactaaccagattaatgctctattccagaaatgcaaataggttgtacttttattttaacatggggctacttttgcctactrttttgctggtttttgttgttttattgcaaaaccacaattactgttacacaatggaagctccatcagtgaagatactttatctactttcttcactgttatattatggggtaaaaaagtgctttgcgtatgagaacaagt

SEQ ID NO: 412657 - DNA, 564 bp, Homo sapiens
  misc_feature (1)...(564): n = A,T,C or G
aattccaaactcttcctgttgtgacatggtcatcttcctttcgtgcgttcatgtcctcacacagcattctcctcgatatgcatttgtctgttcgcctcttaaaataacatcaatcagggtagattaggtccaccctgatgacctcatattaactatatctgtaatgtctttatttccaaataaggtcatattcataggtacttgaggttaggatatcaacgtatccctgtgggngggcacacaattcaacccatattaatatgcctgctagatccccaacccacatcttttcacatacaaaatacattcaccccatcccaacatccccyaaaatcttaacccatcctaatgtgacctctaacaccaaaatgtcttctaaataaaagtaactcaacaactcccaaatctcatcttctaaaacttcagaatcagatatggatgagatgctgggtaatgttcattttggggcaaaattcctctttatctgtggacctctgaaatagagaaaacaaattaccttttttacaaaatgcactggtggaataggcatagaatagatattcc

SEQ ID NO: 412658 - DNA, 410 bp, Homo sapiens
gggagatggaggttgcagtgagctgagattgggccactgaactccagcctgggtgtcagagtgagactccatctcaaaaaamaaaattaataaataaaaaataaaaaaaataaaaaatatatataaaaaatcaaaaacttcaacagtagactagattaagagcagaaagaatttcagaacttgaagacagttcttctgaaataatccagctagacaaaaaaataaggcagaaagaataaaaaagaatgaggaaatcctttgtgatttggtatgacataaagtgaccaaatatttgaattattggtacctctcagaatgaagagaaaataaaagaattataaaatcaatttaacaaaataatagatgaaaatagcccaagtttggcaagaaatttagacattcagatatgt

SEQ ID NO: 412659 - DNA, 562 bp, Homo sapiens
gtgcaaaggacatgaatacatatttctcaaaagaagacatgcccatggccaagagttatatgaaaaattctcagtgtcactaatcagataaattcaaatcaaaaccacaaggaggtatcatcttaccccaatcaaagtggccattattataaagacaaaaaataatgaatgttggcaaggatgcagagaaaagggagcacccatacacagttggtaggtatgtaaactagtaaaccactatacaaaacaggatggaaatacctcaaaacactaaaaatggaactatcatttgatccagcaatcctattactgatatctacccaaaggaaatcagtataccacaggaatacctgtatttgcatgtttattatggcactatttataataacaaaggtagataayaaagataagtgtccatcagtgaatgaatgtttaaagaaaatgtggtatatacacaatggaatactatttgtccataaaaagaaagaaaacatgccatttgacataacattgatggaactggaggtcattatctttagtgaactaagccaggcacaaaaag

SEQ ID NO: 412660 - DNA, 612 bp, Homo sapiens
tatctatctatctatcatctatctatctatctatcgtctatctatctatctatacacttttcaattgcatatggaacgttcaccaaatagaccacagtctgggacaagggtgttcaactataaaaaaaaatcattcaatgtgatccacataaaagcagactaagcaaggaaaacaacacataatcatatcaatatacaaagaaatgcatttgacaaactcaaaattcatgtatgattaaaaaaaaytctccacaaacctagaaggtgatttccttaatatgaagaagaatatctatttaaaaatttacagctaacattatacctaatggagaactgctgaatgactacctctattggaaagactaagcaatgaaaatacacttttagtactcctattcaatattacagtgcttccagtcctagcaagtgcaagtaagtgcaataaggaaagaaaaaagattttaaaatgcatgcaaattgaaaaggaagaagtaaaaaaaaaatccccagtgatagactagatgatcatctatgaagaaaatctcaaaaaaatctacaaaaaagctctcagagttagtaagtgagtttagtacgtttgtggcataaaagttt

SEQ ID NO: 412661 - DNA, 475 bp, Homo sapiens
gtcaagtaacttgacctaattgacatttagagaacattccatcaaacaaaagcaatatctatctatctatctatctatcatctatctatctatctatcgtctatctatctatctatacacttttcaattgcatatggaacgttcaccaaatagaccacagtctgggacaagggtgttcaactataaaaaaaaatcattcaatgtgatccacataaaagcagactaagcaaggaaaacaacacataatcatatcaatatacaaagaaatgcatttgacaaactcaaaattcatgtatgattaaaaaaaattctccwcaaacctagaaggtgatttccttaatatgaagaagaatatctatttaaaaatttacagctaacattatacctaatggagaactgctgaatgactacctctattggaaagactaagcaatgaaaatacacttttagtactcctattcaatattacagtgct

SEQ ID NO: 412662 - DNA, 538 bp, Homo sapiens
tctctgaggggctcctgttcagaacaaaaatgtaatatagctccgggtgttatcagagctgttataaaatgcacttgggcattctgaggattcatgcttaatgcctttctataatttgtgcagaatgtgtgcagagtccttacagcatgctaataacattttgwtatgacacagtgcagcaccacagagccaacttacataaggatagaacaatgatgtagaaggcaaagataaagattagaatttcaagttaaaaagcaaggttttatagaggccattgataggttggaggtaaagcaactgacaacaacttaaaatagttaaagacatttaggcatatcttagaatgagactcgactgacattttgaaggcaagcttataggaaaattaatcacatgaggagtgttcattgactttctatagaaaaagtattgagataaatttgcaggtattcaataaagtagagtgcctatcaaaataggcagcctgcgttaggacgtcaccattttccatacatgtgtgtgtttttcttcctaa

SEQ ID NO: 412663 - DNA, 538 bp, Homo sapiens
tctctgaggggctcctgttcagaacaaaaatgtaatatagctccgggtgttatcagagctgttataaaatgcacttgggcattctgaggattcatgcttaatgcctttctataatttgtgcagaatgtgtgcagagtccttacagcatgctaataacattttgttatgacacagtgcagcaccacagagccaacttacataaggatagaacaatgatgtagaaggcaaagataaagattagaatttcaagttaaaaagcaaggttttatagaggccattgataggttggaggtaaagcaactgacaacaacttaaaatagttaaagacatttaggcatatcttagaatgagactcractgacattttgaaggcaagcttataggaaaattaatcacatgaggagtgttcattgactttctatagaaaaagtattgagataaatttgcaggtattcaataaagtagagtgcctatcaaaataggcagcctgcgttaggacgtcaccattttccatacatgtgtgtgtttttcttcctaa

SEQ ID NO: 412664 - DNA, 540 bp, Homo sapiens
agaattaatgcactgtctgttttctgtagaattatgacagattttatgcctttgttaaatcctaagattagttggtataactactttcaatgctctggcctattttctttgttgctaaaatgaaaatagatcagaaacaccttttgaggcctctggatttataatttaagaattaactctgagaaagtagtaggtgaataaatagagttataatctaagacaacgttacattccttgtgtgagtctcacatctaagacccggcagtactttcttcctctgtgcattctcacgaatacccacacactgtaagcatagtttctaagattccataattatgaatcctaacaataagaatgactcagaatgcagaatattacaatgcagactctgtcctgtcaggtaaagtaaggaaaggtaaatactgyttaccgatacacattattaaatggtctgttctaatttctaattgtaacttcttggtttcaatattagacatacatagaaagttctgcctaagtaacttgaggctgattccctgt

SEQ ID NO: 412665 - DNA, 627 bp, Homo sapiens
gttgtgacacatgcctgtaatcctagcattttgggaggccgaggtggaggatcgcttgagcccaggagttcaagaccagcctaagtaacatagtgagacccccatctccacaaaaaattaaaatacctaatcatggtggtgcatgcctgcaatcccagctactcaggaacctacaataggagccaaaaaggtggaggttacaatgagccattattgcactactgcactgcactcctgcctgggagacagagtgagaccttgtctcaaaacactacaacaaacaacaacaacagcaacaaaaatcagtaggtattaatagttaggttttttgggagtcagaagttatacacagattttgactgtgcaggggatcagcgctcctaacgcctgcattcttcaagggttacctgtattcttgatacaarttctccttcagatttaagtattatagatatttttccagtctatagcttacctattcattttcttaataatgtcttttgattgatttttaatttttaactttggtgaattccagttgtatactttttttatgattagcatttttgtgtcctatgaaactgttgccttcctcaatgtcactaaattctcttaggttttcttcta

SEQ ID NO: 412666 - DNA, 602 bp, Homo sapiens
tcttcaccttcaccttccactgaagagagaggttaaagattaacccccccactctaatcacatgtactgtctataaatctcaatctatcaagaccctttcacgtggaccccttggagttgtaagcccttaaaagggtctggagctctttcttyggagagcgtcattcttgagatgcaagtctgctgacgctcccagccaaataaagcctcttccttctttaacatggcatctgaggggttttgtctgtggctcatcctgctgcatttcttggttccctgaccaggaagtgaggtgattaacggacagttgaggcagccccttaggtgacttacacctgccctgcagagcatccctgcagtgaactccagccagcttgagcgatggggatcctgagaccgctcctgggtaggtgtttgtcctggtagaactcctcgtcagagtggtgcatggcaggcccccgcagatgatcaatgcaatgtctgaacactgggaaggaaccattgcttggagtccagacatctggaatacagaaggaccggtcctgggaacttgcccactgcatttgagtggaagcgtggcctgatcacccactgtgtgccct

SEQ ID NO: 412667 - DNA, 592 bp, Homo sapiens
tgtttgcctttcagtgggaggatccggagtcaggtgtcaccactcagtaccttggacccagcttccccaagggttcaagaactcccccaccatctttgggggggtgctggcttgagacctccagaagtttcccaccagagacctaggctgcttgctgctcgagtacatcgatgacctcctgttgggacaccccacggcagtcgggtgtgccaagggaacggataccctactccagcacctggaggactgtgggtataaggtgcccaagaagaaagctcagatctgcagayagcaggtaagttacctgggatttactatctgatagggggagcacagcctgggatcagaaagaaagcaggtcatttgcaacctaccggagcccgagaccagaaggcaggtgagagaattcttaggagccatggggttctgcaggttatggatcccaaactttgcagtactggccaagcccctgtacagagtcacaaaggggagcgacaaggaacctttcaaatgggggtcccaaaagcaatgagcttttcatgagttaaaagagaaactcatgtcagcccccgccctggggctgcctgacctg

SEQ ID NO: 412668 - DNA, 592 bp, Homo sapiens
tgtttgcctttcagtgggaggatccggagtcaggtgtcaccactcagtaccttggacccagcttccccaagggttcaagaactcccccaccatctttgggggggtgctggcttgagacctccagaagtttcccaccagagacctaggctgcttgctgctcgagtacatcgatgacctcctgttgggacaccccacggcagtcgggtgtgccaagggaacggataccctactccagcacctggaggactgtgggtataaggtgcccaagaagaaagctcagatctgcagacagcaggtaagttacctgggatttactatctgayagggggagcacagcctgggatcagaaagaaagcaggtcatttgcaacctaccggagcccgagaccagaaggcaggtgagagaattcttaggagccatggggttctgcaggttatggatcccaaactttgcagtactggccaagcccctgtacagagtcacaaaggggagcgacaaggaacctttcaaatgggggtcccaaaagcaatgagcttttcatgagttaaaagagaaactcatgtcagcccccgccctggggctgcctgacctg

SEQ ID NO: 412669 - DNA, 592 bp, Homo sapiens
tgtttgcctttcagtgggaggatccggagtcaggtgtcaccactcagtaccttggacccagcttccccaagggttcaagaactcccccaccatctttgggggggtgctggcttgagacctccagaagtttcccaccagagacctaggctgcttgctgctcgagtacatcgatgacctcctgttgggacaccccacggcagtcgggtgtgccaagggaacggataccctactccagcacctggaggactgtgggtataaggtgcccaagaagaaagctcagatctgcagacagcaggtaagttacctgggatttactatctgatagggggagcacagcctgggatcagaaagaaagcaggtcatttgcaacctaccggagcccgagaccagaaggcagktgagagaattcttaggagccatggggttctgcaggttatggatcccaaactttgcagtactggccaagcccctgtacagagtcacaaaggggagcgacaaggaacctttcaaatgggggtcccaaaagcaatgagcttttcatgagttaaaagagaaactcatgtcagcccccgccctggggctgcctgacctg

SEQ ID NO: 412670 - DNA, 496 bp, Homo sapiens
gggggggtgctggcttgagacctccagaagtttcccaccagagacctaggctgcttgctgctcgagtacatcgatgacctcctgttgggacaccccacggcagtcgggtgtgccaagggaacggataccctactccagcacctggaggactgtgggtataaggtgcccaagaagaaagctcagatctgcagacagcaggtaagttacctgggatttactatctgatagggggagcacagcctgggatcagaaagaaagcaggtcatttgcaacctaccggagcccgagaccagaaggcaggtgagagaattcttaggagccatggggttctgcaggttatggatcccaaactttgcagtactggccaagcccctgtacagagtcacaaaggggagcgacaaggaacctttcaaatgggsgtcccaaaagcaatgagcttttcatgagttaaaagagaaactcatgtcagcccccgccctggggctgcctgacctga

SEQ ID NO: 412671 - DNA, 573 bp, Homo sapiens
attgagttacagtgacagctacaggctttaaggaaaattacacaaacaatttcagcctgggtaaatgagaggtgccccatcagcttattctccccagttcaccctttctccttaggtgatcgggtgtggatcaaggattggaacgtaacccccttgcagccattgtggaaaggaccccagaccgtcatcttgaccacagccacaaaggtagagggaatcccagcctggatccaccacagccatataaaacctacagcacctgagacctgggaggtragaccaagccaggacaacccctgcaaagtgatgctgaagaagacaataagccctgctcctgttacacccagaagctggctggtccatgcctggctgaagcataaggaaactcattgtgggtctcattttccttaaattttagacttgtacagtaagtacttcaactgatcttcctcagactgaggactgttcccagtgacatcaagttactgaggtagggcgaaaagttaaaacagtctttctgttttataattattatgaaggtactggaactctaaaagggacttgtttgtataa

SEQ ID NO: 412672 - DNA, 501 bp, Homo sapiens
tctaaaccctatcaaatattatctgtatttaataaatatttcattaccactgaggaataatcattgtgtgtgtcaaagttatgaaccagaggtacactaaggcataatgatagatccttgttcaaggatcatgaaaagtgtctactatcagattttaagtcactgtttactccccttcagctcatccttcagaaatattttgagaggtaacatttttgggggtcaagtccagaattgcttatagtaggtcctctggcaactactgtttatttattctagaatgctttaaaaagagaaygaaataacatgatatctcttctactctcatgaaagccatttaagcttttatttatatcttcctaagagaggaaaacaaggctattgttacaggtgcctgtgtgcatacacacgcatgtacatttgttttttcatatcctcaaataaatatttcatgttgaattacttggttttgccacttggatgtctcaaatttgttgcata

SEQ ID NO: 412673 - DNA, 570 bp, Homo sapiens
caaaaactatctgagactggtctcaattaatttagacatttattttgccaaagttaaggacagtgcttgggagacaagactgtgtctttctccaaagatgattttgagggcttcaatatttaaaggggaaagggcaaatgctggagagagagaaagacatttttaaaagctgtgggtagttaagaggcaagcagttgcattcttctgagtctttgatcagccattcacatgtgacagtagggtagaaaaatcgtcacttatgcattcatctagctcagtgaatctacattttttacataaaataaaataaacttaaggctgaagaagcaatcagataagcatttacctcagatgagcgaagtgaagactttgagttctgtcytttgtcctgtatttgtgaagacaagctatcaatgtacatggtcagggtaaaattcaacataactgtctcaggataaagatcttggggcccacaaggaatttgctcttgggaaaattatgagggagctatgtagctttttcatgtttttagccatcttagaaacaaaatgggaggcaggttgcatgacg

SEQ ID NO: 412674 - DNA, 526 bp, Homo sapiens
taaatgaggcagtgttgttctttttcttccttcatttacaaaagcttttttccacttttttcattgaataaaaaagaaacttagttatggctaggataaataatgtaatatgtgactattttgccagttatgtttcttctactgtgaatagcctatgccataaataacccatttttcaaatgagcaggcatttcttctattattagtttgcatgagctctttaaatatatcttatgtagcaattttcagttggttagatacatgagtttatccctagcttttctaatagcactatttccaatgttacacacacacacacacacacacacacacacacayacagcactcacttataagttgagtgaactccaggtaagataaaccaaagaattccatgccaagagacatttacaaatcttgaagagccagagaaaacccacaccgtacctttagagataaataatacaaatggcagtagatttcttatcagaaaccatggagtcctgaaacaagtggcacaatgcaa

SEQ ID NO: 412675 - DNA, 526 bp, Homo sapiens
taaatgaggcagtgttgttctttttcttccttcatttacaaaagcttttttccacttttttcattgaataaaaaagaaacttagttatggctaggataaataatgtaatatgtgactattttgccagttatgtttcttctactgtgaatagcctatgccataaataacccatttttcaaatgagcaggcatttcttctattattagtttgcatgagctctttaaatatatcttatgtagcaattttcagttggttagatacatgagtttatccctagcttttctaatagcactatttccaatgttacacacacacacacacacacacacacacacacatacagcactcacttataagttgagtgaactccaggtaagataaaccaaagaattccatgccaagagacatttacaaatcttgaagagccagagaaaacccacaccktacctttagagataaataatacaaatggcagtagatttcttatcagaaaccatggagtcctgaaacaagtggcacaatgcaa

SEQ ID NO: 412676 - DNA, 597 bp, Homo sapiens
aacaaaataatagatattttaaaatgaatttgttagccaaatagaaagtaaagtctggggcaaatatctctaccacatagataatccactgatgacttacagttcagttggacatataaaatatgatagaacttttcaataattatccttaaactctagaagaactttgaggagtccttgttcatattgcttttctgaatataattaataagattattaagatcagtctgcagcagtttccttgtagatggaaaagttaattctcagttcagggtataaacgagaaagaacataattactattattggactaattttcctaataaagttaggcttgctagcccttagtacaccattgttaatttatacacatgttgatgaaaggcaagataagtaaagtctagtgagtttggaatagtttagaggtccccctcaacttttargtatgtgaaggggatttttaatgaatgcttttaagttaacaaggaaaagaagggactgaatgatcagttttttgtattaggtggtctgtttcccactggaaaagttgttatgtggctaaagagcctggtttaaataaaaacaaacagacaaattt

SEQ ID NO: 412677 - DNA, 552 bp, Homo sapiens
gcagtttccttgtagatggaaaagttaattctcagttcagggtataaacgagaaagaacataattactattattggactaattttcctaataaagttaggcttgctagcccttagtacaccattgttaatttatacacatgttgatgaaaggcaagataagtaaagtctagtgagtttggaatagtttagaggtccccctcaacttttaggtatgtgaaggggatttttaatgaatgcttttaagttaacaaggaaaagaagggactgaatgatcagttttttgtattaggtggtctgtttcccactgraaaagttgttatgtggctaaagagcctggtttaaataaaaacaaacagacaaatttatgcagaaagttaacgaagactaaaaaccccagtgcccattgtgctgggacagcagatgccatcagcagatgcactggagtttactccagttctttactgagcccaactatataatggctatgcacatttaaatactttaaacacaaaacaggtaataaacacgagtggattgaaacaatgggcaac

SEQ ID NO: 412678 - DNA, 589 bp, Homo sapiens
gtctaaattacacaaatcttgataaatatataatagtatgcattgttttcatattttgttttctgccatcacattaaattttaaaatataccttaaataagtaagatacatattgaaaataaggaagtataaggaagcaatcaacatgaagaaagcagaaaattctatatgcttcattttttttaacttaacatttgattataatttagagctcaggccttaaactcattaaagtgttacaaacatgattacctaggggatggtactgactttttttttttttaaatttaagcatgtgtgtgttgtggctaagcattaaaataatgttttagtatttaggacatatgtagcaatagaatgagctccatatgttaagtgatttttctgtggctgaagatattcaagcccagctggatgcaaagagactattacggaggagaaatcagcacagtakggagggttcctaagattccttttggttcagagtctgcaacttgatgagagttgggtgaaataaataggactgaagagcctcctcttaaagaaagtgtgagagtgtgtctgtgtgtatgcaaatctcattacatcc

SEQ ID NO: 412679 - DNA, 617 bp, Homo sapiens
accattaatctacagtaactcaatgtatggtagattttcagcatcctttcttgaaacttcctcaattccaggggtcttatcacactgatttagcaacctcactggatgatgtcatttaggctgggggtcacgaggctaatttcccaaaatgaacaccaartaaattgaaaagacaaatttttatccacttcaggttctgctcaccttttaatccttagtttcttttaaatacacttggattttatttatttctggcctcacagatgttatcttaggtgggacttcaaaaactttttaaaacataaaattaaatttggaaatagctacaaatagcactttgacagagcttatttctttttttctcattaaaaatgtatgaatacatatggagagtgtttctttttccttaatctttttctggtgttaaatatcttcagtaaacaagaagaatatatatgattttcatctatcacttctaagtatctgtgaaattgcaggatatgacactcacacttaagtcatagttgggattttcacataaagatataaagctacatatattattattactaataagttgtaagttgaaataaattggatcctgtgaataatggtcc

SEQ ID NO: 412680 - DNA, 539 bp, Homo sapiens
aagcaaatgaaggtcattttacatcaaaatgatcaatttggcttctctgccatcagtcgaatttgggatgcttaaacaccattattgatgtgttcaaccaagagttgcagcttagacaggggcctatgtcaacttaaccatgattttgcaacatttggctaaatttagcataatgtgaaaactcttgaatattagcactatatctctggattcttgattccaagctctttttaaggataattattttgtgatgaagaataggaagattcctttggtacaacctggctaacaattgcaacaattgcattagaaaattagttgtataccctatgcttcctttaccagcaatgacaataccgtaaatattggctacttgtcctcactaccatggcarctacccattgtggctaccattcttgattgcagtttttcctatgaaggagaaaaggctagtagatgtgaactgcgatgctttgaataatactcagactccttataagtcttggcatgatctgactcttaagtctctttccaacttc

SEQ ID NO: 412681 - DNA, 561 bp, Homo sapiens
aaaactcatatattcattatcctaggagtatcaggtttgcaaagctggaccaaactaaagactcttcgaggtgcactttggcttcttaaaagagctaccaagattttggctgaggcatgtgacttaaaactcagcaggtatgattggcaagctatcctgtgaaacttgtaatcaatcaccatcggttttagtgaattgtattatctttgttcttgtaaacaytttctttcaagttatcattgcttgtgattgaatcatgagctcttagatttctaagggaacagaaaacctatgaaacatttgaagcacttttgaaaagaaacttcgtggccagaaactcaccaaaacctgaggaaatcttttttattttgaaataaaagaatgcttcctttgtgtttctgtccttgaatccagttgttttacttgagattatagcaaagtcttctctgtcttttatataatgattctttaatatttgacctattcctcttcccccacctcatttatgagttatgtctattccatcttaaacattctcaggttcttaactgtatctgctac

SEQ ID NO: 412682 - DNA, 548 bp, Homo sapiens
aatgttaaaattttaaccaaattataattcattacaatatatttatatgtattattatatataatataatgtataatgtctatttttatatatatagtaktattggagaagaaaatttttaaaagtagtatgagcaaatcaaatccttattgtgcacactgggaagaaagtagaaattttgtacaattgacagatcaagaaatagttgtataattatattacttaagatttttagggtttttcattctaaacagtggaacacaagttgaagaagagggaggcaataaactgtagctttttaatagtgagtttttctgtacagttttgattagttatcagggccatctattactccagtaaatattgaaatagaaaaaaaaggatggaattatatgaaaaaataataatggcctttattgctttatggtgagattacagattttttaatctactttttgcattgaaaacacttgcaataatgtatatatatatttttttgatgataagaaattcagaagtatccacaaataatttttttaaataatatt

SEQ ID NO: 412683 - DNA, 634 bp, Homo sapiens
ttatattacttaagatttttagggtttttcattctaaacagtggaacacaagttgaagaagagggaggcaataaactgtagctttttaatagtgagtttttctgtacagttttgattagttatcagggccatctattactccagtaaatattgaaatagaaaaaaaaggatggaattatatgaaaaaataataatggcctttattgctttatggtgagattacagattttttaatytactttttgcattgaaaacacttgcaataatgtatatatatatttttttgatgataagaaattcagaagtatccacaaataatttttttaaataatatttcattgtctacaatgtgttgtgtaatttgacagaaatttttatgctttttatctattctgtgaaatgatttatccatttgcgttcccacatgaataaactgaggctcactgaaactttttaactaacacaggttcacataaaaatatgccattgcttcaagcctaacttttggcttctcaaaatagctcaccacactctatctccaaaagcttatgacatgtgtagggatgtgactagtaatcttacaaaatagggacctgaaagatttactgcaatttacctgaatgaaaactgattt

SEQ ID NO: 412684 - DNA, 634 bp, Homo sapiens
ttatattacttaagatttttagggtttttcattctaaacagtggaacacaagttgaagaagagggaggcaataaactgtagctttttaatagtgagtttttctgtacagttttgattagttatcagggccatctattactccagtaaatattgaaatagaaaaaaaaggatggaattatatgaaaaaataataatggcctttattgctttatggtgagattacagattttttaatctactttttgcattgaaaacacttgcaataatgtatatatatatttttttgatgataagaaattcagaagtatccacaaataatttttttaaataatatttcattgtctacaatgtgttgtgtaatttgacagaaatttttatgctttttatctattctgtgaaatgatttatccatttgcrttcccacatgaataaactgaggctcactgaaactttttaactaacacaggttcacataaaaatatgccattgcttcaagcctaacttttggcttctcaaaatagctcaccacactctatctccaaaagcttatgacatgtgtagggatgtgactagtaatcttacaaaatagggacctgaaagatttactgcaatttacctgaatgaaaactgattt

SEQ ID NO: 412685 - DNA, 615 bp, Homo sapiens
gtggcctaattaattgctttctctctctctcttttttttttttttgacaggattttgctctattgcctaagctggagtgcaatgacatatgattgcttactgcagcctccaactcctgagcttaagcaatcctaccacctaaccctcctaagtagctgggactacaggtacttttcaccrtgtctggccaatttttaattttttttattttgtttttgtacagacaatgtctggctctgttgcccaggctgatcttgaactcctggcctcaagccatcatcctcctttggcctcccaggtgctgggtttacagggtgactcactccacccagatgtggccaaatgaatttctaatggattctaatgtctttttcacaggattaaatcaaacaatacatataaataattaagattagggccaagtacatagtgcataataattattggctacaatggggttaaaggaggaaattttaacatggcatagaaatttgcaccttgaaattcagcctttttatctcattgctcaggaaacaaatgttcagagcatgaaatcacttgatcaagataattcatgtgatctttatttctcttcataagttactattatgaaat

SEQ ID NO: 412686 - DNA, 615 bp, Homo sapiens
gtggcctaattaattgctttctctctctctcttttttttttttttgacaggattttgctctattgcctaagctggagtgcaatgacatatgattgcttactgcagcctccaactcctgagcttaagcaatcctaccacctaaccctcctaagtagctgggactacaggtacttttcaccatgtcyggccaatttttaattttttttattttgtttttgtacagacaatgtctggctctgttgcccaggctgatcttgaactcctggcctcaagccatcatcctcctttggcctcccaggtgctgggtttacagggtgactcactccacccagatgtggccaaatgaatttctaatggattctaatgtctttttcacaggattaaatcaaacaatacatataaataattaagattagggccaagtacatagtgcataataattattggctacaatggggttaaaggaggaaattttaacatggcatagaaatttgcaccttgaaattcagcctttttatctcattgctcaggaaacaaatgttcagagcatgaaatcacttgatcaagataattcatgtgatctttatttctcttcataagttactattatgaaat

SEQ ID NO: 412687 - DNA, 592 bp, Homo sapiens
ctgttagataatagctgctttactccagccaaacaccactaaaaagatcatagtcccatacccatcagcagaagccaagtggggagctagattttcctgcttacaagggtataataagatactccaataccctatcatgatggtgtcagagaaggcagagtaggaacataggtctctcactcctttcagacaataagctcccttcttccactgcaggatcaatagagacaacatatggagcctggacttccactccaatcatgcattaatgatattctcctccctgtttcractgggtgctatcagagcagactcagtagaaagtcaggacttttaccaccaaacacacattttagaacaagaatctaagacatattttagaacttgaaaatattacaactgagacaaacaaaacctaaaactcaactctctgtgggcgagcttaagagcagaatgaagaggactaggggaaaaaaaaattagagaccttgaaggtctctgataggatcttcagagacaaaagaaattacacttctaaacaacagaaagactgcaaaaataaagcaaaaaataagaataacaaaacccaaat

SEQ ID NO: 412688 - DNA, 568 bp, Homo sapiens
taattttttaacttgtcatccaggacaccatatattttttattcttcgatgaatgtctaatctttctcagtctgttatggtggaataatctctgcttcttgaccttctaatatggagtaccctattgcacattctttgtaattcctcatttcttgatatgacgctaagtacctttgggatctttgccaatctaattttttaaaatatcacctatggcaactctacckcagactattcctctcaactctagactaatgaaaatctccactaggatctcaaaatcaacctgttgaaacagaatcaataattaacattcctccgtgaaatccttctccatccacacttccatgtcaattaatggcagttccatccttccagctactctggccaaatagatttgagtcgaacttgacttatctcttgctctctcattctaagactgatttatcaggaaattctataaatccagtcgtcaaaatatatctagaatgtacctacatcttttcaactctgtcacttccatcactttcatcctctctcactggattactgcaattgcctcccacct

SEQ ID NO: 412689 - DNA, 485 bp, Homo sapiens
tgaggatccatggaattatctgcttttaaaatacattattgattattataatagcaccttatgtttttacattatatagtgtgtttatattaattatatctgttatttataatttacaaataagaatcaaaatcyaaaaatgcggaacaacttggctaaagtaaaagagacacaatggctaaaccaagaacaatgtaaggtcttctcaacacagtgtccctgatctttccttgaagtaagctagtagtgaaagatcctaaacccttacattatatattaattcatttatactgaagtaatggttaagacccctcatgtgtccaccctgtacttgtagtagacatacagtggtgaataaagcaccgatgctcctttcctcatcgggatttagagcctatttggctgtagagaaacctccaataagtaaatgtctaaacatagcaaaacaattcagataaacattatataagatgagcagggtgcta

SEQ ID NO: 412690 - DNA, 485 bp, Homo sapiens
tgaggatccatggaattatctgcttttaaaatacattattgattattataatagcaccttatgtttttacattatatagtgtgtttatattaattatatctgttatttataatttacaaataagaatcaaaatctaaaaatgcggaacaacttggctaaagtaaaagagacacaatggctaaaccaagaacaatgtaaggtcttctcaacacagtgtccctgatctttccttgaagtaagctagtagtgaaagatcctaaacccttacattatatattmattcatttatactgaagtaatggttaagacccctcatgtgtccaccctgtacttgtagtagacatacagtggtgaataaagcaccgatgctcctttcctcatcgggatttagagcctatttggctgtagagaaacctccaataagtaaatgtctaaacatagcaaaacaattcagataaacattatataagatgagcagggtgcta

SEQ ID NO: 412691 - DNA, 392 bp, Homo sapiens
tgtccaccctgtacttgtagtagacatacagtggtgaataaagcaccgatgctcctttcctcatcgggatttagagcctatttggctgtagagaaacctccaataagtaaatgtctaaacatagcaaaacaattcagataaacattatataagatgagcagggtgctatgagacaatgaatcggagtagggcccctttgcagtggtaaataataagtgcagttctttctgatgatgtgaaaattaagcagaaatctggaaaatgaaaacagccaagtatgtgaaaagtggaagtaaaaatactccaggcagagagaactagtggcaaagaaagagttcagtstgtttgaaagactgaaagttgtcaagtgagaccagaaaggaaagaataag

SEQ ID NO: 412692 - DNA, 639 bp, Homo sapiens
acagaaaacaaaaaattctctttgattctctacgacgtgttgggcactgtgttctttgttagattttagagatatactgatatgtcttaaaggagctaataatttaatgaaagagaaagataaatagatcagaaattaaaatggaatatggtgcatgctaataactttatgttctacttgttatgagaacacgccaacgaggtgcaacagatttttcttttaacttggaaactatctattgttactgggtgtgatattttctttattactctatggtagagaaattgttcaattaaaccaatgaagtgatttttaccaaggyctgactgtcctgtcacttctccttatcccattcctcctcacctagcactttcttgcccagactatcagatggatgctttcaactattacattttatagatggatgagaccctttaatatctgacattggtttctgagaaaactactgtgtaatttaaagttagttttgtgcagcgagaatgaaatttgaggttggtattaattcactgtgctttgaaaacactatgtgtgtgtgtatatatatgtatatttattttataataagacacattttacttgtggatgtcttaagcacacattgtaagtaatgtattacaa

SEQ ID NO: 412693 - DNA, 649 bp, Homo sapiens
tgggtggttgtttgggcagataccaaactagcttcaggagttttttttcaataccccagtggcgcctggaacaccagtgagacagaatcgttcactcccctggaaaggggctgaagcagggagccaagtggtctggctcgggggatcccacccccatggaggccagcaagcttggatgcactggctggaagttctcgctgccagcacagcagtttgaggttgacctgggatgctcaagcttggtgtggggaggggcctctgccaatgctgagacttgagtaagtggttttacccttacagagtgaacaaagctgcagggaagttcaagctgggcagagcccaccgcagctcagcaaggccatggtggccagactgcctctccagatccctcctctctgggcagggcatgtctgaaataaaggcagcagccccagctgcttatagataaaacctccatatcccagggacamtgcacctaggggaaggggcagctgtgggcgcagcttcagcagacttaaacattcctgcctgacagctctgaagagagcagcagatctcccagcacagagtttcagctctgctaagggtaagacttccccatcaagtgagtccctgacccctatgtatcctgactgggagacacctcgca

SEQ ID NO: 412694 - DNA, 649 bp, Homo sapiens
tgggtggttgtttgggcagataccaaactagcttcaggagttttttttcaataccccagtggcgcctggaacaccagtgagacagaatcgttcactcccctggaaaggggctgaagcagggagccaagtggtctggctcgggggatcccacccccatggaggccagcaagcttggatgcactggctggaagttctcgctgccagcacagcagtttgaggttgacctgggatgctcaagcttggtgtggggaggggcctctgccaatgctgagacttgagtaagtggttttacccttacagagtgaacaaagctgcagggaagttcaagctgggcagagcccaccgcagctcagcaaggccatggtggccagactgcctctccagatccctcctctctgggcagggcatgtctgaaataaaggcagcagccccagctgcttatagataaaacctccatatcccagggacaawgcacctaggggaaggggcagctgtgggcgcagcttcagcagacttaaacattcctgcctgacagctctgaagagagcagcagatctcccagcacagagtttcagctctgctaagggtaagacttccccatcaagtgagtccctgacccctatgtatcctgactgggagacacctcgca

SEQ ID NO: 412695 - DNA, 566 bp, Homo sapiens
ttaactgctcaggtagttacggttttcaggaaaaatgccttgttacagttaccttataactactatcttatgtttactagtactcaattattgttgttatcatcatttcattacagattagtaccagtttagctttacttttagcaatttagttggtttggaccactgttgccaatttctatcaatagtaccattggcctgtaatattttaatcaacaacctttaggcaaatatgcactacagaatcatccatatccttatgtgtgttttactagtaatttaagtgactaaaagcctgcagatgagacttcgttggtgatgtactgctgtgaatttatagtacttaaataatttataatattagatatagtaaaaagttaaggatatttctaagtttacagtttcataacatacagttgacccttgaacaacacaagkttgaactgcacaggtccatgaagtggattttcttcctcccctaccaccttagacagcaagatcaagccctccttcttcttactcctcctcagcctactcaatatgaaggcgaggatgaagaccctgat

SEQ ID NO: 412696 - DNA, 579 bp, Homo sapiens
tgcatcgggttgcagccaaaactttatttcatgtacaaattacttaaaatattgtacaaaattacctttgggctatgtatataaggtgtatataaaacataaatgaattttatgtttagcacatgggttccatccccacaatctctcattatgtatatgcaaatattccaaaatccccccaaaatgcaaaatctgaaaacacttatggtcacaagcatttcgggtaagagacaaaatcaacctgaagctggaaggtgtaggcagaacacagaatgtttaaagccatgggttactgtggtgtaagagctaagcctttgtctttcaacttgagactgtcaagatgtgtgatgataattaaatgacatataatattaagaaaaacttgataaccctaaaatttcattatagataaaaaagagctaataaatggagaagaaacacagaaacttaagtgtggctctataaaactattaatagtaatactaaataatcatttatattaaatgtctgacatgtatgattaattaccatcaagtacaattaagggtacagatgcrtaacccttgagtatttgtgtgc

SEQ ID NO: 412697 - DNA, 597 bp, Homo sapiens
gataaagagttggaatttgaggggagagacatggaagaacaagtagcaacaccagagaaattgagagcaggatgggaccagctgtgacaaaaaagatgaagtgcaagtaatggagaactgatggctgtgcctggtactagctttgcaaaggaagaaagagaaagctcaacacagtggatcacaaatcaggcagaaaattagagtcacccgaagagcttttacaaacagattttaagtacgatgcartagtgtgtccgtggtctcagctactcacgaggctgagggggtaggattgtttgatcccaggagtttgaggcaagcctgggcaacacagcaagatcctatctctaaaaataaataagacttcagtgaagagaatgagaaaacaagccacagactgggagaaagtatttgcaaaagacaaagctaataaagaactattatccaaaatatataaagaattcttaaaacttagaaagtaactcaatttttaaaaaggcaaaagatcttgacagacacctaaccaaagaagatatacagatggcaagtaagcatttgaggagatcataggtcattaggacactgcagattaaaaca

SEQ ID NO: 412698 - DNA, 437 bp, Homo sapiens
ctttaaaaagtcaatcgtggaagttccagtttctagccattccttccttccttccatttgctctcctgaaggtttgatccagagatgccctctaatccttgggttgttctcctccccgtcccaaaagtctttccccaggaggggtgggatctcagccasagcctggtagctgtcatgcctatgagatggtcttaagttaaatgtgcaccgaattgaagacagttaacttgataagttgcttgttttataggccaagtctcagatatcttcagcatataaaagccacagccatgcccagtgggggttactaattttcttagagtgacatcatgtggtaaagacaggaccacccagcctggctttcaaagtgctgtgatatgttgaaagatgcaagatgtgggaagtgagagaaccccaaggcacgaaccgaagccaga

SEQ ID NO: 412699 - DNA, 437 bp, Homo sapiens
ctttaaaaagtcaatcgtggaagttccagtttctagccattccttccttccttccatttgctctcctgaaggtttgatccagagatgccctctaatccttgggttgttctcctccccgtcccaaaagtctttccccaggaggggtgggatctcagccagagcctggtagctgtcatgcctatgagatggtcttaagttaaatgtgcaccgaattgaagacagttaacttgataagttgcttgttttataggccaagtctcagatatcttcagcatataaaagccacagccatgcccagtgggggttactaattttcttagagtgacatcatgtggtaaagacaggaccayccagcctggctttcaaagtgctgtgatatgttgaaagatgcaagatgtgggaagtgagagaaccccaaggcacgaaccgaagccaga

SEQ ID NO: 412700 - DNA, 607 bp, Homo sapiens
gtgatttcatggaattgtcccatgctgctgtgcttttctaattgataatctttttttttctttttccttgrcatcagctctttttttggcagcactcccccactcccatctgttctccactgtaaccagagaaaccagttaaccaaacatcagtagtttttacattcagttttaagtcactaatcaaggctatatgtctcttctacataggcaaggaagaaacaaacatatttattgagcaagtgctgtgtgccagatgctttcacagactttcttaattaccccacagtccaccgtctcacgtttctctggccacaagcaaatgaggaaagtgagctttgaaaggttaatttgttcaaagtctgtttgaatgtgtcccactgggctgtttttctcaaagcttggatctttggctacatttttgatggttgatgttgcttaaggaataattgatggataaatggtattattgcagatgtcataagtagttgtatactgtttggtcatcaaataagactccttatcattaactgcaaatggactgtattcagatcatttttttttaatattatctatacattgtgccacgcattgtaaggggtacaat

SEQ ID NO: 412701 - DNA, 604 bp, Homo sapiens
taactactctctgaccccactactactccaacagaaaatgctgttgtctctaacttcaaaatgtatccccagaattcaactctttctcaccacttccactgctactatcctggtaaaaccaccaccacctccaactggtctccatctccactcctggcctgctatcatcaggcaaccagggtgaccatgtaaaagcataaatcaaatcatgtcactcatttgctcacaactctcaaatgagttctcatttcccctggagttgaagtcaaagtccttacaatgttctataagctttattcgatctgataatctctcaacttcatccattttttccttttgttcgctctgctccatgcactccctggcatacatcaaacaagctgatttcagtgtcttcgtatttgctattctttctgyctgaaatgttcttccctcagtttcctgcatggctcaaacctctactcaactgtcatcttacagtgaagttttaaatgcccaccttatttacagtaacagcctcacctcactactgatccccaactccaacccacattcttcattattttcctggtctccctctctacaaccaaatgtcagcttcatg

SEQ ID NO: 412702 - DNA, 658 bp, Homo sapiens
ttgccatgctggccaggctggtctcgaactcctaatctcaggtgatccacctgccttggactcccacagtgctgggatttcagacatgagccaccatacccggccaaaaatgtgattttaataattgtgttcttttttccttttatttttagttggcacataataattgtacatatttatgtgatggagtgatatttcagtacatatatacaatgtgtaatgatcaaataaagataaytatcatatgcatcacctctaacatttatcatttgtgttgtgggcattcaaattcttgtcttttagctttttgaaaatatatagtaaattattgttaattgtattcaccctacagtgctacagaacactagaacatatttttcccatcaggctgtaactttgcatccattaaccaacctctttctatcctccccttcctccatccttctcagtctcaaataaccacaattctactctttacttttatgagttcaatttttttcagctcccacatgagtgagaacacgtggtatttatctttctgtgcctgacttatttcacttaacataataatatcctccaggtttcttgatattgctgaagaagacaggattttatgcttttttatcgctgactagtattctgttgtgtatatatacca

SEQ ID NO: 412703 - DNA, 658 bp, Homo sapiens
ttgccatgctggccaggctggtctcgaactcctaatctcaggtgatccacctgccttggactcccacagtgctgggatttcagacatgagccaccatacccggccaaaaatgtgattttaataattgtgttcttttttccttttatttttagttggcacataataattgtacatatttatgtgatggagtgatatttcagtacatatatacaatgtgtaatgatcaaataaagataattatcatatgcatcacctctaacayttatcatttgtgttgtgggcattcaaattcttgtcttttagctttttgaaaatatatagtaaattattgttaattgtattcaccctacagtgctacagaacactagaacatatttttcccatcaggctgtaactttgcatccattaaccaacctctttctatcctccccttcctccatccttctcagtctcaaataaccacaattctactctttacttttatgagttcaatttttttcagctcccacatgagtgagaacacgtggtatttatctttctgtgcctgacttatttcacttaacataataatatcctccaggtttcttgatattgctgaagaagacaggattttatgcttttttatcgctgactagtattctgttgtgtatatatacca

SEQ ID NO: 412704 - DNA, 607 bp, Homo sapiens
tctcttcccccttctcacttgggtgagtcaggttttgcttcataaaggccacrttgtcacaggttgcttatgtaatgctcacccaatgaaaagaaacattcaaagggtgactttgccatttggttgccaaattaatgccttagagaaaaatgggtagagttagaagggacctacccccaataactcaataactggggagtagaaagtaaactgtaggaatgagaaatagcttgcccctttgaatcttcacactgatcaacagggattccagttcaagtgagtgggttaagtagctagaaaacaaatagagcaggtccccagcaatgcagaacagccattacttcacagctttcagctggagagtgttgggcgaaaaaaaaaaaaaaaaaaagaaaaaaagagaaagaaaaagaaaaatagggagaaatactttaaagcatcgcattgagctaagaggtaaaggaaggcaattatgagtaaactcaattcaagaaatgtaattttaatggattagatggttgcttgcaagctgaagatgggaaatgtggctttaatgatgaaccgtacaaagtattttgtagactgaggatatttcattccattactc

SEQ ID NO: 412705 - DNA, 550 bp, Homo sapiens
atactatatctcttaaattctcgttgttttgacctgttgaagaatttgaaggaatgatgaaattgcctgctttctatactgaaggctaactcttggtctgcaaatttatttgtatctctggttctagcttcctcttgtccagacatatattcaaaaatataataaaataaataccaacagaaacctgagtcttgkttcacccccagtttatgaggagtttcaaaacatattttgctcatcctcagaccctctcctatcccccattaatattttggatataatatacatttttttctgtgattttgataatgaaaagtccagttctgataaaaatttaatcccaattgattaaaatttcattttctcttttttcccaagcacaaacttgtccaaggctgagggatctgaagttataagggaagggaaggatctgtctttcgtgcctcacctctctcttcagggttaccttctctgcaaggtgaagaagaaatcctgattctctcatggggtacataggtgcatgctttgaagggtcctgtgggatcttcct

SEQ ID NO: 412706 - DNA, 550 bp, Homo sapiens
atactatatctcttaaattctcgttgttttgacctgttgaagaatttgaaggaatgatgaaattgcctgctttctatactgaaggctaactcttggtctgcaaatttatttgtatctctggttctagcttcctcttgtccagacatatattcaaaaatataataaaataaataccaacagaaacctgagtcttggttcacccccagtttatgaggagtttcaaaacatattttgctcatcctcagaccctctcctatcccccattaatattttggatataatatacatttttttctgtgattttgataatgaaaagtccagttctgataaaaatttaatcccaattgattaaaattwcattttctcttttttcccaagcacaaacttgtccaaggctgagggatctgaagttataagggaagggaaggatctgtctttcgtgcctcacctctctcttcagggttaccttctctgcaaggtgaagaagaaatcctgattctctcatggggtacataggtgcatgctttgaagggtcctgtgggatcttcct

SEQ ID NO: 412707 - DNA, 550 bp, Homo sapiens
atactatatctcttaaattctcgttgttttgacctgttgaagaatttgaaggaatgatgaaattgcctgctttctatactgaaggctaactcttggtctgcaaatttatttgtatctctggttctagcttcctcttgtccagacatatattcaaaaatataataaaataaataccaacagaaacctgagtcttggttcacccccagtttatgaggagtttcaaaacatattttgctcatcctcagaccctctcctatcccccattaatattttggatataatatacatttttttctgtgattttgataatgaaaagtccagttctgataaaaatttaatcccaattgattaaaatttcattttctcttttttcccaagcacaaacttrtccaaggctgagggatctgaagttataagggaagggaaggatctgtctttcgtgcctcacctctctcttcagggttaccttctctgcaaggtgaagaagaaatcctgattctctcatggggtacataggtgcatgctttgaagggtcctgtgggatcttcct

SEQ ID NO: 412708 - DNA, 550 bp, Homo sapiens
atactatatctcttaaattctcgttgttttgacctgttgaagaatttgaaggaatgatgaaattgcctgctttctatactgaaggctaactcttggtctgcaaatttatttgtatctctggttctagcttcctcttgtccagacatatattcaaaaatataataaaataaataccaacagaaacctgagtcttggttcacccccagtttatgaggagtttcaaaacatattttgctcatcctcagaccctctcctatcccccattaatattttggatataatatacatttttttctgtgattttgataatgaaaagtccagttctgataaaaatttaatcccaattgattaaaatttcattttctcttttttcccaagcacaaacttgtccaaggctgagggatctgaagttataagggaagggaaggatctgtctttcktgcctcacctctctcttcagggttaccttctctgcaaggtgaagaagaaatcctgattctctcatggggtacataggtgcatgctttgaagggtcctgtgggatcttcct

SEQ ID NO: 412709 - DNA, 583 bp, Homo sapiens
gcagttctggtgagagtgagttagttctatgagatctaatggtttaaaagtgtgtgkcatcccccactttctctgtctctcctggtaccacgtaaggtgtgtctttcttcccattcaccttccgccatgattgtaagtttctgaggcctccccagccatgtaaaagtgtgagtcaattaaacctcttttctttatacattacccaatcccaatcttctttatagcaatgtgaaaataaagtaatgtaacatgttgttatctttaggaagatttttgtgctaggaaccacaaaccattttatatacaacactataattttttaaccaaatccacaaaactggtttaagcaactatacagtagtttcacaacatacatttaaagcaaacatttatttttctttgctcccaaaatacctattttgaagggagcataaaataatgctatttatagattttattttgggaaaaaatctagttttaggaattgtcataaccttgataactattattatctttctctgagatgctttgaataaatattatgatacacatttgtgcaatatttctgtgtagacatatgcca

SEQ ID NO: 412710 - DNA, 583 bp, Homo sapiens
gcagttctggtgagagtgagttagttctatgagatctaatggtttaaaagtgtgtggcatcccccacttkctctgtctctcctggtaccacgtaaggtgtgtctttcttcccattcaccttccgccatgattgtaagtttctgaggcctccccagccatgtaaaagtgtgagtcaattaaacctcttttctttatacattacccaatcccaatcttctttatagcaatgtgaaaataaagtaatgtaacatgttgttatctttaggaagatttttgtgctaggaaccacaaaccattttatatacaacactataattttttaaccaaatccacaaaactggtttaagcaactatacagtagtttcacaacatacatttaaagcaaacatttatttttctttgctcccaaaatacctattttgaagggagcataaaataatgctatttatagattttattttgggaaaaaatctagttttaggaattgtcataaccttgataactattattatctttctctgagatgctttgaataaatattatgatacacatttgtgcaatatttctgtgtagacatatgcca

SEQ ID NO: 412711 - DNA, 583 bp, Homo sapiens
gcagttctggtgagagtgagttagttctatgagatctaatggtttaaaagtgtgtggcatcccccactttctctgtctctcctggtaccacgtaaggtgtgtctttcttcccattcaccttccgccatgattgtaagtttctgaggcctccccagccatgtaaaagtgtgagtcaattaaacctcttttctttatacattacccaatcccaatcttctttatagcaatgtgaaaataaagtaatgtaacatgttgttatctttaggaagatttttgtgctaggaaccacaaaccattttatatayaacactataattttttaaccaaatccacaaaactggtttaagcaactatacagtagtttcacaacatacatttaaagcaaacatttatttttctttgctcccaaaatacctattttgaagggagcataaaataatgctatttatagattttattttgggaaaaaatctagttttaggaattgtcataaccttgataactattattatctttctctgagatgctttgaataaatattatgatacacatttgtgcaatatttctgtgtagacatatgcca

SEQ ID NO: 412712 - DNA, 481 bp, Homo sapiens
tagaaaccatttgttgataattacttcaacttccctccaatttggttataaatttcctttattcatccctcctgttcttttctgttcttttctctatcaggagcactcaactcctttctgagcataagcttttttgaccaggtctctgtcctgcacttaatatccctgttttccacctgtccagatatgtgaaratcatgtctcctaaattccctcttgctgtgttttgctcaccagctaacaccaccctcaattttatatagattagccatctggtggtactttgaaacgagattgatttaatttttggacactgtgctttttttgctaaacataacctgtgaagtcagtgtctaaatcctggcagttcccttttcacaaccttatttgtctgactgacttttagtttaagatttattttctaccagactattgatttgataataaaatacctttaccttccgtttttatttttttgtcc

SEQ ID NO: 412713 - DNA, 541 bp, Homo sapiens
tgtgaagtagcagctgtccacacaggtggactgcctccattttagtattctagctagagaaaatcatgccatttgccagaatacatttaccctcagcaaaacgtcactgggtatgaattctagctagattcaatgtccaattactgagcccaccacaggacactataatagcagcatgtccagttctctgaataaatttgtcagctgcattcaacatgcaatttagatatgtggcatatagtggaaaccaaaaggaaatattcaaatactataatttttccttttgctaaacttataatttctaaaatacattggtatcatttttaatgttgtcttccagttaaatggcttgggttatttccatgctggaaaaattaagttgattctgttgayatcctttcctgctgcctcctccagcggatgttctcactcctccctggtgatcctaagaaacaggacagctgctgacggtagtaaacagcagtacaattcctgcagtcccaattcggatcacataccctgttaaggcaggaactcccca

SEQ ID NO: 412714 - DNA, 485 bp, Homo sapiens
accatatccaccagcaatctagatgaaataattaattttctcytcattcagagattctgttactcaaatgggttggtgattattttcaaggaatacttatactctgttctttctatcattcagacctcttcattgtgtcctaaaagtaagaggtaagggtttgtcctcagttttaagaatatagcatagtattatttttagatcttattttattctaactagaagagtaattataaataagaggaaactgaaattctagaaatttgaggtttgaggtggggctaatgctggatcccatagattgtgatccctgagaattggcacagatagtggcttcatgaggagaattgagtcccacagtcagacacacctgactgcacatccttaatcttttgttttgtgacattagggaattcctcatttattcagaaaatatttatgagttccttattaggcactaaaagttagtatctctgagctgcctc

SEQ ID NO: 412715 - DNA, 628 bp, Homo sapiens
atatgtagagaaaatgtcctgtcataaacagacttgttaagccaacccccaggtttaatcttcacaacatttgrtattttttataatataaacttgtatttcatgcccttcttccctgctagaccaaaattcctgagtgtagaaacatctgttattggcctctgtattcctcagggacttactcagcaccagcaccctatgcctggccattgctggtattttataaatacaagtgtttgtagaatgaatgagtagaagaaaaactctgtatcctgcttgacataaataccaataatcaagggcctgttttatcaattctgaattaattaatagtgaaaaggtatttattattcccttttgtccatatatatatatatatatatatatatatatataatttctgactgtttcttttaaaaggcatgactttaaggcatgagttttattacttatgatattcattagatatctagttttttttcacatctaagcactctttaccacctggtactcctgtaaagtataaaagcctgtttaatggtttaatgtagtatgccactagaatgctaaaatagtacttttcagtgaaagtgttacaagcactcatgcatagaacatatctagtgaa

SEQ ID NO: 412716 - DNA, 628 bp, Homo sapiens
atatgtagagaaaatgtcctgtcataaacagacttgttaagccaacccccaggtttaatcttcacaacatttgatattttttataatataaacttgtatttcatgcccttcttccctgctagaccaaaattcctgagtgtagaaacatctgttattggcctctgtattcctcagggacttactcagcaccagcaccctatgcctggccattgctggtattttataaatacaagtgtttgtagaatgaatgwgtagaagaaaaactctgtatcctgcttgacataaataccaataatcaagggcctgttttatcaattctgaattaattaatagtgaaaaggtatttattattcccttttgtccatatatatatatatatatatatatatatatataatttctgactgtttcttttaaaaggcatgactttaaggcatgagttttattacttatgatattcattagatatctagttttttttcacatctaagcactctttaccacctggtactcctgtaaagtataaaagcctgtttaatggtttaatgtagtatgccactagaatgctaaaatagtacttttcagtgaaagtgttacaagcactcatgcatagaacatatctagtgaa

SEQ ID NO: 412717 - DNA, 628 bp, Homo sapiens
atatgtagagaaaatgtcctgtcataaacagacttgttaagccaacccccaggtttaatcttcacaacatttgatattttttataatataaacttgtatttcatgcccttcttccctgctagaccaaaattcctgagtgtagaaacatctgttattggcctctgtattcctcagggacttactcagcaccagcaccctatgcctggccattgctggtattttataaatacaagtgtttgtagaatgaatgagtagaagaaaaactctgtatcctgcttgacataaataccaataatcaagggcctgttttatcaattctgaattaattaatagtgaaaaggtatttattattcccttttgtccatrtatatatatatatatatatatatatatataatttctgactgtttcttttaaaaggcatgactttaaggcatgagttttattacttatgatattcattagatatctagttttttttcacatctaagcactctttaccacctggtactcctgtaaagtataaaagcctgtttaatggtttaatgtagtatgccactagaatgctaaaatagtacttttcagtgaaagtgttacaagcactcatgcatagaacatatctagtgaa

SEQ ID NO: 412718 - DNA, 555 bp, Homo sapiens
gtatcagatctggaaatatcttgccttttactgtcacatggacaataaaatgctagatcaaggggaagaaaagaagaaaatttcaaagtaagcaaagtttcatattcagaaatggaatttataatgtgaaccacctttttctgtaaccaagatctctcaattccaacaaattcactgtccaaaagcaatatatagaacttggaatttctgtcctagttctttcttctatatattatttgcattcagacgtttggcaataatgttttttagtttaaattaaaataactagtatattactatttggaaaagtaaattccttttctgaacttttcttaatttcactggcattttttattgtaactggccagaaatgatatattttaaaataccatgaaactgaaaatgtcaggaattgattatccagcagaagaagtcaaggttatgagagaggaaactaagttgatataaaattagtaawgaaaatatgggcttttactacttgattatattcattttatccatctgtacaaaggcatggaagatgaaagatcgtag

SEQ ID NO: 412719 - DNA, 586 bp, Homo sapiens
aggtggaatgaagttattcatgaaaatatgatgcatggaacttcagaattcatttgtatttgataatgaatttaaggtattaaaaatccatatgccttcaaaaaagtaacctgccttttgaggatcttaatttacagaatatgaaaaactgtttagctttttctttctscaattctccactcatcagtctaacctctagccctctcaatgggctctgtcctactcaaatatttttgatagaaagaaatatattaatttattaaatcatgcacaccccaaaccaggaactgcatacaaaacaaaaactaaagagcttttctctgtaagtaacttgctggctgtttggcttacctgaagtataggaaataattaaatctggattcataaacctgctgcttttgatacttgctatattatgagatgtgtgagactataagaataaataaagatgctaacaatttgtactatcaatataatgtaaaaagtgaaaagtcaacaatagttgatatattcttccattacaattaatttttatgctataaatttattttacattaatcatagctataattgttatttgtgcaac

SEQ ID NO: 412720 - DNA, 586 bp, Homo sapiens
aggtggaatgaagttattcatgaaaatatgatgcatggaacttcagaattcatttgtatttgataatgaatttaaggtattaaaaatccatatgccttcaaaaaagtaacctgccttttgaggatcttaatttacagaatatgaaaaactgtttagctttttctttctgcaattctccactcatcagtctaacctctagcyctctcaatgggctctgtcctactcaaatatttttgatagaaagaaatatattaatttattaaatcatgcacaccccaaaccaggaactgcatacaaaacaaaaactaaagagcttttctctgtaagtaacttgctggctgtttggcttacctgaagtataggaaataattaaatctggattcataaacctgctgcttttgatacttgctatattatgagatgtgtgagactataagaataaataaagatgctaacaatttgtactatcaatataatgtaaaaagtgaaaagtcaacaatagttgatatattcttccattacaattaatttttatgctataaatttattttacattaatcatagctataattgttatttgtgcaac

SEQ ID NO: 412721 - DNA, 586 bp, Homo sapiens
aggtggaatgaagttattcatgaaaatatgatgcatggaacttcagaattcatttgtatttgataatgaatttaaggtattaaaaatccatatgccttcaaaaaagtaacctgccttttgaggatcttaatttacagaatatgaaaaactgtttagctttttctttctgcaattctccactcatcagtctaacctctagccctctcaatgggctctgtcctactcaaatatttttgatagaaagaaatatattaatttattaaatcatgcacaccccaaaccaggaactgcatacaaaacaaaaactaaagagcttttctctgtaagtaacttgctggctgttwggcttacctgaagtataggaaataattaaatctggattcataaacctgctgcttttgatacttgctatattatgagatgtgtgagactataagaataaataaagatgctaacaatttgtactatcaatataatgtaaaaagtgaaaagtcaacaatagttgatatattcttccattacaattaatttttatgctataaatttattttacattaatcatagctataattgttatttgtgcaac

SEQ ID NO: 412722 - DNA, 586 bp, Homo sapiens
aggtggaatgaagttattcatgaaaatatgatgcatggaacttcagaattcatttgtatttgataatgaatttaaggtattaaaaatccatatgccttcaaaaaagtaacctgccttttgaggatcttaatttacagaatatgaaaaactgtttagctttttctttctgcaattctccactcatcagtctaacctctagccctctcaatgggctctgtcctactcaaatatttttgatagaaagaaatatattaatttattaaatcatgcacaccccaaaccaggaactgcatacaaaacaaaaactaaagagcttttctctgtaagtaacttgctggctgtttggcttacctgaagtataggaaataattaaatctggrttcataaacctgctgcttttgatacttgctatattatgagatgtgtgagactataagaataaataaagatgctaacaatttgtactatcaatataatgtaaaaagtgaaaagtcaacaatagttgatatattcttccattacaattaatttttatgctataaatttattttacattaatcatagctataattgttatttgtgcaac

SEQ ID NO: 412723 - DNA, 452 bp, Homo sapiens
atttgtgcaactgttcaaatatctttatagataatatggaaaaattcatttgccatttgtatgatataacatagataaatgtaaagatttctgtagagtatatatcctttaaagcaaaagattttatcaataaaaagtttcatttgctctttttaaagacttgaaataagatagaaagtgatttgtatcattcagggatcattgacatacctagctgaagaaatagatatgggcttaaagatgatctttccaataagagattatagtctttctcacttggaaaattggtttgttgatctggaggggaatggggggctattkcatggtttctgaaggccaagattccctctgagtggatttatcgtttgagccacctgtgtacttagactcccactcactttcttcaaggagaatcctgctgtctatggatttagccaggtttaaaatatatt

SEQ ID NO: 412724 - DNA, 599 bp, Homo sapiens
gctttctattaaaagagcttaatagaaccttcatgcattatcaacgctcatttcccaatgtctcctcaaatgaggaattaatgttaacagatcagagggacacccaaaactgactagatgagcttactgtgactgtcctccctttgtagctcatttataaactgtaaaactcgcagtaatatagctcctgaggttatatgcagcaatttacctcattttcttttctcactcataatatagtattaaaaagaaacaaagaaacaaaaaacaaacttctattcctgaatttagctggatttactttgcttcccctttgtgcttcccattccaccattgcgtcattttycaaatactacaaattcagattagatgtcatgacaagtgatactataattaatttatttggtaaactgtgttgttagcaaaataaattgttgtagcaaagtcaaatgggatgctagaaagcacattggtttaagtaggtgttgggatcctaagttcagagttttagagctgttatttatttagtgacttagtttatacaaattgctttacctctccatgcttgatatgctgatatgcaaagtggatatgctgtt

SEQ ID NO: 412725 - DNA, 613 bp, Homo sapiens
attgctttacctctccatgcttgatatgctgatatgcaaagtggatatgctgtttcagctaaattcaagtgttgttttggagattatttcatgtgtcagtttgcatttatttgtttttcttctgattcatttcagaatctttttgaagtggcttacagacacataaaatataaacagacaattaaaacaaaattaagtcaagacaaacactaaactaatagtgaagccaaattggctttcagttccaagtcaacacaaaaacacaaaaagaaaaactaaactggttacatgacctgagaggaacacatttgccctctctctatctctctttctctctctcttccttcctctctctctgtctctctgtcacacacacacacacacacacacacacacacataktcccacatacacacattagaccttcctataacaagtcattaagttgtctaaattagaaatgtggtcctcattgtgagctgctatagaaatgcaggtatcttttctgtcatcttctcttaggaattgcaacaacatctagcttctcacaaaatcaggtaaagttgtgttcctctgccattcctctgctccagtgttgtaacatattttaatc

SEQ ID NO: 412726 - DNA, 568 bp, Homo sapiens
tacagagatgtcaccttataggaacaaatttccaaactcctattggccatgtggactctgtctgtacctagccttacacttctgctcctcactggccattagaaaagcaaatggagggagatggagaaagatagccaaacaaaagcctctactgatcatcctccttgcagaaccaccaaatgtaacacctatttacacaaaaaagagcccttcataagaagcagaaatcagatgagcaattatagtacctggttttaagttcatattactgaaaaaggcactgaagacagcaggaaagacagtcttgaattgcccatgccaaccctcccctgtcttatggcagctgcagtggggcatggaaacaaaatcttgtatgcataggggagggagagcacagtgattgtgggatgttgcattaaagcttagtcctttcctkttacagtggaaagcaacaccagacagaaattggcaggtgcccatagaagcagtatttagaacagacctacccagaggggaatcgcccatcccaatggtcagaacgtgagttctggcaaaactcaccaccaca

SEQ ID NO: 412727 - DNA, 568 bp, Homo sapiens
tacagagatgtcaccttataggaacaaatttccaaactcctattggccatgtggactctgtctgtacctagccttacacttctgctcctcactggccattagaaaagcaaatggagggagatggagaaagatagccaaacaaaagcctctactgatcatcctccttgcagaaccaccaaatgtaacacctatttacacaaaaaagagcccttcataagaagcagaaatcagatgagcaattatagtacctggttttaagttcatattactgaaaaaggcactgaagacagcaggaaagacagtcttgaattgcccatgccaaccctcccctgtcttatggcagctgcagtggggcatggaaacaaaatcttgtatgcataggggagggagagcacagtgattgtgggatgttgcattaaagcttagtcctttcctgttacagtggaaagcaacaccagacagaaattggcaggtgcccatagaagcagyatttagaacagacctacccagaggggaatcgcccatcccaatggtcagaacgtgagttctggcaaaactcaccaccaca

SEQ ID NO: 412728 - DNA, 664 bp, Homo sapiens
taaaagggataattcatccagatgatatatcaactgcaaatatatatgtaccgaacactgaagcaccccaatatagaaaacaaatattattagaactaaagggagatacagaccccaatacaataatagctggagatttcaacaacacattttcagttttggacaggtcatccagtcaggaaattaataaagaaacatcagatttactcttcatgatagaacacatggacctaatagatatttacagatcatttcatctagcagctacagaatgcacattcttttcctcagcacatggattattctcaaggatagactatatgttaagccacaaaacaagtctggagacattcaaaaaatttgaaataatatcaggtaccttctctggccacaatggaataaaactattaatagaaataaataacaagaggaatttttcaaactatacaagctcatggaaattaaacaatatgctcctgaatgaccagtgaatcaatggagaaattaagaagagaatttaaaaatctctttaaataaatggtaatggaaacacaacataccaaaatctatgggatatagygaagcagcactaagaggagagtttatagttctgagtgcctacatcaaaaaagtagaaaaacttcaaataaacaacctgatgatg

SEQ ID NO: 412729 - DNA, 587 bp, Homo sapiens
taatgttaggaactatataactatacacctataaattggaagacctagaagaaatgaataaattcctagacacatgcagcctatcaaaattgaaatatgaagaaatccaaaacctgaatagattaagtaaccagatcaaggccataagaaaaggcctcccaggaaagtaaaaccctcaactcaatggcttcattactgcattttacaaaacatttaaagaagaagtaatattgatcctactcaaactagttttgcaaaatagaggaggagagaatactctcatactcattctgtgatgccagtattaccctgataccaaagccaggcaaagacatatcaaaaaaaagaaaactacagaccaatatccctgatcaacattaatgtcaaaatccccaacaaaatactcgcaaacaatacactcaacaatacattagaaagatcattcatcatcrccaagtgggatttatctcagggatgcaaggatagttcaatgtatgcaaatcaatcaatatgaaacatcatataaacagaatgaaggacaaagcctatatgatcatttcaatcgatgctgaaaaaagcatttgata

SEQ ID NO: 412730 - DNA, 597 bp, Homo sapiens
ttgaagtctttgaaacaagtcacactgacttgaaatataatgtatttagcacttgtatttttctttgctttatttttgcaagtcttgaaaaacatgtatttagtgtacaggattttgcaaaattttgtgatgacatctttctaggactggggttctagccatacaccaagagggtggaattgaacaaatctgtttgtgcactatttcatagactgaccatgtgctgtgtagaacagtatttgtcatatgctctgattaaagaggaataaactctcttacatgaaaatatttcatatcttgaaacatgagtatataaatataaatacctacagtcttgaaacttgatattagtgagggattactgtattatacagtgtgccaattgttcagatcaatgttttccaatgtttcctgatgagcaaaatcaccaaataacttttttaaagtacagaatgttaagacttatagcagatcaataaatgcctaggaatggaaactgggaattcacatagtgtttttttttyctcctgaattgtcattattgtgtatattcttgaagaaataacttattttttttaagttgatctgcactagcag

SEQ ID NO: 412731 - DNA, 593 bp, Homo sapiens
agttctttccaagtcactgaaaatttaatgtcagaaaatacatatttcagcatacattatttagtgaaaagttcatttttacttttctgcaaaagtgctctaagctttggagtaagagcattttgtgggttcctggtaataccatatgttttagaggttttaacttcctcatgggtatccaaagatgttaatatttgacttttcctgacatttcactgatttcattttcttactgttgctgttgttgctgcctttgttattatatatgaacataaatgggaaattgctcagttgataagtgatcaacagctactttactcctggtattgaccaggagtggctgctttgggaagctgtgattcctttsggaagtgagatatgtcataatccttaaaaatggaataaagtctataatttaaagtattccacaaatccttctggaaacaatcaccaccaaccccaacccaaatgagaaccattgccctggacactatcaacaatggccagacctttggtgaactacctatcctggacaaggcctaccacaaagtaggtgcttttcaaaatatggttcagtcgttgttgaggctgag

SEQ ID NO: 412732 - DNA, 551 bp, Homo sapiens
caactatctgagttttccttaatccaggcaagctcatagtaaaatttacgatcacaacattatagcaaaacttcagagtatttgctttgagagaaaaggtattcctggcactattttaaaaataatggagttagaacatgactccccamcccttagacatggacttcacatagtgaatttcttccaaagagtacagtgtggaaaaggggaaagtagaataactttgcagtcgagaaatcagtcaaatgccaactaaaacaggtaactaagctatcaacagggataattcatgttcattacatgtacccttgatgtgatgtgatgagaatgatcttcctcccaaaatccataacctcaatctaatcatgagtaaaatattaggcaaattccagttgagaaaatacatgactagtgcacctcaaaaccattaaagtcatcaaaatgaatgacagtctaaaatttgtcacaacaagatttagaagacatgaatactaaatctaatgtgataactttattgagatattagaacagaaaaaggacattgcggaaag

SEQ ID NO: 412733 - DNA, 578 bp, Homo sapiens
gtgtgaatgtcaggatgtggaggtcattgggaaccatcttagacactgtttatttgctacactaagtaaattttaacaattaaaatatttcttttgtcattatctatagtaccagtgtataattttaacaacttaaatgagaaacagtaaggaaaaaagtcatacattaaaatattagataaaaagtccttaaaatagctatatatactacatggcataatgaaaaattcttgtaaaataatcttaaacagaaaagcagagaacaaaattatgcaaatacagacataacaatgaatactagtagggaagacgcaaaaagtaaagcaatgttgtcaaggtagcatgatatagttaagatttgtttttttcaaaaatgtttaatattgtttttaaaacatttgtacattttttaaatgggagaagtggtgacattggcaatatttaatttatattttttagctggaasgcgtcttgttctcaataaatgaatttgtgttaagaactattatgaaatgggcatgacagagtatggatcactcactccaaacctatttatcactagtggcattaggttttta

SEQ ID NO: 412734 - DNA, 578 bp, Homo sapiens
gtgtgaatgtcaggatgtggaggtcattgggaaccatcttagacactgtttatttgctacactaagtaaattttaacaattaaaatatttcttttgtcattatctatagtaccagtgtataattttaacaacttaaatgagaaacagtaaggaaaaaagtcatacattaaaatattagataaaaagtccttaaaatagctatatatactacatggcataatgaaaaattcttgtaaaataatcttaaacagaaaagcagagaacaaaattatgcaaatacagacataacaatgaatactagtagggaagacgcaaaaagtaaagcaatgttgtcaaggtagcatgatatagttaagatttgtttttttcaaaaatgtttaatattgtttttaaaacatttgtacattttttaaatgggagaagtggtgacattggcaatatttaatttatattttttagctggaacscgtcttgttctcaataaatgaatttgtgttaagaactattatgaaatgggcatgacagagtatggatcactcactccaaacctatttatcactagtggcattaggttttta

SEQ ID NO: 412735 - DNA, 616 bp, Homo sapiens
  misc_feature (1)...(616): n = A,T,C or G
atatgtgtaattacaaaagcaaaactganggggaatttaacctagtttcatttngggggttattaaagctaaacacatatattcctggaacaactccaagaagaccattattagaaaataccgtgaaaactttaggaatttcatattccccccaccaaaaaaaaaaaaaaaaataggcatagtggaagattcagtattatctgcctaaaaagacattaggttgcataaaatagattattaaaattatttaatcmaattttttcctgcttcctacactacctttgttcctttcttagaaccaaagacttgataatatgaggaatcacaggaaagcctcatttattcaggaatacctaagttcacacaaggtaattttctaaaaaaaaaataacattttaaatactaagttttatgaacttttaaaatgcttttatgacagaaatctgaaatatattagacatcactctgtcttctttgcaaagaaaatacattgcatgtaattttacatgtttgtgtgtaatttagatgtcaaggcccttcatcgtcttttccagctctcctcttagttaatacatggacagccccaccttgcccattatgcatcccatgcccctcc

SEQ ID NO: 412736 - DNA, 617 bp, Homo sapiens
ttcagaaggaagtagtagaagattgttttttgaaaagaaggaagggagacacaaaggaaaggaaggaaaaaaaagaatagaaaaaaagaagaaagtgatatcaactaagtacaaatttatgaacctgagtcatacaactgagaaattaaatctaaaaaaagacgtcaacataaaatcatttctacaaatctaagatttaaactaagtagaattaatatttgttaatcaagcataaaattaaaatcagtcacttaataaaaataaaaacagtttataattttaaaaggattaaaaacttttaaacataaaaataagaaattgtgactattaaaaagtcacttttaaaaaaacaatgaagaggtaatagtaaaagcataaatctttcatactggttattcagtccaatgatctattaattttatcttgcactctggtaataatacatgaataaaacacaatctattatccctattaatagcaayaatagcaacttcccatctacaaatcaaaggggaaatgctaatctttgctcttaagaaatgctaactaagaaactaagaagctaggtaaaactcaaattttgagtgttttcatttaaaatgagcttttaattaaca

SEQ ID NO: 412737 - DNA, 604 bp, Homo sapiens
tctgtgttttttttaatttatcttttaattggacatatttgatgctcaagcttttttacttttttactcaagaagggcacctgagtatagttatcttaattcattcttttttgatagcacctatagcctttatytctgaataacatcttgaatggtgatagaattattgggttacacttttgttactttagagggtgcagacattgttttatcacctcttgcattgtatgttggaaatgtctgcagctaccctcatgttttctctcctgttaggtgacactttgtgggagggttgtggggatctgaatagtcaataggttgagtaggccatgtcttattgttgactatgtcaagtttacttgaaattgtatacttctgatgttcagattaagttacttatttgggaaaataatattatagattcaacatgcatcttctcctacgtttgttgagtctctacttcacagacatgaattattgttatgctgtattacctagtctcacttccatatctacttgtttttctttaatcattttaatcctcttcatttacaatgaagcagcattcattatataaacctcaacatttttaacaatatcactt

SEQ ID NO: 412738 - DNA, 604 bp, Homo sapiens
tctgtgttttttttaatttatcttttaattggacatatttgatgctcaagcttttttacttttttactcaagaagggcacctgagtatagttatcttaattcattcttttttgatagcacctatagcctttatttctgaataacatcttgaatggtgatagaattattgggttacayttttgttactttagagggtgcagacattgttttatcacctcttgcattgtatgttggaaatgtctgcagctaccctcatgttttctctcctgttaggtgacactttgtgggagggttgtggggatctgaatagtcaataggttgagtaggccatgtcttattgttgactatgtcaagtttacttgaaattgtatacttctgatgttcagattaagttacttatttgggaaaataatattatagattcaacatgcatcttctcctacgtttgttgagtctctacttcacagacatgaattattgttatgctgtattacctagtctcacttccatatctacttgtttttctttaatcattttaatcctcttcatttacaatgaagcagcattcattatataaacctcaacatttttaacaatatcactt

SEQ ID NO: 412739 - DNA, 604 bp, Homo sapiens
tctgtgttttttttaatttatcttttaattggacatatttgatgctcaagcttttttacttttttactcaagaagggcacctgagtatagttatcttaattcattcttttttgatagcacctatagcctttatttctgaataacatcttgaatggtgatagaattattgggttacacttttgttactttagagggtgcagacrttgttttatcacctcttgcattgtatgttggaaatgtctgcagctaccctcatgttttctctcctgttaggtgacactttgtgggagggttgtggggatctgaatagtcaataggttgagtaggccatgtcttattgttgactatgtcaagtttacttgaaattgtatacttctgatgttcagattaagttacttatttgggaaaataatattatagattcaacatgcatcttctcctacgtttgttgagtctctacttcacagacatgaattattgttatgctgtattacctagtctcacttccatatctacttgtttttctttaatcattttaatcctcttcatttacaatgaagcagcattcattatataaacctcaacatttttaacaatatcactt

SEQ ID NO: 412740 - DNA, 589 bp, Homo sapiens
aataaatagatgcgattgtatatataaattttaaaaatctaaaaaawttttttttggaaaaaagcttgtctttttttttggagctttgctagttggtgcaaacaagtgaccagcctataaaaaactgtcctcatcttagcaaagggtttggccatagagaaaagaaatgtcctccctgtgccagcattttacagatttagtgtctgaacttctagatcttatccactgaatacctcactctaatcattctctgcacctctgacgctagggcacagatttctctctgtgttttccttgccttgcctttctgccttgatacctgatgccacagtctatccaccttggaccccagctgcagacttcagagtctctcccagcattgcctttatctctctgggatgctggccaaagatattcatggagatcctatggagtattactactgctacttaatcctgccccaaaaacccatccctgcacctgctcctacatgcagcttcttaccactccttgtctttgcctaaggagtcagacctaggcacgacagcttttatcaggaaggaacctgcatccaaactgacttgaaaag

SEQ ID NO: 412741 - DNA, 589 bp, Homo sapiens
aataaatagatgcgattgtatatataaattttaaaaatctaaaaaaattttttttggaaaaaagcttgtctttttttttggagctttgctagttggtgcaaacaagtgaccagcctataaaaaactgtcctcatcttagcaaagggtttggccatagagaaaagaaatgtcctccctgtgccagcattttacagatttagtgtctgaacttctagatcttatccactgaatacctcactctaatcattctctgcacctctgackctagggcacagatttctctctgtgttttccttgccttgcctttctgccttgatacctgatgccacagtctatccaccttggaccccagctgcagacttcagagtctctcccagcattgcctttatctctctgggatgctggccaaagatattcatggagatcctatggagtattactactgctacttaatcctgccccaaaaacccatccctgcacctgctcctacatgcagcttcttaccactccttgtctttgcctaaggagtcagacctaggcacgacagcttttatcaggaaggaacctgcatccaaactgacttgaaaag

SEQ ID NO: 412742 - DNA, 535 bp, Homo sapiens
cctcactctaatcattctctgcacctctgacgctagggcacagatttctctctgtgttttccttgccttgcctttctgccttgatacctgatgccacagtctatccaccttggaccccagctgcagacttcagagtctctcccagcattgcctttatctctctgggatgctggccaaagatattcatggagatcctatggagtattactactgctrcttaatcctgccccaaaaacccatccctgcacctgctcctacatgcagcttcttaccactccttgtctttgcctaaggagtcagacctaggcacgacagcttttatcaggaaggaacctgcatccaaactgacttgaaaagagcttcttccaggcctaagtcttttgctgcattttgcattattacattgtccctttatgaaaatcaagtattctgttttactcttttttgcctgtttcttagtagatatcaactccaaatatcttttaatatctacagcaatggtgattgtttcccaggccttttaaagacaataaaa

SEQ ID NO: 412743 - DNA, 587 bp, Homo sapiens
taattttctaaaaaaaaaataacattttaaatactaagttttatgaacttttaaaatgcttttatgacagaaatctgaaatatattagacatcactctgtcttctttgcaaagaaaatacattgcatgtaattttacatgtttgtgtgtaatttagatgtcaaggcccttcatcgtcttttccagctctcctcttagttaatacatggacagccccaccttgcccattatgcatcccatgcccctccttaagcttctccaggaggctttctttttccctctatcttacatctaagtctccttaagcttctcaaggagcctttcttcttctatcttacatctaagtctccaggtcttgytgctaccgtaatgagcccaagttttatttccaggtcccatttctagtcttagcttatacatctcttcccatggaggtctttcctgatcctccaaatctggactatgtcttattcctgagttctcatagcacaatgtactttccacaacaacttattacacagtatttgtaactacctgtttagttgtttgtgtctttcattgaacatcagacaaatggagagagcataa

SEQ ID NO: 412744 - DNA, 562 bp, Homo sapiens
tgaataaagggctccaatcaagcatttatagaaaaatcttcctctcaaatatctccagtctcttattaagaacactgatttgcagtaactgagaagttaaagaatagtaagaggtcagatgcagctgatggtacatctrctacacgaaggtaacatttaaactcccatccattttttcagggcatccttctggcattcatccagtttcctaaacaatgatcatgcactctacaaacatgtcataatagtgacctaattctgcaggttgggtattatttcaaaaacaaaactgattaggactctccatagcacaccatcatcaacagcttcccattttcttgagtgtgaattatttatatctcttgactatgatgtgccttctgattgtcttcctaggcttttctcttatgaaaattccccctcccatactatccctccaacagatctgaattaccttcagctagatagccacgcttcccaagctcttagaaaataacatacagtgttgatactgatattctgcccttatgcccttgtctttttgtttacctagagagagtct

SEQ ID NO: 412745 - DNA, 505 bp, Homo sapiens
taaaattaaaacctgacgttatttcataatttttaaattaagttgtattcacccatttaactatacattggagaaattttgataattgtgcactgacatttaattctcacaacacacaaaaaaagatggaaaacagttccattctcataaccctttgtagrccatctcctctcccagtctccagcctcaggcaaccacccatctgatttctgaccctagatactttttctaagagttcatatgaataaattgcacagaatgtagccttttgtgagattattttacttacagtaacatttccagattcacttatactgttgtgaatattagtattttcccttgtactgctgagtaatattccatagtaacaatatgccacaattcatttacccatatgctagttaatggatggttggattgtttccaggttttttctgcctttttgttattttaaataatgctgttgtaaatatttacatagtagtccttaggtggacaaatattt

SEQ ID NO: 412746 - DNA, 193 bp, Homo sapiens
gtaatattgatatgtgtgggttcaatcctgtcatcatgttgtgagctgcatgttatgaacacttgatggtatagttgctttatagtgtcaatkgtctatgtactgaagtgtttttgtggtggcttgtaatggtctttcatttccatatttagcactcccttaaggaactcttgtaaggcaaatctggtggtaa

SEQ ID NO: 412747 - DNA, 529 bp, Homo sapiens
gcaggtctgattgcttcctttgagaaggctaaccaraaactcaaaagcatgcaactgtttgtctcccacctacctgtgacctgaaagctcccaagcccccttccaacttcaaattgtcccacctttctgcaccaagtcaatgttcattttacctatgttacttgatgtctcatgtctcccttgttaaaagtgaaagaattgagtataaatgttttaggtaaactatttctgtaaattaatatcttaaagttatttttgatgctcatttaatatctgggtcatttccaattaagaaagtgttgtgatatggagaaatatgtttctaaaaattgtggaattgttcttatctataaatgcccatatctgatagttcaggatttcttgctttttagggtttcactgaagttttaggttactaaggaaaataattctagttaacatgtaattctgtatacaaaatgtgccagaaagggttgtgttattagtgaaaaaaaaagaataattttgtttaattcagaagatatctaaa

SEQ ID NO: 412748 - DNA, 467 bp, Homo sapiens
aacttggggatattaaattgtgtatcaggaagaaaatattcattatgtgggtttcggggggccctaggaaacactgtagcctccttggtaaattgtgtaggaaawtttagggttggtttcctgtttatttgtttttgcttctagtttttattcatttgctgtttattctcttgtggctttacttgtgtatgcatatatataaaacaatgatgatttttacttcctagtggaagggttttatttggttatgtgaataattattttgttttctatgcatttctagcaagtcatcattcattccatttgtctggaattcctaagctacctttgccaggcccacaggaattaatggagcacaccaactttctacccttaaactaactttctggattttaggcttcctgacactttaagcgtgttgagtataattttgtaaaaagaatttgagtcatagttctctctctgcc

SEQ ID NO: 412749 - DNA, 595 bp, Homo sapiens
tttaaggctatccatgacttggccctgacctacatttctgacattaatttcctctccttaaaacactttaattgtctgtcgatctgctgtcctcatatatctttgccctctctgccccaatgactcagctcatgtttttcaacgttcattcttagaatgcttggcttcttcctctacatatgcacatttaaaagaaggcagacctacatcaagaggacacatcaagcattctatcctatttgacagctgtatccatggctcagtctatgaagcaagtagttgatagttataaaaatcctcattagaccattcacttattcacaatcttcaatagatactttgaggccaactttgggtgctggaaayccagtgtgaatgagagaaatgatgtctatacccgtgtaggtcttatagtaacaataacaaaataaaataaaacaaaataaaagcatattttccaaaattgtattaactaagctccatgtataaaaacagcaacaaacagtttgttaatagtgaaaagggaggggaaatatctaggctgagatctgaggaatataagaaacccagccatgctgatcaccaggttagaaca

SEQ ID NO: 412750 - DNA, 595 bp, Homo sapiens
tttaaggctatccatgacttggccctgacctacatttctgacattaatttcctctccttaaaacactttaattgtctgtcgatctgctgtcctcatatatctttgccctctctgccccaatgactcagctcatgtttttcaacgttcattcttagaatgcttggcttcttcctctacatatgcacatttaaaagaaggcagacctacatcaagaggacacatcaagcattctatcctatttgacagctgtatccatggctcagtctatgaagcaagtagttgatagttataaaaatcctcattagaccattcacttattcacaatcttcaatagatactttgaggccaactttgggtgctggaaacccagtgtgaatgagagaaatgatgtctatacccgtgtaggtcttayagtaacaataacaaaataaaataaaacaaaataaaagcatattttccaaaattgtattaactaagctccatgtataaaaacagcaacaaacagtttgttaatagtgaaaagggaggggaaatatctaggctgagatctgaggaatataagaaacccagccatgctgatcaccaggttagaaca

SEQ ID NO: 412751 - DNA, 525 bp, Homo sapiens
tttaaaaagtaattcagattccaacaaataattgttgacagaatcttgagaactaaatggtgctacttaactgtgttaataaagagaaaatatcttaattctcctgtgcacatttctccttttttaattatttctgacctgttcttctgatgtttctatttrctatcagtattatttacatagttaataagtgttttataaaacgtacaataaaaaagagcatgaaatttggagccagatgaatgagaatttgcttctctcctgtttcacttggtagctgtgcaaccccagggaagtgtattagtcctgactcttcagagaaacagaatctagagaattattataaggaattggttcacataattaaggctgacaagtctccagatctgcaattggctttctgaagagctttttgtcagatagcatcttctggacactttctcccactgcttgcctggatgcacatctgaggactgacatcagagccacagctatgaccttgtgcatacctctggacttgcaacc

SEQ ID NO: 412752 - DNA, 525 bp, Homo sapiens
tttaaaaagtaattcagattccaacaaataattgttgacagaatcttgagaactaaatggtgctacttaactgtgttaataaagagaaaatatcttaattctcctgtgcacatttctccttttttaattatttctgacctgttcttctgatgtttctatttactatcrgtattatttacatagttaataagtgttttataaaacgtacaataaaaaagagcatgaaatttggagccagatgaatgagaatttgcttctctcctgtttcacttggtagctgtgcaaccccagggaagtgtattagtcctgactcttcagagaaacagaatctagagaattattataaggaattggttcacataattaaggctgacaagtctccagatctgcaattggctttctgaagagctttttgtcagatagcatcttctggacactttctcccactgcttgcctggatgcacatctgaggactgacatcagagccacagctatgaccttgtgcatacctctggacttgcaacc

SEQ ID NO: 412753 - DNA, 525 bp, Homo sapiens
tttaaaaagtaattcagattccaacaaataattgttgacagaatcttgagaactaaatggtgctacttaactgtgttaataaagagaaaatatcttaattctcctgtgcacatttctccttttttaattatttctgacctgttcttctgatgtttctatttactatcagtattatttacatagttaataagtgttttataaaacrtacaataaaaaagagcatgaaatttggagccagatgaatgagaatttgcttctctcctgtttcacttggtagctgtgcaaccccagggaagtgtattagtcctgactcttcagagaaacagaatctagagaattattataaggaattggttcacataattaaggctgacaagtctccagatctgcaattggctttctgaagagctttttgtcagatagcatcttctggacactttctcccactgcttgcctggatgcacatctgaggactgacatcagagccacagctatgaccttgtgcatacctctggacttgcaacc

SEQ ID NO: 412754 - DNA, 525 bp, Homo sapiens
tttaaaaagtaattcagattccaacaaataattgttgacagaatcttgagaactaaatggtgctacttaactgtgttaataaagagaaaatatcttaattctcctgtgcacatttctccttttttaattatttctgacctgttcttctgatgtttctatttactatcagtattatttacatagttaataagtgttttataaaacgtacaataaaaaagagcatgaaatttggagccagatgaatgagaatttgcttctctcctgtttcacttggtagctgtgcaaccccagggaagtgtattagtcctgactcttcagagaaacagaatctagagaattattataaggaattggttcacataattaaggctgacaagtctccagatctgcaattggcttyctgaagagctttttgtcagatagcatcttctggacactttctcccactgcttgcctggatgcacatctgaggactgacatcagagccacagctatgaccttgtgcatacctctggacttgcaacc

SEQ ID NO: 412755 - DNA, 638 bp, Homo sapiens
aagataaagaagcagaagagcttatcagaaacaaaatatataattcaggaaaagaaaagytccctgataaatttcatcagagatattggaagctatagcatttccctgaaacaaaattaagctgttatgtttgggaagagagacagacagaaaccaatactgagagagaaagagggagtggggagagagagaacttcaatttcagtaatgataagacagctcagtgtatcagtcagggttctccatagtaacacttgaatttattttaaggaaatgtctcatgcagttgtgggggctagaatgtccaaatatgtagggctggcaagtgggtaggtaactcatgcagaaattggtactgcagtcgtgaggcagaatttctttttctctgggaaacatcagtttttgcttttaagactttgaagggattgaataagactcacctacagtattgaaggaaatctcctctacttaaagtcaactgcttatagatgttaaccacatataaaaagtaactttacagcaacacctagattaatattttacaatttaactggctactgtagtcccaccaagttgatgtagaagactaaccatcacacttagaataaattttctactaaacacaataaaatatatta

SEQ ID NO: 412756 - DNA, 625 bp, Homo sapiens
ttcttctgaacaagggaattattttaaagcaaatgaagtttaacaaataggtctttgccaatggaattcatagttcctaccatataccccggcctctgcctaattgaatagtggaatgcactacttgccttatagcatggaggaaggggttcagaagacacttagatcacctttcaggtatcaggttataaactacatgcagaagttaagttccagacgttatataccaaagatgcttctatttctcctatagctatacttcatgggtccaggatgtaaggaatgcaaagagaagcttttcttttattgctatacctaatgaactacaactgtggcctctaaattgtttagaagtcttacctgactaaggagaaatgttcttattagggatactacagggacaatgtcagagggaagataagaactatgtttctcagaatatcttatccttaatgttagagtttgccagcaagaagaaattgcatgagattctaaaggcagggaaaaagccaaatccactgttttctggaggtgrttgtacccagataaggatatttattggttacaagttctttcattacccattttactcatttttgtctaaatccagtattcaatataccgt

SEQ ID NO: 412757 - DNA, 543 bp, Homo sapiens
caaaataaaacttttattaatgtattaatagacattattaagacatgaagtaatataatagatttctctttttctggggttctataccagataaaamctaactatgtttttaggaatgcaaaattgtatttttaggaggcataactacaaagtaaaacaaaggcataacccacctaaaattcaggacagtcattatttagaggcactgacagaggaggaagtggagaaaccatgataggaaaggctggcaatattccatttcttaatctgggtcatacatatatacatatacttgcttatattatttatttgtattattaaaatatttattaatcattcatattttaatatttttcctgtactgtgcctcgtgaaaggggaaataaaacagaatattgaataaaagagaaaatacatagtctgtatacaattctaatacattaaaaatatcttagtgcaggttctacttgagcattttttaaaaggtctccaggttatgttattgtgcagtcaaagtcaagaactacctgtatgagacagaag

SEQ ID NO: 412758 - DNA, 523 bp, Homo sapiens
tagctaaaagtaaaaggattgacagtatcatgtgctggcaagaacgtggagcaattgaagctttcatatatcgctgatagaaattcaaaatggtatggtcactttgaaaaagaaagcagtagtttcttatataaatatattctaccatatgctactatacatactactacagctaatttattcctagaaatttattcaaaagactcagtgtgcatccatgcactgatctcagtacaaatgtttacaccaattttgtttgtaattggaaaaactagaaatggtgactgcaaatatccttcaaatactgaataaataaaaaaatgtgtaatattcattaaatgagataatattcagcaataaaaaagaacaaatacatggataaatctcaaaaacattaaatgaagttaaagaagttaaacacaaaagactatgtactctacggttccatcatatgatatttatttttcactataaatgtttaacgttgcttaataggttgaagmtatttagaccagatagtcaa

SEQ ID NO: 412759 - DNA, 492 bp, Homo sapiens
ttatttatttatttgctgtgaaactcctcataataagatattatttgcttaaatatgtttcataaaatgttggtcctygtttgatcttctatagaatggaggaaatattcataattaaagccaacatatggggatggcaggtggtcatttcctgcaataatggctatgatatgagttaatttcaaattctaaattaaaaagcaatgagttccaaaatgcataatccattcaaggaaaacaacactttgaggactatgcccatcagttattaactgtttcaaaagaatgaccctttaactatcaaagctttgttaaccaaatttcataatatatgccagtattcaaagcacagtgattctgatatctatcaactccctaataagcaagtagggaaagaaaaagtcaattactttttgtgaaatgttttaaaagaaactatgtggttcactaacactatttttaaaaattcatttaaatctctgatgacaggat

SEQ ID NO: 412760 - DNA, 492 bp, Homo sapiens
ttatttatttatttgctgtgaaactcctcataataagatattatttgcttaaatatgtttcataaaatgttggtcctcgtttgatcttctatagaatggaggaaatattcataattaaagccaacatatggggatggcaggtggtcatttcctgcaataatggctatgatatgagttaatttcaaattctaaattaaaaagcaatgagttccaaaatgcataatccattcaaggaaaacaacactttgaggactatgcccatcagttattaactgtttcaaaagaatgaccctttaactatcaaagctttgttaaccaaatttcatratatatgccagtattcaaagcacagtgattctgatatctatcaactccctaataagcaagtagggaaagaaaaagtcaattactttttgtgaaatgttttaaaagaaactatgtggttcactaacactatttttaaaaattcatttaaatctctgatgacaggat

SEQ ID NO: 412761 - DNA, 610 bp, Homo sapiens
tcttgctctgttgcccaggatggagtgttattgtttccttaaatcaaattcttttcattcaatcaataaacatttactgaactcctatgagcaggtactgtagccttttttatccttcctaagagaaatcaaaggggacttattcagtgggtttcaggcaatgataaggaaatgtcaatttatgtctgagttttctagtcagctttaaggtaatctcttctgcataagaagaaataagacaactgagagtaaagaagggaagggagagaggcagtcagcacctgctacatgcctagcactgagccaaggactgtatgtgggtgtaagccatagaactcttaagcctcttaagagctatagaggtatttatttttcccattttacagacaagggaaaagaagctttaatgagtttcataactgttcaagatgattccccaagctacactatagcttacatccttaacagattcaccgcaggaaaatactactagaataattttagaatttaaactcagatctgagtaactccaaagtgaaagctcaatgcttgtkgttgtcattgtttattgcataacaccaagatgctataaatatctctgaactgagaa

SEQ ID NO: 412762 - DNA, 625 bp, Homo sapiens
ttttttttcatgtccctggttctgtgaatttctttatcaattgttttgctatcagcaaagcttatcaatgtgacctgcaagattcctcaaaagaatatataatgagaagagagcaaaacaacaggatttgtattggtatttgtattctagcatttttgatcaccaacttgagtcttctatactagctcaacttctggctgataaatgggatggtttggatgatggagaggttttcattagaaagataacagattcttagacgtgattaggaaaagaagaaagcataattttatctgaagctttcccaaagtatacaagaatgagtgtattccgtttaggaatttctgttaaattgctttcattaaacaaaaatgagagaagtagtggctaaagtaataagctayatcaaataatttcttggaaatatctctctctatatatagggtatatatttatagcattagggtgtattttccattccacccctccccatcaccggtgatagattttcataacttgtagtagctggaaacaggactgggaaaagctatggcaaatctcctgtaggtcaccgccctgttgtgcctgtggaaagaaaccagctttgtcgagagggaggagagtt

SEQ ID NO: 412763 - DNA, 625 bp, Homo sapiens
ttttttttcatgtccctggttctgtgaatttctttatcaattgttttgctatcagcaaagcttatcaatgtgacctgcaagattcctcaaaagaatatataatgagaagagagcaaaacaacaggatttgtattggtatttgtattctagcatttttgatcaccaacttgagtcttctatactagctcaacttctggctgataaatgggatggtttggatgatggagaggttttcattagaaagataacagattcttagacgtgattaggaaaagaagaaagcataattttatctgaagctttcccaaagtatacaagaatgagtgtattccgtttaggaatttctgttaaattgctttcattaaacaaaaatgagagaagtagtggctaaagtaataagctacatcaaataatttcttggaaatmtctctctctatatatagggtatatatttatagcattagggtgtattttccattccacccctccccatcaccggtgatagattttcataacttgtagtagctggaaacaggactgggaaaagctatggcaaatctcctgtaggtcaccgccctgttgtgcctgtggaaagaaaccagctttgtcgagagggaggagagtt

SEQ ID NO: 412764 - DNA, 625 bp, Homo sapiens
ttttttttcatgtccctggttctgtgaatttctttatcaattgttttgctatcagcaaagcttatcaatgtgacctgcaagattcctcaaaagaatatataatgagaagagagcaaaacaacaggatttgtattggtatttgtattctagcatttttgatcaccaacttgagtcttctatactagctcaacttctggctgataaatgggatggtttggatgatggagaggttttcattagaaagataacagattcttagacgtgattaggaaaagaagaaagcataattttatctgaagctttcccaaagtatacaagaatgagtgtattccgtttaggaatttctgttaaattgctttcattaaacaaaaatgagagaagtagtggctaaagtaataagctacatcaaataatttcttggaaatatctctctctatatatagggtatatatttatagcattagggtgtattttccattccacccctccccatcaccggtgatagattttcataacttgtagtagctggaaayaggactgggaaaagctatggcaaatctcctgtaggtcaccgccctgttgtgcctgtggaaagaaaccagctttgtcgagagggaggagagtt

SEQ ID NO: 412765 - DNA, 586 bp, Homo sapiens
attctgtgggttgtcttttcactttgttgactgcatcatttgctgtgcagaagctttttaacttgatgtgtctgtatttgctttggttgcctgtgcttgtggagtattgctcaagaaatctttgcccagaccaatgtcctggagagtttcctcaatgttttcttgtagtggtttcatcgtttgaagtcttatatttaagtatttaatctgttttgatttgatttttgtatatggtgagagacaggggtctagtttcattcttctgcatatggatatcccccagtgtatatccttggcacctttatcaaaaatgggttcactgtaggtgtgtggacatgtttctgggttctccattctgtcccattggtctatgtgtctgtttttaatgccagtaccatgctgttttggttactatagctctatagtataaattgaagtcaggtgttgygattcctccagttttgttctttttgcttaggatagctttggtcctaggtcttttgtggttccatgtaaattttaggattttttaatatttctgtgaattatgtcattggtattttggtagggatggcattgaatctgt

SEQ ID NO: 412766 - DNA, 576 bp, Homo sapiens
gtagatgaatgcctcgaacccagggctttctgattcaaaaatctatattgttttctgctgtactatattgctgccaaaaaagcaggggaaagagaaccatgctttttcattttaaaaagaatatgctagccgcggtggctcatgcctgtaatcccaacattttgagagggtgaagcgggcatgtcacttgagctcagaagttggagaccagctgggaaacatggtgcaaccctgtctctacaaaaaatacaaaaattagccaggtgtggtggtgtacacatgtagtcccagctacttggggggctctggtgggaagattgcttgaacccaggaggcagaggttgcagtgagccatgatcacaccattgaaatccagctcggrcaacagagccagaccttgcctcaaaaataaaacaaaatcaaataattggtaaaagaaaaaaaaaaaagaaaagaaaaaagaatacctggcaactttgtcagctccaggactccactgcatcagtggtgtggtggtaatgcctggagggcctgcatgatccagtcaaagtagcatggcaccaggaaggagggagc

SEQ ID NO: 412767 - DNA, 529 bp, Homo sapiens
ttgaggatgctatggactttttccggcttgggatttacttcttgtctatgggggccacataatatgatgacttccctgtatatccctgtatttacaaaatttggcattttgaatcaaatacgaaagctttgttattcccaaatcacctcattttaaatctgatcacaaaaagaaaggagatctcccttcagatagagaggaagagtgtggcttgctgagggctgccaggggagactatttcagtcctcatctgctttctaaagtagtttaagaaactagagaaggaaagcaagctctctgacagggagctgaggaggaagggcctgaagctttagcagccagcacaaaagcagaaacaggctggaggacgcacactgttctcacgcacagcatgtgaatgaagtcrttttgggaatgtctggaaaatattcttatttaaggccctcttctcaaaatacacattgcaataaactggtacaaatacatccgatacacatcttttaagtcagagtaagacaaatttaccaaa

SEQ ID NO: 412768 - DNA, 487 bp, Homo sapiens
tgatttagtacaacaaaaataattaatcaagtgataagtaataaactgaacaaaacgctgaaacattttccactggaaacatgttaagataaatctgaggtttgattaccatcttgctgtaattttgttatgtgttactagcctacataccccatgttttctgtaatcatgcagatgtgagtggaagtttgaatgattaaataaacgaaagtccatttactgcagggaaccattccacaaggcrgccaaactgggtttagagaacaaaactattcaagaaattctccatgtatttaggttcattttagaatccatgaatctagatggatttgagactgagctcccatctccttggctgcagcgcccgattaaacccttcttccttggcaatactggttgtcatctcagtcattggctttctcagcgggcagcagcaggacctagatggaaaccctggtgtttcggtaacaatacatgggattagcgc

SEQ ID NO: 412769 - DNA, 488 bp, Homo sapiens
tttcctacaaaaataaataaaattccatgcccaaattgcttcactggtaaactgtactaaacacttaaggaagaagtaatgccaattttatacagatgttccagaaaattagagacaggaatatttccaaattcattctatraggcagcttaaccctgatgccaacaccataaaaaatgactacaggaaaagaaaactaaagatcaatatcattcaagaacacagatgcaaaactatgtaacgaaactttagctaatcaaatccagtaatacataaaaatgaaaatacagcctgaccatgtggggtttacccaggaatgcaaggttgctttaacatccaaattttaatcatgttaaaggaccacgaaagaaaaaccatatgaccaacaatgtagattcagaaaaaatatttgacagaatccagtatccgttcctaataaaaactctaagcaaactaggaatagaagaaaaccttctcaacctgatgaa

SEQ ID NO: 412770 - DNA, 488 bp, Homo sapiens
tttcctacaaaaataaataaaattccatgcccaaattgcttcactggtaaactgtactaaacacttaaggaagaagtaatgccaattttatacagatgttccagaaaattagagacaggaatatttccaaattcattctatgaggcagcttaaccctgatgccaacaccataaaaaatgactacaggaaaagaaaactaaagatcaatatcattcaagaacayagatgcaaaactatgtaacgaaactttagctaatcaaatccagtaatacataaaaatgaaaatacagcctgaccatgtggggtttacccaggaatgcaaggttgctttaacatccaaattttaatcatgttaaaggaccacgaaagaaaaaccatatgaccaacaatgtagattcagaaaaaatatttgacagaatccagtatccgttcctaataaaaactctaagcaaactaggaatagaagaaaaccttctcaacctgatgaa

SEQ ID NO: 412771 - DNA, 488 bp, Homo sapiens
tttcctacaaaaataaataaaattccatgcccaaattgcttcactggtaaactgtactaaacacttaaggaagaagtaatgccaattttatacagatgttccagaaaattagagacaggaatatttccaaattcattctatgaggcagcttaaccctgatgccaacaccataaaaaatgactacaggaaaagaaaactaaagatcaatatcattcaagaacacagatgcaaaactaygtaacgaaactttagctaatcaaatccagtaatacataaaaatgaaaatacagcctgaccatgtggggtttacccaggaatgcaaggttgctttaacatccaaattttaatcatgttaaaggaccacgaaagaaaaaccatatgaccaacaatgtagattcagaaaaaatatttgacagaatccagtatccgttcctaataaaaactctaagcaaactaggaatagaagaaaaccttctcaacctgatgaa

SEQ ID NO: 412772 - DNA, 488 bp, Homo sapiens
tttcctacaaaaataaataaaattccatgcccaaattgcttcactggtaaactgtactaaacacttaaggaagaagtaatgccaattttatacagatgttccagaaaattagagacaggaatatttccaaattcattctatgaggcagcttaaccctgatgccaacaccataaaaaatgactacaggaaaagaaaactaaagatcaatatcattcaagaacacagatgcaaaactatrtaacgaaactttagctaatcaaatccagtaatacataaaaatgaaaatacagcctgaccatgtggggtttacccaggaatgcaaggttgctttaacatccaaattttaatcatgttaaaggaccacgaaagaaaaaccatatgaccaacaatgtagattcagaaaaaatatttgacagaatccagtatccgttcctaataaaaactctaagcaaactaggaatagaagaaaaccttctcaacctgatgaa

SEQ ID NO: 412773 - DNA, 529 bp, Homo sapiens
ccatagacttaagagatacagctcatgactaagtcagaaagtctatttggaagcccagtgttgccagccaggcagttcacatcctccagtttactcttcagtaataaaaaagcagaccaaaatacctacctctgtctgacttccatatctgtcaattggctcctagtgaggtgggagggggcctatttagtatcgtcactgaacttcactcaacacaatctcagtgggcsaaggtgcccattattttcataaccatttaatataaactttatgttcttttagggctgttttattttactgttaagtggagtcagttaattccacaaatgcacagaagtaaaaatacagacctgttttgagaagaagttctaaaaacacatctcaatacatatttcttcataatttataggaagggagggatgaggaagggacaagaggagaggaaagaacagaagaggaaggagatgaaaggggaggcaagggaagagtaagggaggagagaagaggggaaaactgactacagcttacc

SEQ ID NO: 412774 - DNA, 580 bp, Homo sapiens
aaaacttgtcaaggaaacacacacacacaacacacaacacgcaacacagacattttaatccacttaaatctaggaaatggctccaagctcaggtatgtaaaggaatatgatacataattatggattgytaaaaaataaatatagaaacaaacatacaaaaatcatctttctggtttctctggatgggattatatccagtggaaaacttcaacccactaaaaggcctaacaatggatccttattgttggaaactatagtgttgtcctcaaacagtaatatattttaaccatttctcctaatcccactgaagagcccaatgacacaattccaatgcatatgtaaataattactaagcagcagataattatgcccaaatcaatagctggacagctgggttactctatgtcaaaacctaggcaattcaacaaaagctcccctaaggaatattctcagttgttatggtgaattttgctgttacttttgcattttgattgattaatacacaatgcaccttggcatgttttctatttggaatgcaaaatgctggtaacacatgagaggatacagtagaattctccta

SEQ ID NO: 412775 - DNA, 647 bp, Homo sapiens
tggtgccagcagctggattccactttgagatgcagtgtttcctggggttggagctctgggaaaatcccaacagcaagcatcccgggctgcctcctgcaggtgcatgggttgaggacatccatgcagaggctggacttgtccaggaaggggtgggaggcacagatatcagggccctcggcccccaggagccgtgaggtgaaaagagatgcctgaaagtccccttgtccaggctgcctagccagctagaagcttctgagccgctctccagtcctctgcctatcatccccatcaaacccatgagctgggcctggtggccacaccccctcaacccctcactccagctccgggcttgacctgaccccagccttgcctcctcctcatctccctgcgctgccatcacccctaggatccattctccacccatgattagagggaacctgttaggacccaaggctgactgtgcccctcccctggtgaaacactttcgagggctccccattgctcttggactaaccccctaagttttgttgcagcctccacggccttgcatggcatcttctggtagtctctgyacttcacccatgctggcctcccttctgtctccagagcccactcagccagtttctacctcaggaactttgcactct

SEQ ID NO: 412776 - DNA, 545 bp, Homo sapiens
tcacaacacaccccaagtccacacatgtgcaggtgtcatgagtgctgagaagaatcagacgtggttcctgccctcagcccactcacactctggcaggcaacacaacacagtgsgggagccacaggggccctggcaggtccaaagaggcatcagatccaacctatggggaggaggggaaggtcaagatgggcttcctaggggaggtgatgtctggatgactgaaaggatgaaaaggaggatcaggaaaaatagtgccaggatacgggctgcccagcgtggtgaatgtcctaaatgccaactgagttgttcactttaaaatgtttaattgcatgttatatgaatttcacctcaatttttacaaatgataaaaaaaatagtgcaaacagagttccaaacagagggaatagaatgtgtaaatgtctggtggacagaaactgaaggtcatttcactggagctgcacatcaaaggagcagatatcggaagtggtgatgagacaggagagctggccaggggcctgtggccacggagaggagtttgggctttt

SEQ ID NO: 412777 - DNA, 545 bp, Homo sapiens
tcacaacacaccccaagtccacacatgtgcaggtgtcatgagtgctgagaagaatcagacgtggttcctgccctcagcccactcacactctggcaggcaacacaacacagtgcgggagccacaggggccctggcaggtccaaagaggcatcwgatccaacctatggggaggaggggaaggtcaagatgggcttcctaggggaggtgatgtctggatgactgaaaggatgaaaaggaggatcaggaaaaatagtgccaggatacgggctgcccagcgtggtgaatgtcctaaatgccaactgagttgttcactttaaaatgtttaattgcatgttatatgaatttcacctcaatttttacaaatgataaaaaaaatagtgcaaacagagttccaaacagagggaatagaatgtgtaaatgtctggtggacagaaactgaaggtcatttcactggagctgcacatcaaaggagcagatatcggaagtggtgatgagacaggagagctggccaggggcctgtggccacggagaggagtttgggctttt

SEQ ID NO: 412778 - DNA, 602 bp, Homo sapiens
gaaatagaccctgagtccttagctaaggaccagagcgaccttggcagaaatgtgcacaggaaatcacatggcctctgtctcaccatcaggtgttccaggaatgacaaaagtgttcccttttccccatttcactcaagtctagaatcaggcatatcttggtttgttagaagtcagctcactacaaaacccaggtattccccgggacacactgaactgcaaggggcagggaaactcaactcaaaatgacttcatcattaaggaaatgtgtcttcccgtacattgagaaacccagagatggcctggcggctcccacaggcatgcattcggcttcgaggaacacagaccctgaccccagcagrgtttatttgtattgcccccctgctacaagaaatccagaggcatccagagctgatggggtgactcaagggtgctaccaggggctcagattctttcccagttttgttgttgttgttgttgtttttattgttgttttgcgacagtctcactctgtcgcccaggctggagggcaattgtgcgatcttggctcactgcaacctctgcctcctgggctcaagaaattctcctgcctcagccttccaggt

SEQ ID NO: 412779 - DNA, 518 bp, Homo sapiens
ccattcctggacccttttggatcccgcagaatcacattgcataaagcagggccaagattaccaagtgatttataaacttgaggggttcaagatacattcatgagagtttagttcaacctttgcatcaaaggaaggctgcactgcctgccctgtttcagtttggtaggaagaggtcagtgcggttcatgctcccattactgtaaagaacattgctggtgtctgataggggagggcaggggaaaaagaaacatattttaatagttatggagaagcttgttsttctctcattgctcttaaatcttttcagttattaacaacaaaaatgggtgaatgttttctgcaagtctcggtctttctgcccgtgggtgtgtgtggtggtagcaggtgaataggttgtgctttaaaggcatattctcaagatgcaggtttgatatgttccagagcatctcatctgataatgcatttcagggaaagaggaggaagagaaaaaaaatcactttttctcaggtgagcatgtc

SEQ ID NO: 412780 - DNA, 518 bp, Homo sapiens
ccattcctggacccttttggatcccgcagaatcacattgcataaagcagggccaagattaccaagtgatttataaacttgaggggttcaagatacattcatgagagtttagttcaacctttgcatcaaaggaaggctgcactgcctgccctgtttcagtttggtaggaagaggtcagtgcggttcatgctcccattactgtaaagaacattgctggtgtctgataggggagggcaggggaaaaagaaacatattttaatagttatggagaagcttgttcttctctcattgctcttaaatcttttcagttattaacaacaaaaatgggtgaatgttttctgcaagtctcggtctttctgcccgtgggtgtgtgtggtggtagcaggtgaataggttgtgctttaaaggcatattctcaagatgcaggtttgatatgttccagagcatctcatctgataatgcatttcagsgaaagaggaggaagagaaaaaaaatcactttttctcaggtgagcatgtc

SEQ ID NO: 412781 - DNA, 577 bp, Homo sapiens
gttagagacaccttctgcacaaaatattagtgtaatacttaggattaggttcacctttgagagtcagaaaagccaaaataacaggggctcaaatgaaattttttttttgagacagagtcttgctctgtcacccaggctggagtgcaatggcactatcttggctcactgcaacctctgcctcccaggttcaagtggttgtcctgccttagcctcccaagtagctgggattacaggcccccgccaccactcctgactaatttttgtattttttgtagagacggagtttcatcatgttggccaggctggtctcgaactcctgacctcatgatccacctgcctcagcctctcaaagtactgggattacaggcatgagcctctgtgcccagccagaagtttgtttgttacataaaagatgcatggaggtggcagtctaggactagtagtgtggctgcacaaattcactggggactcagggtccttctctcttgttgctccactttgtcccaagatggccactcagkttctggccatcacatctgcactccagccagcaaggaggatgggaaaaagtagaggc

SEQ ID NO: 412782 - DNA, 585 bp, Homo sapiens
ccccttcctaaggacattacttggaagttacttatatcccattggccacatggacacctagctgcaagagaggctgggaagtgtagattttcttctgggtggtcacatgcccaatgaaagcttgcaatttccattatttatttatttagagacagagttttgcccttgttgcccagcaggagtacaatggtgcaatcttggctcactacaacctccatttcctgggttcaagcaattctcctgcctcagcctctcaagtatctgggattacaggcatgcaccatcatgcccggctttttttgtattttttgtagagatggggtttctccatgttggtcaggctggtctcaaactcccaacctcaggtgatccgcttkctccagcctcccaaagtgctgggattacaggtgtgagccaccacgctcagcctgcaattttcattattaaggattagggaagatcagaggatgagagagaaaaaaatacaacagttgaagagaacgtcaaagaaaattttgtaataacatgagaagtatgattttgaagactttgaaactagcaggatttgaaattgtacacacagtg

SEQ ID NO: 412783 - DNA, 589 bp, Homo sapiens
taaattcccgtaaaagcatccctgtgcagttacataatccacttgagctacaatttgtgttgtgcaagttctgtcctcaaacatgccaaggcagccagatgggaaaagaagaaatgaaattatttctagtcatagaacacatgattgtgaatggagcaaagtctaagtaacacacaaaaagcaaataggaaaactgtgacctgggacttcgtgcagtataaagtcacaggtttgctgaaatatgagctccatcatcttgggcatgtcacatacttctccacttggatggggtgattgtttttttcctccaggrtacattcagcaatgttggaaacatattttgtcgtcacaacttggagtaggggcatgctactgcatctagatggtagaagccagggattctgctaaacatcccacaatgccaaggacagcccccacaacagggaattatgtgaccccaaatgtccgccttgctgaagtggagacccctgccctaaacatgtctattgggcctgcttcctggcttttgctatcatgagccatgttgtcatggtctgtagggtacacacgtctgtggacatgtgcgagt

SEQ ID NO: 412784 - DNA, 571 bp, Homo sapiens
aaggaacagaaaattcccgacattctgacagcatcacacagcaagtcaacagcatcacacactgaggcccagtttagtgtttaccaatcaccgatggcaatcccagcctgggctcagcatttaataagcatgggcaggttgtgtgcttgcaacaaccctgcaaagcaggatgagcaaaccagggttcagagaagccaagctacttgcttgaggtcacacagaaaagaagtcaggatacaaatctgtgtttgtttcccaaacctttgttatttggacaccccaacaagaagacgcactgaggatgaatgggcatatgcctgacgctgagcaacctggggttagggtccacatctgaaatttctttctacttctaggccaaacccaggggcactaaatatggcaggccctccataactatcacataaaagctgcaagaaagcatggscagcttatagggttttgcttaagaagttcagagcctctgagacccatctttctcatttttttttaattttaaacatctctcataaaaactctagctgagtcattctctgacctcattttagctctt

SEQ ID NO: 412785 - DNA, 539 bp, Homo sapiens
aaattctgactgccacttaccagctgggcaagttgctcccacgccgttgacctcagtttcctcgcctgtagtctgagaccacattgctgctggcaggctcgagtgagatcatgcctgtgaagtacttggctcaggcgtactcagagacctcgttcaaacaggkaacaggcagaaattctgcacccctcaagggtgacagggcggagggaggacaggaggggctcctttgccggactggggattcgtgtgcaactagctgggcagggagtcccccacaaaccggccggctcagaggttcttccgacagtttggagagagtgacaccaagtggccaagtctgaaactacaccttcaagccggagggttagagcctctcccggacccctccagctgcagtcctgagccaggcactgaacttccctgaatctcaattatttttctgctgtgaaatggaggtaatgctgcctacctggcagagcggaggtgggaattaaatgaggtagcccgcagagattctctccagggccgccatgttgcac

SEQ ID NO: 412786 - DNA, 369 bp, Homo sapiens
atgacttcacagagaggattatagtctgctgagtgagttgacgtctttttattactctcctaatgtgacatccatgaatacctgatctaggcagtggtctttcacctcctgcaacgctgcttccaggaacacaccaaaatgaatatttgaggacttcaaggatagtatttggaagacagttactttctggcgaaggaatccagaaaatgccagataaaagtattaacagtgctagagtagggaattctacaagtgtatcattttctaccagaagtggttaggatgccccctcttggaagtacatccccttcarttttcacgtattctccatttgctattcttaaacttctggaccaactcaaacacatc

SEQ ID NO: 412787 - DNA, 505 bp, Homo sapiens
gtggaactttgaacttgagagagatctgaaattggaaattatgtttaaaagcaaagcagagcataaaagtttggaaaatttgcagcctgacgattcagtagaaaagaaaaacccattttctggaaagaaattcaagcccactgcagaaatttgcataagtaatgagaagmcaaatgctaattgccaagacaatggggaaaatgtctccagggcatatcagacacctttgcagcagccccttccatcacaggcctggaggtctaggaggaaaaaaatggtttcctgggccaggccaggcccccctactgtgtgcagcctagagacttggtttcgtgcatcccagccactctagccatggctaaaaggggccatggtacagctcaggccatggtttcagagggtgcaagccccaagtcttggcagcttccacatggtgctgaccctgtgggcccacagaagtcaagacttgaggtttggaaacctccacctagatttcagaggatgt

SEQ ID NO: 412788 - DNA, 652 bp, Homo sapiens
aggacagtccagctggtgagcctcttaatggtccaaatgtctaaagtaagaatcaaatggtggggacttagacaaagtgtggtatgggstgaggcttatctgttcatttattcccttattctacaaatattttttgagttcatactttatgctagtcagtaggttctatattgtatgttcttgtatctaagtagtgctcacagtaaacagcgtaagcaaataaatgaactaatttttaccaaaaaaaatccaataaatcaaatattgttctagtcttcgtctctgtaacaacctctccaagtctaagtgttgtgctccctgtaggagaaaagaagatctgagctgtcctctttgctttcttaaggcatttttttaaactctatccctcacctctcctatttcaaacatccaaccattacagagaaaaagaaagcacctaaaatcctccaaaatgaaacaataagttaatagatctggaaacaagaaaaaaaataaaatggaaacagaggcatcttctaaacatgtcttttcatgttgttttatctaccaagttaaatcactccctggtctgggctatctctgtacctggcaactcttctactgccatgcttagcacaatgaatgtataaactttttacttacttagctgctt

SEQ ID NO: 412789 - DNA, 304 bp, Homo sapiens
cagaaggtgttagaacttacaggatataggcttctgttgagcaatttctagagagggtttaaggaagtagggctttactctggaatgtatagcgtcaggaaatggtagtaattctatgattggatgtgttaacttttatctaaaaggaaagaaaaatggatcgaggctaaaactatagctgataaagaaggagcagtcactcatatcagccagaatggagggttgtttggttattcttgtggtttggrcaatgcctttgtttttgtcagcattcaaacatgattatggagtggtcttgttttta

SEQ ID NO: 412790 - DNA, 539 bp, Homo sapiens
agacatattattgagcatctactgcgttccaggaacatgtacgttacatttgtaatagaccctagctgtgtttggcttgccatgtcagctttaccctacttttgaagtctcctattgttatctagaatctactcttcyccagtctcaatctgtgggcttaggatgagggtccctgactttgttccagaagaacaacaagtgaagcaagagagaggcctgagacaatcaaggtattccatccttctagttcatctggggttggacagacacatgactcacaccagatcaagcagtcctaaacagatctaatctcaggcattttcctgagattagaaaaccattcttttctattgtacttaaaccaaaagaatacagggatttaaactattacaactaaagtgttcccacatcaagcctgagactggcaccaacacagaagaaagagacaaaaaacatggagaaagaaaaactgggtcttcattacctcctcaggcccctacatccagctgtactgaaatgtattcctcttaaccctccct

SEQ ID NO: 412791 - DNA, 570 bp, Homo sapiens
tgattctcataatcatttaacaggttcttaaaagttatagatgctatctaaattattaaacatccatgtaactcatctatctgtagactcagattaatttaattactcaataaggagacaattaattatcacttaaaggggaaaatgctagaagtttgctttattggttttcttaatcacatatatacaattccattaaactgaaaaagaagagtgccgtgagcctttgtcaaattgctaaatatattactttttccgtattytaaattattattcatcttcattccaaaaccaagctttcttcagcaaattccttatttgatattgaggatataggaaaaaaacaaagtcagtttctcctatactgtcactcaacagtcaacacaaaagatttctgtgaccaaatgtaggggtaggggttcccccccatacaccaagcaagcaatcacttctgcagcagacaccagctgggtgtcctctaattcaagtcaattgtgacactctctacctggaggtagttcagatcccacaggttgaagtctcagtccccaagacttcccctccttatcc

SEQ ID NO: 412792 - DNA, 461 bp, Homo sapiens
caagtttgacaatagttttcagttgctacctctttctgtggtctctgtctgcttagccgttttcttgaaatcagtggcttcttaaaggaagaaggacatcaggagtatgttagaattgcgcctcaagatcagctgacttcaggtcatatatcttcaccactttctccagagaagatagatatcaaaaatccaacttggctaagctaaggatgggaactgaaggatgaaggatggagagccgggattgggccaggcctgtagaaaggcatctagttatgactggcgggtgacccactgaatcaactaagtgagtggattggtttcagtgcamaaagttagtgtgtaaaattgttaactaaaattaggtttctggaaaaattttgggattttattacaaaagctatgttaatccttaattatcataggaatcatttggtgcatattgaaagtagaagaagata

SEQ ID NO: 412793 - DNA, 473 bp, Homo sapiens
gtgctgatgggggatggcaattttgaggaataagatcgtgaataagaataataaaactaaagagtgtgagagagtcctggaggtcagtggaaaacattaatgtggatgagaaaagtcagaatgtcagctgtccaccagcctccagagaagagtagggttcccagagatggcactggaacaagagtttaaagctttagaaggaggcatcaaggagaagtgtgctcaacctttctcctcaaaactggaatgaggggtaggagaataaacaacactattgaaagatcatgtaagrggcaggtaggctatggttatagggaaagataggaggaatgataaagaaaaaggcaagaatgtaggggagttttgacacaaaatttaacaggcattcctaatgggcaatcttagatcctatgaggccaaacaaatctggacttactgaaggcttcattttttcccccagctattttttaaaa

SEQ ID NO: 412794 - DNA, 556 bp, Homo sapiens
ttgaagttttttcaaagtggtctaactttaagacgattgtatatttagaattcctgtactttaaaaatatttattgagaatgaggggtgggaagagggagaggatcaggaaaagtagctagtggatgctgggcttaatacctgggtgatgggatgatatgtgcatcaaaccactgtggcacatgtttacctatgtaacaaamctgcacatcctgcacatgtacccctgaacttaagataaaagttggaaatttaaaaaaaagagaatgaacttttttttttttaagatcactttgataaggagaaagtcaatatattgacagaattttacagctgaagctaccagaaatggcatgtggccatctctgaacccttcctgcattcttttctctataccaggctgcctggcatgcttttaaatcaccaccagtacaacctctgcagagatcttcagctatattctccagcagcttaatttttctcccaaggttaaaccttacacagaaagtttgttctctgataggcataggtacactgaataaactactatagtactg

SEQ ID NO: 412795 - DNA, 611 bp, Homo sapiens
gatgaaatttatatcaccaaaatcattcaagaagtggaaaatttgaaaagatcaattattgtaraaaagattggaaagataattagatagctaccattcatgaaagtatcaggactagatggtttcatagattagttctaagaacatttgtagttccaatcctatttgaattattctataccacagaaaaaagtttccccaatttattttcttaaggccgcataattttaaaaatattacaagtaaaaagctataaattaattgcatttttaataaggatgcaaaaaagtaattaaaaatagtaaaagttgaatatagcaatcaaaaaaaagaataacatattacaaacaaataaggtatagtctagtaatggaaagttaaattaatatcagaacacttattaatctaattcaatgcatccaaaaattttaaagagatattagcatacagcttcaaagatatgtaataaaatattattagctattcttaataattgaaggaaactacttaaatatagtaaagaccatttactgaatactaatagctataacacagtaagcagactgctaaaaagtcttctcatttaaattcaggaagttgactgagatttt

SEQ ID NO: 412796 - DNA, 611 bp, Homo sapiens
gatgaaatttatatcaccaaaatcattcaagaagtggaaaatttgaaaagatcaattattgtagaaaagattggaaagataattagatagctaccattcatgaaagtatcaggactagatggtttcatagattagttctaagaacatttgtagttccaatcctatttgaattattctataccacagaaaaaagtttccccaatttattttcttaaggccgcataattttaaaaatattacaagtaaaaagctataaattaattgcatttttaataaggatgcaaaaaagtaattaaaaatagtaaaagttgaatayagcaatcaaaaaaaagaataacatattacaaacaaataaggtatagtctagtaatggaaagttaaattaatatcagaacacttattaatctaattcaatgcatccaaaaattttaaagagatattagcatacagcttcaaagatatgtaataaaatattattagctattcttaataattgaaggaaactacttaaatatagtaaagaccatttactgaatactaatagctataacacagtaagcagactgctaaaaagtcttctcatttaaattcaggaagttgactgagatttt

SEQ ID NO: 412797 - DNA, 611 bp, Homo sapiens
gatgaaatttatatcaccaaaatcattcaagaagtggaaaatttgaaaagatcaattattgtagaaaagattggaaagataattagatagctaccattcatgaaagtatcaggactagatggtttcatagattagttctaagaacatttgtagttccaatcctatttgaattattctataccacagaaaaaagtttccccaatttattttcttaaggccgcataattttaaaaatattacaagtaaaaagctataaattaattgcatttttaataaggatgcaaaaaagtaattaaaaatagtaaaagttgaatatagcaatsaaaaaaaagaataacatattacaaacaaataaggtatagtctagtaatggaaagttaaattaatatcagaacacttattaatctaattcaatgcatccaaaaattttaaagagatattagcatacagcttcaaagatatgtaataaaatattattagctattcttaataattgaaggaaactacttaaatatagtaaagaccatttactgaatactaatagctataacacagtaagcagactgctaaaaagtcttctcatttaaattcaggaagttgactgagatttt

SEQ ID NO: 412798 - DNA, 611 bp, Homo sapiens
gatgaaatttatatcaccaaaatcattcaagaagtggaaaatttgaaaagatcaattattgtagaaaagattggaaagataattagatagctaccattcatgaaagtatcaggactagatggtttcatagattagttctaagaacatttgtagttccaatcctatttgaattattctataccacagaaaaaagtttccccaatttattttcttaaggccgcataattttaaaaatattacaagtaaaaagctataaattaattgcatttttaataaggatgcaaaaaagtaattaaaaatagtaaaagttgaatatagcaatcaaaaaaaagaataacatattacaaacaaataaggtatagtctagtaatggaaagttaaattaatatcagaacacttattaatctaattcaatgcatccaaaaattttaaagagatattagcatacagcttcaaagatatgtaataaaatattattagctattcttaataattgaaggaaactacttaawtatagtaaagaccatttactgaatactaatagctataacacagtaagcagactgctaaaaagtcttctcatttaaattcaggaagttgactgagatttt

SEQ ID NO: 412799 - DNA, 565 bp, Homo sapiens
gttctttgttattgtcatataatctttaatattttgtgaacacacacaaaacaatcaggtattgtgttttgagttatagttacccggataagtatttacttttcaagacaatgctttgtcttaaatagttaatgatgaatgtgaatgagctagtacttaaaaaatatatgaaaatattaagactggaatctcaaatcagataatgaggtataatcactagtttgttggaaagaaatagcttttcttaaacccataattgtttttagtggtagatatttgcatatcttcaattaaagagtgaacaaatttataatatttagtacaaatttttttaaatgtatgtattagagaaaattgggctaatatcagtgtttcccaagtacactagaaggagcaaatttgaagaaaggaaaaaggggtacttgaggcaacactgggatagtagccaaaatgatggctgmgagtgaaggaaatgggagatgaatatttaaaaaacacagcaacaacaaaaaaatagccatttaaagttatttaacaaaggagcaattaacttataaactcagta

SEQ ID NO: 412800 - DNA, 595 bp, Homo sapiens
ctccctcacatttcccttgacctccttcattgtgtctcctgatattctctcaaggttcactgtggaaaactttccaattttctcctcttaaagacggggcttgctctgttgctcaggctggagtgcagttacataatcacagctcaatgcacctggaactcctgtgctcaagtggtcctcccacctcagcctccctggtagctaggactactggcatacaccaccatgcccagctattctctctctctctttctttctccttttcttttcttttttcttttctttctttcctttctctctctttccttccttccttccttctttscttctttccttccttccttcctttctttctttccctccctccctccctcccttccttccttcctttcttttcttttttttattttttgtaaagacagggtcttactatgttgcctaggctggtctctaactcctggcctcaagtaatccttctgacttggcctcccaaagcactggaattacaggtaggagcccccagttttcttttttccgagcttctacggttcctattttgggtaacaagcaaatgctttatataataatatactaa

SEQ ID NO: 412801 - DNA, 542 bp, Homo sapiens
agaatcaacaaaaggccagtagaccagaagaagcagacagacaggaatgatggatgcctcagtggtgtactgaggtaaacccctcctcagtaaccacctccatgcaacatttatatagatgggctcaggaaacccagcttggatgagaggctgtgctttcatctggatttacaaagcactttatggaagactgagaaaatttaaattatccaatgataaatataattggaggaacatccactgctctcaaaatgccttggaactacrtaacctaatggaaccatgacaagactatagggaagagagtacttcccctaatgactaaggttaaatttgccaccagtcaagagaataaaagttaaaagaagaaattaagttgttctgtagaaagtgaagaatatagccctgcctaccagagattcatacttgctacatacgtactatttaatttcctctttgaatgaattttatgtggtgaaaactgttattttccctattttatagtttgagaaaattagtgcccagagaggttaagtaacttg

SEQ ID NO: 412802 - DNA, 599 bp, Homo sapiens
gtgccattttttgcccattagtctactcttttcatcgttatgaattaggattattataatttttattcattcaatatttactyatatatacttagtatgtacctatatctttactaacattacctctgtaagtctcctaccttccagttgcaatcatattccttttatgtgaagcacttcctttagattttcctttagtgagtatatgttattgataattctctcacttctttaaaagactttcattttgaccaaatgctagcaagataattttcctgcacttggaattctaggttaataattgttatcttttagtagattgaaggtactattttacggtcttattgttttcattgttgctgttgagaagtctgacatcaattaaattaccggtaatttaataatgtgattattttctagatgttttaaaaatcttccctttgtatttggagtccatagttttattatggtatgcctagttgtaattatttttttaatttattctcctttgaattatttgggattactggattttaagattgggctcttcaaaaattctgttaaattcaggctgctataacaaaatatcacagactgag

SEQ ID NO: 412803 - DNA, 529 bp, Homo sapiens
tcaggcagccttcaaagaagaaactccaggacacaagagttcaacataaaccctcaggatgaaagctagactgggtgtccactaaactcccatgggtcccactttcactttattgtggtactgtttggattccttgttgtgcgtgtgtgtgtgtgctggccccaaagtgcatttaaacagatttttagaaatatttttatccagcatcttattgtttcagtaagaagagttgtgctcagggtaactaatccatcatactagtaaaaatggaagcctcatcctgtcttcttagtgagagaacctggaccataaattgacatgtataaaacatttgccttaatgatttaattcaatgtgattcatatgactaccccccatagctctccctaaaaacagtcttgtctcccactctcttctatcacaagtaccaaagatatcctttgattcrttataatgaccattgttttgcagaatccactcacttcgacagaggaaagaggaggagctttgctgtcaggcaaaccttgta

SEQ ID NO: 412804 - DNA, 584 bp, Homo sapiens
gaaaagattattgcattcacactgcctttctaatgtatatcagatatatatatattcactcaggagtaaaaatacaacattctttacctttctttttgaagttataaaggctattgcagtgttccctggtatttcttggacctatgaaaactaaaacttggaaatcaccatggagcagacatttatttttcaaaggtcctccttcctaaatttcttacctatcaactctttagtaacaagaagcaacttaccatattagaaggctaaaaagataccaatccccaaaacatttaataatctatttcaaaatgcttttcctcagcaaatccttgcagattctgattataaacatccartaaactaatctggagttagtggagaggtgagggtgagggtgatgacaagaatcatctactagtaacttgaagagtaaggacaattgggagaaattaaatataaaacagagggccaaagataactgaaaggaaggaaagaagaaaagaaagaattaggaaataagatagggagacactactgagagacagcagagctttatttgtacagaacatgggtttgcagcgcag

SEQ ID NO: 412805 - DNA, 584 bp, Homo sapiens
gaaaagattattgcattcacactgcctttctaatgtatatcagatatatatatattcactcaggagtaaaaatacaacattctttacctttctttttgaagttataaaggctattgcagtgttccctggtatttcttggacctatgaaaactaaaacttggaaatcaccatggagcagacatttatttttcaaaggtcctccttcctaaatttcttacctatcaactctttagtaacaagaagcaacttaccatattagaaggctaaaaagataccaatccccaaaacatttaataatctatttcaaaatgcttttcctcagcaaatccttgcagattctgattataaacatccaataaactaatctggagttagtggagaggtgagggtgagggtgatgacaagaatcatctactagtaacttgaagagtaaggacaattgggagraattaaatataaaacagagggccaaagataactgaaaggaaggaaagaagaaaagaaagaattaggaaataagatagggagacactactgagagacagcagagctttatttgtacagaacatgggtttgcagcgcag

SEQ ID NO: 412806 - DNA, 504 bp, Homo sapiens
gtaggaaaataactctgggctttttgataaaaggcacataaaattgcctaaactcccttctgttatcttattacaaaataaattgccaattttaggctatttgtttcagtgtatccattttaaaaattctaagtatgtatttactttaaaattggtatattttacaacaatggtatgtgctatgtgtcctgaattgaacttatttaaacaagtttggtatacaacagtattaaaaatgaagcataaaaaataatatttctatattctaatatttctaagagtagggtaatttttaaattataaactgttccaaagtttktttccgttgttaaaaatagacatggatagcaaacatgaacctaataaatacatagacatgatgtaaagtttaactaacataaagaaagcatgtatctttctattaatttaacatatttgaatgaagtcacttgaaaaaaaacaaatgctataggtctcaatgacttctgaaaatgtaaatgtaca

SEQ ID NO: 412807 - DNA, 596 bp, Homo sapiens
taaggacttattattttggatagacagtttcccatgaacctttcctaatccatttctaattagatcaacccaggcccaggtatgacttcttagcttacagaaggtaatgcctcataactgagggcagatgggccttctggacgtggaacacacaagtattcctttggtgaagggagaaaaataaaawagatctgtcttagttcgggatgctataacaagataccatagactgggttgcttaaacaacagacatttatttcacacagttctggggactggaaagttggaaatcagggtgctagcatggttgggttctggtgaagaccctcttcctggcttgtaaagtaacactttcttgctatattctcacgtggcaaagcaagagcaagtgagagagggagatctcatatctcttcttataaaggtactaaactcatcatgaaagttccacccttatgatctaattactgcctgttatggactgaatgtttttggttccccaaattcataagttgaaacctaaacttcagtttgatggtatttggagatgaggtctttgagaagcaaatctgttttggaagtgaagccttcccaaa

SEQ ID NO: 412808 - DNA, 596 bp, Homo sapiens
taaggacttattattttggatagacagtttcccatgaacctttcctaatccatttctaattagatcaacccaggcccaggtatgacttcttagcttacagaaggtaatgcctcataactgagggcagatgggccttctggacgtggaacacacaagtattcctttggtgaagggagaaaaataaaatagatctgtcttagttygggatgctataacaagataccatagactgggttgcttaaacaacagacatttatttcacacagttctggggactggaaagttggaaatcagggtgctagcatggttgggttctggtgaagaccctcttcctggcttgtaaagtaacactttcttgctatattctcacgtggcaaagcaagagcaagtgagagagggagatctcatatctcttcttataaaggtactaaactcatcatgaaagttccacccttatgatctaattactgcctgttatggactgaatgtttttggttccccaaattcataagttgaaacctaaacttcagtttgatggtatttggagatgaggtctttgagaagcaaatctgttttggaagtgaagccttcccaaa

SEQ ID NO: 412809 - DNA, 467 bp, Homo sapiens
tatctgacatatgttactttaattcaaattataaaatactcttgatatagaattaaggactcatttgtgtatgggataactggttggagctttactatatttggcatgaaaaatatctttaatttattgtctatgaatttttatgtgttgatttcttcacagtggaataagaactttaaaaagacttgtaaaataatttgggaagagaatccttttatatcttaattattgtttttccactcatcctttagaaactcatgttatgcctttatgtagtctttttaatatgcttaaacttcattttcattttttaaaaccttatttttccactcataagtctatcgtgtatgtaataattaaatcatgtaataacaagtaaaattgatatacttgcatttgtgtttacaacaagcatcgtgtaaacatacaattcwagtgatgagagccaacacatgcaagcacaactt

SEQ ID NO: 412810 - DNA, 420 bp, Homo sapiens
cctggtcatgttcctccctatttgygttttgcttcctgcttacatttgttttcacataagtaaacgtagtagatgtaatctttagaaactgacttatttgaaatttcctatttttaaaacgtgaaaagcaaatctatgatttttccatggtggcagtggatatataaatattttcagggtggcccagaagcatatccacacaatggaagcatgtgagcgcatggccacagggtggtttgtacaagtggggaaactttgctgggtccataatcctattaaatgcggagagtttgtggcattttcctccttgtgtattttcaaatgggatatagtagtcttatctgtttataattgctaatattttatcttgtccaaaattagggcttctcagtattgtccaactctgcagacttgctctga

SEQ ID NO: 412811 - DNA, 429 bp, Homo sapiens
gctgtctgtttaaatgttaagaacagactgtaaaagtagagtttaatttaaaatttgctcaatctgtctgtttgtaccttaagagtcattgaaatattttcccctatagaatgtgaatgttgtcattagaattgtatagatttttaaaatagtttgttgagggggatcacacatggtgctagaacattatttgtcattctagtccttccacccactagattatcagtgatatccaatggctgattttagagtagagaataactgaagagaaaacaattacatattgcctaatggaatgtcactgagatagcygtattaaaactatgggtatttttgttttacttttgcaatttcatgggtatttttatcacaggctcaaaaatactgcctgtgcttagttgtgttctctagtggctcactctcaagtga

SEQ ID NO: 412812 - DNA, 550 bp, Homo sapiens
ttcagttccagtgattcatctggaaatttcctgttacagtgaacctccaagttaggcctgctgacagcacgggagcaagtatcttgaaaagatcatagtgagaattagagagaggatatggtgtgaaatctgggcaaattatatctacccacaatattacacattcttttttttaaacggtatgagtttactaggtttaagtgtcaygaaagatgaaatatgcaaaaagtaataaattgagcccacttttaagatggtaataagatcatttaatacatgtgtaaaactgctaaatgatttcgcagaaggattgcttcacctctgagtgaatcataaactcataaacaagcattcaacaggagatcaatgctgttttgtagtgcacacactattgcagcatctgctccaatacaaagataaatccagtgcaaaccatgtgttttactttttgggccagcatccttatcctgctgctcttattacacctaaactatagccttcaacaatctcatttctgattaagtagaaatcagttgcaggtacacatact

SEQ ID NO: 412813 - DNA, 469 bp, Homo sapiens
cctaaactatagccttcaacaatctcatttctgattaagtagaaatcagttgcaggtacacatactactaatgtttgtatcaagataaatgagacataagactaaaacacaagctccaaaataagagacattktacattttgcaaaagttgactgtagtaaattattgaaatttggtataggaataaattagacaaagatgaataacttcatattaagacatgaaataagccatttacctatgggaccagtaaattacagattttttaggttttaaatcagatagacacttttgatgactcactttaaaagcataactgacaaaaaaatatgaaaaaataaatgagaggactttctatttgaaatcgtaggcccagagagattattgcttcttttgattaccacattaagtataagacataattctttcttttatttttgatttatttggacggttaagtggtcatgtt

SEQ ID NO: 412814 - DNA, 561 bp, Homo sapiens
ctcttgtgtttgagtacttcacagtgggcaagataggggctcaacctaagtatctgtcagtggatgaatggaaatagaaaatttggcatatatgcacaataaaatagtgtttggccattcagaaatgaaattttgccacttgtaacatggatggaactggaggatgttttgttaagtgaaataaactaagcagagaaakatgaatattatatgttctcacatgtaaatgggagctaaaaaaaagtacatctcttgcacttagcataatggtggttgactgaggctgggaagggaagaagagagggaagatggggagaagtttgttaatgcatacaaaaatacagttagatagaaggaataagtactagtattcaacagtatagtaggaaaataacagttaacaataatttttgtatatttcaaaatagctagaggagaagaaaatgcacacaacaccaaaaaagataaatgttgaggtgatggatattccgattaccctgattttattattacaaattctatctatgtatcaaaatatcacatgcaaccccagaatgcatc

SEQ ID NO: 412815 - DNA, 561 bp, Homo sapiens
ctcttgtgtttgagtacttcacagtgggcaagataggggctcaacctaagtatctgtcagtggatgaatggaaatagaaaatttggcatatatgcacaataaaatagtgtttggccattcagaaatgaaattttgccacttgtaacatggatggaactggaggatgttttgttaagtgaaataaactaagcagagaaagatgaatattatatgttctcacatgtaaatgggagctaaaaaaaagtacatctcttgcasttagcataatggtggttgactgaggctgggaagggaagaagagagggaagatggggagaagtttgttaatgcatacaaaaatacagttagatagaaggaataagtactagtattcaacagtatagtaggaaaataacagttaacaataatttttgtatatttcaaaatagctagaggagaagaaaatgcacacaacaccaaaaaagataaatgttgaggtgatggatattccgattaccctgattttattattacaaattctatctatgtatcaaaatatcacatgcaaccccagaatgcatc

SEQ ID NO: 412816 - DNA, 620 bp, Homo sapiens
ctgtcactcagttctgttcatagccatgcttacttcctttcataagcaatgtaaggttttttccttgacagacattatttgtctgtttgagacatttcagatattcacatacttgaaagagaagtcacctgatattaagttaagtagataacttagcttcttactgatgctacgaagacttttctattttccctttcctaaraaaattatactgccactttgtgactcttttttatgtacgtattctagcccaccttaactctaactctttctttaaatgaaaatcgtatatatttaaagtgtaagctaggtgattattttgctcctttttaaggcttaaagtgagtattaattaccactgacaaatgtttcttgagtatacggagcaccactgaattgtgttcttcttatttaatgccaaattctaggaccttcttggaaatcacattcttaactgaaaagaaaacctgacagtaataatatttgtcagataacaatatacaaaaacaaaaatattccaagtaaatacaaaaataaatattccaaatgatttatgacaaggtggtagacataaaagtattaattgagagatatatatgaaaatgtgatttttaatcaga

SEQ ID NO: 412817 - DNA, 615 bp, Homo sapiens
cgtggtgtggtagtgcacatytgtagttccagctacttgggaggctaagccaggagaaagcagaacccgggaggcagaggttgcagtgagccgagatcgagccactgcactccggcctgggtggcagagtgagactctgtctcaaaaaaaaaaaaaaaaaaaaaaaaaaaaggtgacctaaccaaagcagtaacagaaaacatggagacacagagatattcttgggatacatactggagaaataccctgaaattaattatgtgtgggacacggtgggaggtgtgtcataatggacacacacacacacacacacacacacacacacacagcatgcttcttcctatgttcttatttactgtatactgatagtttggttatatattaaggttttttatgctgcttaccaattattttactttccttctttattttctgtgtgtagtaaatttattgtctgacattgttcacaaatttaaaaagtaatcctataagaggtagcgctattgctttattttgaaacatggtgaagttgttttcacattgacctgggagccattgttgaaattaaaaaacctcaacctctcataaccgacatctctgtgaagggccaaggat

SEQ ID NO: 412818 - DNA, 620 bp, Homo sapiens
atctttatgttttaatcatttattgctattactaaaggaaaattattttgattgcgatggggtatggtaaaaccactcagggactctcaaacctgaaacaactagtatttgtactggtggcttgtattgtgcattttttgtctgttattctcagaaatgactgccctcagaatgtaacatgtacttgaaattaaaaacctcaccctctgccttcttagatrtaaaatttctctgtatgtattgattaggaattggagcatttttactcaaagttttaacttacactaaacgtgatgtctttgaaaggactgttgaaagttaaaccttatattagcccattcttgcattactataaagacaaagaaaactaaattatatccgagtgcaatagtgaactgacctgttggtgtcagaatagtggaatcatcaaaaaggaggaactaggaaacaaaggatttgaagtggcctcagaaacccaagcgcaagaggctacttttgcatgccaaatgccagttatgtagatacagccaataccaaagtgtgcatatggaagaaaaatataaataaacctgaccatgaaatacagacagccatattctgagctgcaaactaaatgaagg

SEQ ID NO: 412819 - DNA, 570 bp, Homo sapiens
tgaaattaaaaacctcaccctctgccttcttagatataaaatttctctgtatgtattgattaggaattggagcatttttactcaaagttttaacttacactaaacgtgatgtctttgaaaggactgttgaaagttaaaccttatattagcccattcttgcattactataaagacaaagaaaactaaattatatccgagtgcaatagtgaactgacctgttggtgtcagaatagtggaatcatcaaaaaggaggaactaggaaacaaaggatttgaagtggcctcagaaacccaagcgcaagaggctacttttgcatgccaaatgccagttatgtagatacagccaataccaaagtgtgcatatggaagaaaaatataaataaacctgaccatgaaatacagacagccatattctgagctgcaaactaaatgaaggccttggtgatgggagaaaaatattcgatgttctacagccagccagtgtttgccctcccttttttcttactactcctttcttgtttttgaaggcatcaygtgtgttgggaattggcaaaaaagcttattctgagta

SEQ ID NO: 412820 - DNA, 567 bp, Homo sapiens
  misc_feature (1)...(567): n = A,T,C or G
tgttgtcctgcttggaaggtgtcctccacaaggatttcctcagttctgggttatttctgcttagtaatctcatttgacactgatgacttttacttttccagacaatgycagattatattttccaaagttggctgcaccaataatttcccatcacacatgatcttctacaaggtaatctcaaagcattcccatcaagaggtaaccaagagaatgtggtggaagtgatgcttcgtaactttttaggtgaggtcagaaaaggtcatacagcatctacctgactctcttagaaagctcacttttaagatcctccctcttgaaacccagacgccantctgtaataaccccanccacttggaaagcccatatgtaggtgtttcagttgacagtgcatgcgaggccagcctttaagccagtcatggacgtgtgagtgatggatgtgtgagtgatgagtctccggattcctgctcctgggattttggtcactccagcattggagtcctcccagctgaggaccaagacatggtggagcagagacatctccattggccctgcccaaattcctgactc

SEQ ID NO: 412821 - DNA, 640 bp, Homo sapiens
tctgcactatgtatctttggggcattccctgacatctgacattatatgacaatatatttgtgctcctctgtctcctgctagaaggtaagctccatggaggctggtttttctcatccaccctgtgtcctccatggtcagtacagtgcctggcccagagtagatatttcatacatatttgttgaatgaatagatgtgaagaaataatttacttcttaggcactgactaaggccattacttgccagagactatgacaggtggacaatgtttattccttgtccctaggagtttatagccttctgggtaaagataaggagatgatatatatatatatttttaataaatatatgtatatatgtatgtatatgtgtatgtgtatatatttatatgtgtatatgtgtatatataggcaacgtatataaatatataggcagtatatatakagagagatttatatatatatatttatatattgaggccaggagttcaagaccagcctgagcaacatagcaagaccctgtctctaaatgtatatataaagcattatcacaataaaacatttatcacaattaaaatgctgtatttaaagcatttatcacactgtaaatatatatatttatatataatatatgattatcatat

SEQ ID NO: 412822 - DNA, 591 bp, Homo sapiens
aatatgaaaacaaagccatctcagaagaaactagaaggtgttgtgaaataaggcaaattttttgaccccagtttcacataaatgctctgagcaaaaaataaatkttaatgataatttaaatgactgttaaccatacatagaagaaaaatatgagattcaattttcaaaaagcaggagaaaatgggcaaagggaggaactaacatttggcaagctcttactttgtcccaagcactgtatcaagcatatttaataggatcctattatccatggctattatccatggttcatctcgcccaagtccagaaagactaggttagttcctgaaaactgttatcatttatgtgaaagcatagtctgatgtgcattttctttattacgcagatgtacaaatcaacgcattccattacaattttataaagaccacagatgcttttacccagagaagcaggtagaaagttaaaaaatttcaaatttatttgaaccactattccccacataaaaattcagcttaatctgacatacacatgcccaacaagcatagaaaaaatgctcaacatcactaatcattagagaaatgcaaatcaaaacca

SEQ ID NO: 412823 - DNA, 610 bp, Homo sapiens
tctaaaaaaaaaaaaaaaaaaaaaaatgtatatctatatctatatctgtatctatatctatcatttggatgactaatcagaacacattgaatggtttttctctattattcattatgaccaaatgaataccagttattgtcacgtcaccaagcatgtcaccactattcagccaagaattgagatgtcgtgtttcaagagacgttcattctcctgccatgatccagtcacaactgatgggcctgcatagtagcacttttctaagtgatagcctttatatttctttagaaccaaaacttatttgaaggttctctgtaagcacttaggctaagcacaccttgctttaaaaaatataaaatccttcgaaacaacaaatggargaaatgtcctgtgtgctaaaatggaaattgttttgtcattttgttcttgctactgcctggaagagaaggagttgctggaaccctaaatatgtcttggccctggccctagtatttcataggaaactgttatttttttaaaaaagtacttctcaggtattgcaacttcagacattagtaaatgatgctgtgttgggtttttgcttgttcatgtgtttgtttatgttttataggtt

SEQ ID NO: 412824 - DNA, 556 bp, Homo sapiens
  misc_feature (1)...(556): n = A,T,C or G
nnnnnnnnnnnnnnnnnnnnnnnnnnnnnnatttagcatgtacacatggagccttcagatgaagacccaaagacacaggagaaattgatctattttatgcttaggtttaacaaagtatggacagccatgtagaaatatgattgcaccaaaaaggtatgatctaatgctaataaactgagcaaggaagcccagccaggtctgtctgcctagattctccttcgcctctctgagcagcattccttccttctggggatgggacatgaccttctctggaatgggggtcttatgatctacaaacaaggtatgtcagataatttctttatggcctgttttcacagaaatagggcagaaggaaagttggagtaayatttttaggttttatgtctggctttggagaaaaaggcattttggtttctatgacccgccctggggaagagggattctagtttctgaggctagcctcagtggggcatgggactgagggacaggagggcaggagaaggtcagagaacaaacctacacctctgaggctgcttctgaggccttcattttgggg

SEQ ID NO: 412825 - DNA, 608 bp, Homo sapiens
aaatatatcctgttttgcaaaaggcccttttgcccctttactttttttttaaatttatttgtcatgtaccctgttgactaggattgctcctttttaacagctattttatcctttcccaggtaccaagtgttagtatgtggggtaattttgtcttggagaaaaccacacaaatgcattcttacaaagtgataatagctttaattattgtttccttgagcttttgcatttgtaggggcctcttcaggaagaagtcaatgcttagcaccaggtaataaatcccaaaagtggaattaggcatcaaatgggggaatggggacataaatggaagggatggggaatataatttggatagmtgttccccttttattagggtacttagtaggacctatatattttggttctgggtttattctctggttaggaaaaagcctaaatatgttcatcctggaggcaagtgaacatcaagataatgtctaatagctatagctaacaaatgccaagtttttgaatgtgtgtgaatcctaaaaggtggtattattaaccctattcaaaagataaggaaactgaggctcaggtaactgaggttaagtgacttgtccaaagtcata

SEQ ID NO: 412826 - DNA, 520 bp, Homo sapiens
gcacaggggtcagtgcatcaactttcacacagtcagaagtctgcagtcatttcctgtcattaggctcatcttccaaaaagtggaagaactacagaatgttctcagatggcaaatagattttaaacctctacattcttgagcaaatttcacccttaaatagaaattcagccaattattttaatctcataaagagccattttaaggagccctaaaatttttttcttctagtttttrttttaggttcagggggtccatgttcaggttggttacagggtaaattgcatgttgctgtagtttggtgtacaaatgagttcatcacccaggtactgagcataaagttagttgtttgatcctcatcctcctccaccaaccctccaccctctagtaagccccagtgtctgttgttgccctttttgcatccctgtgcacacaatgtttagctcccacatataagtgagaagatgctggtatttggttttctgtttctgcattaattcacttaggataatggcctccagct

SEQ ID NO: 412827 - DNA, 594 bp, Homo sapiens
tttaaaaagttgctcaatttttttccagcttaagaatttagtacaagttttatgcatgttgtttgcctagttgttggattgacgataatacctgtaaaattcctkacaatttagtgtattaattagccttcctcagaaaatcctgaggatgtttccagactgtgtgccgcttgtacgttattgcagttgtcgttgttttgcattaaggacaggaatctctacagatggcaaccacatacttgatgcattttccagaaatcactgaagagaggtagatttcatgtgcgaaggtggagaagaaagccctgtctcctcgcccctgccaagctcaaacccctgctgctcctctgctgccctcttcctaggtctgccagcctgagtcccttgccaggtcctgggtgttttacctcctaattacaactctgcttggcacctcagcctttctttccatgaaaaatcactagtggcacatagaggaccttaaaaacaaaaacaacaaaaaaagattaaattatatatgtatgtatgtatgtatatgtatgcatgtacgtatgcatatatatgtatagtctggccaaaaaccagttttgttac

SEQ ID NO: 412828 - DNA, 594 bp, Homo sapiens
tttaaaaagttgctcaatttttttccagcttaagaatttagtacaagttttatgcatgttgtttgcctagttgttggattgacgataatacctgtaaaattccttacaatttastgtattaattagccttcctcagaaaatcctgaggatgtttccagactgtgtgccgcttgtacgttattgcagttgtcgttgttttgcattaaggacaggaatctctacagatggcaaccacatacttgatgcattttccagaaatcactgaagagaggtagatttcatgtgcgaaggtggagaagaaagccctgtctcctcgcccctgccaagctcaaacccctgctgctcctctgctgccctcttcctaggtctgccagcctgagtcccttgccaggtcctgggtgttttacctcctaattacaactctgcttggcacctcagcctttctttccatgaaaaatcactagtggcacatagaggaccttaaaaacaaaaacaacaaaaaaagattaaattatatatgtatgtatgtatgtatatgtatgcatgtacgtatgcatatatatgtatagtctggccaaaaaccagttttgttac

SEQ ID NO: 412829 - DNA, 594 bp, Homo sapiens
tttaaaaagttgctcaatttttttccagcttaagaatttagtacaagttttatgcatgttgtttgcctagttgttggattgacgataatacctgtaaaattccttacaatttagtgtattaattagccttcctcagaaaatcctgaggatgtttccagactgtgtgccgcttgtacgttattgcagttgtcrttgttttgcattaaggacaggaatctctacagatggcaaccacatacttgatgcattttccagaaatcactgaagagaggtagatttcatgtgcgaaggtggagaagaaagccctgtctcctcgcccctgccaagctcaaacccctgctgctcctctgctgccctcttcctaggtctgccagcctgagtcccttgccaggtcctgggtgttttacctcctaattacaactctgcttggcacctcagcctttctttccatgaaaaatcactagtggcacatagaggaccttaaaaacaaaaacaacaaaaaaagattaaattatatatgtatgtatgtatgtatatgtatgcatgtacgtatgcatatatatgtatagtctggccaaaaaccagttttgttac

SEQ ID NO: 412830 - DNA, 531 bp, Homo sapiens
attataaggtctagggtattgttttgtttattttgttttgtgggagttagtccaggtcttgatcagttcatgcccctaatttgctttcaccatgctatgccttcaagatgctgaaataccagaattaaaagtagaaagttcctgttgatttttagatgccttaaatattaaacatttaaattaactaatggaaggtgaagtagataaaccaaatcatcaagtaaactgagattcatttctgtttcgttctgcagtaagtcatgtgatattttcctgggaaaattcatatycttaattatctttggtttgcaataatattaaaataactgcatttcctgagtacaattcaattgtgccattaagggatgtggtgttctttcatcattccaggcacgatggaatctactgaaaaaagctgaccattccaggaaaggtggaatctactggaaattggtcagaaacaatacacacgaaaataaaatagatttgatgatatttagaagcatgcataatgacagaagttgcattatc

SEQ ID NO: 412831 - DNA, 531 bp, Homo sapiens
atggattgtctttgaaaagtgcaagtctaaaactacagtcctgaagtgagattttggtttcaacatgaaagaactgcagtgtgaaatgtaatgcctaacttcatctggtagttaatgtgacatgacagctcacatgaaaatgaactgcaaataaatgcttaattttaaaagatactgtatgatctcaataattgaaayattgaaggcttcttaacagagcataagtaaatgtttcaataaaaaaaagggatactcttttctacagacagccaacgacaatagactggatgactgtgatcattctcattattgtttatataactaattcttatctcttcctatgtgtttatatttgcttcctttttttacactgatacattagaaaggaaagccaaaggtcattttctctttattgtataacttttttatgattatagaactaataaatatatactcattggagagaatttggaaaattaaaaaaaattaaatttaataacacagcacttagaaatttcattaaggtggtat

SEQ ID NO: 412832 - DNA, 554 bp, Homo sapiens
taattattctcttcttcacctatagatttgatttattcccaattaaaattctagcaaaagctktcctgtagataatggcaaactgattctaaagcatatatggaaaggtgagaaacctagaatagctaacataatactgaagaagaatgagtggaagactcacactacctgatctccagatttcctataaagtcacggtaatcagtacagtgtatattggtgataaaataggcacatagatcaatgaaacagaatagagagcccagaaatagacccacacaagtataggcaatttatctttgacaaggattaaaagccatttctcctaatctgctcagcctgccataacaaaatgccatagattgggtggcttaaacaacagaaatttttattttctcataggtctggaggctggacatcttgagattagggtggcagcatggttggattctctcttcctagctttcagacagctgccttcttgctgcgcgctcatatggcctttccttgctttgtgcacatagacagggagaacaagcaagccgtttggagtc

SEQ ID NO: 412833 - DNA, 628 bp, Homo sapiens
ctagggtatctatctggcagaagaaatttctaagcagcaaagtgctccagatgtgccctggttgcttctaacagcctatgctcatatgcaggagcaaataaatgacttaaagctggaacttatatttaaaagggaagcagagagtaagagtttggaaaatttgcaacctggccatgtggctgctgagcaaccacttgctagagaaatttgcataactaaaaataaggcaagtgctggtagccaagacagtggggaaaagtcctcaaaggcatttcagagaccttcatggcagcccctcccatcacaggccctgaggcctaggaggcttccctcctaggtttcctgrgacagacccagggagtgtgctgccctgcacagcctcgggacactgctccctgcatcccagtcgaaccccatctagccatagctcagaggagcccaggtcgaaccgcagctcagaccacagctccagagggttgatagtttgcaaccttgataaaatgtgatgaaaatggcactttacccctgtgattctctccaaaaaatgataagcccagactaattgttatttttaaaaaatcaaggaaatgcaacttgagggacattctacaaaaataaaataaaataa

SEQ ID NO: 412834 - DNA, 628 bp, Homo sapiens
ctagggtatctatctggcagaagaaatttctaagcagcaaagtgctccagatgtgccctggttgcttctaacagcctatgctcatatgcaggagcaaataaatgacttaaagctggaacttatatttaaaagggaagcagagagtaagagtttggaaaatttgcaacctggccatgtggctgctgagcaaccacttgctagagaaatttgcataactaaaaataaggcaagtgctggtagccaagacagtggggaaaagtcctcaaaggcatttcagagaccttcatggcagcccctcccatcacaggccctgaggcctaggaggcttccctcctaggtttcctgggacagacccagggagtgtgctgccctgcacagcctcgggacactgctccctgcatcccagtcgaaccccatctagccatagctcagaggagcccaggtcgaaccscagctcagaccacagctccagagggttgatagtttgcaaccttgataaaatgtgatgaaaatggcactttacccctgtgattctctccaaaaaatgataagcccagactaattgttatttttaaaaaatcaaggaaatgcaacttgagggacattctacaaaaataaaataaaataa

SEQ ID NO: 412835 - DNA, 437 bp, Homo sapiens
catttaactcattattcaaagtctgttcatgcttcttttaaaatgtctaataaaaacactcgtaattttttttttttaagagacaaggtttcaccatgttggccaggctggkcttgaagtcctgacctcaagttatctgcccgccttggccccccaaagtgctgggattacaggtgtgagccaccatgcccagccaacacttgtaattttaaactatattaaatttgaattggcaatatcaatatggactcatgaattaaaaacatatatgtgtgtgtgtgtgtgtattctagctctgtacactgaaagaacatagaagcaatgatattcctctagcaatgagcaatacctagaacccagatcttggtttctactcatctttgtttattgaaacacagtaaacaatgttcctgtttacaggagaaatagctgattct

SEQ ID NO: 412836 - DNA, 437 bp, Homo sapiens
catttaactcattattcaaagtctgttcatgcttcttttaaaatgtctaataaaaacactcgtaattttttttttttaagagacaaggtttcaccatgttggccaggctgggcttgaagtcctgacctcaagttatctgcccgccttggccccccaaagtgctgggattacaggtgtgagccaccrtgcccagccaacacttgtaattttaaactatattaaatttgaattggcaatatcaatatggactcatgaattaaaaacatatatgtgtgtgtgtgtgtgtattctagctctgtacactgaaagaacatagaagcaatgatattcctctagcaatgagcaatacctagaacccagatcttggtttctactcatctttgtttattgaaacacagtaaacaatgttcctgtttacaggagaaatagctgattct

SEQ ID NO: 412837 - DNA, 589 bp, Homo sapiens
tctttcctttgtttcagaacttccttttattctactgccttggaaatttttgttttctccttcagctgtgatgttaaataattagaggtgtgaaaccctttgactcaattattaggcttgttttttgtccttgcgctcaactgcttgatcctagcacgttgcagtaaacatcctcttggttgtgaattggaaagatgtcaagttaaagaggtttgtctgttgttactttatttttgcttcattttacctaagaaacaagaatggaaatttgaattctgataaattttagagtgttatgatgaataataacacctcctatttattgaacacttactatgtacctaacactattaatttttcagaatgctttcamttatttaagtcctcagggctgttctgtggtaggtgctctgttatcccgatttcactgttgaggaatatgaagttttaagaaattagacaacctgctcaaggctatatagtagtagaatgataaagctgagatgcaaacacaggcttgtttggccagtctgcactcttaaccactgtactataacgttccttggcatttcaagttatttgtaagcaa

SEQ ID NO: 412838 - DNA, 589 bp, Homo sapiens
tctttcctttgtttcagaacttccttttattctactgccttggaaatttttgttttctccttcagctgtgatgttaaataattagaggtgtgaaaccctttgactcaattattaggcttgttttttgtccttgcgctcaactgcttgatcctagcacgttgcagtaaacatcctcttggttgtgaattggaaagatgtcaagttaaagaggtttgtctgttgttactttatttttgcttcattttacctaagaaacaagaatggaaatttgaattctgataaattttagagtgttatgatgaataataacacctcctatttattgaacacttactatgtacctaacactattaatttttcagaatgctttcacttatttaagtcctcagggctgttctgtggtaggtgctctgttatcccgatttcactgttgaggaatatgaagttttaagaaattagacaacctgctcaaggctatatagtagtagaatgataaagctgagatgcaaacacaggcttgtttggccagtctgcactcttaaccactgtactataaygttccttggcatttcaagttatttgtaagcaa

SEQ ID NO: 412839 - DNA, 466 bp, Homo sapiens
agtggttattactgcaggggcctctttatttgttctcttcttgagcactgagatcttagagccaaagccatcctagctctgagagacccaaaatccaacataaaaatgggatccttaatttctaaacatctgacaactctgccttccagtatgcctgcctttttcacgtacagaattatggctcaggaagctgcaaatatcaaatcttactacagataatatagaattataatggctaytatgcagaatgttccagatgaacaagaccattcatataactgtacttgaatcccaagtttctataattaggcagagagaatggaattgttattctaattggcattcagaagcctcaagcagacaacaggattctaaaattgctttttaaaaaaattcattgcaaagagctaataaaaagttacaaatgtgagatatcatccatacgaaggacagtaatattaacctg

SEQ ID NO: 412840 - DNA, 504 bp, Homo sapiens
cacagttactgggcacattttctggtcactccataacaatgtgttgagggaaggaatagataagtaaatgaatgttaaattaatcaccactttaactagtagacccatcccagagtcagctttctccttacaccttgcccagtgtgaagcaggtgccaagtactcttcagggagcttacttcccgggccctcccaccagtgtctgatgacagctacagctctgtgggaaggaccctgggcatctyggaggggttggaaactgctgacccacgcatttggaaaacccagaaatagcagagctggtggtacccagggtctgaaaaaaatattcagatgtcagtttttggcttatcttcctccaaaccttttgcaacaagtatttcactgataaaatgtgagggagggaggtaatattttacaggtaaattgctatggacagcatggtccaaagtatatagtaagcgttccataaatatttgctcagtggaggtacaaactgggaga

SEQ ID NO: 412841 - DNA, 504 bp, Homo sapiens
cacagttactgggcacattttctggtcactccataacaatgtgttgagggaaggaatagataagtaaatgaatgttaaattaatcaccactttaactagtagacccatcccagagtcagctttctccttacaccttgcccagtgtgaagcaggtgccaagtactcttcagggagcttacttcccgggccctcccaccagtgtctgatgacagctacagctctgtgggaaggaccctgggcatcttggaggggttggaaactgctgacccacgcatttggaaaacccagaaatagcagagctggtggtacccagggtctgaaaaaaatattcagatgtcaktttttggcttatcttcctccaaaccttttgcaacaagtatttcactgataaaatgtgagggagggaggtaatattttacaggtaaattgctatggacagcatggtccaaagtatatagtaagcgttccataaatatttgctcagtggaggtacaaactgggaga

SEQ ID NO: 412842 - DNA, 352 bp, Homo sapiens
tcaaaatgttacaggttgaaatgtgctgcctcatcactagaaacaagtcaaggctgaatcctgctgataataaaaagtccaaatcgtaaagcaggacattagcagccttttgggagaacaaaggaccaaagcaaacatgaaggatacacaattgcccttggtcagttcttygtaaagtgcattctaagccattttatgaggaaaaaagaaaaggactcatttgggaaatgctgcaaaccacatctttttcctagagtttcaaaatgtgaattaaaggctgggcatggtggctcacacctgtaatcccagcacattgggaggctgaggcggtcggatcacctgaggtcaggag

SEQ ID NO: 412843 - DNA, 527 bp, Homo sapiens
ccagtactattcatcactagatttgggccttctttcagcaaagatttgtccagttgtatttggattggatattgggtaggacaagttatccccttgggatttcatcccacctctcgcacccctttcccagtgaatctatgcctcagcctccttggaaaccttcaatttcccaagtccacttcaaactcttgccctagctaagagggcccagaccctcagctgtttcttccccaatcctctaaactctcttttttgccaacccatagccattccctgagcatgccatgctctatctcactgccacatgtttgcatatgatcatctctctaccttcytagccatcagttaacacccaactgaaatgtcacctctgtgaagcacgatgcataggctactgccttctgatctcccaagatgttctctcttctgtcataacatctgtcccattttagcatcatgtgtatttcatgtttatttttgtggattagactgagccccttgaaggagcagaaagctccttatcatct

SEQ ID NO: 412844 - DNA, 633 bp, Homo sapiens
ttcttctcccccctcctccctctgcatctcctcctcctcccaccttctccaccatttctgcctcttcttctcctttagaacgaactaatttaaatggaatttatttggctaacacaagaagattaattatttgggctaggagaaaattaggaggaggggaaggaaattaagaaagggaacattttggatatatatttgcctytcatatacacctctttccaaatgcagagctgtttcctgaacagttttcctagtgaaagaggtcattcacagctagagaaagcaggccccactgctgccaggatgggcctgccactgcaattgcaaaattaatagcttattgccatttctatcatgttttaatagttgaaagaataagaattgatccttatctttaaaaaagcgagaagggcttcaggaaattactcccttcatcttatcacctctgctgtgccttattgtcatgatacaatcatgtgtctgatattttcttttcctctgctaatagcagggctttaaattattaaaggagaagaatgttgaccctctgctttgctgcttctccctctgtgctttgagagttggttgactctttcagcttctttccctctgccttagaaaggctcattttct

SEQ ID NO: 412845 - DNA, 583 bp, Homo sapiens
ttaaatggaatttatttggctaacacaagaagattaattatttgggctaggagaaaattaggaggaggggaaggaaattaagaaagggaacattttggatatatatttgcctctcwtatacacctctttccaaatgcagagctgtttcctgaacagttttcctagtgaaagaggtcattcacagctagagaaagcaggccccactgctgccaggatgggcctgccactgcaattgcaaaattaatagcttattgccatttctatcatgttttaatagttgaaagaataagaattgatccttatctttaaaaaagcgagaagggcttcaggaaattactcccttcatcttatcacctctgctgtgccttattgtcatgatacaatcatgtgtctgatattttcttttcctctgctaatagcagggctttaaattattaaaggagaagaatgttgaccctctgctttgctgcttctccctctgtgctttgagagttggttgactctttcagcttctttccctctgccttagaaaggctcattttctgttgggagtcacgtcctggctctgcttcatgcctgtgag

SEQ ID NO: 412846 - DNA, 633 bp, Homo sapiens
ttcttctcccccctcctccctctgcatctcctcctcctcccaccttctccaccatttctgcctcttcttctcctttagaacgaactaatttaaatggaatttatttggctaacacaagaagattaattatttgggctaggagaaaattaggaggaggggaaggaaattaagaaagggaacattttggatatatatttgcctctcatatacacctctttccaaatgcagagctgtttcctgaacagttttcctagtgaaagaggtcattcacagctagagaaagcaggccccactgctgccaggatgggcctgccactgcaattgcaaaattaatagcttattgccatttctatcatgttttaatagttgaaagaataagaattgatccttatctttaaaaaagcgagaagggcttcaggaaattactcccttcrtcttatcacctctgctgtgccttattgtcatgatacaatcatgtgtctgatattttcttttcctctgctaatagcagggctttaaattattaaaggagaagaatgttgaccctctgctttgctgcttctccctctgtgctttgagagttggttgactctttcagcttctttccctctgccttagaaaggctcattttct

SEQ ID NO: 412847 - DNA, 641 bp, Homo sapiens
taggcattcactggcaggcattcttcccagctcaagaaattcctggggatgggaatagacattgtgctctgggagtttttatttagctgttctttaaaatrtagagttaaatgcaattcaattcatgtatctagtgcctttaactattccccaaaacatctgaaagaatttggaaaccctggaaaggcttcctgtctgtcaagcaatgccacgtgcatgtgcctagttttttgcagctgcattaacctcagctcttccctgtacagagatctggatgcttgccccagctcctgaatctaaagttgttttgtttttcatttgcttattctacagtgttcatcattctgacatccaatttgtttgtttagcttaaatgaataaggatagagacaaaacaactaggtacaggcagttttctatgtacatcagtgcataatgcattcttgaaaatatgaacaaacctgcaagaaccaaataattgtaaatggagttctagtaccaatgaaccaaaaatactataaaatccctaaatacatcatgtttttagaggtagtctttaatcatgtatttccagcattgtctttgttctttaatgctttcctttcaccactagacccatgaaatactggctgacatccaac

SEQ ID NO: 412848 - DNA, 617 bp, Homo sapiens
acttttgggtactgtactgcctctaaaacctggaatcaggttggacaccaccaccctcattttctgttccacagttattttcttgctttatattggtgtttgcttctaagtccaacacctgctaaaatcccagcttcacattgttgaaaggaatgcaatggaatctaatgtgcaaactgtgaaatatctcaagctgctagttcatatagctttcaaaagatattaaatatctcttcttttgtttcaaaaaatgtaaactgtctcttagagttatctctgtggttctgcaggatgcttcaacacatagttttggaattgtagacttacrtaacatatctggaaatatttagaaagctaatatttgctcttctggagacatgtttagatgtaaagacatcagactattctttcatagaaatgtttataaataccagagttagaagaatctctaaattgtacttcattcacttagcttgttttacagatgaagccatcaaaacaagtaaattgcatggcctgccaaaggacacagagataattcatagactatcactgtttgatgttttattacaatgtcctgttgacttatcaatcttgttcactgaataacagaaatc

SEQ ID NO: 412849 - DNA, 585 bp, Homo sapiens
atagtcttggtacaaaggacattgtatatgctcaataaatgtctctttaacctataaaaaagttgagataagcatatgaaatcagatcttatacatctttcatgtcacaataactttgataaatgagtttctgcagtcatttatcatacaaaatccaactttgcttgcttggcagaaaaatcaatattcttcttgyctccagattctaagtagttaaaatgtatttatattccattagaatatctttcagagtatcagtctcattatatatctatcttagtctcaccaatttttatcttaattagcaacctaaaaatttgattatttcaaatatactcaactatctttttggctcttggatattgaaaaagtctaatcaagatgaaagatctggttagaaaaataattctcaaactaatatacaattatatatattattttattgatatgcttttttattcagtctacaaatttaattaaaaaattcttaattgccatttgctgttgtagctcctgggcgttaaaaaatgggacaaaatgctactgttagtaattcgaaatctggtaaaatatacaaaatcataa

SEQ ID NO: 412850 - DNA, 586 bp, Homo sapiens
tgatcatatcaacagatgcagaaagaacacttgacaaaattcaacacttattcaagacaaacattttcagtaaagtaggaatagagggaaacttccttatcttgataaagcacatctacaaaaatgtacagttaacattattcttaatggtgagaaactggatgctttttctctaaagtcaggawcaagtcaaggatgtcctatcttatcactcttactaaacatcatagtggaaattctagctaatgaaaaacaaggaaaggaaattaaaaaataattgggatatttattctaaagtaacatgcttttctatgtagaaaatctcaaagaatcaacaaagaactgtcactaacaagtgattatggcatgactgcagaacacaaaattaatagttaaattcaattgctttcctatatataaacaatgaacaattagaatttgaaataaaaaacacacaaccatttacatgaacaccaaaattttgaaaacttaggtatggattgaaagtataagatctgtatgaggaagattacaaagctctgatgaaaaaaaattacagaaataaatacggaaatattttgtgttc

SEQ ID NO: 412851 - DNA, 586 bp, Homo sapiens
tgatcatatcaacagatgcagaaagaacacttgacaaaattcaacacttattcaagacaaacattttcagtaaagtaggaatagagggaaacttccttatcttgataaagcacatctacaaaaatgtacagttaacattattcttaatggtgagaaactggatgctttttctctaaagtcaggaacaagtcaaggatgtcctatcttatcactcttactaaacatcatagtggaaattctagctaatgaaaaacaaggaaaggaaattaaaaaataattgggatatttattctaaagtaacatgcttttctatgtagaaaatctcaaagaatcaacaaagaactgtcactaacaagtgattatggcatgactgcagaacacaaaattaatagttaaattcaattgctttcctatatataaacaatgaacaattagaatttgaaataaaaaacacacaaccatttacatgaacaccaaaattttgaaaacttaggtatggattraaagtataagatctgtatgaggaagattacaaagctctgatgaaaaaaaattacagaaataaatacggaaatattttgtgttc

SEQ ID NO: 412852 - DNA, 533 bp, Homo sapiens
tagatagaacatggttactaatgtcctcaatataagataatggggaggaaaaattgtattctactccctatgtttcctctattaacatgatgataacatgatattttaayggaagcagaaagtcctccattaaaatgacatttctgtgctctctcaggcactttttcagcactcctaggtgagaaagggtgacttcttgattattgagtgtgattgaagcagatggacatgcctggctcagacccttccaagctaattcttagattctgcctaacccccccaagtatgaaatttctacttttctagagacaggcttccatgagtaaggtggtcacacattctgctttgcccagataagtcaaagtttgtcctttcctggagcctcatccaatttagaatgtgtactgattttttttcttataaagttgtattattaacagcttcaggaaaataagtgactatatgtttgacagaccaaaacttgtcttttttctagcttctgtcgtaatcttacctattagtgtcagaagtaa

SEQ ID NO: 412853 - DNA, 533 bp, Homo sapiens
tagatagaacatggttactaatgtcctcaatataagataatggggaggaaaaattgtattctactccctatgtttcctctattaacatgatgataacatgatattttaacggaagcagaaagtcctccattaaaatgacatttctgtgctctctcaggcactttttcagcactcctaggtgagaaagggtgacttcttgattattgagtgtgattgaagcagatggacatgcctggctcagacccttccaagctaattcttagattctgcctaacccccmcaagtatgaaatttctacttttctagagacaggcttccatgagtaaggtggtcacacattctgctttgcccagataagtcaaagtttgtcctttcctggagcctcatccaatttagaatgtgtactgattttttttcttataaagttgtattattaacagcttcaggaaaataagtgactatatgtttgacagaccaaaacttgtcttttttctagcttctgtcgtaatcttacctattagtgtcagaagtaa

SEQ ID NO: 412854 - DNA, 533 bp, Homo sapiens
tagatagaacatggttactaatgtcctcaatataagataatggggaggaaaaattgtattctactccctatgtttcctctattaacatgatgataacatgatattttaacggaagcagaaagtcctccattaaaatgacatttctgtgctctctcaggcactttttcagcactcctaggtgagaaagggtgacttcttgattattgagtgtgattgaagcagatggacatgcctggctcagacccttccaagctaattcttagattctgcctaaccccccmaagtatgaaatttctacttttctagagacaggcttccatgagtaaggtggtcacacattctgctttgcccagataagtcaaagtttgtcctttcctggagcctcatccaatttagaatgtgtactgattttttttcttataaagttgtattattaacagcttcaggaaaataagtgactatatgtttgacagaccaaaacttgtcttttttctagcttctgtcgtaatcttacctattagtgtcagaagtaa

SEQ ID NO: 412855 - DNA, 568 bp, Homo sapiens
ttaaacatgaaacaagcagaaatattgtgagtgttatagaatatcttgcttaaaagtccaatttttttttttttttttgcttagagtattttaaatacatgttttgaggtggtggagatcatagcaaaaccaatattccattttcattaaattaagaattctgttgggaaacatgtatttgaatttggttttgggaaacataaaattctcaattgtgtccaagcaaggtgtgatgtactgccaattaaaatatagaggtggggagcaaggcagcagaataggactcgcctgcaatcatcccccyacagaaacatcaattagaagaagtgtccatgcacaagaatacattcacaagacctgaagaaaccaggtcagagaccatagtacctggttgttgcataacagtaagaaaagacacactgaagaaggtaagaagagtatttttacattacctgtatcacccctccacaatctgaggcagtgcagtgtggagagagattctctctgctcaaagaaaagatagacaaatgatcacaggattttgcctcaaatcattacacttggccca

SEQ ID NO: 412856 - DNA, 568 bp, Homo sapiens
ttaaacatgaaacaagcagaaatattgtgagtgttatagaatatcttgcttaaaagtccaatttttttttttttttttgcttagagtattttaaatacatgttttgaggtggtggagatcatagcaaaaccaatattccattttcattaaattaagaattctgttgggaaacatgtatttgaatttggttttgggaaacataaaattctcaattgtgtccaagcaaggtgtgatgtactgccaattaaaatatagaggtggggagcaaggcagcagaataggactcgcctgcaatcatccccccacagaaacatcaattagaagaagtgtccatgcacaagaawacattcacaagacctgaagaaaccaggtcagagaccatagtacctggttgttgcataacagtaagaaaagacacactgaagaaggtaagaagagtatttttacattacctgtatcacccctccacaatctgaggcagtgcagtgtggagagagattctctctgctcaaagaaaagatagacaaatgatcacaggattttgcctcaaatcattacacttggccca

SEQ ID NO: 412857 - DNA, 617 bp, Homo sapiens
atgccactgcactccagcctgggcaacagagtgagactccatctaaaaataaaataaaataatgaagaaaaataaataaggaaagaaaggaaagaaagagaaagaaggaaagaaggaaaggaaggrgggaaggaagggagggaggaaggaagtggagtggatgggagggagggaagggaacctgagaggtgcaaaatactttttctgtttatatacccactgaggcaaagcccagttttcaaacccatattaataaaaatcctttattcattaatttatacccttttgaatatttttgggcaatgaggaaaagtgatttgtaatccctcaagaaagctataaacaaagtacctctgagtgtgaatgttcagatctgtgttgcaatctagtcatcacctgcaaggattgagtctggagtagaagaatgatagtttccaatctagttggatgagaactgtaacaagtgggatttttggaactactaaaagattataaaaaaagtgtaattatttgatacctgcaacatatatgtggtgatttctgtactgaattgatctattattttacggctgaggaagctgaggtacagtggtaattcatttcttcagaggaaaatg

SEQ ID NO: 412858 - DNA, 598 bp, Homo sapiens
acctgtactcacaagttacacaggtaacatttacttcattctaccagttacaactgagtcactaaggctagtcgaggatcaatacctctctaaaaaggcgatgttttygaagagatctgaaagaataatggcaaaatataggtcaatctggaggaaaagcaactcagaaagagagagaggaagagaaagacagaacagtacttagaatgtgtgtgtgcataagaggacgtcagagtgcagcaggcggcccggtcttttaaggttaggtaaactgttgtaaacattgtatatattcctgcaagtaagatgaaaatcagaggaatatttgagatgcaggcatattatgcccaagttaatgttttaaatgtgttgctctccagcaatgaggaaaccaggatatggggaaacaagagtatattcagggagatttgtgggagtttattgtaataattcagatgagaaatgatgatggcttaaataaattgagtatacagaaggtaactagaaagatttgcactcagaataccctttgaatgtagagttgctagaatttgttgatgaattaaatatgaggtatgagagaaagaaaagggttcag

SEQ ID NO: 412859 - DNA, 560 bp, Homo sapiens
attttcagttcagcacagtatggtattgttcccagcaataaaaagtgtgtaatatacgggcaaagctgaatattcgagaccagcctgaccaacatggtgaaaccccatctctactaaaaatacaaaaaaaaaaaaaaaacattagccaggcatggtggcaggtgcctgtaatcccagctacttgggaggctgaagcaggaaaattgcttgatctctggaggcagaggttgcagtgagccaagacggcgccgttgcactccaccctgggcaacaagaatgaaactctgtctcaaaaaagaaaaaraaaatgctgaatgtggaaatgacttcctgccttacgtctaccaccagcattcacttgattcaagcaaatctctacccatttctggaccttgttcgcttaactctaaactgactctcacattttgtccagctctgagatcaatgaatctgaaaatgccgaggaaggtatatcttcaagttttcaccaagataagaaatgcagacagttggaatatcttactgtattagtttgttttctgttgcttataacagaaaac

SEQ ID NO: 412860 - DNA, 651 bp, Homo sapiens
cccacctcttcattacttccaaagagccaactttgtccagtctaaaaaataatagctctttctgatatttttttcaagggaaaacctattcttgggacttttttccacttttctttcagtttttctttgaattttctcttctgtcacgttttcaaaatgccattattcatgatttatcactgtctttaagtatcattataggaattaaatatctttttacttttatagtttcaagacttttgttgaacttattcaactagcactaaatatttttattcattttaaagaaaattatttcagaaaattgtctacattaattgtctaaatggttttatcatggtgaaatatatatataataacataaaatttgtcattttaatcattttaaaatattcagctcagtggcattttatattcatattgctgtgcaaccatcatcactatctattctaaaacatttttatcacttccaacagaaactctgcacccattaagtaataacttctatttccctctcccccagcccctgggaacttctctatgaattttcttattgyaaatatttcgagtaagtggaatgttacatcatttattcttatgtgtctcatttcttttagttagtataatttatccaaggttgacccatattgt

SEQ ID NO: 412861 - DNA, 568 bp, Homo sapiens
tgtaatgatagatgagttgcctcatcaataagagttttaaaagctagacgttcaggcacaccataacagctacaaaactcatgtcacacaaccagctagaactgagaagagaaatagtgracctaaaattagagctggtatgaacaatgctttcttagtaactgatacaatgcataaaaataaaataaataaatatatatgacttgaaaagcactattaaccaatttgacttaattgatacctctagaccattccatcaccaacggcagaataaattttattgtcaaatgaaactagagtagtaaagataggccattttagatcgagtgtggttgctcatgcctgtaacctcagcactctgggaggccaaggcacgtggatcacttgagctcaggagtttgggaccagcctgggcaacatggtgaaaaaccatctctacaaaaaaatacaaaaattagctggacgtggtggtgcacacctgtggtcccagctacttggtaggctgatgtgagaggatggcttgagcccaggagacagaggttgcagtgagccgagattgtgccactgc

SEQ ID NO: 412862 - DNA, 616 bp, Homo sapiens
catactcagaaatggccttgatactgaaaatttcgggaaaggaattttaaactatgaataatcagttaaagaacatagtggaaaaggtaacaacgtgcttgaacaaatggatagctacaaagtgataaccataaagtgtccagtggatatgggagacatgcaaacatggtatcagacatgtagatgtccctgtacaggctgaataaatcgactgggcactgtaaaagacataataagttaattggaggacattctatcgaacattatctaaaagaaatataaagatatttttaatttagaatagaggttctaagagttattaaactattatcagaatgtttaacataaatgtaattggtgtcctaaaagaaaaacaaatggaaaagaaaggttagaagaatagttgaaaagagagtggcaaggattacattaaattaatcaaaacctataccagtagaatcaaaagactgtactgctaaccataggcaggataaatactaagaaaatttccaagggcacattatagttaaattgtgaaatacaaaaaaaaagagtatatattgaatgcagcagtgggggataggaaagtaraatataggaaaatatatgataataa

SEQ ID NO: 412863 - DNA, 638 bp, Homo sapiens
ggaagtggtataatattgtaactgtaggtgaaaatgttttcatggcctgtagtttagatccttggatttttaggtcaaggaaaacatgggaaagagagggctaatttgagtggctattcctgactattgtctagatatctatactctggaacaagaacttttgggttctgacttgctcgcattttggatagccaggacacacacaaacacayacacacacacacacacacacacacacacacatttttagatttacacaaagatgtacacaaagatgatagaatctgcttgtattagtttattcaacaagtatggttgtgtgccacataatgtcatttcagtcaatgatggactgcaaataggaccatggttccataatattataatactatatttttaccataccttttatatgtttagatgtttagatacacaaatacttatcatcgtgttataattacttacagcatttaggacagtaacatgctttacaggtctgtaacctaggagcaataggctataccatataggataagtgtatagtgggctacactttctaggtttgtgtaagtacatgcagtgatgtttgcacaatgacaaaatcacctatgggtgcatttctcagaatatactcccat

SEQ ID NO: 412864 - DNA, 638 bp, Homo sapiens
ggaagtggtataatattgtaactgtaggtgaaaatgttttcatggcctgtagtttagatccttggatttttaggtcaaggaaaacatgggaaagagagggctaatttgagtggctattcctgactattgtctagatatctatactctggaacaagaacttttgggttctgacttgctcgcattttggatagccaggacacacacaaacacacacacacacacacacacacacacacacacacatttttagatttacacaaagatgtacacaaagatgatagaatctgcttgtattagtttattcaacaagtatggttgtgtgccacataatgwcatttcagtcaatgatggactgcaaataggaccatggttccataatattataatactatatttttaccataccttttatatgtttagatgtttagatacacaaatacttatcatcgtgttataattacttacagcatttaggacagtaacatgctttacaggtctgtaacctaggagcaataggctataccatataggataagtgtatagtgggctacactttctaggtttgtgtaagtacatgcagtgatgtttgcacaatgacaaaatcacctatgggtgcatttctcagaatatactcccat

SEQ ID NO: 412865 - DNA, 638 bp, Homo sapiens
ggaagtggtataatattgtaactgtaggtgaaaatgttttcatggcctgtagtttagatccttggatttttaggtcaaggaaaacatgggaaagagagggctaatttgagtggctattcctgactattgtctagatatctatactctggaacaagaacttttgggttctgacttgctcgcattttggatagccaggacacacacaaacacacacacacacacacacacacacacacacacacatttttagatttacacaaagatgtacacaaagatgatagaatctgcttgtattagtttattcaacaagtatggttgtgtgccacataatgtcatttcagtcaatgatggactgcaaataggaccatggttccataatattataataytatatttttaccataccttttatatgtttagatgtttagatacacaaatacttatcatcgtgttataattacttacagcatttaggacagtaacatgctttacaggtctgtaacctaggagcaataggctataccatataggataagtgtatagtgggctacactttctaggtttgtgtaagtacatgcagtgatgtttgcacaatgacaaaatcacctatgggtgcatttctcagaatatactcccat

SEQ ID NO: 412866 - DNA, 638 bp, Homo sapiens
ggaagtggtataatattgtaactgtaggtgaaaatgttttcatggcctgtagtttagatccttggatttttaggtcaaggaaaacatgggaaagagagggctaatttgagtggctattcctgactattgtctagatatctatactctggaacaagaacttttgggttctgacttgctcgcattttggatagccaggacacacacaaacacacacacacacacacacacacacacacacacacatttttagatttacacaaagatgtacacaaagatgatagaatctgcttgtattagtttattcaacaagtatggttgtgtgccacataatgtcatttcagtcaatgatggactgcaaataggaccatggttccataatattataatactatatttttaccataccttttatatgtttakatgtttagatacacaaatacttatcatcgtgttataattacttacagcatttaggacagtaacatgctttacaggtctgtaacctaggagcaataggctataccatataggataagtgtatagtgggctacactttctaggtttgtgtaagtacatgcagtgatgtttgcacaatgacaaaatcacctatgggtgcatttctcagaatatactcccat

SEQ ID NO: 412867 - DNA, 625 bp, Homo sapiens
tattggagatgatatcttaattacagttaagatataacatcaaagattttcttgctgcttctttttaaaggaggtaaaacgatctgaatatgatttagttaaatgaaatctacatggcaaagctaactagcttccaatgtttgaaagttgcaaattacacagaagcagtctgaagagtatcaaagtgaattatgaaatgatataaagtaaggaaaaaccactcaccttctgggagggaaactcttatttgctgtatctaattaggagaatctgaagcaagagttatgagagttgggtggctgagggcatatcaaggaaactagactctacagcaaatgagaaagagttgcaaggtccaatctcttctcagatgtgcaatggattagctccttrgccttcctgcctcttcttgagcttttgtggttctatctgaagacataaatgtttcatgtgaactttgcttacatttggcaaaaatgcaagattttcctttattgcttttagtaagaactctgaagagcaccccagacttttctgatttcattctcaccaggtatacactgtttccagagtctcatgaattccctctaattttcattgagtccattaggatataaaggctatg

SEQ ID NO: 412868 - DNA, 625 bp, Homo sapiens
tattggagatgatatcttaattacagttaagatataacatcaaagattttcttgctgcttctttttaaaggaggtaaaacgatctgaatatgatttagttaaatgaaatctacatggcaaagctaactagcttccaatgtttgaaagttgcaaattacacagaagcagtctgaagagtatcaaagtgaattatgaaatgatataaagtaaggaaaaaccactcaccttctgggagggaaactcttatttgctgtatctaattaggagaatctgaagcaagagttatgagagttgggtggctgagggcatatcaaggaaactagactctacagcaaatgagaaagagttgcaaggtccaatctcttctcagatgtgcaatggattagctccttagccttcctgcctcttcttgagcttttgtggttctatctgaagacataaatgtttcatgtgaactttgcttacatttggcaaaaatgcaagattttcctttattgcttttartaagaactctgaagagcaccccagacttttctgatttcattctcaccaggtatacactgtttccagagtctcatgaattccctctaattttcattgagtccattaggatataaaggctatg

SEQ ID NO: 412869 - DNA, 497 bp, Homo sapiens
ttggttttgtcagtagatgtttaagctgtgcccagaagcacragtttacctatgcgtttggagccctgaggacaggtggagggaagggttggaacctgcttagagtaagattgtttcagtcctggagcactagcgattccagttcaatctcttctaggaatgaccctggcaagaaatccaagggagagcaggagaggcaagagggaggtaaaacaaatgcagagagtgtgggagaggtagaacaacaaaaaatggtggggtggagagagaggggaatattttgttttacagccacttgtgtaagtaaaattagtctctgcctgtcagttactacatcatcagaaagtggcaggtctgattttcactggatgtagtctaccactttgttggcctgcctggaagcatagactatgtagcacaccatatgccactttgggacgccttacatagatgagtagtcagagtctagcgcagctgaaattgaggtaccaaggcct

SEQ ID NO: 412870 - DNA, 497 bp, Homo sapiens
ttggttttgtcagtagatgtttaagctgtgcccagaagcacaagtttacctatgcgtttggagccctgaggacaggtggagggaagggttggaacctgcttagagtaagattgtttcagtcctggagcactagcgattccagttcaatctcttctaggaatgaycctggcaagaaatccaagggagagcaggagaggcaagagggaggtaaaacaaatgcagagagtgtgggagaggtagaacaacaaaaaatggtggggtggagagagaggggaatattttgttttacagccacttgtgtaagtaaaattagtctctgcctgtcagttactacatcatcagaaagtggcaggtctgattttcactggatgtagtctaccactttgttggcctgcctggaagcatagactatgtagcacaccatatgccactttgggacgccttacatagatgagtagtcagagtctagcgcagctgaaattgaggtaccaaggcct

SEQ ID NO: 412871 - DNA, 538 bp, Homo sapiens
accacaaaacaacacaaggaaatggttgaagatgatgagtatatttagtaccttgattttgatgatggcatcatctatgttcaaactcatgaagatgtatacattaaatatatgcaatattttatatattgattacatatcaatgaagctctttttaaaaaatgatttcataagattttcaggcattctcttgcttcagattcaggccttattagtgcttgtacttttaacattaattttaatatgcatttgggtacttttacacaaaccaagcttttaaaaaacattttaaaatatttcarcagtattcaggttggtatttgatcattttctctcatacttcaatcgttttccacccagattttatttatttatttatttatttagtgtatgtgtgagatggagtctccctctgtcacccagcctggagtgtagtggcgtgatctcggctcactgcaacctccacctcctgggttcatgcgattctcctgccccagcctcccgagtagctgggactacaggcccccaccaccacgcc

SEQ ID NO: 412872 - DNA, 538 bp, Homo sapiens
accacaaaacaacacaaggaaatggttgaagatgatgagtatatttagtaccttgattttgatgatggcatcatctatgttcaaactcatgaagatgtatacattaaatatatgcaatattttatatattgattacatatcaatgaagctctttttaaaaaatgatttcataagattttcaggcattctcttgcttcagattcaggccttattagtgcttgtacttttaacattaattttaatatgcatttgggtacttttacacaaaccaagcttttaaaaaacattttaaaatatttcagcagtattcaggttggtatttgatcattttctctcatacktcaatcgttttccacccagattttatttatttatttatttatttagtgtatgtgtgagatggagtctccctctgtcacccagcctggagtgtagtggcgtgatctcggctcactgcaacctccacctcctgggttcatgcgattctcctgccccagcctcccgagtagctgggactacaggcccccaccaccacgcc

SEQ ID NO: 412873 - DNA, 538 bp, Homo sapiens
accacaaaacaacacaaggaaatggttgaagatgatgagtatatttagtaccttgattttgatgatggcatcatctatgttcaaactcatgaagatgtatacattaaatatatgcaatattttatatattgattacatatcaatgaagctctttttaaaaaatgatttcataagattttcaggcattctcttgcttcagattcaggccttattagtgcttgtacttttaacattaattttaatatgcatttgggtacttttacacaaaccaagcttttaaaaaacattttaaaatatttcagcagtattcaggttggtatttgatcattttctctcatacttcaatcgttttccacscagattttatttatttatttatttatttagtgtatgtgtgagatggagtctccctctgtcacccagcctggagtgtagtggcgtgatctcggctcactgcaacctccacctcctgggttcatgcgattctcctgccccagcctcccgagtagctgggactacaggcccccaccaccacgcc

SEQ ID NO: 412874 - DNA, 581 bp, Homo sapiens
ttagggttagcactaaggttagagttagggttagggtttgtggagcccgtgttaacccagatatagctcctgtgcccttttgacatgtgcccactagtctttgagcatttctggctttctgtaacaagatgtctcaggcttgcctttggccttctctacctcagacctggaatcagctatttctccaagaagccatggttatgttgtggatggcaggtgacagcacatagaaaccaaaatctgaattctaaggtactctttgcaaacaggtgttatagctcctaatattatccataagggaagaactaggaaatatattgtgaaaatgtgtgagtttatattgatatttccaataacatttaattttacagagtttttacttaatttcttgcatttttgttttagatttattgattttcatacgttgaaccagccttgcatcccagagatgaagcagacttgaccatggtggataagctttytgatgtgctgctggatttggtttgccagtattttattgagggttttcacactgatgtttgtcatggatattggcttgaaattttctttttttttttttt

SEQ ID NO: 412875 - DNA, 514 bp, Homo sapiens
taacaatctgctaatgtaatgcttttatcataattattttagagatgaagaaactgaggttcagaaagattagatttaaaatatttttaggaaaagagaaaaatgcctaaccataaatttaaagcatcataagactaatattaatatttattatagactaaaatattgtttccctgaaagataactggtctgaaaaatatacagatagattcaaattttctctagcattcaaataattcatagaaattctgaaaaatgttgctggcacagaataatattcgttcaaaaaaaggtatcaatgtatatacaccatgaagcatccaaaaaagagccatttyacaaatcatgtcacacacgtgtccagaagatgcactatgcagattcccccacctttaagaaagaatcaagcccagagtcagggttggagctttgttgcctgacagcttctagctgcagctctttcaggctgtaccttggcattccaggccagggctgcctcttctctggtggctct

SEQ ID NO: 412876 - DNA, 348 bp, Homo sapiens
gactactaaaaattggtggggatgctgtacaaatggatctggagaatacactacaaaattgaaacatgtacrtttgactgcttcgctgtgacaaaacctctaggccaggggtcccccgaccccactgggccctggaccagtaccagtctgtggccgttagggcccaggccacacagcaggaggtgagtggcgggcaagtgagcattactgcctgagctcattcagcctcctgtcagatcagcagcagcagcattagatttccatagcagcaggaaccctatggtgaactgtgcatacaagggatctaggctgcacactctttacgcaaatctaactaatgcctgatga

SEQ ID NO: 412877 - DNA, 582 bp, Homo sapiens
ggtacctgccctccatgtgcttacagtctaggaaggtgatttcaagtgtctcagtggctttaataacatgtatttatttttaccraaataattagttatttccaatttatgaaggcatttatttccaaagatgatagaatgatcatttcaatatcaaaacatgtataaaacaggaaaaccaaaaaattcaaatatatttagagcatttattctcaaccttggctatatcagaatcacctgggaacattttcaaactaccaaggtcagggccctaactgtcagagattctgatttaattggtccacagtggagcccaggcactggtatttttaaagttccctagtttcagattcaatgactttaataattgcattaagctcctgggataagtcttttaagtagtcttaatattaaacattaaattaaaaattaaacttaacattagttagcttccagttatccaaaggaaaatagaaacacatttctcaactgacaggtgactgaaaaaaaaatggcagataggaggcagtactaaagtgcagctcccactctggatagacagagcagaatgtggagactagc

SEQ ID NO: 412878 - DNA, 631 bp, Homo sapiens
tacagtttggctctcagaaagccacatccctagggaaagagggggaatattacatcaagggagtaccccgtggcacaagagtctgaacagcagccttgagctccagatctcccctctgacatagcctacccgcatgagaaggaaccaggaaaacaattctggtaatatgacaagagaaggttctttaacaccccaaaaagtcgcattagctcaccagcaatggatccaaaccaagaagaaaaatctgaattgccagaaaaagaattcagaaggtcaattattaagctattcaagcaggcaccagagaaaggtgaagtccaacttaaggaaatcaaataaatgatacaagatatgaggggagaaatcttcagtgaaacaggtagcataaataacaatcacaacttcaggaaataaaggacacacttagagaaatgcaaaacatacttgagagtctcaggaatagaattgaacaagcagaagaaagaacttcagagctcaaagacaaggtttttggaataacccaatccaacaaagayaagaaaaaagaattttgaaaatgagcaaacccccaagaagtttgggattatgttaaatgaccaaatatgagaataattggcattcctgagaaaga

SEQ ID NO: 412879 - DNA, 568 bp, Homo sapiens
  misc_feature (1)...(568): n = A,T,C or G
nnnnnnnnnnnnnnnnnnnnnnnnnnnnnnnnnnnnnnnnnnnnnnntaataagtgcttttctaacaaagtggcattcaagttaaagctcagtcgggcagccamattccccttccaagcattaagctatacttacagtgtacttaaaggatattttatgtggaattataaaagttaacacttctggccaggtgcagtggctcatgcctgtaatcccagcactttgggaggctgaggcaggcgaatcatttgaggtcaggagtttgagaccagcctggccaacgtggtgaaaccccgtctctactaaaaattcaaaaaataagttagctgggcgtggtgacaggtgcctgtaatcccagctactgggaggctgaggcaggagaatcgcttgaactcaggaggcggaggttgcagtgagccgagatcgcgccactgcactccagcctgggcaactgagactctgtctcaaaaaaagaaaaaaaaaattttagcacttctattcttcttttgtctgggtctaactatctttagactttgtctctttattcatactgagatctggataagag

SEQ ID NO: 412880 - DNA, 568 bp, Homo sapiens
  misc_feature (1)...(568): n = A,T,C or G
nnnnnnnnnnnnnnnnnnnnnnnnnnnnnnnnnnnnnnnnnnnnnnntaataagtgcttttctaacaaagtggcattcaagttaaagctcagtcgggcagccaaattccccttccaagcattaagctatacttacagtgtacttaaaggatattttatgtggaattataaaagttaacacttctggccaggtgcagtggctcatgcctgtaatcccagcactttgggaggctgaggcaggcgaatcatttgaggtcaggagtttgagaccagcctggccaacgtggtgaaaccccgtctctactaaaaattcaaaaaataagttagctgggcgtggtgacaggtgcctgtaatcccagctactgggaggctgaggcaggagaatcgcttgaactcaggaggcggaggttgcagtgagccgagatcgcgccactgcactccagcctgggcaactgagactctgtctcaaaaaaagaaaaaaaaaattttarcacttctattcttcttttgtctgggtctaactatctttagactttgtctctttattcatactgagatctggataagag

SEQ ID NO: 412881 - DNA, 592 bp, Homo sapiens
acgtttttctccttcactgaaacaatcgatgagagttgaaacgackactgaataagtattcttataagggcctgttgttttccatgaaagaaaatatatttgcagacctgttaccaccaagggattgcggtcaagggaaggctaaagctttcttcctccaccaacggattgcttaaagcccctttagacaaacataaaagactcaaagtcagtatgcttcacttcaagcacagctttttcctgctaagctgctcctactatatggaaattctgggggtgtcaatgtttgtatgcccaactgagtatctgttataaaacacacttttcccaagcccccacattaataatttctgacacataaaaaattaagagttcagatttaattaattgtggacatttaggaaggctaatttgaaagtgtataatatggttaagctttgtgtctccacccaaatctcatcttgacttgtaatcctgataactcccacagtccccatgtgtcaagggagagaccaggtggaggtaattgaatcatgggggtagtttcccccaagctgttctcatgctagtgagtgagttctcacgagatctg

SEQ ID NO: 412882 - DNA, 506 bp, Homo sapiens
cttgagtcaggaatcaagacaagcctgaccaacatggtgaaaccccatccatacaaaaatacagaaaattagctgggtgtggtggtgcatgcttgtaatcccagctgcttgggaggctgaggcaggagaatcacctgcagctaggaggcagatgttgcagtgagccaagatcatgccactgcactcyagcctgggcaacagagcaaaactccatctcaaaaaaaaaaaaaaaaaccaaaaaaaacccaaaaaacaaaaaaaaacttaggaggactgttgggaaggcatgattggttttgaaatgtgaaagggacatgagatttgggagggtccaggggcaggtggaatgatatggttaggctttctttccccacccaaatctcaggggggttgtttcccctatgctgttctctgatagtgagtgagttcttatgagatctgatggttttataataggctcttccctcctttgctcagcaccccttcctgctgccttgtgaagaagg

SEQ ID NO: 412883 - DNA, 564 bp, Homo sapiens
gagaggatacaaagtggtacaaatgttttgggaaatcatttgacagtttcttaaaaaattaaacatacacctatcacatgacacagaaatctcacatttcatacaagaaataaaaatgtatttcatacataaaccaatacatgaatagttatggmagttttattcataacctccaaaaacaggaaaggaaagggaaggggaatatttatggcagccttattcataacctccaaaaacaggaaaggaaggggaaagggaaaaatatatccttcaataagtgaatgggtaataaagcgtgttatgtgaaagaagccagtttcaaaggctgtaaacaatatgatttcatatacacaacatccaagaaaaaacaaaaatatggaaacagaaaaaagactagtggtcaacaaggattagggataaggacagtatttgactgcaaaaggtcagcaagaagaaattttggggagcaatggatttgttctgtgtactgattataatggtaattacacacatctatagaagagttaaaactcatacacacatatacacaaagataagtttatg

SEQ ID NO: 412884 - DNA, 558 bp, Homo sapiens
catctaagctaaaattcccatttccctctgactccagcaattggtgatgccttcatgaatttcayagcatgggccatagctcaataggctgttacttcaagaggccacttccgaccatcacctgagaccagaaggagtgagctgtccctaatttcatatgcttgtatgatctgttttatcaacaaggaccctccctaccattcttgaatggaaggcatcagatacattgcctccaaaagggtcaggttattgctgcttttcaaatttatttatcatacaccttaatgagaaccctggtcactgcacaagcatctgcaagggaccatggcaaaagctgaaagtacaaaacaggatgttcaaacccattcctgctttctttgaggtaaatattaataacatagttactgcctttaaaaaacaaaaatcgaggacaaatgatcaatcagacagacatgggtactacagatgtaaactgggactgacactgatcttatatgagctctgtcatacatggttagtagtctcaagtgatggtcctaccaaaaaaaacactattca

SEQ ID NO: 412885 - DNA, 524 bp, Homo sapiens
ctggtgcagggcagctcagcctctgttctctgtacagagcatctaagctaaaattcccatttccctctgactccagcaattggtgatgccttcatgaatttcacagcatgggccatagctcaataggctgttacttcaagaggccacttccgaccatcacctgagaccagaaggagtgagctgtccctaatttcatatgcttgtatgatctgttttatcaacaaggaccctccctaccattcttgaatggaaggcatcagatrcattgcctccaaaagggtcaggttattgctgcttttcaaatttatttatcatacaccttaatgagaaccctggtcactgcacaagcatctgcaagggaccatggcaaaagctgaaagtacaaaacaggatgttcaaacccattcctgctttctttgaggtaaatattaataacatagttactgcctttaaaaaacaaaaatcgaggacaaatgatcaatcagacagacatgggtactacagatgtaaactgggactgacac

SEQ ID NO: 412886 - DNA, 536 bp, Homo sapiens
aatcagactcatttttggtactcattacatcagaattgccaaatcaaaagagagttattccaagaatttaacctttaaatatatttcaccttttcttccttctgttttcatataatccagagtcttrtttaccaaccatttgaacattctactacttaaagtagtataaagttttgttataatttggatgaggcgaagataaggctaaggagaagataaattttaaattcaaaggttggctctgaaattaattttattttcttaactatgtgtacatggattaaagccagaaaaaaaatttataacccagttgccatatatctgaagtccaaatattttctctggcccagaacatttgtcataatttttatgaaatgatttttctaatttttttctcacttcactgtttttaagacaactttggataacatgaattcattagagtttaacatttgtggtcagctaacaggctatcattcaaaagatatctaggaaaccacctatatgttacaaagaaagatatactttcaggccac

SEQ ID NO: 412887 - DNA, 555 bp, Homo sapiens
gtattcaaacccactcgcacactaggtctttagctctaagtacagtgtcagtttaaactccagttcttatatgttctggaggtcagaatttggaaatgcttatctttacgtagattatataatttactcaactaaatcttaagcacaaatagttttatactgtgatctacctcttgtctacctgctcttaaagctgggcagagggatgagtgaagagatcatgggaacaagtagccccaaatattaataacacctggaaaaggatccacaataagkggagtagagggtggtcaagggaagcccctgcctgactgcttagccaatgtttctttcctttcgctcactgaccataatcttgaggcagcacagaagtgaaaatctgcaaacgatgctgttatattggaagtgatttctctagcatcaatacttcaggtatatcaaaaggaatcagcaaatgcctttcacaaatggtaaagagaggaggcatccagagccaggtgatgaaatagatgcttagtcatgcctatgagacagctgggtgaaacatgaagacat

SEQ ID NO: 412888 - DNA, 602 bp, Homo sapiens
cttggagtggataagtacttaatgaaggatcttattctaagcatactctttgaggagaaaaaactaattgtcgtaagaattgaaccaaatcttgttcatattagcgttttagatcaattcaattcaataaatatttacagaagacctactatgctaagtattttttagtcttcggaaccgtcagtccctccaacagtccctccaacactaatgtttatgttttgtaccttatcggctgccacccccttcctgtctttgcaaagtgtttagactagggtatacctggcttaagccgatccttagcttgccctgtaacctataacaaattatggcctggctcaaaaatrgaagctttatgaatcccctgctggcctatttgaactaagagactacagaaagttgctcaatagtgatgaaagctgaaagacctagatcatgtacagtccatcctagaacagtgtgggcatttgtgtcaccagatttagaggaactgctctgacagagagaatatgagatagaaatgggataggccatgcatcccctgagggagaagcagatgaaaacgctgtgtttctaatgtcttctcagttctagttcccagg

SEQ ID NO: 412889 - DNA, 586 bp, Homo sapiens
gtgagcgtaactaatccgataagcagaggtccatgggtggttatgcaccctggaaaggaataagcattaggaccatcaaggatgctctatgactaatgctcattggaaaatgactagggctgctggcatccatatgttcttttttcagatgggaaacgttccccscaaggaaaaactccactaagatgtattctggagaatttggcccagtcagagtgtatgtaccttttaccctgtcagacttgaagcaaactaaaatagacctaggtaaattctcagataactctgatgactatattggtgttttacaagggttaggacaatcctttgatctgacatggagagatacaatgttactgctagatcagacactaaccccaaatgagagaagtgccaccataactgtagcccaagagtttggcgatctctggtatctcagtcaggtcaataataggatgacaacagaagaaggagagcaattcctcacaagccagcaggcagttcctagtgtagactctcactgcgacacagaatcagaacatggatattggtgccacagacatttgctaacttgcgtgctagaagg

SEQ ID NO: 412890 - DNA, 586 bp, Homo sapiens
gtgagcgtaactaatccgataagcagaggtccatgggtggttatgcaccctggaaaggaataagcattaggaccatcaaggatgctctatgactaatgctcattggaaaatgactagggctgctggcatccatatgttcttttttcagatgggaaacgttccccgcaaggaaaaactccactaagatgtattctggagaatttggcccagtcagagtgtatgtaccttttaccctgtcagacttgaagcaaactaaaatagacctaggtaaattctcagataactctgatgactatattgrtgttttacaagggttaggacaatcctttgatctgacatggagagatacaatgttactgctagatcagacactaaccccaaatgagagaagtgccaccataactgtagcccaagagtttggcgatctctggtatctcagtcaggtcaataataggatgacaacagaagaaggagagcaattcctcacaagccagcaggcagttcctagtgtagactctcactgcgacacagaatcagaacatggatattggtgccacagacatttgctaacttgcgtgctagaagg

SEQ ID NO: 412891 - DNA, 586 bp, Homo sapiens
gtgagcgtaactaatccgataagcagaggtccatgggtggttatgcaccctggaaaggaataagcattaggaccatcaaggatgctctatgactaatgctcattggaaaatgactagggctgctggcatccatatgttcttttttcagatgggaaacgttccccgcaaggaaaaactccactaagatgtattctggagaatttggcccagtcagagtgtatgtaccttttaccctgtcagacttgaagcaaactaaaatagacctaggtaaattctcagataactctgatgactatattggtgttttacaagggttrggacaatcctttgatctgacatggagagatacaatgttactgctagatcagacactaaccccaaatgagagaagtgccaccataactgtagcccaagagtttggcgatctctggtatctcagtcaggtcaataataggatgacaacagaagaaggagagcaattcctcacaagccagcaggcagttcctagtgtagactctcactgcgacacagaatcagaacatggatattggtgccacagacatttgctaacttgcgtgctagaagg

SEQ ID NO: 412892 - DNA, 610 bp, Homo sapiens
tgatgcagttgtctccaaaattggtggaggtgggtgtatatgtaggttaaatgactcctcaaagattcttattcttaagcatttatgattaactttttgaaaaaagtcttacaaatgacttcatgctgtcctaatatttttaatgtaggataatgtgaattttaatttattggaggagtgyatttaaaaataacttcaaaaatgaatgttcagacacttttagagtgtagaagggcatatctttgaattttgaaaagattgaacatggtttactaaatgtatttctgggcttgccctagttgaagctgctgtttagttatgttttgtatttctaaaattaagcgaatttggaaagaatttttttcatgtgaaagctttgattttgggcaatattgatagttgcaaacttaatgcccatcatctttgcccaaaagtttaaagaaaagctttctgataattatagttactcaacaagtcaaatgatagataatggtaatagaaataaaagcaatccactgactgaattatacaatatgattctttgaaaagtgatatagttagagaataactgaagtagaaatacaataaaatagataagaagaaagataga

SEQ ID NO: 412893 - DNA, 572 bp, Homo sapiens
ccagcacaaaaatagatcgccatttttccatttagaagttactcacagaaaggaagagaaaaggagccttacttacttattttgatctctagtraagaaattagatgatatttttccataagaggtcatatcctactatgttatgcatgtattataatgatttcctcccaggatgatcccagaattaacaacaattatgctgcttttcctcaacacgtaaatttatttcgtatactgcttaaggtagtaagaactgtgtggaaggttattttagataccttatccagggctggtagttaagtgatttttacctcattccttcaaatttcagaaagtggatgaagagtaatcaagtcctttaaattcactgaagagtgctttctctcaagtaggtaggaattggtaaattatttatataagtcaaatgaagccttgcagtcctgtactaaaacactatttagtgggaatagaatgtaggaagctctagaaaatcaatttgccacagtactcttatttgaaaaccagccccatgctaagactgtacagttatgtgagacttaacccccagtccc

SEQ ID NO: 412894 - DNA, 613 bp, Homo sapiens
atcctactatgttatgcatgtattataatgatttcctcccaggatgatcccagaattaacaacaattatgctgcttttcctcaacacgtaaatttatttcgtatactgcttaaggtagtaagaactgtgtggaaggttattttagataccttatccagggctggtagttaagtgatttttacctcattccttcaaatttcagaaagtggatgaagagtaatcaagtcctttaaattcactgaagagtgctttctctcaagtasgtaggaattggtaaattatttatataagtcaaatgaagccttgcagtcctgtactaaaacactatttagtgggaatagaatgtaggaagctctagaaaatcaatttgccacagtactcttatttgaaaaccagccccatgctaagactgtacagttatgtgagacttaacccccagtcccttcattcaatacagtacctctcttttggaagccaggagagggcttcctacagaaaaagagctcaattttggtcttaagaatttgtatttgaataaatgaattaaaattatctacaaccaatccctgctcagtctagtatttcacataatagctttagttttctttttttt

SEQ ID NO: 412895 - DNA, 624 bp, Homo sapiens
cagttaccaacgatgaggcagcagttgtggtgattatgaattattgccttaaccaatttattttgctgtatttttctttttatatacgcaatagactaatatgttaaaaaagatctctgtcaaagtaagactaaatggctcttaraataaatgtaaactatttttaaattatgggaaagcaacttgtcacaatttaattgtcagtgattttctcctattggaacataaaatagtgtgtttaataacactttagattcaataaagtacaatatgcattatgcccatacaatgtccatgcaaatctattaagtaaaaaagcaccagtgcgacatttctcattgtgcctactacattgtaaatttcttgccaactggatcatctttatatcccaatatcacccagtgtagtgcatgcaagtgacagatactgaataaatctctgttgaatgaaacatgtaatgagactgattttcttatattcccagaaagagaaatttaaaacaagagttccaaaaatattttaccaagtgtcagcatcattataattattgtagaacttcctgtgataatgaccttgctcaaaatatcatgctaattttaatgtatttatcataaggagcaatgg

SEQ ID NO: 412896 - DNA, 599 bp, Homo sapiens
ttggatctttacttatttgttccaatacttcccaggataacaaatgtcacttacatgtgtgataaaaaagaatctaattgagacccattccctaatcacatcccctgcaaactatactttacttatgatctattaatcaataaaactttagcgccttcatttaagttgatgttccaatggacatctgagagtctctattggtaaatggaatagggagggcttgatgcgagatggataataaaattggttttcaaaagatagacctaactatatgagatctagacagctgatgagggaagagtgggtcttaagagggcaacattacctgtgactgactccaagtcaccaaatattctaatatagtttacaagtttcagaaaatcactttggagtagtaaatcaaacaattagcagttgtgataygaaaaagaaaaaagaagttgctgagaaaataaacacaatgggaatggaagttgaggacctattttaggtagaatagtaaggactacatttttgaaaaggtaacatgtagattgagaccagaggattcagtggtgtcagtcatgagagatgcaggagtgagagagaaaatacatggg

SEQ ID NO: 412897 - DNA, 560 bp, Homo sapiens
ccatcagacttacaaggagaaaactatcctcccttcctgcatggcagaaaatttccattattcctgacttatacaaacaacattcaagcccaccagatctagctttcagtatactaatggaagctttcaatatttagaaaatccatactccctctacaaaccctaactgtggggctttttacttttcattttttacttgtactaaacccagattccagagaactcgaaatrgtttacaaggaaggagtctcagaaacccatcagcattccattccctcctcatccaggaggatatatttattgcagagaaggaatatggagtgttcattaaatgtttcttttcttggctatggtgggccatcagatagtcctctgtgtcatggtcaaaacaaatccatctgcttctatacttccaaagttctgggcaatggtgggctgatatggcttttatcccatgttgaaagacatcctcaagatccataaaattagtgactagctggtaaaacatttgtaaatcttgtcacactggaagcaggctaggatttcagagccagaaaata

SEQ ID NO: 412898 - DNA, 616 bp, Homo sapiens
aatcttgttatgggacaccatttccttcccacacagctgtcagtcaagagtgacccttaaccaaactttttctttcatttatatctaatccagtgacttcwaattttactgcacataagaatcacccaggaaggttttctaattctcaacatccagatcaaaaccccatactaattaaatcagaatgtacagggatagaagccaggtatcaatatccaatatcttttaaagcttctctcctagatgggtccaatgtgtaataaagtttggaaaccactgatatagcccaacaatgattaaccatctctctctctcgctctctctttctcaattgctctcttttctctttttctcacaaatgacctatgaaggatgaatcttggaactggccacaggaggctttttccctggcatgaatttactatttttctaaagtttatccccctttgcactgtcttccaaagttaaatgatagacttggatgctttaaaaaagaatacatttaaaagacaaaaaaaaattcttaaaatttttacatttatattaggaaaatctaagataatttagttattcagggtaaataaaatcacgactagtaatttactgccagaaaaac

SEQ ID NO: 412899 - DNA, 616 bp, Homo sapiens
aatcttgttatgggacaccatttccttcccacacagctgtcagtcaagagtgacccttaaccaaactttttctttcatttatatctaatccagtgacttctaattttactgcacataagaatcacccaggaaggttttctaattctcaacatccagatcaaaaccccatactaattaaatcagaatgtacagggatagaagccaggtatcaatatccaatatcttttaaagcttctctcctagatgggtccaatgtgtaataaagtttggaaaccactgatatagcccaacaatgattaaccatctctctctctcgctctctctttctcaattgctctcttttctctttttctcacaaatgacctatgaaggatgaatcttggaactggccacaggaggctttttccctggcatgaatttactatttttctaaagtttatccccctttgcactgtcttccaaagttaaatgatagacttgsatgctttaaaaaagaatacatttaaaagacaaaaaaaaattcttaaaatttttacatttatattaggaaaatctaagataatttagttattcagggtaaataaaatcacgactagtaatttactgccagaaaaac

SEQ ID NO: 412900 - DNA, 498 bp, Homo sapiens
ttgcggtgagctgagactgcacggcgctccagcctggacaacaagagtgaacctctgtctcataaaagaaaaggtagttgtggctatttgagcataattatgtatattttatgcacaggaattatttaagccatctcagtttggaaattgaaagttacctactattgtatgtaatgcctctatcggcatggtaaggtttttgttttaaagacatctaaaatcttgagcatatcagyttcgtacactactgaagtaacacatctgatccttgttttaaatttcaccaaagtatgtctctgtttcttgagaaagctgatgtcctgcagtctatttattgctttcagaacctggatttttccatcaggagagtgggatacttttctcttctttttttttttttttttttttgtttcagtagataaagggggactccaaatgagcagttactacatgcaatttttgttacaatatctgatcttgtccactcttaatgaaatt

SEQ ID NO: 412901 - DNA, 498 bp, Homo sapiens
ttgcggtgagctgagactgcacggcgctccagcctggacaacaagagtgaacctctgtctcataaaagaaaaggtagttgtggctatttgagcataattatgtatattttatgcacaggaattatttaagccatctcagtttggaaattgaaagttacctactattgtatgtaatgcctctatcggcatggtaaggtttttgttttaaagacatctaaaatcttgagcatatcagcttcstacactactgaagtaacacatctgatccttgttttaaatttcaccaaagtatgtctctgtttcttgagaaagctgatgtcctgcagtctatttattgctttcagaacctggatttttccatcaggagagtgggatacttttctcttctttttttttttttttttttttgtttcagtagataaagggggactccaaatgagcagttactacatgcaatttttgttacaatatctgatcttgtccactcttaatgaaatt

SEQ ID NO: 412902 - DNA, 509 bp, Homo sapiens
acaacttacaaaagtaacacaaaagaaatagaaaattagaagattgctatactagaaaagaaatggaatctgtaatcaaaagtttaccacaaaaaaaatctccagacctagatggctttactggtgaattcctccaaacactttaaaagatataatatgaattccacataaattcttctagataacaggaaaaaaagaacacttcccaattcattttataaagccagcattactgaaacctgacaaatgcaattcaggaagaaaatgtataggccaatttccctcatgaaaataggcaaaaataattctaaacaaaatattaggaaataagatccagtagtatataaaagaaaacatatcatgaccaattgagatttattcaaagaatacaatcccaaattaatmagtataatttaccacttcaacgaagtaaaggagaaaaatcataaaatcacatacatacatacaggtaaaggtatttaataaagttcaacatccacttatgattt

SEQ ID NO: 412903 - DNA, 608 bp, Homo sapiens
gattttattttgttttggtttggtttggtttggttttggtttgagatggggtctcactctgtctcccatgctggagtgcagtggtgcagtcatagttcactgtagccctgaattcctagactcaagtgatcctcctgtctcagtctcctgagtagctaggactacagatgcacatcacctcacctggctaattttttttactttttgtagaaacatgatctcgctacgctgyccaggctgatcttgaacaccttgcctcaagcgatcctcctgccttggcctcttgagtagctgagatatcatgtgggagccactgtgctcaagtaggggcattttttttataaggagacactatggtatagaaagaagtattttcttaaataatggtgctctgttaattagatacctatctagtaattaaataattcttgattccatctcacttcatacacaaatatccattctggatagactgtagatctaaatttaaaacatcaaagaataaaacttatagaaaacaaattttttaaaatccttgtgaacctgtgataaacaaagaattcttaaataagacataaaaagcactaattataaattaaaagataaat

SEQ ID NO: 412904 - DNA, 312 bp, Homo sapiens
tgtgatatattacatatatgtaatatgtgatatgtaatatgttacatatgtgtgatatgcgatatgtaatatgttacatatatgtagtgtgtgatatgtaatatgttacatgtrtgtgatatgtaatgtgtaatatattacatgtatgtgatatatgtgtgatacatatgtaatatattataaaatatattatatataatatatgatacattatatgtattatataatatataaaatatatattatagcatatattttatatatactatagtatatatactatataatacatatatattatatatgtaacat

SEQ ID NO: 412905 - DNA, 312 bp, Homo sapiens
tgtgatatattacatatatgtaatatgtgatatgtaatatgttacatatgtgtgatatgcgatatgtaatatgttacatatatgtagtgtgtgatatgtaatatgttacatgtatgtgatatgtaatgtgtaatatattacatgtatgtgatatatgtgtgatacatatgtaatatattataaaatatawtatatataatatatgatacattatatgtattatataatatataaaatatatattatagcatatattttatatatactatagtatatatactatataatacatatatattatatatgtaacat

SEQ ID NO: 412906 - DNA, 654 bp, Homo sapiens
  misc_feature (1)...(654): n = A,T,C or G
nnnnnnnnnnnnnntatctgagactgaggaaacacagacttttcctcttagttccctgaaacttcttcccccttttctctagctgtrtaaaaactctctgtttcatctttctgttaagacaaattttgaggctgggcgtggtggctcacacctgtaatcccagcactttgggaggccaaggcagttggatcacctgaggtcgggagttcgagaccagcctgaccaacatggataaaccccatgtctactaaaaaaatacaaaaattagctgggcctggtagcacatgcctgttatgccggctactcgggaggctgaggcaggagaactacttgaacccaggaggccgagattgcagtgggccgagatcgtgccactgcactccagcctgggcaacaagtgcaaaactccatctcaacaacaacaacaacaacaacaaaaaacccagacaaatttgagagttcttgctctcctgccttcttgctttggccaacttgaacacatctctgcatctccaagcaccaatatcttagtgttcggctccagctatgcactgggtacacagtcgtgaatttggggttgtacaacatttgcatactgtactcattcagtggtcactagtaatttgcctcccagctcagtgtagctaactagat

SEQ ID NO: 412907 - DNA, 558 bp, Homo sapiens
gatgcatgcttgcccaatagattttaattgtttttgcatgattgttcgtatcttaacattaatacactatttttaaagcggttttagtttcacagcaatattgaacagaaacaaagtattcccttaaaccttcttcctttccccacaaactcccccactaacatccctcaccacagtggtacatttattacaactgatgaaccttatattgaygcaatgttaccacctagagtccataatttacatcagggttcactcatggtttttcacattctatggatttggataaatgaatgatgacatgtgttcatcattgtaatatcgtgaagaataatttcactgatctaaatatcccccgtgctctgcctattcatttctccctctatgctaactcctggcagacaccaatatttttactatcttcatagttttgtcatttccagaatgtataataattggattatacagtgtgtagcatttttttcaggttggcttctttcacttagcaatatgcatttaagttttcttcatggctttccatggctttatagttctttt

SEQ ID NO: 412908 - DNA, 523 bp, Homo sapiens
gtgagggaatgcacaggtcatttaggaatttagcaaaaaatagtttacagagtgaaggtctttatgtgctgagactgagagccaaccacagcaattccatgatgactggataattgtaggctttacacacacattccagacactccccaggccctattacaagcacaattagargcatccttatgtgatagaatagcattcctcattggaattgtgactagttgtggagagttgtcatgggtgcataaaaagaaagtcttagaatttttgaaggtagaaagggaaaccctagtgcctcttttgatggatttaaatataagatgtcagtcaaatggaaacaagacttgaaaaccactatgagagatgggcagatcacgagatctttgaattaagagctctggactcaagattatctatttgctgtctaatgttggataagtgaattacatgccttcttggacgagttgtcagacaggtgaacatctggctcacaaaagccccagtattaaatggaaaaaaaagt

SEQ ID NO: 412909 - DNA, 605 bp, Homo sapiens
gaagcctgggagctacactccctagactcccttgccagtagggttttgaatttawgtggggttccaccaaggagacaccctgccacaagatttagaaggcagacaaagcagaagccatctctatgacagtgggtgtaagtgtgggtctcccaggcatgaatgtttgcagtagtttctgcattctcctgccattcacctttctggatgatggagttatagaatctgcagcagatttctgcaggtcactgactctggatggcagtacctctgtctctgtagcacgaaacctacaactaatatattttgccagttcaggctcttaatggttttgcaagcacctaattctaacctagctaataaataataaattctggcttttattgggaattctactgccatatggagctagggaatcaagatctggctcttgacacttcttaccatatagaaggcaagatattagaatagtttttagcacttaaaatgaatatgtcaaatgtttacttgcaactaaacctgatatgcaaccttgttaacttcattgtttttctgctgtgtaatgtgatattttaaaaatattggattaaacagtttaagtacatcct

SEQ ID NO: 412910 - DNA, 605 bp, Homo sapiens
gaagcctgggagctacactccctagactcccttgccagtagggttttgaatttatgtggggttccaccaaggagacaccctgccacaagatttagaaggcagacaaagcagaagccatctctatgacagtgggtrtaagtgtgggtctcccaggcatgaatgtttgcagtagtttctgcattctcctgccattcacctttctggatgatggagttatagaatctgcagcagatttctgcaggtcactgactctggatggcagtacctctgtctctgtagcacgaaacctacaactaatatattttgccagttcaggctcttaatggttttgcaagcacctaattctaacctagctaataaataataaattctggcttttattgggaattctactgccatatggagctagggaatcaagatctggctcttgacacttcttaccatatagaaggcaagatattagaatagtttttagcacttaaaatgaatatgtcaaatgtttacttgcaactaaacctgatatgcaaccttgttaacttcattgtttttctgctgtgtaatgtgatattttaaaaatattggattaaacagtttaagtacatcct

SEQ ID NO: 412911 - DNA, 627 bp, Homo sapiens
ggggttccaccaaggagacaccctgccacaagatttagaaggcagacaaagcagaagccatctctatgacagtgggtgtaagtgtgggtctcccaggcatgaatgtttgcagtagtttctgcattctcctgccattcacctttctggatgatggagttatagaatctgcagcagatttctgcaggtcactgactctggatggcagtacctctgtctctgtagcaygaaacctacaactaatatattttgccagttcaggctcttaatggttttgcaagcacctaattctaacctagctaataaataataaattctggcttttattgggaattctactgccatatggagctagggaatcaagatctggctcttgacacttcttaccatatagaaggcaagatattagaatagtttttagcacttaaaatgaatatgtcaaatgtttacttgcaactaaacctgatatgcaaccttgttaacttcattgtttttctgctgtgtaatgtgatattttaaaaatattggattaaacagtttaagtacatcctatttctctaaccgaatgcacccataaaacccataaagaatgcctggagcagctatatgaaaattctgaaagtaagtaag

SEQ ID NO: 412912 - DNA, 610 bp, Homo sapiens
ggctcatgcctgtaatcacagcactttgggaggctgaggtggacagatggcttgagcccaggagtatgagaccagcctgggcaacatggcaaaacctcatctctacaaaaaaatatgaaaactcatctggacatcatggcacatacctctagtcccaactacccaggagggtgaggtgggaggatctcctgagcccatggagrtcgaggctacagtgagcgatgatcgtgccattacactccagcctgggcaaccgtgagactctgtcaaaaaaaaaaagaaggaaataattatttctctcctggctgtctttgctcttaacaatgacatttttaaatggatgctttaaaaggaaaataggcagtagaaattgtggaagctttccagaacaattgggagttagaggtaaatctctgataacatttccattttttgtcctggtttcaattacatgatagctttctgttattttttacctataaaatgaagttatttcagtaaaaacttacacaccactgttgtcagagaataatttcccctagtaaatataaatgttatgcataacattaatatcagatctaataaggattgaaaatttatcatcttgttc

SEQ ID NO: 412913 - DNA, 610 bp, Homo sapiens
ggctcatgcctgtaatcacagcactttgggaggctgaggtggacagatggcttgagcccaggagtatgagaccagcctgggcaacatggcaaaacctcatctctacaaaaaaatatgaaaactcatctggacatcatggcacatacctctagtcccaactacccaggagggtgaggtgggaggatctcctgagcccatggagatcgaggctacagtgagcgatgatcgtgccattacactccagcctgggcaaccgtgagactctgtcaaaaaaaaaaagaaggaaataattatttctctcctggctgtctttgctcttaacaatgacatttttaaatggatgctttaaaaggaaaataggcagtagaaattgtggaagctttccagaacaattgggagttagaggtaaatctctgataacatttccwttttttgtcctggtttcaattacatgatagctttctgttattttttacctataaaatgaagttatttcagtaaaaacttacacaccactgttgtcagagaataatttcccctagtaaatataaatgttatgcataacattaatatcagatctaataaggattgaaaatttatcatcttgttc

SEQ ID NO: 412914 - DNA, 610 bp, Homo sapiens
ggctcatgcctgtaatcacagcactttgggaggctgaggtggacagatggcttgagcccaggagtatgagaccagcctgggcaacatggcaaaacctcatctctacaaaaaaatatgaaaactcatctggacatcatggcacatacctctagtcccaactacccaggagggtgaggtgggaggatctcctgagcccatggagatcgaggctacagtgagcgatgatcgtgccattacactccagcctgggcaaccgtgagactctgtcaaaaaaaaaaagaaggaaataattatttctctcctggctgtctttgctcttaacaatgacatttttaaatggatgctttaaaaggaaaataggcagtagaaattgtggaagctttccagaacaattgggagttagaggtaaatctctgataacatttccattttttgtcctggtttcaattacatratagctttctgttattttttacctataaaatgaagttatttcagtaaaaacttacacaccactgttgtcagagaataatttcccctagtaaatataaatgttatgcataacattaatatcagatctaataaggattgaaaatttatcatcttgttc

SEQ ID NO: 412915 - DNA, 610 bp, Homo sapiens
ggctcatgcctgtaatcacagcactttgggaggctgaggtggacagatggcttgagcccaggagtatgagaccagcctgggcaacatggcaaaacctcatctctacaaaaaaatatgaaaactcatctggacatcatggcacatacctctagtcccaactacccaggagggtgaggtgggaggatctcctgagcccatggagatcgaggctacagtgagcgatgatcgtgccattacactccagcctgggcaaccgtgagactctgtcaaaaaaaaaaagaaggaaataattatttctctcctggctgtctttgctcttaacaatgacatttttaaatggatgctttaaaaggaaaataggcagtagaaattgtggaagctttccagaacaattgggagttagaggtaaatctctgataacatttccattttttgtcctggtttcaattacatgatagctttctgttattttttacctataaaatgaagttatttcagtaaaaacttacacaccactgttgtcagagaataatttcccctagtaaatataaatgttatrcataacattaatatcagatctaataaggattgaaaatttatcatcttgttc

SEQ ID NO: 412916 - DNA, 611 bp, Homo sapiens
aaaacagtgtgacaattcctcaaagaccaaaagacagaattaccttttgacccagcaatcccattctgggtatatacccaagggaatataaatcattccatcataaaggcactagcatgtgtatgttcactgcagcactatttacaatagcaatgacatggaatcaacctaaatgcccatcaacgatagactagataaagaaaatgtggtacatatagaacrtggaatactatgcaaccatgaaaaagaatgagatcatgtcctttgcaggaacatggatggagctgaaggccattatcctcagcaaactaaagcagaaacagaaaaccaaatacttcatgatctcacttatatgtggaagttaaataatgaggacccatggacacaaagagggaaacaacatacactggggtctgctggagagtggaggttgggaggagggagagaatcagaagaaataagtaatgagtactaggcttaatacccgggtaataaaataatctgtacaacatactaccatgacagtttacctatacaatacacctgcacatgtacccctgaacttaaaagtttttttaaaaataaaaaatgaagttcttaacatgtttttt

SEQ ID NO: 412917 - DNA, 453 bp, Homo sapiens
tgataatggtgaggcaaccagcacataattagttgttaacatttatttagcacatattaaataccagacattgctctaaatgccttaygtacattagcccatttaatcatcacaataatcctagaaggtaaatgcttttattttcttctctgtacagatgatgaagctgattcaaagcatagtaacttcatgtctcagacttactaagtatcagggccagaattagcacctgattactctccagatcatttcctaaaccacctgctacactgctttgcattgccagaaaacagacctaaaatctatacatacatcttttttctcctttcctttcacagtcatttgttaacatatttatgccacctttaattcaatatgattaaaactagactgtgaagttgtttctttaactggctttctatatctgcaacttccattgccattctccaaatt

SEQ ID NO: 412918 - DNA, 328 bp, Homo sapiens
gaaaatttcccttaagcttcaatatttgaaacctttaaaatgtaatgaggctattacaatagaatagtcataaattaacacttataaaagtactatatatcaaaatgtatgagatgcagctaagtggcatttagaggtaaatttattagaatcgaatggatatattaaaaactaaatgactgaaaattaaatctttaaatcaagatataaaataacaagaatattctgaagaaaaaaatawgcaataaagattagaataaaaatcaatgcaatagaaaataaaagaaacagcagagggcattcacagttgctttttaacactgatatt

SEQ ID NO: 412919 - DNA, 584 bp, Homo sapiens
caaaattagtagaagaaataataaagatcacagcagcaataaatgaaattgcaacaaaaaagaatagaaaagatcaacaaaatggaaagttgttttttaaagataaataaagttgacaaaagttgagacagactaagaaaaaaagagagaagacccaaataaataaaatcagattgaaaaattagacatcacaagtgatacaccagaaattcaaaggatcattatagacttactatgagtagctatgtgccaataaattggaaaacctggaagaaatggataaattcctagatacatgcaatgtaccaagtttgaaccaggaaaaaaaatttcaaaacctgaatagaccaataatwagtaacaagacggacaccataataaaatgtctcctagcaaagaagagtccaggaactgatggcttcactgttaaattttaccgaacatttcaataaccgataccaatcctactcaaactattctgaaaaatagaagagaagggaatgcttccaaactcattctatgatacaaatattacactgatggcaaaactagacaaaggcacataataaagaaactataggcca

SEQ ID NO: 412920 - DNA, 581 bp, Homo sapiens
cctgagcactccttggtctgctgtcctctcttggggccccagcctggccatgcatgtttatagggcagtcttgggtaccctggaggccctcctcatagcttctgccctggtgaactgtgactgactggaggagggctccagtgaggtggctcctacagccacacacccgtcctcacatttcctcccyatactatagcttccccaagcccacatcaattccccacatcactttgctgacacatgtctgcaggggcaggttttgttttacttgcccagccagcacacgggagtgcaataggcccctccactcctgctaactgccactgcagacaaagccttggtggacacagagccagcaagccctgtccccaccagcacccctcccttgtgctacactgcagaaagaacaggggatcctctcacaccctgagagatcactcctgctcgcaaggcacagagaaggcacccagacctccaatggccagcaccccaccccaagccaacaccaactccagggcaataatgcaaacaggattatgtaaagagactgaatctacaactgattgttctacttgaaagag

SEQ ID NO: 412921 - DNA, 555 bp, Homo sapiens
ttgggtaccctggaggccctcctcatagcttctgccctggtgaactgtgactgactggaggagggctccagtgaggtggctcctacagccacacacccgtcctcacatttcctccccatactatagcttccccaagcccacatcaattccccacatcactttgctgacacatgtctgcaggggcaggttttgttttacttgcccagccagcacacgggagtgcaataggcccctccactcctgctaactgccactgcagacaaagccttggtggacacagagccagcaagccctgtccccaccagcacccctcccttgtgctacactgcagaaagaacaggggatcctctcacaccctgagagatcactcctgctcgcaaggcacagagaaggcacccagacctccaatggccagcaccccaccccaagccaacaccamctccagggcaataatgcaaacaggattatgtaaagagactgaatctacaactgattgttctacttgaaagagatggggaaaatgaaaccaacttggaaaacatatttcaggatatc

SEQ ID NO: 412922 - DNA, 581 bp, Homo sapiens
cctgagcactccttggtctgctgtcctctcttggggccccagcctggccatgcatgtttatagggcagtcttgggtaccctggaggccctcctcatagcttctgccctggtgaactgtgactgactggaggagggctccagtgaggtggctcctacagccacacacccgtcctcacatttcctccccatactatagcttccccaagcccacatcaattccccacatcactttgctgacacatgtctgcaggggcaggttttgttttacttgcccagccagcacacgggagtgcaataggcccctccactcctgctaactgccactgcagacaaagccttggtggacacagagccagcaagccctgtccccaccagcacccctcccttgtgctacactgcagaaagaacaggggatcctctcacaccctgagagatcactcctgctcgcaaggcacagagaaggcacccagacctccaatggccagcaccccaccccaagccaacaccaactccagggcaatartgcaaacaggattatgtaaagagactgaatctacaactgattgttctacttgaaagag

SEQ ID NO: 412923 - DNA, 598 bp, Homo sapiens
caacttccattgccattctccaaattctcgaggactcttgctcccaaagcctgtaaggaataggaaactaattttaaggaggactgtgcagaagttgtggctcactggttcttcattggctaatttacagtgtatccctagaatttatcctagaatttggtcactgcaatagcctccttctgggtaccctaatgtccattccatgattctgatgtttagagtaatctaatagatacagattaattggtgagcagtaggaagacactgaatggcagtctgagtgaaaaacttcaatctttctaatatatcttaagatcattcatatatgatagttctttactattcagtcaaaattccttgggttgaaattgtacattctaaagtaggttcaacctctttacaactttattttcatgtacttctctatctccagtacatttacagtcttctagccattcttagcaaaagcaccaagctggaaaggaataataacatcctcccctgataaacaactgcctttttacacaaagttatctcctgayccttttaagtcttaccatctcagttcatgccaaaataactttgataactttgatag

SEQ ID NO: 412924 - DNA, 645 bp, Homo sapiens
ctagaaaaccctatagtctcagcacaaaagttccttaagcttataagtaactttaggaaactctcaggatacaaaatcaatgtgcagaaatcactagygttcctataaaccaacaatagtcaagctgagagccaagtcaagaatgcaatcccattcacacttgccacaacaagaataagatgcctcggaatacagctaactagggagatgaaaaatctctacaaggaatacaataaagcactgctcaaaaaattagagacgacacaaacaaatgaaaaaacattctgtgctcatgaatacaaagaatcaatgttgttaaaatggccatattgctcaaagcaagttataaattcaatgctatgcctattaaacttgagattcttcacagaactagaaaaaactattttagaattcacatgaaaccaaaaacgagcctgaatagccaaagcaatcctaagcaaaaagaacaaagctggaggcatcatactacctgatttcaaactatactacagggctacggtaaccaaaacagcatgatactggtacaaaaacaaacatatagaccaatagaacagaatagagagccagaaataagaccacacacctacaactatctgatattcaacaaacctgacaaaaacaagc

SEQ ID NO: 412925 - DNA, 645 bp, Homo sapiens
ctagaaaaccctatagtctcagcacaaaagttccttaagcttataagtaactttaggaaactctcaggatacaaaatcaatgtgcagaaatcactagcgttcctataaaccaacaatagtcaagctgagagccaagtcaagaatgcaatcccattcacacttgccacaayaagaataagatgcctcggaatacagctaactagggagatgaaaaatctctacaaggaatacaataaagcactgctcaaaaaattagagacgacacaaacaaatgaaaaaacattctgtgctcatgaatacaaagaatcaatgttgttaaaatggccatattgctcaaagcaagttataaattcaatgctatgcctattaaacttgagattcttcacagaactagaaaaaactattttagaattcacatgaaaccaaaaacgagcctgaatagccaaagcaatcctaagcaaaaagaacaaagctggaggcatcatactacctgatttcaaactatactacagggctacggtaaccaaaacagcatgatactggtacaaaaacaaacatatagaccaatagaacagaatagagagccagaaataagaccacacacctacaactatctgatattcaacaaacctgacaaaaacaagc

SEQ ID NO: 412926 - DNA, 645 bp, Homo sapiens
ctagaaaaccctatagtctcagcacaaaagttccttaagcttataagtaactttaggaaactctcaggatacaaaatcaatgtgcagaaatcactagcgttcctataaaccaacaatagtcaagctgagagccaagtcaagaatgcaatcccattcacacttgccacaacaagaataagatgcctcggaatacagctaactagggagatgaaaaatctctacaaggaatacaataaagcactgctcaaaaaattagagacgacacaaacaaatgaaaaaacattctgtgctcatgaatacaaagaatcaatgttgttaaaatggccatattgctyaaagcaagttataaattcaatgctatgcctattaaacttgagattcttcacagaactagaaaaaactattttagaattcacatgaaaccaaaaacgagcctgaatagccaaagcaatcctaagcaaaaagaacaaagctggaggcatcatactacctgatttcaaactatactacagggctacggtaaccaaaacagcatgatactggtacaaaaacaaacatatagaccaatagaacagaatagagagccagaaataagaccacacacctacaactatctgatattcaacaaacctgacaaaaacaagc

SEQ ID NO: 412927 - DNA, 509 bp, Homo sapiens
tcaggaagttctttatagcagtgtgagaaaggactaatacattcttcctccagcacctttctctgttcatgtggcctctcgctctagtagggtacttgactctttgaaatggtagctgtgttccaagcaggtaaaaattgatgctccaaaacttcrtaatgcctacatccacaattaatacaaaattacttcagctgcattcaatctgtcaaggcaagtcaaaggaccaggcaaaattcaggaagaggaaaggggaaagaagttcccctttcagcagacaagaggcacacatgcattgggatgagagtaatcactgacagtcaactttgcagaaaacctaccacacaaaggtttacttttgctttgcttcagtaagacatatcaaaagtattttccagcaaaagtactgtatgaaaaccattatcattttcctttctttctatatactgccacatggtagtttgattgcaaaagtgtatctcactctgtgtttctcaaaattataaata

SEQ ID NO: 412928 - DNA, 585 bp, Homo sapiens
tcccccagggccttgagaagtagtatggccctattgacacatagacttcaatcttctggcattcataatagtgacagaataaatttatgttgttttaagccacccagtttgtgataactggttatggtatcccaggaaactaatacatagttttttaatcaaaatcttattgaaaatattttttaatttactatttttaaaaaatttttattcctagttcatctgacttcagaggcacttcatattgcagaagaaaataagaggggtgaaagaccttgcatttattttaaatttactgatactctcttaacaagaatatgtgaatcttagttcctgaatttttwaaattgccctcatcactcttgcatctacagatataggactcaaataatctcatcacttatattccgaatagcatctctgtagtctcatatacttatggcaagaaattaacacaaaagtaaaatatttaattggtcccatggcttaaataagtcttccttaaagagtgacacctataccagcaacatcagtatcatttcagaacttgttagaaatgcaattcctggataccactcctgacct

SEQ ID NO: 412929 - DNA, 575 bp, Homo sapiens
ggtttagctgggagtggtggcctgcacctgtagtcccagcttctcaagaggctgaggcaggaggatcacttaagcccaggagttcaacattgcagtgagctgtgcttgtaccactgcattctaccctgggcatcagagtgagaccctgtctttattttaaaaaaagaaaatatacaaatggtgagcaagaacatgaaaatgtgttcattatatataaaaatataataaaattcagaatataatatgttattattatatcataacagaatataataatataataataatgacagaatattatacagaatgtataccacaatttatttattcaktcttctgttgatagacattttggttgtttccacatttggctactgtgactagtactgcaatgagctgaatatgaacatattattattacataaatatgctacaatatagatgaaccttgaaaatattacactaaatgaaagaagccaggcacaaaagatcacatattataaatatgataaattaaagaagatggaacaatttgatttaaatatgcatagtaataattttcatatttattatct

SEQ ID NO: 412930 - DNA, 464 bp, Homo sapiens
aacagatagtcacatatattatcattttccaaaacatcctctctcctggaagccaatgttaccacttggccttccaaaggccatgtgaccagccattamtaacaaactcagatcaaccatatcctataaagtcttaacccttgaatctcacaacagtaccatttaaagatgcgttggcatatttatttgctgaaggaatttgaagatctgaggtagcctagaagaagaagttgtttcaagggacatatttctttcagaagttacgttgtctgctttcaggaggacctgagactcttatgttttatgttcaacaattcagggagggcatttaccatttcattgtgtgtattgtagctcaaagctacttccatgatgagaaatgaagctgaatgttaactttctcatatcagaagatgacagttaaaaatttgccttgcattttaagccaatcacaacaatttata

SEQ ID NO: 412931 - DNA, 591 bp, Homo sapiens
tagctcaaagctacttccatgatgagaaatgaagctgaatgttaactttctcatatcagaagatgacagttaaaaatttgccttgcattttaagccaatcacaacaatttataagaaattcatttctgcattcaaatattcctcaatcaatgttttttaaaagaggcattttacgtaaacacatgaaataaaaattttattaggtactaaaatgctagkttttcctctctaggtaaacattgcacttgaaattttaatccatgtcttaatttaatcctacaagtaactctgctatgcaacatagaaagttggagaaatcaagcctcagaggggctaagtaatgattccattcagtataggggcttggtttctgcaattaatgtctccttttccagcaatactcataatattcccagggaaaatataatcaaattttctttgaaatcgaaatatgcatttcccagtgaacttctttttcaatttttttttattgtggtaaaattcacataacgtaaaatttaccatcttaagcaagtccaaaacttattggacttaaaacagtccaataacattaaatatgttcacaatgtt

SEQ ID NO: 412932 - DNA, 550 bp, Homo sapiens
tggtttaaaccttgatgaggaatacatacacacatttgcttttgtcttctaaaaatctcattttcaaatcaaaccaaatgcaagatggatctaaaatctgaatctcaggctcttagacaaggcaatactgctttgttattttgcttagatagcccatcaaaatacaaaccattcaagaagtcagctgctgctataaaggtcatctggaaagcccrgggaaggaccatgtgctgctgctgggaaaggaaaattgtcctctgggctcgtgagctggtgtgtttgtctgctgagtggcttcagtggttttatctgttgctgaaagagccagagaaagggataaaacaggactgtaatctacaccacaatgagctggaggagaacaggagccaagtgagtgttttgtttgtgtgctgcctcctctggcacattgaattggtgcaggaattgtatgagtttttaatcatcattcagatatgagtgatccaagcttggcattcattgggtttttatacagcttgctaataaccccaaagtgctagcatctgcaact

SEQ ID NO: 412933 - DNA, 550 bp, Homo sapiens
tggtttaaaccttgatgaggaatacatacacacatttgcttttgtcttctaaaaatctcattttcaaatcaaaccaaatgcaagatggatctaaaatctgaatctcaggctcttagacaaggcaatactgctttgttattttgcttagatagcccatcaaaatacaaaccattcaagaagtcagctgctgctataaaggtcatctggaaagcccagggaaggaccatgtgctgctgctgggaaaggaaaattgtcctctgggctcgtgagctggtgtgtttgtctgctgagtggcttcagtggttttatctgttgctgaaagagccagagaaagggataaaacaggactgtaatctacaccacaatgagctggaggagaacaggagccaagtgagtgttttgtttgtgtgctgcctcctctggcacattgaattggtgcaggaattrtatgagtttttaatcatcattcagatatgagtgatccaagcttggcattcattgggtttttatacagcttgctaataaccccaaagtgctagcatctgcaact

SEQ ID NO: 412934 - DNA, 510 bp, Homo sapiens
gtggtatactgtaaggagctgataacagtcaacattgagctataagccgagtctycttccctgaaatcactgggaagaacaaaaatgtaatgcttggctggaagagccaccacagatgaccgtctccccacagaagcctgtaaagccaccaaagtgctatctgtggaaaaacatcttgtgaaaaactcttttctaaacaaagactcagactggagccctgtgcctggattagaaagccacctcgtaaaatctcccaaagctattttttctctttcttacaaagatggtgaattgaccttttcttgtttcctagggagaacaggatgaaaaaagaaataaagtattttactaaaggtgattgagaataaataatgaagaggggaagcgggaaatctaagcttgtatgaaagggcaaaaaaattaatgcccactaaatgcattacctcatctcattaaagccatgtgagaagcagagggttttagtttcactgacaaagtgggagtagtcaa

SEQ ID NO: 412935 - DNA, 566 bp, Homo sapiens
ccatgaagaagccagaagaaacaggagaacagaagaaagattaaggaacgtgatgttgtcacagcgcatcactgaagagttgaagtggttaacactgtcaacaggaacaggcgctgttttaggaagtattatgagaatgctcagttttcatgtaggaaggaagaggggaatcgaagaatttattctaccacaaggaagaaaagcattcaatctttttctctgcccacagcccctaaagcacacaattaagttctttcgtttagagaaatttatgtgacagtgcccagaataaaagaattgcagactttataaataaactacacatgaatagtctctgtgaaatagttcagagtacagtttcttcttatctgttaatatttccacctataagaatatcacttcaaaaaacattgcttatcaaaactaaaccctgtacaaatccttamccagtatgttttgttgccttctccaaaagaaacttgagagttgaggtttggagccagttggaattccatcatcagcacttcactgggcaacattggacatgttatttaaccactatgagc

SEQ ID NO: 412936 - DNA, 524 bp, Homo sapiens
attcactaaatggagctgctataaacatctctcttagaaagtatttgccgtgtttgtaaacttcatcagtcttgccagtataccttctttactcttggaagatacttgggttgtcttcactcctgacatttgcctcctttttagatcttcacaatttcaggtgggtagaggtcactgaaacccatggtgtatcatgttttttccagggatttttttgtggttttaaaaccagtgctakgtttccagttgctcttttcctatttaataaaatatttaatttatggaattttaaagatgtggcccataattatttggcccatagttttggccaagtctgtcctcaaaagtatgtttggtgagttactttaattccaaaagtaaacttccccaccactaagtcattcaacagccatttactgagtgcttgctaattactataactatttaggcacagagtctattcattaacaaattaggatctctgtccacaagatcccagagtaatgaatctatttccccgactt

SEQ ID NO: 412937 - DNA, 554 bp, Homo sapiens
tagctgggatttcccccactgtgggtccctgccactaatgaattcaacatgtgcttgatactagttgattccctgacaccctcagctcaaggacttgtggcaccacttgtattgggacaggttccctcttgcatgacgacctacccagatcatacaccaactctcttccgaccttttccttgacatgagttgctgcttttctaccaagctaaacaygaggccatcattattagcaatttgaccagtggctttctgctgcatgggctatccaggtactcacctgacctcatgaaattcttccctgggggaataaacagctattccccattgacccagagattcttatagccaagcaaaccatgtcaccagttgctcaccaatacattgccaaaatcagaattaaaagaaagtctgatctttgcaggagtatcaatttttgtttttgctttttcttttagttctgcttttctcatcccactttctttttgctatgacccagcagcaattatcagagtgatctacataaaccaatttcaacacaacaaatggccgat

SEQ ID NO: 412938 - DNA, 597 bp, Homo sapiens
agaaagatgtcttagtcagtacaggctgctgtaacaaaaataccatagaccaagtagcttaagcaacagacatttatttctcacagttctggagcctgggaagttcagggtcaaattgtcagcaggtctggtgtctggtgagagcctgcttcctggttggcaytcattgctgtcggtgagttcagttctccagtaacaattccaagcttagagagaagagtttctcagtgatgctgctgtctggctcatgaacaaactatttattgtctaacagttggaatgtcctcaaggcccgcctgtgaaatcacgtggccttataggtttttgagggtgtgtttttgtttttgttttggctttatatagtgtatccactttcacatgcccacatctctaaactttttgatcctttcttttgctgttagcattccagcatctctactttacttggtgggtgctactgaattttccaggcatccaagaactagcatagcagtgtattaacattatttcctggggtccttgctcagtgattaaatcatgtaatgtacaaatgtgtttccaaatttgaaaaagtctccctcattcaaattatgactg

SEQ ID NO: 412939 - DNA, 597 bp, Homo sapiens
agaaagatgtcttagtcagtacaggctgctgtaacaaaaataccatagaccaagtagcttaagcaacagacatttatttctcacagttctggagcctgggaagttcagggtcaaattgtcagcaggtctggtgtctggtgagagcctgcttcctggttggcactcattgctgtcggtgagttcagttctccagtaacaattccaagcttagagagaagagtttctcagtgatgctgctgtctggctcatgaacaaactatttattgtctaacagwtggaatgtcctcaaggcccgcctgtgaaatcacgtggccttataggtttttgagggtgtgtttttgtttttgttttggctttatatagtgtatccactttcacatgcccacatctctaaactttttgatcctttcttttgctgttagcattccagcatctctactttacttggtgggtgctactgaattttccaggcatccaagaactagcatagcagtgtattaacattatttcctggggtccttgctcagtgattaaatcatgtaatgtacaaatgtgtttccaaatttgaaaaagtctccctcattcaaattatgactg

SEQ ID NO: 412940 - DNA, 597 bp, Homo sapiens
agaaagatgtcttagtcagtacaggctgctgtaacaaaaataccatagaccaagtagcttaagcaacagacatttatttctcacagttctggagcctgggaagttcagggtcaaattgtcagcaggtctggtgtctggtgagagcctgcttcctggttggcactcattgctgtcggtgagttcagttctccagtaacaattccaagcttagagagaagagtttctcagtgatgctgctgtctggctcatgaacaaactatttattgtctaacagttggaatgtcctcaaggcccgcctgtgaaatcacrtggccttataggtttttgagggtgtgtttttgtttttgttttggctttatatagtgtatccactttcacatgcccacatctctaaactttttgatcctttcttttgctgttagcattccagcatctctactttacttggtgggtgctactgaattttccaggcatccaagaactagcatagcagtgtattaacattatttcctggggtccttgctcagtgattaaatcatgtaatgtacaaatgtgtttccaaatttgaaaaagtctccctcattcaaattatgactg

SEQ ID NO: 412941 - DNA, 597 bp, Homo sapiens
agaaagatgtcttagtcagtacaggctgctgtaacaaaaataccatagaccaagtagcttaagcaacagacatttatttctcacagttctggagcctgggaagttcagggtcaaattgtcagcaggtctggtgtctggtgagagcctgcttcctggttggcactcattgctgtcggtgagttcagttctccagtaacaattccaagcttagagagaagagtttctcagtgatgctgctgtctggctcatgaacaaactatttattgtctaacagttggaatgtcctcaaggcccgcctgtgaaatcacgtggccttataggtttttgagggtgtgtttttgtttttgttttggctttatatagtgtatccactttcrcatgcccacatctctaaactttttgatcctttcttttgctgttagcattccagcatctctactttacttggtgggtgctactgaattttccaggcatccaagaactagcatagcagtgtattaacattatttcctggggtccttgctcagtgattaaatcatgtaatgtacaaatgtgtttccaaatttgaaaaagtctccctcattcaaattatgactg

SEQ ID NO: 412942 - DNA, 449 bp, Homo sapiens
tgggtagactatgtaaggtctactgtctcctcactatatttaggtacatatctgtcattatgattttccagtctgacatgtaaagagcttggaagtcatcactcatcttctcacaaaaagayaaaaactgaacaaactgaaaatcaacaactcttcttagaggcatcagataattgagagcagaccgctgctgcaaacactggagagagagtcagatactaagaatcatagtttacaggagctgaagctgaggagcagaagccagaggctggagccggtgctggtaagaacatttaaactataattgacaaattgctataggctcaatgtggataaacttgagagttacaaactctgggggcccagctctgggagggcccacatgttttttgttttacctccaagagcaccaccatgttcttttggtgaagattggagaaaaaaatccc

SEQ ID NO: 412943 - DNA, 449 bp, Homo sapiens
tgggtagactatgtaaggtctactgtctcctcactatatttaggtacatatctgtcattatgattttccagtctgacatgtaaagagcttggaagtcatcactcatcttctcacaaaaagacaaaaactgaacaaacygaaaatcaacaactcttcttagaggcatcagataattgagagcagaccgctgctgcaaacactggagagagagtcagatactaagaatcatagtttacaggagctgaagctgaggagcagaagccagaggctggagccggtgctggtaagaacatttaaactataattgacaaattgctataggctcaatgtggataaacttgagagttacaaactctgggggcccagctctgggagggcccacatgttttttgttttacctccaagagcaccaccatgttcttttggtgaagattggagaaaaaaatccc

SEQ ID NO: 412944 - DNA, 628 bp, Homo sapiens
tgagagacaggaagagctgagtagctgaagcattagaaaacagagcacaactttcctcatgtcagccaccagatctcatcatgatggtcttggattatattgtgatgtttctcagactgtagagaagcgaaaaattacattgctgctattgagtagtcagaaaaaacactgaagaatcaaggaaacttagttttctcagattcaaatctctggaggtttctccattctaggtgakgatcatcctaaccatgctaaaagatagaatgatgaaacacacagagagtatcagagcgaggttgtgaaacagaaagatatatagactcttagctgtgtctgaaagactgtcagatagtaggggttgagctacaaggtttgaaaaacctgttgctcagttgtagacatgaagaggagattcacgttgactttggtttacctttcacatgtaaaaagcttggaagtcaccactcccatcctaaaaacaagaaataaatctgagaagacttaaaaaatcaatgacatttattagaatcaccagagacttgagctcacaagacagaccaccacctcgaaatctgaagagacagatgaatacaagtaactgcagctgaaacttttgtaccagaaacga

SEQ ID NO: 412945 - DNA, 541 bp, Homo sapiens
acaaacctagatggtgctatacacctagagtatatggtacaccctattgctaataggctacaaacctatacagcacattgccawacagaatactgtaggcaactgtaacacaatgataatgtgtatttatggtacacaaatacttgtgtatttaaacatatctaaacacagaaaaggtaagtaaaaatatattacaatctcaagggaccatcatcatatatttggtccatcacagactgaaaggttgccatacagggcatgactgtatatatccacacacactaacctttaaagcatattttttgtaatttttccaaatttgagcaactccttacactgactctgacatatataaattactgattccaacaagtctttttaagaagtacaaataatatcttagttgataggtgacagttacacaactgtatgcctttgttaaaattcatagaactacacgcataaaagtgccaattttactagatgtaaattacacatcaataaacctgacttaacaaaaagacaagtaacatattttatc

SEQ ID NO: 412946 - DNA, 541 bp, Homo sapiens
acaaacctagatggtgctatacacctagagtatatggtacaccctattgctaataggctacaaacctatacagcacattgccaaacmgaatactgtaggcaactgtaacacaatgataatgtgtatttatggtacacaaatacttgtgtatttaaacatatctaaacacagaaaaggtaagtaaaaatatattacaatctcaagggaccatcatcatatatttggtccatcacagactgaaaggttgccatacagggcatgactgtatatatccacacacactaacctttaaagcatattttttgtaatttttccaaatttgagcaactccttacactgactctgacatatataaattactgattccaacaagtctttttaagaagtacaaataatatcttagttgataggtgacagttacacaactgtatgcctttgttaaaattcatagaactacacgcataaaagtgccaattttactagatgtaaattacacatcaataaacctgacttaacaaaaagacaagtaacatattttatc

SEQ ID NO: 412947 - DNA, 541 bp, Homo sapiens
acaaacctagatggtgctatacacctagagtatatggtacaccctattgctaataggctacaaacctatacagcacattgccaaacagaatactgtaggcaactgtaacacaatgataatgtgtatttatggtacacaamtacttgtgtatttaaacatatctaaacacagaaaaggtaagtaaaaatatattacaatctcaagggaccatcatcatatatttggtccatcacagactgaaaggttgccatacagggcatgactgtatatatccacacacactaacctttaaagcatattttttgtaatttttccaaatttgagcaactccttacactgactctgacatatataaattactgattccaacaagtctttttaagaagtacaaataatatcttagttgataggtgacagttacacaactgtatgcctttgttaaaattcatagaactacacgcataaaagtgccaattttactagatgtaaattacacatcaataaacctgacttaacaaaaagacaagtaacatattttatc

SEQ ID NO: 412948 - DNA, 537 bp, Homo sapiens
aagaaagaaaaaatggtgcagtgtttgcatgtaatctatgtacatccgtatattttaaatcatctttggattacttatagtacccaatacacacaatctaaatgatatgcagtagtgtgatctcagctcactgcaacctccacctcccgggcttaagccattctaccacctcagcctcccgtgtagctaggactatagccaagcaccaccatgcctggctaatttttgtattttttgtagagatgaggttttgccacattgttcaggctggttgtgaattcctgagttcaaacagtccgcccacctcagcctcccaaagtgctgggattacaggcatgagccaccatgcttggcctatattgttatttctaatcttttaaaatattttggatctgaggttrgttgaacctacgagtatgggacctgtgggtgaagagggccaactgtgttttctattgtaaaagttaaatgctacttactcacattactctcatttctacttttaggcctactgaacttgacgcactggtatttggc

SEQ ID NO: 412949 - DNA, 592 bp, Homo sapiens
cggtctaattaggaaggtatcgccactccaccagaggagaaggaaaactgagagtcaaagagattttttccaaagatttacagctagtaagtgatggagctgggagttacatctgggaacatgtgttgtctccagagctatgtgctttctatgtgctaacgacaccacactgaaataggggagataaaaactgtgctttagaaatgttctgaaatccatggtgtaagcctgcagcactgtagtggaccactggcaaccaccagcaacagatggccgaggcaggtctttttaaacaaaagccacactgtgctccagtggaggagctagtggtgcaaacaggagcaagcaccgtcagaagtggctgaggctgtgaatgaaagcacagtgctcagggcgaacactgtggaaggactcatcatttcacagtgggctcattagcatttcctcacacacaggcagtgaccaccattgtggggtatcacccttggataargcacagctgaaatatcagatgctcagaggtaaatttaaaattttatatctgtactttagaaatatgagtgcttcataaatatgaggcattaaaatgatt

SEQ ID NO: 412950 - DNA, 483 bp, Homo sapiens
accactgcagaaacctcagaatactgtcttgagaatacttcaaagatttccaaaacacatcagtataaaacatctkcactgtaaattcaagatgccaattgggttgccagtaaaggcaaagtttaatattcccagatgttactatacagtatctatgatatgttggctgaatagggtatgcacatttgcacatcatggtattttttcaaaatgtaaatttagtccctggagatataacaatagcaaggctgaataaattgtctaaaaattaaaattcatatttttttgttagtttaaaagatgggggaaagcagagagcaataaagctaattcatatactaaatgtcatttaaaaaattgagatagtacccccaaaatcttaaaagcatgaatagatctgaaataaatagctttttattttggcagtgattattcccattaccagaacttcgtgagcatgcaatgaaagctaagtatgctcaa

SEQ ID NO: 412951 - DNA, 483 bp, Homo sapiens
accactgcagaaacctcagaatactgtcttgagaatacttcaaagatttccaaaacacatcagtataaaacatcttcactgtaaattcaagatgccaattgggttgccagtaaaggcaaagtttaatattcccagatgttactatacagtatctatgatatgttggctgaatagggtatgcacatttgcacatcatggtattttttcaaaatgtaaatttagtccctggagatataacaatagcaaggctgaataaattgtctaaaaattaaaattcatatttttttgttagtttaaaagatgggggaaagcagagagcaataaagctaattcatataytaaatgtcatttaaaaaattgagatagtacccccaaaatcttaaaagcatgaatagatctgaaataaatagctttttattttggcagtgattattcccattaccagaacttcgtgagcatgcaatgaaagctaagtatgctcaa

SEQ ID NO: 412952 - DNA, 555 bp, Homo sapiens
tcagctcactgcaacctccacctcctggtttcaggcaattcttttgtctcagcctcccaagtagctgggaatacaggtgcctcccaccatgcccggctaatttttttgtattttcagtagagacggggtttcaccatgttggccagactggttttgaactcctgacctaaagtgatccacttgcctcagctttccaaagtgctaggattacaggcgtgagccactgctcctggcctgttatctctcttttagtgatgttaacattgatcccgtagtttgggagctattagcatagcatattgtagtagcctcttcactggtcttcccattttccctttgctcccacctcatcccacctcatcaaggatattctttatggagggactgaactctgtgttggctgggcagttttgctgattttggcggggcttgactgtatggcttttctgatctcagctagggctctctcacagttgaccagctgtttgcctaatctagcgtggmctccactgggacagctcatttgttccttgtatgtcatcccacagcaggcta

SEQ ID NO: 412953 - DNA, 396 bp, Homo sapiens
cctgccaatgaaggaggaggacgtcctcaagttcctttcagcaggaacccacttaggtggcaccaaccttgacttccaaatggaacagtacatctatatgaaaagtgatggcatctacatcctaaatcagaagaagacctgggagaagtttctgctggcagctcatgccattgttgtcattgaaatccctgctgatgtcagtgtcatatcctccaggaaaactggccagaaagscacgccgatattggctgctgtcactggagccactcttgttactggctgcttcactcctagaatattcactaaccagatccaggcagccttccaggagccatggcttctggtggttactaatcccaggctgaccaccagcccctcacagaggcatcttatgtt

SEQ ID NO: 412954 - DNA, 542 bp, Homo sapiens
atgtttgaaatttttcataaaacctgttttgaaaattcaatacttttaattctaaatgagtatttcttatcaagaataaaaaggaacctagatttccagcttctgcttacaatgtagaaagatttaaaaagcactgctcccaccctcacaataacaacaaacaccagacaatatgcaaattcaccacggttcttgaacttatacagctgaggctgcaggaccaacgaatccaaaatctaaggacagaagagtcacaagcacttgcttacctgaaacagatactactggacaatggtaagaaaaagtaagctaaattttttaactaattgctaaaggtttattataagcraacaagagtctctaaaaaccctgggggtcacagacacaaggggaattcatactcattcataggttcttctccaagaacctcacagaaagttttttttaaaaaattgcagacacggtaggaatcctaagaaagtgacccttgctctttggagagaacagttgcagctgtaggaaaggcttaaagcccccagttg

SEQ ID NO: 412955 - DNA, 603 bp, Homo sapiens
accctttccacctcttttaatgaggacaatattaacatgatactaaaaccaggcaaaggcactacaggaaaactagagaccaacatttctcatgactatggacataaagatcctaaacaaaacacccggaaataaaatccaacaatataaaaagagataatatatcacaattaaatrtgatttatcccaggatactagagttgacctaatatttgaaaatcaattaatataattagccacttcaacagaataaaatttttaaaaacctatgatcaactcgatggatgcagaaaaagcctttgataaaatataccatctattcatgaccttaaaaaaaaaaaaaaacactcggcagaccaggattagaagggaactgcctcagctcagtaaagggcatcaacaaaaacctactctcacacttaatggtgaaagactgaatacttgccccttaagataccacaaacaaggtaagaacatccattttttcattcccattgaacaatgcactgtgctagttagtgcagtaaggcaaaacaaaagcaaaacaaaaaggcatacagattggaaaagctgaaataaaactatattcacagaaaacaggat

SEQ ID NO: 412956 - DNA, 577 bp, Homo sapiens
gatagtagtaagttcttacctatcaaagataatcttgaatgtaaatggattaaattctacagccaaaaggcatagaatggctaaatgaataagaaaaacaagatccaactatatgctgcctataagagatccggttaaaccttaaggacacacataggctgaaggtgaaggaataaaagaacatactcacggctaatggttaccakgcaaacagtaaccaaaagagagcaggggtgactatctggtaaaatagattttgtgtcaaaaactgtcacaagagacaaagaaggtcattatttaatgacaaaggggttgaccaatcaagaggacacgacaattgtaaatgtatacgcatccaacattgaagctcctaaatacataaagcaactattaatggacataaaggaagaaatagatagccatacaacaacagtagggaacttcagtacctctcttcaacaatggatatgtcaaccagacagaaaattaataaggaaatattagacttatattgtacttttgactaaatggacctaatagacatatatagaagttttcatccaatgccagcagaata

SEQ ID NO: 412957 - DNA, 577 bp, Homo sapiens
gatagtagtaagttcttacctatcaaagataatcttgaatgtaaatggattaaattctacagccaaaaggcatagaatggctaaatgaataagaaaaacaagatccaactatatgctgcctataagagatccggttaaaccttaaggacacacataggctgaaggtgaaggaataaaagaacatactcacggctaatggttaccatgcaaacagtaaccaaaagagagcaggrgtgactatctggtaaaatagattttgtgtcaaaaactgtcacaagagacaaagaaggtcattatttaatgacaaaggggttgaccaatcaagaggacacgacaattgtaaatgtatacgcatccaacattgaagctcctaaatacataaagcaactattaatggacataaaggaagaaatagatagccatacaacaacagtagggaacttcagtacctctcttcaacaatggatatgtcaaccagacagaaaattaataaggaaatattagacttatattgtacttttgactaaatggacctaatagacatatatagaagttttcatccaatgccagcagaata

SEQ ID NO: 412958 - DNA, 577 bp, Homo sapiens
gatagtagtaagttcttacctatcaaagataatcttgaatgtaaatggattaaattctacagccaaaaggcatagaatggctaaatgaataagaaaaacaagatccaactatatgctgcctataagagatccggttaaaccttaaggacacacataggctgaaggtgaaggaataaaagaacatactcacggctaatggttaccatgcaaacagtaaccaaaagagagcagggstgactatctggtaaaatagattttgtgtcaaaaactgtcacaagagacaaagaaggtcattatttaatgacaaaggggttgaccaatcaagaggacacgacaattgtaaatgtatacgcatccaacattgaagctcctaaatacataaagcaactattaatggacataaaggaagaaatagatagccatacaacaacagtagggaacttcagtacctctcttcaacaatggatatgtcaaccagacagaaaattaataaggaaatattagacttatattgtacttttgactaaatggacctaatagacatatatagaagttttcatccaatgccagcagaata

SEQ ID NO: 412959 - DNA, 556 bp, Homo sapiens
attctggcctatcttcacgaataaactttcaaaggccctgtggcagcttatgtttggggggttaattggagcaggggatggggagctttgacttatgctcctcagaatctcacagatctcctgaaacttaattttattcctcctacagaattcactgacttaatccttaccttctctagagaagaggaatcttcctgacactcgggagtaaatgtaacccttacttcgatgtgcttaatccacgcaaggcttcagttcagtttttttctttttacttccatttgctcaccataggcaaatattctagktcatatattggcatgtaaaatgtgatgtcggatgcatgttcgacataagtggacttagatcttgtccggtctagcttagcacatctccctacttacatgctccttgtgtaatggacacctaggctgattcctactgccataggtaatacaataatgaagtagaatggataaacttcctttctcaggcaacttatagtatccttatggaggggcctagcttttctcacttctctagagttgctcagttc

SEQ ID NO: 412960 - DNA, 556 bp, Homo sapiens
attctggcctatcttcacgaataaactttcaaaggccctgtggcagcttatgtttggggggttaattggagcaggggatggggagctttgacttatgctcctcagaatctcacagatctcctgaaacttaattttattcctcctacagaattcactgacttaatccttaccttctctagagaagaggaatcttcctgacactcgggagtaaatgtaacccttacttcgatgtgcttaatccacgcaaggcttcagttcagtttttttctttttacttccatttgctcaccataggcaaatattctagttcatatattggcatgtaaaatgtgatgtcggatgcatgttcgacataagtggacttagatcttgtcyggtctagcttagcacatctccctacttacatgctccttgtgtaatggacacctaggctgattcctactgccataggtaatacaataatgaagtagaatggataaacttcctttctcaggcaacttatagtatccttatggaggggcctagcttttctcacttctctagagttgctcagttc

SEQ ID NO: 412961 - DNA, 634 bp, Homo sapiens
aagactcacctttggtgtatttgcatacagcacaggctgaagggaaaacatttcggccatgggctatgtaatagttctgccctggattcaatggtaattatggttttgtagagttggctgatacttgctaactgcttttgaagtctggaagaggatgacagacttagagcagccaactatcaaccaaaacaaggcatgccatgatagctaggcctccatgacaaccttggaagagacatgtcctaaacctaaagggtttaattagactgagcctgaagagtagcagagctgaaagtagataagacaatgcatagcattaatatgtcttctatactaaagccaaggacccaacaaagtaggataaccctgacccaggtatcagagtcctaagtagatgagcccaagaatgttgactcagattcccctgaggcattcaggatggaagaagcaggcctctacctcctgcaagtagaaagccactgcccactgaggatcacactaaaccctgaagamgacaagatgacgtttgtcacaaaatctttcattgcatcaaggcaaataactagggccagctctcagcacagcctgaggaggaaaatgtatctgcttcaggaggaacttattgctgaaagac

SEQ ID NO: 412962 - DNA, 592 bp, Homo sapiens
ggacaaaccgctctgcctgctgagctgaagtggctaagggcaaaggagttcttccaccatctcaaagtagtgacagcagagcctgcagagtatgtaccagagtcactttaaaatatgagccatctgttaaccaggacaactcagccttgtcctggggactttctcgtagatcctgctgaggggttaaaagctggtctgtcagttaagcagtcctgtggtggtccctctaaaggcaaggtcaggagagtcacagggttaaggtattatagtgtgaaatagtggcttataaagtaagttggctggcaggaagatgctgagtgagttaagcttccatggcatgaggaatcccatgactctcagttgcctcagctaacatggttgactaccrtattgtagagaagagtgtgggcctccatgcttttagattaagactcccaaagtgtttccttccttttcatatacaaagaatacttgattatgacctatagctggaagatttatcaatctcccctttaagaatttgctgtttagattctgcctaaataaaggagtcaggcttggtaacttaccagaccagaagtgaaacattagg

SEQ ID NO: 412963 - DNA, 592 bp, Homo sapiens
ggacaaaccgctctgcctgctgagctgaagtggctaagggcaaaggagttcttccaccatctcaaagtagtgacagcagagcctgcagagtatgtaccagagtcactttaaaatatgagccatctgttaaccaggacaactcagccttgtcctggggactttctcgtagatcctgctgaggggttaaaagctggtctgtcagttaagcagtcctgtggtggtccctctaaaggcaaggtcaggagagtcacagggttaaggtattatagtgtgaaatagtggcttataaagtaagttggctggcaggaagatgctgagtgagttaagcttccatggcatgaggaatcccatgactctcagttgcctcagctaacatggttgactaccatattgtagagaagagtgtgggcctccrtgcttttagattaagactcccaaagtgtttccttccttttcatatacaaagaatacttgattatgacctatagctggaagatttatcaatctcccctttaagaatttgctgtttagattctgcctaaataaaggagtcaggcttggtaacttaccagaccagaagtgaaacattagg

SEQ ID NO: 412964 - DNA, 592 bp, Homo sapiens
ggacaaaccgctctgcctgctgagctgaagtggctaagggcaaaggagttcttccaccatctcaaagtagtgacagcagagcctgcagagtatgtaccagagtcactttaaaatatgagccatctgttaaccaggacaactcagccttgtcctggggactttctcgtagatcctgctgaggggttaaaagctggtctgtcagttaagcagtcctgtggtggtccctctaaaggcaaggtcaggagagtcacagggttaaggtattatagtgtgaaatagtggcttataaagtaagttggctggcaggaagatgctgagtgagttaagcttccatggcatgaggaatcccatgactctcagttgcctcagctaacatggttgactaccatattgtagagaagagtgtgggcctccatgcttttagattaagactcccaaagtgtttccttccttttcatatacaaagaatacttgattatgacctatagctggaagatttatcaatytcccctttaagaatttgctgtttagattctgcctaaataaaggagtcaggcttggtaacttaccagaccagaagtgaaacattagg

SEQ ID NO: 412965 - DNA, 527 bp, Homo sapiens
atgtatacatatgtaacaaacctgcacattgtacacatgtaccctagaacttaaagtataatttaaaaatcatgtgtgaattttcaagttaaaagcttctagaacttgacacaggaaaacatttacgaatgcttgagatctgagagaacctggcttttctctaacacatttatgcagagatttttgattcccattccccatattcatctttgcatttctgagacaaatcctactttgtctcttaataagttgctgtatttgactttrtctttaggcctacagatgcaaggagactaaagaaaactaagcaaatatatagagtttatttgggccaacactgaggattgcaacacaggaacatagattgaagttgccttgaatgtacactccaatcagcagcagttacaagtggattttcaaaggaaaagagaagttcctaagttgtttaccaagaatttagattaaaataatgtaagctattgattatacacttttctctataccataaattccaggaacatgaagat

SEQ ID NO: 412966 - DNA, 578 bp, Homo sapiens
tgaggattgcaacacaggaacatagattgaagttgccttgaatgtacactccaatcagcagcagttacaagtggattttcaaaggaaaagagaagttcctaagttgtttaccaagaatttagattaaaataatgtaagctattgattatacacttttctctataccataaattccaggaacatgaagataatgagtgaggcagctattcgggaacaagatgcatttacacagttgcccccaggtattgggggtaggggagtatgactgaagtcccatactcatgattctctgggcctgaagttttacctatacgccatagctcagactgctcggttaatatatagattgcttttgttctatggtatcaaaattatgctagtttcataaaataggtcaccttttygtttaggcattttctttatgcagtgtatcctcttatcagtctgagtctaaactgggaaaacaaagcacttcaggtattcaaaatctacgttatcctgaggatgatggtggtgatgacagagtatagatacggtaaggaaactgataaattaatagctgcaggggacccactact

SEQ ID NO: 412967 - DNA, 607 bp, Homo sapiens
agtgaatttagtgagggaaagggtagagaagcacttattagcaaaaagacgtacataagctgcttagaaacagaggtcattggttccagaggttcagagccagagttgtcagtttatcagtggagacgcaagtgttcttcaaatatttcatctgaattattgcagtcctaaagaatatctagtaataaacctaatcaaaggagatgtgtgaaggatgcaaaagggtttcttgtggggtttttagaaagcacttggaaacaggttcttatctcagacatgttaaacctgagcctttctcctttgttccttcccagttctctctctytctgcgtctgataaaagtagtttgatacttgtatctgagactttcatatttctccctttgatcaagttctttctccaaaagcattgtggataagctagctttagtcaggttgtaagtgtccctcagcattgggaaggacctttccaagttggtctagtcccatgctagaggggacaaacagctgaaagtcagtgatgtgttttagacagattcgagaaacaaggaggccagttgctctcaggtttactttgtctgaatttcattgtttaaatttttactttg

SEQ ID NO: 412968 - DNA, 566 bp, Homo sapiens
gacgtacataagctgcttagaaacagaggtcattggttccagaggttcagagccagagttgtcagtttatcagtggagacgcaagtgttcttcaaatatttcatctgaattattgcagtcctaaagaatatctagtaataaacctaatcaaaggagatgtgtgaaggatgcaaaagggtttcttgtggggtttttagaaagcacttggaaacaggttcttatctcagacatgttaaacctgagcctttctcctttgttccttcccagttctctctctctctgcgtctgataaaagtagtttgatacttgtatctgagactttcatatttctccctttgatcaagttctttctccaaaagcattgtkgataagctagctttagtcaggttgtaagtgtccctcagcattgggaaggacctttccaagttggtctagtcccatgctagaggggacaaacagctgaaagtcagtgatgtgttttagacagattcgagaaacaaggaggccagttgctctcaggtttactttgtctgaatttcattgtttaaatttttactttgtaccat

SEQ ID NO: 412969 - DNA, 558 bp, Homo sapiens
tttgttctcacttcatgttagcctcagcttcgctagtggagtttacccaggtaccagcatgcggtattagcaataacacagacatcggcaataacacagacaatcaccttgttcagctaatagataatcaagcaattttatctaaaaccacctgggcaagaaaagctaatgaatatggcttttaatagagtagcagacaaatttgtcacttattagcagttacaccataccgtggtacaaaagatctgccaaaagaagctaagtcttgtgacctacaacgtaactctcagttctctgaagtgagagaggaggcttgtccagtgattattctaatgatgagtttcagatctcatgtactgatagcagtcaaataatcccaactcacatggcctcctgttatccaaatatctaaacatctggaggccyatgttaatatcctacccatgaatgttaaatatatctgataggaacatagacattccttcaatctgaattttctatacatggtagaattaaaccaggggtcagttgtattactacatattgctaatggccttc

SEQ ID NO: 412970 - DNA, 558 bp, Homo sapiens
tttgttctcacttcatgttagcctcagcttcgctagtggagtttacccaggtaccagcatgcggtattagcaataacacagacatcggcaataacacagacaatcaccttgttcagctaatagataatcaagcaattttatctaaaaccacctgggcaagaaaagctaatgaatatggcttttaatagagtagcagacaaatttgtcacttattagcagttacaccataccgtggtacaaaagatctgccaaaagaagctaagtcttgtgacctacaacgtaactctcagttctctgaagtgagagaggaggcttgtccagtgattattctaatgatgagtttcagatctcatgtactgatagcagtcaaataatcccaactcacatggcctcctgttatccaaatatctaaacatctggaggcccatgttaatatcctacccatgaatgttaaatatatctgataggarcatagacattccttcaatctgaattttctatacatggtagaattaaaccaggggtcagttgtattactacatattgctaatggccttc

SEQ ID NO: 412971 - DNA, 576 bp, Homo sapiens
tggtcttcagtgacaagtagacccggagataaacaactcgaaatccctgctagctattaaatctagttgagctccacaatgtgtgaagaacagacttaaactactctctccccaamcactccccaccttggagattaaaaggaataacatgccctccagacttgcttgggtactgtcaagtggtccgttcccattataagacagaaagctgctgcagtcacccagcttcatggttcaatggatgtgaccaagcccttgcctggtagctccagtcttttaacatcctatcatcagtactcagattctataaggacccagtagcaccccagggactgcttttctgttgcagatggtataatcttgctcagaaccttagagatctgtgctgcaagtctattattggggcctaccaaagactaaaaaaaggatgcttatctgcccttgatacctctgacttgttaacatggcctgatgtaatacatcatggaccttagtagagtactctatttctttgggcctcacttgaaactgattttcaaggacccaagaaatccactaaagcagcattcctgctgg

SEQ ID NO: 412972 - DNA, 576 bp, Homo sapiens
tggtcttcagtgacaagtagacccggagataaacaactcgaaatccctgctagctattaaatctagttgagctccacaatgtgtgaagaacagacttaaactactctctccccaacyactccccaccttggagattaaaaggaataacatgccctccagacttgcttgggtactgtcaagtggtccgttcccattataagacagaaagctgctgcagtcacccagcttcatggttcaatggatgtgaccaagcccttgcctggtagctccagtcttttaacatcctatcatcagtactcagattctataaggacccagtagcaccccagggactgcttttctgttgcagatggtataatcttgctcagaaccttagagatctgtgctgcaagtctattattggggcctaccaaagactaaaaaaaggatgcttatctgcccttgatacctctgacttgttaacatggcctgatgtaatacatcatggaccttagtagagtactctatttctttgggcctcacttgaaactgattttcaaggacccaagaaatccactaaagcagcattcctgctgg

SEQ ID NO: 412973 - DNA, 608 bp, Homo sapiens
ctgaatcctggggaggtgccaaactcttaacctcatgatctaaccaccttcaagatacacggccatgcatgttctcacaggtgacacagtatgtgtttaccaagcattacaaccctttcagtgcagaagcttttctcccaggaaagataatttctgacttgggagtatctgatgtcagttatattatggagataagtggaaaagacagggttggtttttcgttttttgaggaaggaatataacatcttttgacacgtctgcctgagatgtaatgttgtcatggtctttaggcaataggaagctgtctctyatttgggtttttctttttaaacatggggaagaataactacttctccaaacccagaaagtttctgggaagaatctgggaattcgaggcactcaagtgttcaccaaactgtacctatcctgagtcttagggtcttaccttctctctgttgagatgacagtatctcctaatgtcaaatacgcagtctgaatatgcagccttgacaagtctctcatgctagatacaatgtcttttgtttttctgtcatctttacagtcaagtcttcagcctgatgtttcagtctgatctgtcacttagccat

SEQ ID NO: 412974 - DNA, 591 bp, Homo sapiens
ggtttttcgttttttgaggaaggaatataacatcttttgacacgtctgcctgagatgtaatgttgtcatggtctttaggcaataggaagctgtctctcatttgggtttttctttttaaacatggggaagaataactacttctccaaacccagaaagtttctgggaagaatctgggaattcgaggcactcaagtgttcaccaaactgtacctatcctgagtcttagggtcttaccttctctctgttgagatgacagtatctcctaatgtcaaatacgcagtctgaatatgcagccttgacaagtctctcatgctagatacaatgtcttttgtttttctgycatctttacagtcaagtcttcagcctgatgtttcagtctgatctgtcacttagccatgggcaatgaaactccttaaagtcgctgagaatttctggctttcactgcaggtcctaagttggtagttggctaacttgagcctgctgttctttcttcaagttttctaagtcagtttaagaagtcaagctcttctatgcttttcattgccccatatcattcagatgctagagccactgtgttatcctgtgcttccct

SEQ ID NO: 412975 - DNA, 549 bp, Homo sapiens
gtctacacctgcatacacctatccaaagcatctgccactggaaatggcagtgagtaagggggatgggaggggagttggtcagactgaaacatgcctgtaacagggaaagaagtaacgatgcaactggctcaatattgccaaacccttccctgaaactctctgtaatccatgcctctgatactttattcaagaagagggaagaaatgatctgccagttcccctcttccataaatcagacactaactccatgcaaaattatctttcctatacatcccacttacagacatgggcactgagcagtgatctggagcatcctatgccctagtctgaattagrgaaatccagggcaggagatgaggcaccagcacaaatacaatgcaacctgctactcagaaagggatctgaaatgtcacaggtgtcagatacatgctgcatgtacattaaggggcaaacatagataagaatattgaagacttgaacaaaaacaagcatgatctaagaaggaaaaaatgttaagtgcagccagagagaaaggttgggttacccaca

SEQ ID NO: 412976 - DNA, 549 bp, Homo sapiens
gtctacacctgcatacacctatccaaagcatctgccactggaaatggcagtgagtaagggggatgggaggggagttggtcagactgaaacatgcctgtaacagggaaagaagtaacgatgcaactggctcaatattgccaaacccttccctgaaactctctgtaatccatgcctctgatactttattcaagaagagggaagaaatgatctgccagttcccctcttccataaatcagacactaactccatgcaaaattatctttcctatacatcccacttacagacatgggcactgagcagtgatctggagcatcctatgccctagtctgaattagggaaatccagggcaggagwtgaggcaccagcacaaatacaatgcaacctgctactcagaaagggatctgaaatgtcacaggtgtcagatacatgctgcatgtacattaaggggcaaacatagataagaatattgaagacttgaacaaaaacaagcatgatctaagaaggaaaaaatgttaagtgcagccagagagaaaggttgggttacccaca

SEQ ID NO: 412977 - DNA, 603 bp, Homo sapiens
tatgtacatcagttttgcatcctgaaactttactgaaatcatctattagttttaggagctttttagagatgaatttttagggttttctaggtatacgatcatattggcaaacagtgacagtttgacttcctctttacccatttggatccaagagattaaatcctttgtctttagctaccagggctggtagagaaagaccatcaggtgggggcaagggttaggagtgtctgacctcagactctccgtgggtgaagcttgctgctgctgcagagaatggagaggcggggggtggttctaaggtcaaagaagttatgttcctaggggaattatggctgtctctgctgcttcatacagatcaccagggaaatgggggaaagccagcagtgacaggcctcacccagctcccamgcagccagaaatgccagtcccactcccactatgcccaccgctaacagcactgagtttatttccaggcagccggtgagcagggctgagaactttccccagactacgagcttcccagctgagaaagcaagcagggctttcaaggtttcatgcctccccccacctgccacagcttctgtgctcatatccatattccct

SEQ ID NO: 412978 - DNA, 598 bp, Homo sapiens
agattccactaagtctgccttaaggtttctccacagggttcacaatgcttatagttcattcagtgcttatctcagccttccctaggcctcagggtgcctgggttgatatttacccctcaattctgaatagccctggcagaggaagcatgaaccctagtccctacttacgtcagctacctaagccacctaccagtcattcccctccccccacactgatcaggaagaccaactgcagatgggtccaggaattctaactctgggcactggagtgaacacatgtggtagcatgaataggaccaccattatcaggtgagaaaatagcaataggaaaccacaggccataccaacgaatgagatgagctgcagaatggacaaaaataccaaatactgacttcaaaggagaagcagtaggtgatttcactcaaattatttaaaaagtagagcaataacctggcaatcttggtgtcccaggagagaggccacatgagcaaacaggaaatcaggcaaataagtgyaaggacatggccaaggctgctgatggaatgcctcttaggctttccacatggcttcagcttctgcaaccctgggatccatacat

SEQ ID NO: 412979 - DNA, 488 bp, Homo sapiens
tggcctgggcttccatgttctctttagtgctagtctggcagttaaccaacttctcagtcctgattcattgcttctctcccaaatgctagagaaattgtacatcctcttccakctctgtcatcctcattctccacaggggagaaatctcaatcatgatgctttaatacagacattctcagactccgagcagtcacctggtgtgccaataagacagaggcccaggctgggtaaagcaacagtgtctgatttatattttcaccaagttcttcaggtgattctcatatgcaccaaaattcaagaacgatcactacagtatgctgggagttattactccatttgacatctgcattgtggtcttgctgccatagatagctgatgagtgaataatctgattccagaatcttgtctacttgcagagactcccactggctagagataaccttgatattaaaaccttatgaggcaaactttaaatgttagatttagat

SEQ ID NO: 412980 - DNA, 488 bp, Homo sapiens
tggcctgggcttccatgttctctttagtgctagtctggcagttaaccaacttctcagtcctgattcattgcttctctcccaaatgctagagaaattgtacatcctcttccagstctgtcatcctcattctccacaggggagaaatctcaatcatgatgctttaatacagacattctcagactccgagcagtcacctggtgtgccaataagacagaggcccaggctgggtaaagcaacagtgtctgatttatattttcaccaagttcttcaggtgattctcatatgcaccaaaattcaagaacgatcactacagtatgctgggagttattactccatttgacatctgcattgtggtcttgctgccatagatagctgatgagtgaataatctgattccagaatcttgtctacttgcagagactcccactggctagagataaccttgatattaaaaccttatgaggcaaactttaaatgttagatttagat

SEQ ID NO: 412981 - DNA, 571 bp, Homo sapiens
aggagtcctgtatcagaactcaggcttcatcattttccaggtgagtcacgcttaggtaaatcagcacctgtcttctggttttctcatctgtaaaacagaaataattaaatgtacttcattgaactgatatgatggtgagataatatgtgaaaatgcctagtctcaatctgggatcctgacagaagcatatttattcatttattcaacaaatattttattggtyatttattacaggtcaggaagtaacaagagagacaaaaagaaaaacaggtccccccccgaccccggcccctgcctcaaaaaataaattcctgccttcagatggcttactttttcatggaggagacagatcataaagaagacaaatatagacctacaaggtgatggatgcttggagattgacaaggcatggaaaggggtggggactgtaatattattaaatgtaatttatttgaaagatcttttcatccaaatctgaaaagctctttctgatcactcttagaagtcatgttatactttatcatggagggtagaagataagcatctaataaaactgctagttggatgaata

SEQ ID NO: 412982 - DNA, 585 bp, Homo sapiens
gtcatacctgtctgtcatggcctaggagttgaagagcaaatcagaatggtgcgctaattctctagaccacctctccctgccctacactattgaactggagcagatgcttgggcagcgagacagaattgaatgagtacagcaggctgactagcaccaacttgcaaaatgataccacagccctgaaacaccagatctccagagttctagatagttggtgtgttgttccacgatcaggcctrggtgattgtactgatctggcagcaagaaaaaagtggaaaggtggtggatggtgacttaggacattgctggagccttggcactgaggtaggctcaggcaaagttaccattgatggcaggcccagtctgggtttccctgtacctgaaaccgatcatctgctatagttcatctggcagataggcatgggatttttggaccttgaagccagttcattgtttctggtcttgagcagtgtgaactagacagcagctgtctacagctcagatggtaggtctggttcatgtggctccaggtgcccaaaaggcctgcatgataaatagaaaggcagcagccacagactacatgca

SEQ ID NO: 412983 - DNA, 508 bp, Homo sapiens
gtcttatagaatgtcctgtatttaggtttggctaactgcttctgtgtctaacttgttcctttcccctgttcctacaggttgactagattactgacaaagtcttagccaacaaaagctatctatactttccattgcaacacattcaaggacactatacctggctgttccttttacagtggtgctaagtctagtgaatagctcagcctgatgccatatgaaaccactgaatttctcatcaccctttcactgaaggattttagttcataytgattacaaaaaaccaattcttctccccctgtcgataccctttacaatgtgacttcaccattcttccaatcaagaaatggattatttgcccacccccttgaatctgagctgtccttgtggcttgcttggaaaatagcaggtggtagaaaggaaactgccaatttcaagcctgtgccttaagggtccttgtgtcttcctctttattgccactgtaatgagaatgagcctaggctaggatgaa

SEQ ID NO: 412984 - DNA, 568 bp, Homo sapiens
gagaaattgtcatgtcttatagaatgtcctgtatttaggtttggctaactgcttctgtgtctaacttgttcctttcccctgttcctacaggttgactagattactgacaaagtcttagccaacaaaagctatctatactttccattgcaacacattcaaggacactatacctggctgttccttttacagtggtgctaagtctagtgaatagctcagcctgatgccatatgaaaccactgaatttctcatcaccctttcactgaaggattttagttcatattgattacaaaaaaccaattcttctccccctgtcgataccctttacaatgtgacttcaccattcttccaatcaagaaatggattatttgcccacccccttgaatctgagctgtccttgtggcttgcttggaaaatagcaggtggtagaaaggaaactgccaatttcaagcctgtgccttaagggtccttgtgtcttcctctttattgccactgtaatgagaatgagcctaggctaggatgartctgattagactgagggtgaaagtcccattgtcccaactgaggtcat

SEQ ID NO: 412985 - DNA, 569 bp, Homo sapiens
ggaggacagtggccctctttttacaactccattaggcagtaccccagtgggtacctggggggaggcagggctccaaccccacatttcccctccacagtgtcctagtcagatattcatgaggtctctgctcctgcaacaggcttctgcctggacacccagrcatttccatacatcctctgaaatctaggaggaggatttcaagcctcaactcttgtagtttgttcacctgcaggcttaacagtacatggaagccaccaaggattaaggctacagcctgtgaagcagcagtacaaactgtacctgggaccctttgaaccatggctggggctggagcagctgggacacagggagcagtgtctgagaactgtgcagggtgacagggccctaggtctggcccagaaaaccattcagtactcccaggcctctgggcctatgatgggaggggctgttggtcttcagaggcagctgacagtgtagcctgccccagcctaagctctgtgtcaaatcttgagtctatgtgtatttcaaagtctaatagttgagggtcagtaactcatatatggagtcta

SEQ ID NO: 412986 - DNA, 616 bp, Homo sapiens
aaacaaaacaaacagatggctagtgatatcaacaggcttagaacagttaataactttggggtatagagaaaatcaactcttcaataaaggagttagaagcaattggagagagagtcttggataggtacctttactagataggtcacttggtgggggtctcatattctgtgacaaagttgggaaaagccatgaaattacaggcatgactaaaggattattatgttcatgaatcaaaagatttgggatgatatccagcagtcagatttcctaaagaggtcaaagtctgggaaattctagtcatggggttatctcctcaagccagcacaagagtcaagagtgattaaaaaccagaatcatattgatccttttccagaaagacaagataaaaatgacatgtccaattctatccaggctattaatagaagttctcatatcttgagtaaaataaagatagctaatgtgctgaatgattatkatagctcagataccaaaacataatccataaaagttcaaaaagtaacaaattttattcctaatagccatttaaaaattcaaacgaagggagaaagcataaatccaaattcagggaaactgctgctcaagctctggtgtttgc

SEQ ID NO: 412987 - DNA, 576 bp, Homo sapiens
tttcagcaacatggatggaaatggagatcattgttaagtgaaataaaccaggcacaaaaaggcaaacatcacatgttcccatttatttgagggatctaaaaatgaaaacaattgaactcataaacatagagaatagaaggatggttatcgaaggctggraagggtattgtggggatgggggcagaaaaggatggttaatgggtacaaaaaaatagaaagaatgaataagaattactatttggtagcacaacagggtgactatagtaataataacataattgtacattttaaaataacttaaaaagtgtaattggatcctttgcaactcaatggataaatgcttgaggggatggatacctcattctccatgatgtgctaatttcacattgcatgcctgtatcaaaacacctcatattccccagaaatatatacacctactaggaacccacaaaagttaaaaataataagtaaataaaagtgggtgattaaaatatatttttaaaactgaagtacctggttataaacacccctctgttaagatttatttatttatttagagacagagtttcattttgc

SEQ ID NO: 412988 - DNA, 576 bp, Homo sapiens
tttcagcaacatggatggaaatggagatcattgttaagtgaaataaaccaggcacaaaaaggcaaacatcacatgttcccatttatttgagggatctaaaaatgaaaacaattgaactcataaacatagagaatagaaggatggttatcgaaggctgggaagggtattgtggrgatgggggcagaaaaggatggttaatgggtacaaaaaaatagaaagaatgaataagaattactatttggtagcacaacagggtgactatagtaataataacataattgtacattttaaaataacttaaaaagtgtaattggatcctttgcaactcaatggataaatgcttgaggggatggatacctcattctccatgatgtgctaatttcacattgcatgcctgtatcaaaacacctcatattccccagaaatatatacacctactaggaacccacaaaagttaaaaataataagtaaataaaagtgggtgattaaaatatatttttaaaactgaagtacctggttataaacacccctctgttaagatttatttatttatttagagacagagtttcattttgc

SEQ ID NO: 412989 - DNA, 568 bp, Homo sapiens
aaattccccattgtgctggatgattgtgagtgagctacaagcagaacttgatatgctgaaacataacacaatttgtaagacattactgaacttcttaggcaaaagcagatatcaaagtatatgttgattaaatgcatattgctgagattttyttcccctgaaattcacctacccagatgataagtaattgcaccacatctcctactttccctgttaattctagaagtctgtaagagacgtgctttgtgttacttcatcttactgcttctatccttttgtaaattaccaaagatcactattaatttgagctcatgacatctttctgatattttcctttggtacatgtggaactgagtgataaatgtggttctttgtcatgagcactatggtcgtaataccttccatttatatttgtcccttcctttgatctcttctttcccctgtgcatcctgaatcacttcaggcccccatctctctttggcaatcatgattccttcctgtatttgcccctgttctccccatctcatgccagccttcacattgtctttggtaaacttcctcagacatg

SEQ ID NO: 412990 - DNA, 613 bp, Homo sapiens
gggcctggcattgagcttgtcagcatggggttaggggaatgcttatggcatggaggaggggatgtactcataaccctgagaaggcaggctgatgctggcaagcaggtagtggtgaacgcctaaggaggatggcaccagagaggaccatggcttggcagaacttgctgcaggagtcctgcacctctcttttcaaggtgcccatctgtagtgctttctgaatccagctccccacattgtttgtcctctggtgggcctgcaaccagttctgttctagaattacttgcttagtgaaatgttggtagatgacacattgcactttgatggtaggagtgggggcgataaattttggaattaaaaattcttccagagccaagcaaatacagcttttttggccagtgcctggatggaaggaacagacacaagtgcacagcagtgtcacgtacattacctcacagaggaggtattttgagataggagccatgctttacsccccctcaagtatgccttgctaaacatcctgattactcagaagatggtcatctgaagccgaggggtctaagattcctggtggccaccttgacttgcctcccagcaaaatctgctttctttttaa

SEQ ID NO: 412991 - DNA, 622 bp, Homo sapiens
aattcaaccttgctaccactgtgaaagggacaaaaaaaaaaaaaaaaaagcaacctctattctgtagatactaaaggttacatattcaaatatacctcctctacttgaaaagcttcactgattctttcaagcgccagacctgtaaaagaagtatcacagtaggtattactaaatagcaaaatacagtactgtctagactgtttacaaaaactgtgcaagtaagtaaataaaatcgtccagtatcttacacactgttgctttagtaatgttgtgacatctaaatttatgttttcactcaaaatcctgtctttctcttggcttagtagtattatccatttaccaagagctttttcccttttaccaaaagsgtaattttaaaaggggggggggtatgattccatttaataaattcctgcataccaatttggcctcaggtaaatcctttaatccatcacagcagaagcacataaaatcagattagagttctcatccttggccacaatttcaattcaactattaataacttaaaccaaattctttccactcggcccataccttaagttcatcagcatcttgaaactccaccaagcctggttaaaaaaagtgaaagacaatgttaaga

SEQ ID NO: 412992 - DNA, 581 bp, Homo sapiens
tagattattggcagtttcatctggttaaacctaatatatatataccatgcttgagtgagctggatcagtgtttctcaaattactgtggttagctttttttttttttgtaatttccactccatcacagactaattcttttgcaaaagacaataaaaataaattgctagaaaaattaaatgaaaagaaaacatacaaaataaaagcccgtttattttattagattataggcataaaattatattttaataaaaataatcagaacaacctcatataggaaaaagatagaaaactgcacataatatgtatacatacacttgattaatatggaaattgctgtacatgcacattttgtccttttccatcataactaaacacagttataagggaaataatgatttgtggttttgaacttatgtttttttaattcaaacaccacttaggtttcagcgtttargtggttccattacttccctagcttctacaaataacacccgggggtttagcacttgaccataacttacagctacaaaatcaaacgaacccagcatttgagggatcatattttgagaaaaacaggtaca

SEQ ID NO: 412993 - DNA, 583 bp, Homo sapiens
tgattctttcaagcgccagacctgtaaaagaagtatcacagtaggtattactaaatagcaaaatacagtactgtctagactgtttacaaaaactgtgcaagtaagtaaataaaatcgtccagtatcttacacactgttgctttagtaatgttgtgacatctaaatttatgttttcactcaaaatcctgtctttctcttggcttagtagtattatccatttaccaagagctttttcccttttaccaaaagcgtaattttaaaaggggggggggtatgattccatttaataaattcctgcataccaatttggcctcaggtaaatcctttaatccatcacagcagaagcacataaaatcagattagagttctcatccttggccasaatttcaattcaactattaataacttaaaccaaattctttccactcggcccataccttaagttcatcagcatcttgaaactccaccaagcctggttaaaaaaagtgaaagacaatgttaagaatatcatgcaattttgttttttaatgagtggtctttatggtggctatccaatagctctctttgatgagtaaataaattg

SEQ ID NO: 412994 - DNA, 554 bp, Homo sapiens
tttttattttttatttaatagtagccattctaatgggcgtggggtggaatctcattgtaactttgatttgcatttccctagtgattggttatgttgagcaccttttcatgtacttactagccattygtatatcttctttggagaaatgtctgttcaaatcctttgcccatttttgaatcagcttgttttttgttattgagtttcaggggttctctatgtattctgggtatgaatcttttatcagatatataatttgcaaatatttcctcctattccatagattgccgtttttctttcttggtagtatctttttatgcataaaatctttaaattttcatgaagttcactttttctgtttttttcttttgctgcttatatctttggtattatatttaagaaatcactgtctgctccattgtttctcattcttccagtattcttgcttttaatgctgttttgagaagtctaaggccatttgattcctgtttttttctttctatgtgacctgtttgttttttcctctttgaagcatgcagaatcatctatttgtcccc

SEQ ID NO: 412995 - DNA, 554 bp, Homo sapiens
tttttattttttatttaatagtagccattctaatgggcgtggggtggaatctcattgtaactttgatttgcatttccctagtgattggttatgttgagcaccttttcatgtacttactagccatttgtatatcttctttggagaaatgtctgttcaaatcctttgcccatttttgaatcagcttgttttttgttattgagtttcaggggttctctatgtattctgggtatgaatcttttatcagatatataatttgcaaatatttcctcctattccatagattgccrtttttctttcttggtagtatctttttatgcataaaatctttaaattttcatgaagttcactttttctgtttttttcttttgctgcttatatctttggtattatatttaagaaatcactgtctgctccattgtttctcattcttccagtattcttgcttttaatgctgttttgagaagtctaaggccatttgattcctgtttttttctttctatgtgacctgtttgttttttcctctttgaagcatgcagaatcatctatttgtcccc

SEQ ID NO: 412996 - DNA, 545 bp, Homo sapiens
gtttaaacataccaattaaaagacaaattagcatagtggacttaaaaaaatgactcaattatatgttgtataagaaattcacttcaagtagttcaaattatacatgtagcttaaaaataaaggatggaaaatacacaccatgcaaactttaatcaaaataaagcagatgtggctctgttattatcagatacagtagagtttagataaaagaaacatatcaaaaacagagaaggacattacacaatgataaaaggktcaattcaccaagaaaacatagcaatccctagtgtgtgttcaccaaacaacagaactgcaaaatatatgaagcaaaaacggatagaaagaaaaagttatggataaatccacagttctcattggtgacttcaacactcctctctcaactagaactagctgttgatagaacaactagagagaaacagcatcaaagatgtagagaactcaacatgacaatcaaccaacaggatctaattgacaataaaacacttcatttaacaatagtagaattcatgtttttttcaagtacc

SEQ ID NO: 412997 - DNA, 579 bp, Homo sapiens
tttttaaaaaataccccaattaaaagctctttccaagaaagttgctctttgtctttctgttatatgaacaattttatttaatctgttcactgtgctctttcatggctacttcagtgtcatttataataattccatttttstaatttagccatttaggatttcttcaattcctccaatgtgttctctcttgcctcgagccttcggacctgcagcgctccccaagtggagcacctctcctgcctccaatggctacatcctacacattcttttgctataaatttaaatgtcatttctgctgggaatcctttgtcaaccctctgcattacattcaactctcctcctgtgcactgccttagtagctgtattagtttcctaaggccgctgtgactaatagaccacaagcaggatggcttaaaacagcatgaatttaatcttgcacagttctggaggctggaagtttggaatcaaggtgtcagcaaggccatgctccctctgaaacctataaggggggatccttctttgcctctccctaccttccagtagttgttggcaacccttggtattccctggcttatagat

SEQ ID NO: 412998 - DNA, 579 bp, Homo sapiens
tttttaaaaaataccccaattaaaagctctttccaagaaagttgctctttgtctttctgttatatgaacaattttatttaatctgttcactgtgctctttcatggctacttcagtgtcatttataataattccatttttgtaatttagccatttaggatttcttcaattcctccaatgtgttctctcttgcctcgagccttcggacctgcagcgctccccaagtggagcacctctcctgcctccaatggctacatcctacacattcttttgctataaatttaaatgtcatttctgctgggaatcctttgtcaaccctctgcattacattcaactctcctcctgtgcactgccttagtagctgtattagtttcctaaggccgctgtgactaatagaccacaagcaggayggcttaaaacagcatgaatttaatcttgcacagttctggaggctggaagtttggaatcaaggtgtcagcaaggccatgctccctctgaaacctataaggggggatccttctttgcctctccctaccttccagtagttgttggcaacccttggtattccctggcttatagat

SEQ ID NO: 412999 - DNA, 605 bp, Homo sapiens
cttacgtcttttttgtttacaatgttgctaattttatacctagtttacaaaattagataaaacaacaaagattctacctgctatctccaaaatttaaaaacatttagaatctcactgggcctaatatattttcattgctaatgccctgctgctaaaactgtgtaaacaccttccctctaggcccagggactattgcggaataggtaggtgtgtaagattataagggctgattttgagcaataaaattagtttagattctctaaatcaaggacaggmacatagatgcctgaacagctggaattttgcctcctgggccattatgtggcccctttccatccatttcaaccataaagaatttcctgcttcagatatatattaaatttttttttaatcagccaccttaggacagattactaaaaagacctcaaaattcatggtgatacaataaaagtctctaaattctttagcttaaatagttttaacaaaatactttttaaaatatgactaattaggccagttgcagtggctcatgcctgtaatcctaggacttggggaggctgaggccggtggatcacctgaggtcaggagttcaagaccagcccagt

SEQ ID NO: 413000 - DNA, 605 bp, Homo sapiens
cttacgtcttttttgtttacaatgttgctaattttatacctagtttacaaaattagataaaacaacaaagattctacctgctatctccaaaatttaaaaacatttagaatctcactgggcctaatatattttcattgctaatgccctgctgctaaaactgtgtaaacaccttccctctaggcccagggactattgcggaataggtaggtgtgtaagattataagggctgattttgagcaataaaattagtttagattctctaaatcaaggacaggcacatagatgcctgaacagctggaattttgcctcctgggccattatgtggcccctttccatccatttcaaccataaagaatttcctgcttcagatatatattamatttttttttaatcagccaccttaggacagattactaaaaagacctcaaaattcatggtgatacaataaaagtctctaaattctttagcttaaatagttttaacaaaatactttttaaaatatgactaattaggccagttgcagtggctcatgcctgtaatcctaggacttggggaggctgaggccggtggatcacctgaggtcaggagttcaagaccagcccagt

SEQ ID NO: 413001 - DNA, 530 bp, Homo sapiens
gactgggaacagttgcatctcagcggtcactgtcctgagggcagttcagaccccagcagaggccagtgaggatgtgcatcaaccccgtaaccctgtttcccttcccctgccgtaagcacctccctccccccgccacacacatrcaccagatgccatctggagaggcaaagggaaggggagcagaaacccgaaagactaagtctgttacaaaaatagactgaacatttacctcaaacgcctgtttaaattattgaatctgaataaattacttgactggactaaagtgtgagacctgcaaggcacctcaagccctatccagcagaacatgggctcaacaggaagcgcagaccagcaacagaaaaatacagagtaactctgttctcaagccagcatttgtgacgctgctgccccaacttgaagactacatttggcaaggagaggagaaaggacacaggatggaagcaaaaggaacctaaacaggccctgttgcttttctggaaggcaggaagtcatgttcacacagatgctta

SEQ ID NO: 413002 - DNA, 571 bp, Homo sapiens
atgagttgtagcttcatttttcttagagaytttcctggctgtggttgaacaatgaaaaggccctctagtggtgtttgttttagggacacttaggtgataacaattctggtattctttcccagacatgtaacaagagtaacatgtgtgaaagcagcaaagaggcactggcagaaaacaacctgaaccttccaaagatggctgaaaaagatggatgcttccaatctggattcaatgaggtaccaacttgtcgcactcacttttcactattccttaggcaaaacttctccctcttgcatgcagtgcctgtatacatatagatccaggcagcaacaaaaagtgggtaaatgtaaagaatgttatgtaaatttcatgaggaggccaacttcaagcttttttaaaggcagtttattcttggacaggtatggccagagatggtgccactgtggtgagattttaacaactgtcaaatgtttaaaactcccacaggtttaattagttcatcctgggaaaggtactctcagggccttttccctctctggctgcccctggcagggtccaggtctgccctccc

SEQ ID NO: 413003 - DNA, 571 bp, Homo sapiens
atgagttgtagcttcatttttcttagagactttcctggctgtggttgaacaatgaaaaggccctctagtggtgtttgttttagggacacttaggtgataacaattctggtattctttcccagacatgtaacaagagtaacatgtgtgaaagcagcaaagaggcactggcagaaaacaacctgaaccttccaaagatggctgaaaaagatggatgcttccaatctggattcaatgaggtaccaacttgtcgcactcacttttcactattccttaggcaaaacttctccctcttgcatgcagtgcctgtatacatatagatccaggcagcaacaaaaagtgggtaaatgtaaagaatgttatgtaaatttcatgaggaggccaacttcaagcttttttaaaggcagtttattcttggacaggtatggccagagatggtgccactgtggtgagattttaacaactgtcaaatgtttaaaactcccacaggtttaattagttcatcctgggaaaggtactckcagggccttttccctctctggctgcccctggcagggtccaggtctgccctccc

SEQ ID NO: 413004 - DNA, 689 bp, Homo sapiens
ttaattttcctttaacaaaagccaaaactttatatcttttgtataaccttccttataaaaaatatatcctttttaatataccctgtatacaaaattgtttgtttatatctattagttttaataacatctgttgattataattttaactctattttaatcataattttcggtgaaaaacctaggaagtaatcagttttaattgttacatactagatgcagagccaaagatagaggaaagaacttgaagacaatgcctgaagaatcaacacctcccagcatggccaggaggcagagctggaccagggaggattggtaaatgttgagcttgggcctgccctgcatctcttggtgcagatactataaacacatgtatgtgtggaggccttgtcatggccattctagaaatcagaatctacaggctcaaaataagacatatcctcaaagatargtcaaggaagtatcaaaaatatcagagaaggaacagttttatgacagaaaaacatagagtagagatagtataaattttgtctgaccagtatacctaggcaaaaatgtctaaaattctgaagacatttttaatttattttaccaacaattttaaaactagtttatttatcaaatattactaaagtcatgtgaacttgaaaagcatttgggttagttattcaatttatgagtactcatttatt

SEQ ID NO: 413005 - DNA, 622 bp, Homo sapiens
atctaaatgtacaaaaaatgaataccatcctgtggtaataatcattcattgcaactgctatcagtcatctccaaaattacagtcctctctccagtgactcaccaaccattacacaccaacaggtcaagttctctctcacagtatgtagtaattcctgttaacccccaaaagcccaagaaatcagggaactcaatgcaaaacagatcagagctttaggcctcaggagaacctgcccctgaatcttggggcttcatgaggaagacagaaacgtccctcaaaagagrgtgtgtgacacctttactttgtgttcctcaaggggtttcagtgcttctagaagtcccttttagatttcttcatgagatatcaaaggtagcaaaaaaggaaggcatagtagaagtaaattgtagaataagtattagagaagacaatttgaggagattttaaacttcccaataaggtcaatgaggttttacatttttctcaacaaaagttatgccaacaaggaaggaagcaacaaagaaatggaacatcaatgcttaaaaaagggattcatttgactgaaaaaaaaatactcagggaagaaataagatccaaaagagaaaaagcaaataggtctttaaaa

SEQ ID NO: 413006 - DNA, 587 bp, Homo sapiens
tgcgattggtagcacttatttaattttcaagttttggaggaattttaaatatattaccaaatttaatcattctattaatattatgatgttagtattattattctaattctgttgatgaaaattgaaccttaaaatattaagtaaattctgttcgagctagaatttgggtgtgtgcttacactcattctcaagtaaaagaaattatttacagtaaatttcagggccctctgaaatgcagtgttatctttgtgtaataattcttagaagtataaacaggtctaattacttaaaaacacaaaatgaaacaaaattaaggaatagagrtgtgctaatttttgtataacggtattacattttgttttatcgttttcagagccaaggaacttacagaaaattaaatatattttacttgaatatatcatatttctttcaagaaaatgcgtatataacttattgtaatgtcttctgggattggtggttcaaagccaaactgcagtataggataatgaggcagtgactatgaagttataccatcttttcctctaaggaaagttcataactttcaataccttttgggattgtaagta

SEQ ID NO: 413007 - DNA, 587 bp, Homo sapiens
tgcgattggtagcacttatttaattttcaagttttggaggaattttaaatatattaccaaatttaatcattctattaatattatgatgttagtattattattctaattctgttgatgaaaattgaaccttaaaatattaagtaaattctgttcgagctagaatttgggtgtgtgcttacactcattctcaagtaaaagaaattatttacagtaaatttcagggccctctgaaatgcagtgttatctttgtgtaataattcttagaagtataaacaggtctaattacttaaaaacacaaaatgaaacaaaattaaggaatagaggtgtgctaatttttgtataacggtattacattttgttttatcgttttcagagccaaggaacttacagaaaattaaatatattttacttgaatatatcatatttctttcaagaaaatgcrtatataacttattgtaatgtcttctgggattggtggttcaaagccaaactgcagtataggataatgaggcagtgactatgaagttataccatcttttcctctaaggaaagttcataactttcaataccttttgggattgtaagta

SEQ ID NO: 413008 - DNA, 545 bp, Homo sapiens
ttccaggtgcacagttccagctgttgatggatctactgttctgggttctggaggatgatgtctctcttctcacagctccacaaggccatgcaagcagggagtctgtcagggtttatcacctaactctgtctggggttatgaccccacattttctttctccactgctgtcacagaggttctccatgagggcttcatcctgtagcaaacatctgcattggcttccaggcatttccatacatcctctgaaatctaggtagacgttcccaaacatcaattcttgacttctgtgtatctgcatgctcaacatcatgtggaagctgccaaggcttggtttttgaaccctctaaagccacagcctgagttgtacctctaccccttttagccatggctggagtggctgggacatggggcaccaagtctctaggttgcacacagcagatggkccctgggcccagcccaggaaaccattttttcctcataggcctctgagcctatgatggaaggggctactgtgaaggtatctgatatgccctggggacattttt

SEQ ID NO: 413009 - DNA, 620 bp, Homo sapiens
tggctaagtagatcactcagcataaatatctttgggcaatgaaaattttgattttgttyaacttaagtgagcaccgtggtaataataaaatcaacctccagaaggaatctaaaaaaaaccccatcaaactcagccttgtgtcattatctagtaaagattggtattaaaataaaagttgccagacacagatttcctatttatcaaaatgagcgaatcactctatgcagcatttatcaaatactattttcaaaatttaagagcattaccctcatacaaataaataataaatatatgtcaaagatatttgttcaaaaaattctttaattgaggaaccaataagaccctacagctagctcaaaaaataatttgagaaatgtaaatatatataattactcagtaaaaggaattctaagttaaatatgttaataaaacaagttaatttcttacagagtattaaaaccataacattgaaattatgttttctactagacagaaatccacaagttagcatgtgactccatagtgtctgagtgctaatcgcatagtacatagaaaagatgaacacaagtatgttttcttacataattaataatagtgagtctgttaaacagtgtcgtttt

SEQ ID NO: 413010 - DNA, 620 bp, Homo sapiens
tggctaagtagatcactcagcataaatatctttgggcaatgaaaattttgattttgttcaacttaagtgagcaccgtggtaataataaaatcaacctccagaaggaatctaaaaaaaaccccatcaaactcrgccttgtgtcattatctagtaaagattggtattaaaataaaagttgccagacacagatttcctatttatcaaaatgagcgaatcactctatgcagcatttatcaaatactattttcaaaatttaagagcattaccctcatacaaataaataataaatatatgtcaaagatatttgttcaaaaaattctttaattgaggaaccaataagaccctacagctagctcaaaaaataatttgagaaatgtaaatatatataattactcagtaaaaggaattctaagttaaatatgttaataaaacaagttaatttcttacagagtattaaaaccataacattgaaattatgttttctactagacagaaatccacaagttagcatgtgactccatagtgtctgagtgctaatcgcatagtacatagaaaagatgaacacaagtatgttttcttacataattaataatagtgagtctgttaaacagtgtcgtttt

SEQ ID NO: 413011 - DNA, 596 bp, Homo sapiens
ataaaaacccaaccatcacatcaaaaataataataattgaccaatttgaaaagcataattatttcattcaataaccatgtataamagtgtaaaattggttgcttaaattatttgccagtaattatgcatgtatatcaactatttattacctaagctaataatgtagactattaaagttttcatatatatgaccactttttagaagtaacatatgtaatcgactttattgaagtataatttgtatgcaataataaaacatctacttcaaatgtaaagtttaatgagttttcacaaatgtatatatccatgtatttaccagtctgatcaaaatatataataattccttggataaggaaaaatatattttgacctatattctaattattgagattagtctccattgtaaatttgacaacattgaagaggagacttgtttgtctttcacctagattctatttgtatagtattgtagaacactaataatggatctgtaataaaggggtttgattctatttcctttgacctggcttatgaactagatggcccaggacaattccttgaacctctgtgaacctcagtgtttatattcattatgt

SEQ ID NO: 413012 - DNA, 557 bp, Homo sapiens
aataaataaaaatagccctatttcaataaactctttaaaataaataacttaaagtttaaaagtattcaaaatagctaataagtttgcctattaatggattatcctgttcatagcacatataataagacagatttctaaattcttagcattattagattagaataaataaaattttgctgattatatcaattatataccatttaaaaagttaacatgtatatttaattgttctttcatcatattaaatctatgamtgcatgaatttaatgaatatgtaagtataatttaatctttcatcatatttaaaatatttgtattataaaaattatacttaaaattgattgtataatattagatgggcacaattatatgtcaaattaaaaacactaaatccaatacttaagacctacgttgtctaattaaaagttaaaatcgcaatgagataacactacataccaattagaatgacttaagttaaaaagaatgaccatgtgaagtgttgccaaagatgtggataaactggaactctcacatgccaccaagaacagtaaaatgat

SEQ ID NO: 413013 - DNA, 557 bp, Homo sapiens
aataaataaaaatagccctatttcaataaactctttaaaataaataacttaaagtttaaaagtattcaaaatagctaataagtttgcctattaatggattatcctgttcatagcacatataataagacagatttctaaattcttagcattattagattagaataaataaaattttgctgattatatcaattatataccatttaaaaagttaacatgtatatttaattgttctttcatcatattaaatctatgactgcatgwatttaatgaatatgtaagtataatttaatctttcatcatatttaaaatatttgtattataaaaattatacttaaaattgattgtataatattagatgggcacaattatatgtcaaattaaaaacactaaatccaatacttaagacctacgttgtctaattaaaagttaaaatcgcaatgagataacactacataccaattagaatgacttaagttaaaaagaatgaccatgtgaagtgttgccaaagatgtggataaactggaactctcacatgccaccaagaacagtaaaatgat

SEQ ID NO: 413014 - DNA, 565 bp, Homo sapiens
tcacatgccaccaagaacagtaaaatgatataatcactttggttaacagtttagcatgtttcttaaacattaaacatatacctacaatatggtacaaccattcatcccagtggtatttatccaaacaataaatgcatatgcccacataagtcttgtacatgaatgttcatagcagttttgtttagttccaaactgcaaattactccaacgtccattgacagatgaatggacaaactgtggcatatccaaataattgaattcaagtcgccaataaaaattaactattaatgaactatttatacatgttacaatgtagatttatttcaaaattgttttttttgaatgacaataatcagaaaaaacacacaggtcggaaacagtgcctcatacctataattccagcactatgagaggccmacatggacagattactggggaggggtcatgggttcaagaccaacctgggcaacacagcgaaacaccttctctacaaaaaaaaaaaaaaaaaaaatagcagggcatggtgttgtttggctgtagtcccagacactctagaggctgacat

SEQ ID NO: 413015 - DNA, 444 bp, Homo sapiens
taatcactttggttaacagtttagcatgtttcttaaacattaaacatatacctacaatatggtacaaccattcatcccagtggtatttatccaaacaataaatgcatatgcccacataagtcttgtacatgaatgttcatagcagttttgtttagttccaaactgcaaattactccaacgtccattgacagatgaatggacaaactgtggcatatccaaataattgaattcaagtcgccaataaaaattaactattaatgaactatttatacatgttacaatgtagatttatttcaaaattgttttttttgaatgacaataatcagaaaaaacacacaggtcggaaacagtgcctcatacctataattccagcactatgagaggcccacatggacagattactggggwggggtcatgggttcaagaccaacctgggcaacacag

SEQ ID NO: 413016 - DNA, 475 bp, Homo sapiens
tgtcttcaggtaaacatgcaatttcatgacttacaagttctacctttcacaaaaccctgtgaacataagcatttcaaccaagttatttgtccctgtattactcagggttccctagagggacagaactaatcrtatatctatatctatatattatattatattatattatatatacaaaatatatattatacatataatatatatattatatatatttggaaaatttattaagtagtattaactcacacaattataaggtcccacaatagaccatctgcatgctgaggagtaaggaagccagtctgaatcccaaagctgaagaacttggagtccaatgtttgagggcaggaagcatccagcatgagagaaagatgtagactgggaggctaagccagtctagccttttcatggttttttttttttttttttcctgcttaatattctagccacgctggcagctgaataagtggtgccc

SEQ ID NO: 413017 - DNA, 475 bp, Homo sapiens
tgtcttcaggtaaacatgcaatttcatgacttacaagttctacctttcacaaaaccctgtgaacataagcatttcaaccaagttatttgtccctgtattactcagggttccctagagggacagaactaatcgtatatctatatctatatattatattatattatattatatatacaaaatatatattatacatataatatatatattatatatatwtggaaaatttattaagtagtattaactcacacaattataaggtcccacaatagaccatctgcatgctgaggagtaaggaagccagtctgaatcccaaagctgaagaacttggagtccaatgtttgagggcaggaagcatccagcatgagagaaagatgtagactgggaggctaagccagtctagccttttcatggttttttttttttttttttcctgcttaatattctagccacgctggcagctgaataagtggtgccc

SEQ ID NO: 413018 - DNA, 417 bp, Homo sapiens
tttttccacaaactttttgatgtccccatgtgtgtgtgtgtgtgtgtacacaactcttctattggttctgctttactagagaaccctgaygaatgcacaccattagattcctcaaaaaggaagtaatcatgtgatactttgattctaattcagcaatactaattgtctggtaagtttttatagcagcaattggaaagtaatatagcttttgtaccaggaaacaaagtgttgctgaagcaattacctataaatatgtaacaatatgtggcagggcacagtggctcacacctgtaaacctagcactctgggaagccaaggcaggcagatcacttgaggtcaggagttcaagaccagcctggcagacatggtgaaaccccatctctactaaaaatacaaaaattagctgggagtggtgtt

SEQ ID NO: 413019 - DNA, 417 bp, Homo sapiens
tttttccacaaactttttgatgtccccatgtgtgtgtgtgtgtgtgtacacaactcttctattggttctgctttactagagaaccctgatgaatgcacaccattagattcctcaaaaaggaagtaatcatgtgatactttgattctaattcagyaatactaattgtctggtaagtttttatagcagcaattggaaagtaatatagcttttgtaccaggaaacaaagtgttgctgaagcaattacctataaatatgtaacaatatgtggcagggcacagtggctcacacctgtaaacctagcactctgggaagccaaggcaggcagatcacttgaggtcaggagttcaagaccagcctggcagacatggtgaaaccccatctctactaaaaatacaaaaattagctgggagtggtgtt

SEQ ID NO: 413020 - DNA, 417 bp, Homo sapiens
tttttccacaaactttttgatgtccccatgtgtgtgtgtgtgtgtgtacacaactcttctattggttctgctttactagagaaccctgatgaatgcacaccattagattcctcaaaaaggaagtaatcatgtgatactttgattctaattcagcaatactaattgtctggtaagtttttatagcagcaattggaaagtaatatagcttttgtaccaggaaacaaagtgttgctgaagcaattacctataaatatgtaacaatatgtggcagggcacagtggctcacacctgtaaacctagcactctgggaagccaaggcaggcagatcacttgaggtcaggagttcaagaccagcctggcrgacatggtgaaaccccatctctactaaaaatacaaaaattagctgggagtggtgtt

SEQ ID NO: 413021 - DNA, 565 bp, Homo sapiens
tataaaggacttatgggacaccatcaagaataacaatgtattcattacaagaatctgtgaaggaaaaaagggagaraaacagcagaaagtatatttaaagaaacgacaggtgaaaactttccaaatctagaaggagaaatgaacatcttgattcataaagcccaaatttccaaatagatataattaaactgacaaaagtcaaagacaatgagataattttataagcagcaagagtaaaaagattatcagtgtatttgtcagcagaaattttgcaggccaggaatgaaatgatacatccaaagtactagaagaacaaaaggaaaaacacttgccaacaaaaaatactttacagggtgagactgtacattaagaataaagaaaagataagactttccaagacaaacaaaacataagaaagttatttaaccactaaacctgtcttacaagaagtgctaaaggaagattttcaagttttaaagtacagatgttaaacaacaacataaaagtgtataaaagtaaaaatataatttaaaagataaacaaacagaatattttaatactgtaa

SEQ ID NO: 413022 - DNA, 565 bp, Homo sapiens
tataaaggacttatgggacaccatcaagaataacaatgtattcattacaagaatctgtgaaggaaaaaagggagagaaacagcagaaagtatatttaaagaaacgacaggtgaaaactttccaaatctagaaggagaaatgaacatcttgattcataaagcccaaatttccaaatagatataattaaactgacaaaagtcaaagacaatgagataattttataagcagcaagagtaaaaagattatcagtgtatttgtcagcagaaattttgcaggccaggaatgaaatgatacatccaaagtactagaagaacaaaaggaaaaacacttgccaacaaaaaatactttacagggtgagactgtacattaagaataaagaaaagataagactttccaagacaaacaaaamataagaaagttatttaaccactaaacctgtcttacaagaagtgctaaaggaagattttcaagttttaaagtacagatgttaaacaacaacataaaagtgtataaaagtaaaaatataatttaaaagataaacaaacagaatattttaatactgtaa

SEQ ID NO: 413023 - DNA, 462 bp, Homo sapiens
tgttatctacaatatattttctagatttatgggacacacataggctgaaagagaaaggataaagatatttcataaaaaataatcacaaaaagagaagagggatagttattcttatatcatacaaaatagactttaagtgataacttgtctcaagaaacaaagcaggtcattatatgatgataaattgtcacttgaataggcagatatagcaatgataaatacatgtatactcartgtcaaatataccacaaattgaatatattcagcttttcatttgtcaatcatacttcaataaatctgggaaaaaataattatataagaaagaaataatttagtctctgtgaggtcttttctatggtgatgtgtcatattcacttaatgtttccttcactgaggtagtattcaactaggtattaataagaatacttaactagtgtaactatgtcctaagattactaatga

SEQ ID NO: 413024 - DNA, 462 bp, Homo sapiens
tgttatctacaatatattttctagatttatgggacacacataggctgaaagagaaaggataaagatatttcataaaaaataatcacaaaaagagaagagggatagttattcttatatcatacaaaatagactttaagtgataacttgtctcaagaaacaaagcaggtcattatatgatgataaattgtcacttgaataggcagatatagcaatgataaatacatgtatactcaatgtcaaatataccacaaattgaatatattcagcttttcatttgtcaatcatrcttcaataaatctgggaaaaaataattatataagaaagaaataatttagtctctgtgaggtcttttctatggtgatgtgtcatattcacttaatgtttccttcactgaggtagtattcaactaggtattaataagaatacttaactagtgtaactatgtcctaagattactaatga

SEQ ID NO: 413025 - DNA, 570 bp, Homo sapiens
acagacataattacctattcttgttcttactgtgtgcttccaaaacttattgrtccacgtgatgaattcagaacaaagcagtacacaaggagaactttctgggtttgaaagagcaaaggaaaagatggatgaactgtgacatgaactatgaattttattaaaagtagaacacaggaacatcaactgtgcagtcgtgcctaagaaaagacaacattaagaaaaattaaatagatttcccaaaggaaaacattattgatgaaagaaagaagtaacattgaaagcatattataagtggttaggtagctaatgtcttgtggtaggttgtatatacacatatatacacacatatacacatgtatacatatattctgataactttcgatatatattattctgtgtatacctgggattgtgagaagaagatagttggccctcctgaaacaatgtttgtgtaaatggaagcagcctggatttggcctgtggaaaaaaggtgatgaaagaaaaagaaaacaatgtcttcttcctcaaagacatcatagtttgacagctaagactgacataatgacagta

SEQ ID NO: 413026 - DNA, 275 bp, Homo sapiens
tcattaccaatttctatattagttttttcagggtgctataacaaatttttatatactaaatagattaaaaaacatttatttctaacagttgtggagactgggaattctaakataaagccactagcagataaaatgtctggtgagggtgtgcttcctagtttacaaacattggtcttcttgctgtcctcaaatactagaaaggaggctagagagctctctggggtcttgtttataatgacactaatttcattcatgaaggtttcacttgcatgact

SEQ ID NO: 413027 - DNA, 567 bp, Homo sapiens
aagtattttctcccattccacatgttgcctttttatccaatcacacaaaaatttttagtttttaagtcccattagtttgtttttttttcttttattgcctgtgacttaggtttcatatcttagatatcattgctaaatccaatgtcaaggagctttgcattattttttctataacttatatacttttagctcttaagtggacatatttaatttattttgagtttgtttctggacgtaacatttggttaggttctaacttttgtatgccgataattagttttcccaacatcatctgttgaaaagactatttgctctccatgaaaaggccttggctttcttgttgatatttatttgaccatgtatgtaagggtttatttctgagctgtttctttattctattgagctgtaygtctgtcctcgtgttactactgcattgtattgattactgtagctttgtagtaaattttgaaatcagaaagtgtgagtcttccgactttgttatttttcaagattgtttgaattatttggggtttattcagatgccatataaattttaagaaaagtttt

SEQ ID NO: 413028 - DNA, 591 bp, Homo sapiens
cttatgatttattctacattttcaatttatgtcattcttaggtactttcttaaataactatgaatcaaaacatattgagaaagcaytaaaaatatttttattacattcgtaggcattaactatcttccttatatattccttgacatactttattacttaaataaaacatataactctatttaaataaaaaatgtaaaattatattttaaaacatggatattgttttgaaattatgtatatatcattttaaatataatatttaattgtattcatttcaataaattatttgattttgattttctctacagtcttttgtggtcacacatttaatcacaaaacacctgtgaattacataatcttattcgtaaaaattatagacaggaacctaagcagaagatgttatcgccagttgaactatggatgctttgttgtatgactgcatttacaaattatttgacctcctttagatttggtcttatgttgagtataggcaacctattttaaaatagccttcttcacatttgttttctaatcagcacaaaaccatcaacctctacctggagaattgctgtgaatttagaatttgcaata

SEQ ID NO: 413029 - DNA, 591 bp, Homo sapiens
cttatgatttattctacattttcaatttatgtcattcttaggtactttcttaaataactatgaatcaaaacatattgagaaagcactaaaaatatttttattacattcgtaggcattaactatcttccttatatattccttgacatactttattacttaaataaaacatataactctatttaaataaaaaatgtaaaattatattttaaaacatggatattgttttgaaattatgtatatatcattttaaatataatatttaattgtattcatttcaataaattatttgattttgattttctctacagtcttttgtggtcacacatttaatcacaaaacacctgtgaattacataatcttattcgtaaaaattatagacaggaacctaagcagaagatgttatcgccarttgaactatggatgctttgttgtatgactgcatttacaaattatttgacctcctttagatttggtcttatgttgagtataggcaacctattttaaaatagccttcttcacatttgttttctaatcagcacaaaaccatcaacctctacctggagaattgctgtgaatttagaatttgcaata

SEQ ID NO: 413030 - DNA, 523 bp, Homo sapiens
tagagccaataaaaatatttcaccaaaagcaaagtgcatgccatatgcaaaatgatatctgatttcaagagctcaatcagaagaaacaaagcctgttatataatggtaagaaaagataaataatgtaaataagccacccacctataatattacattgttcttctagtaaattaaaaaggtattttttccagacttactgaggtataattgaccaataaaaattgtatgtgtgcaaggtgtgcaatctgtttatttgctatacctttacattgtgaaatgattactccaatcaaattaacacattgattccctcacacagttaccattgtgtgtgtgtgcaggtttgtctgagtgtgtgtgtgatgaagatacttaagatctactcttttagcaaatttcaagtaaacaatacagtaaaactgtggtcgctatacytacattagatcctcagaacttactcatcctgtaactgaaaatttgtattatttggtcaatatcctcagcccctgtcaactattattct

SEQ ID NO: 413031 - DNA, 523 bp, Homo sapiens
tagagccaataaaaatatttcaccaaaagcaaagtgcatgccatatgcaaaatgatatctgatttcaagagctcaatcagaagaaacaaagcctgttatataatggtaagaaaagataaataatgtaaataagccacccacctataatattacattgttcttctagtaaattaaaaaggtattttttccagacttactgaggtataattgaccaataaaaattgtatgtgtgcaaggtgtgcaatctgtttatttgctatacctttacattgtgaaatgattactccaatcaaattaacacattgattccctcacacagttaccattgtgtgtgtgtgcaggtttgtctgagtgtgtgtgtgatgaagatacttaagatctactcttttagcaaatttcaagtaaacaatacagtaaaactgtggtcgctatacttacattagatcctcagaacttaytcatcctgtaactgaaaatttgtattatttggtcaatatcctcagcccctgtcaactattattct

SEQ ID NO: 413032 - DNA, 473 bp, Homo sapiens
gtaaggtgagattttttgtctagttgtggtgtgtataatatctgggtggtctgatgttttccccaattcatgaaactaatgtttgggcagtggtaaacgctctcttgataaatgtaatttctgctcttgggatgccatagtatttaagtcagacagaaaaaaaatattttatttctatggttatctaggaattatgcaaatattacagattcctgtaaggctgagtcctctggaaaatagagcaaacaaatcaaacaaaaaactcaattgtctaaaattctgccacttcctatattaagatgacctagagctttgctaccaccttaaagttagagcaacctttacaagcaaatawgaactcttttctttgaatttctgtttggcagacttatgaattttggtacaactttttttgtgtgcctgatttaactgaatcctctcataatgatgtttatcacctcaaatggcttctc

SEQ ID NO: 413033 - DNA, 473 bp, Homo sapiens
gtaaggtgagattttttgtctagttgtggtgtgtataatatctgggtggtctgatgttttccccaattcatgaaactaatgtttgggcagtggtaaacgctctcttgataaatgtaatttctgctcttgggatgccatagtatttaagtcagacagaaaaaaaatattttatttctatggttatctaggaattatgcaaatattacagattcctgtaaggctgagtcctctggaaaatagagcaaacaaatcaaacaaaaaactcaattgtctaaaattctgccacttcctatattaagatgacctagagctttgctaccaccttaaagttagagcaacctttacaagcaaatatgaactcttttctttgaatttctgtttggcagacttatgaattttggtacaactttttttgtgtgcctgatttaactgaatcctctcataatgrtgtttatcacctcaaatggcttctc

SEQ ID NO: 413034 - DNA, 628 bp, Homo sapiens
gtagaaacaaataacatgtaataagtagacaaacatatatctggcatttacagatagagactgcaaaagacatgtctagtgtcactaggataaattgggattaagggtctctccaatcttaatatatacagataaacaaaagtgaatacctattattcacaaagatttatttaattattataacaggataactattgattcttttctcatgccaaatgaaagcaaaccaacagaccaaaaaggctcttagagtttgtccataagatttaaaatagttacagctgtatacattaacaatagaaacttaatctgtacctttcaatagtgtctcataataaaaytttgatactaaaagatggccatgaatatctttgcatttcacatcgacaaaaaaaattggagaaaatggaaaaattgttaaaaggcctaattgtcatatgattgttatgatatttatgtgatgaactaaaactcaaatgttatttgttatcacttgcaaggaaaacttctcattaaaaagttacattacctggctccagaatcaagctattccttgggtttggatgagacaggactttataaagaactactaaatggttatttggttaatcatttgaaaaacactaaa

SEQ ID NO: 413035 - DNA, 501 bp, Homo sapiens
atcttgcaatcacttttgaaaaaggaaaaaaataagttaagtgaataaaagtatgttatttgaatattaataagcagaaataaytttctcttttagtctcttttctttataagattttattgcattgaatattaaaaatcatttttacagtcaaaatttaaatacaaatcaattgtgtcttaagaaaaatgtttataacacacatattcaacagacgtttttacataaaactcttcctgtaaagtattgattaattgaaactatgctcttagattttttacaatattatacactataaattcaagcacacctaactggttttaaggtgtacaatggtcattcaatttaaaatgccatatctaaagttttcattatccttgtagtagcagaagttttgtttctgctccatgccaattctttagattctgtcaatcgaatttatcacagtagatcacaaagcatattctcctcaattattgtctctatttctgaggctaagga

SEQ ID NO: 413036 - DNA, 501 bp, Homo sapiens
atcttgcaatcacttttgaaaaaggaaaaaaataagttaagtgaataaaagtatgttatttgaatattaataagcagaaataattttctcttttagtctcttttctttataagattttattgcattgaatattaaaaatcatttttacagtcaaaatttaaatacaaatcaattgtgtcttaagaaaaatgtttataacacacatattcaacagacgtttttacataaaactcttcctgtaaagtattgattaattgaaactatgctcttagattttttacaatattatacactataaattcaagcacacctaactggttttaaggtgtacaatggtcattcaatttaaaatgccatatctaaagttttcattatccttgtagtagcagaagttttgtttctgctccatgccaattctttagawtctgtcaatcgaatttatcacagtagatcacaaagcatattctcctcaattattgtctctatttctgaggctaagga

SEQ ID NO: 413037 - DNA, 549 bp, Homo sapiens
ttataaataggcggtcagcacaagatataatcataaagaccctggtgataaaacagaatgcaatcaagaagctaatcaaaacccaccaaaaccaagatggtgatgaaagtgacctctgctcatcactctcaccgctcattgtttactagttataatacattaatatgctaaaagacagtgcctccagtgacatgacagtttacaaatgccctggcaatgtccagaagttatgctatatggtctaatatggggaagaatcctcagttctgggaattgcccacgccttttccagaaaactcataaataatctaccacttgttcagcacataattaagaaacaaccattaaaaatagccaaccagcagccgtcattgctgctctatgtagtagccattcyttggggtttttactttataaacttgccctcacttcatactttggactgggcccaatttctttgttgtgccaaatccaagaaccctctcttgggatctggatctggaccccttttgggtaataaggttacaggcatgagccaccacgcctggc

SEQ ID NO: 413038 - DNA, 536 bp, Homo sapiens
ttataaataggcggtcagcacaagatataatcataaagaccctggtgataaaacagaatgcaatcaagaagctaatcaaaacccaccaaaaccaagatggtgatgaaagtgacctctgctcatcactctcaccgctcattgtttactagttataatacattaatatgctaaaagacagtgcctccagtgacatgacagtttacaaatgccctggcaatgtccagaagttatgctatatggtctaatatggggaagaatcctcagttctgggaattgcccacgccttttccagaaaactcataaataatctaccacttgttcagcacataattaagaaacaaccattaaaaatagccaaccagcagccgtcattgctgctctatgtagtagccattccttgggktttttactttataaacttgccctcacttcatactttggactgggcccaatttctttgttgtgccaaatccaagaaccctctcttgggatctggatctggaccccttttgggtaataaggttacaggcatgagc

SEQ ID NO: 413039 - DNA, 538 bp, Homo sapiens
tgtgtgatcttttaagattggctatttttttcactcagcgttatggtcttgagctctgtccaaggttttgcctctatcaattcttggctcctctttattacagagtgatagtccacggtatggatggaccacagtttgtttatccattcatccactgaagggcatttgcattgtttccaggctattacaaataacacttctatgaacattcrtgtatatgtcttttcatggacctaagttttcatttctatgggataaatgtccaggagtaggatggttacatcatactatatgaatacatttcactttttaagaacatgccaaactgttttccaaagtggctgtatcattttgcatcctcaccagcaatatacgagagttcaagttgctctgcaaacttgtcaaccagtattttttttagccatctaaggaggtggggagtgatatcccattgtgattttgacttatatttccttggtggctaataatggttgagcaccttttcataggttcagttgtcatccctgtatcttctctg

SEQ ID NO: 413040 - DNA, 538 bp, Homo sapiens
tgtgtgatcttttaagattggctatttttttcactcagcgttatggtcttgagctctgtccaaggttttgcctctatcaattcttggctcctctttattacagagtgatagtccacggtatggatggaccacagtttgtttatccattcatccactgaagggcatttgcattgtttccaggctattacaaataacacttctatgaacattcgtgtatatgtcttttcatggacctaagttttcatttctatgggataaatgtccaggagtaggatggttacatcatactatatgaatacatttcactttttaagaacatgccaaactgttttccaaagtggctgtatcattttgcatcctcaccagcaatatacragagttcaagttgctctgcaaacttgtcaaccagtattttttttagccatctaaggaggtggggagtgatatcccattgtgattttgacttatatttccttggtggctaataatggttgagcaccttttcataggttcagttgtcatccctgtatcttctctg

SEQ ID NO: 413041 - DNA, 593 bp, Homo sapiens
cagaagtcttattggctcaagactacatagttggagttgagggcttccagagcaactggaaattgagagggaaaaaamatatcccagaaaagagagccacagagggagaaaactccccttaaatctttggctgactctggcatggggcatgactccaagaagcctaggggaagacacagatggaagactaaaagaggggagcataggttcctgtagctgcttgatatttgggagatggattttcctgttcaaatctcaccaagttagtggggcttggtaaacactccaggctttttcattgagatcctgggagatcatgacttaggaagaagcactaaaacaaacctaccccaacacagtttcaaattgagactccaccaaatcaaggtgaatggtcagcaactaaacagagcaatatgcaaaattcttcagagaaagacaacacaatccagaatctctatactgtattatttacaatgtccagcataaaatagcaaattactagatatgtaaggaaacagaaaagtgagacacataattaagattttaaaaaatagaaacaggtgcagattttggaattcataagcagactt

SEQ ID NO: 413042 - DNA, 593 bp, Homo sapiens
cagaagtcttattggctcaagactacatagttggagttgagggcttccagagcaactggaaattgagagggaaaaaaaatatcccagaaaagagagccacagagggagaaaactccccttaaatctttggctgactctggcatggrgcatgactccaagaagcctaggggaagacacagatggaagactaaaagaggggagcataggttcctgtagctgcttgatatttgggagatggattttcctgttcaaatctcaccaagttagtggggcttggtaaacactccaggctttttcattgagatcctgggagatcatgacttaggaagaagcactaaaacaaacctaccccaacacagtttcaaattgagactccaccaaatcaaggtgaatggtcagcaactaaacagagcaatatgcaaaattcttcagagaaagacaacacaatccagaatctctatactgtattatttacaatgtccagcataaaatagcaaattactagatatgtaaggaaacagaaaagtgagacacataattaagattttaaaaaatagaaacaggtgcagattttggaattcataagcagactt

SEQ ID NO: 413043 - DNA, 545 bp, Homo sapiens
ggaatgcaaatgacatcgtagctatttgttatgtcttgkttttttttgtactcaacactacttatttattattgttttccccatattcttttattttgtttggtttggggctctttcatttttattcatcattaataattgcatatatttattgggtacaatgtgatgttatatacatatatacattgtggaatgatcaaatcaggctaattaacatatctgtcacttcacgcatttatcattctttgtggtgaaaacatttaaaactccactcttttagcaattttgaaatatacaatgcattattattacctagagtcaccatgctgtacaatagacaccaaaaggtattcctcccgtctaactgaaactgtgtacccttcgaccgataactcccttttccccacctgccgccccctcacttcagcctctggtaaccatctttctactctttgtttctacgaaatcaacatttttagattccacatataagtgagatcatgtgacatttctcttcctatgcctggcttatttcacttagcgta

SEQ ID NO: 413044 - DNA, 562 bp, Homo sapiens
ttaatccaaccagtattccaaggtcaagatttttgccatcattcttgctctagccagatgcaacagctaaatgaagtgaaagaggccttaaatgtgtccacacacttgaactaataagtgttaaagcccctcctgtggataatttttttaattgtcactacctataaaatcatacatttaaagaagtctgtcaattataagatttaaaatattgctgccaattyaaaatgtgacaaatatataaatatgatctgaattgctaatactaaaacaagagcattttaataattttttagcttgccaaaataataggcaaatttgaataattttatgaaagcgtagagggaagagggaaagagtttaagatttgttttggatgggttctcgcataatgttataaaatagcaacagaaaacattcaagcagagcattaaaattaaaaagaaaaatcaaatgaaatatggcaccctgcgttctaagtatttgttgtgtgaatgaatgagtgttgatttggcttatttgttagataataaaaggtcagtgaaatgaagcaattatttaa

SEQ ID NO: 413045 - DNA, 562 bp, Homo sapiens
ttaatccaaccagtattccaaggtcaagatttttgccatcattcttgctctagccagatgcaacagctaaatgaagtgaaagaggccttaaatgtgtccacacacttgaactaataagtgttaaagcccctcctgtggataatttttttaattgtcactacctataaaatcatacatttaaagaagtctgtcaattataagatttaaaatattgctgccaattcaaaatgtgacaaatatataaatatgatctgaattgctaatactaaaacaagagcattttaataattttttagcttgccaaaataataggcaaatttgaataattttatgaaagcgtagagggaagagggaaagagttwaagatttgttttggatgggttctcgcataatgttataaaatagcaacagaaaacattcaagcagagcattaaaattaaaaagaaaaatcaaatgaaatatggcaccctgcgttctaagtatttgttgtgtgaatgaatgagtgttgatttggcttatttgttagataataaaaggtcagtgaaatgaagcaattatttaa

SEQ ID NO: 413046 - DNA, 560 bp, Homo sapiens
atgatccaggcctctgttttatagcaggtcagttattcatcctctgaccctcacccctctttcttctgacacttcttgtcctttggtttcaaaatattaccttagaaaactataaaataataaatacctagcactgtcctgttgcacagcagtttcttaaacattgcactcattactgaattttccataccgcacctgccagttcaatgagagatagtctatttcattgtataattcctcatcttgcagatttgcytcaaaagtctacaaaatagacaagcacaggctttataaaagtccttacctttaggtgcttggtgatgttcaattgacctatgaaattacatatttataattgatcagctgcttatggttatcatgctttcttttactttacattcccaacaacttagcatatataatcagctgaattccctttcaacagaagctttatcattcttgaaataagaaaagaaaaaaaatcaccaaaatgatcacttagaatgtcacaactacactttgtacactttgcagtatgtgacctatcctgggaaaaggca

SEQ ID NO: 413047 - DNA, 560 bp, Homo sapiens
atgatccaggcctctgttttatagcaggtcagttattcatcctctgaccctcacccctctttcttctgacacttcttgtcctttggtttcaaaatattaccttagaaaactataaaataataaatacctagcactgtcctgttgcacagcagtttcttaaacattgcactcattactgaattttccataccgcacctgccagttcaatgagagatagtctatttcattgtataattcctcatcttgcagatttgcctcaaaagtctacaaaatagacaagcacaggctttataaaagtccttacctttaggtgcttggtgatgttcaattgacctatgaaattacatatttataattgatcarctgcttatggttatcatgctttcttttactttacattcccaacaacttagcatatataatcagctgaattccctttcaacagaagctttatcattcttgaaataagaaaagaaaaaaaatcaccaaaatgatcacttagaatgtcacaactacactttgtacactttgcagtatgtgacctatcctgggaaaaggca

SEQ ID NO: 413048 - DNA, 588 bp, Homo sapiens
taaaatcattttcaaaacagatttacagcaaagggcattagacattataaatcagtgacaataatcaatttaccatgcttccaaatgtacataggctaaacttttctcatgaacatttcaaaacattcaaatttggtataattttgtaacaagttataataatttatgaaaatgacaattggtagtcagccactttctagggaaacaaaaagagaaactcagagctaagcttagagtgctttgcagttagttttattaattccatttgcctaaataaggtaaagayttgccttttttttttctagagtgatttaatcagttcaagctgctataacaaaatactatacattgggtggcttaaacaacataaatttatttcttacagtgctagaggccgagaagtccaagatcaaagttcccaaaaagtaggttttattctgagatctcttctcttggcttgtaggcaggcactggtatctcactgctcaaatgacctctttgtacacacccacagaaagacagagagagaacaaactctctggtgtctctcctttacagacgctacatgagggccccaccctcatgaca

SEQ ID NO: 413049 - DNA, 585 bp, Homo sapiens
ctacccactttggcacaatttcctacaaaactttgacaattcattccttggtgactttagctgtcactcattataatgtgatgatttgtcacagttagctgttcctagcagacatacattgctatgaatagttttatttattcatctggaaaaattgtaagtgtcatgagatccaaagaataaccacttctttagaatccaaaccctctaacatcaaagatacttgcacccttttctccaaatcttttccacatttttagaaaatayttccaataacttggtcttccagttccttgtcctcctgttctccaatggccttgacttctggtctatctcagccactcattcctatctttataccataacatttaatgcctattttttttagaactctgaagtgtctattattatttataaatcttttatatagatatagacacagaaaaaaacacaaatctatagatacagacataaatagaatttgaggaaacttcttgaggacctcctctctcattggccaccaacaaaattaggcatttctaacagagattggcaatgtttatatagccttttgtagataacaag

SEQ ID NO: 413050 - DNA, 465 bp, Homo sapiens
acatttaatgcctattttttttagaactctgaagtgtctattattatttataaatcttttatatagatatagacacagaaaaaaacacaaatctatagatacagacataaatagaatttgaggaaacttcttgaggacctcctctstcattggccaccaacaaaattaggcatttctaacagagattggcaatgtttatatagccttttgtagataacaaggtgattcttcagacattcccatacaattgatacaaaatgatttctcctctgctgatttttatttccatatgcaatggcattcattttaagaaatgttttttgaagattcaatactaacccttgattttttagcataactttggtacctgataataacttttaaattatccacttattattttttgtacctgccacgtattaaatgtgtatctgaaggagacagagaccagtgatgtgtttaaaa

SEQ ID NO: 413051 - DNA, 628 bp, Homo sapiens
cagacataaatagaatttgaggaaacttcttgaggacctcctctctcattggccaccaacaaaattaggcatttctaacagagattggcaatgtttatatagccttttgtagataacaaggtgattcttcagacattcccatacaattgatacaaaatgatttctcctctgctgatttttatttccatatgcaatggcattcattttaagaaatgttttttgaagattcaatactaacccttgattttttagcataactttggtacctgataataacttttaaattatccacttattattttttgtacctgccacgtattaaaygtgtatctgaaggagacagagaccagtgatgtgtttaaaatagcagagacactgaagaagtgattatgtgatctaaatagacagggattgagaagcagaaggatgatcaggggaaataactaatatttattgtttattaaagtagaatttaccttcatcagaatgtacaggtattaactgtctatctcaaggagttttacaatcatatacacccatgtggccactacccaaagcaagatatagaacattttcatgatttaagagagggttctcattcttatttttagttcatccttcacagaaa

SEQ ID NO: 413052 - DNA, 628 bp, Homo sapiens
cagacataaatagaatttgaggaaacttcttgaggacctcctctctcattggccaccaacaaaattaggcatttctaacagagattggcaatgtttatatagccttttgtagataacaaggtgattcttcagacattcccatacaattgatacaaaatgatttctcctctgctgatttttatttccatatgcaatggcattcattttaagaaatgttttttgaagattcaatactaacccttgattttttagcataactttggtacctgataataacttttaaattatccacttattattttttgtacctgccacgtattaaatgtgtatctgaaggagacagagaccagtgatgtgtttaaaatagcagagacactgaagaagtgattatgtgatctaaatagacagggattgagaagcagaaggatgatcaggggaaataactaatatttattgtttattaaagtagaatttaccttcatcagaatgtacaggtattaactgtytatctcaaggagttttacaatcatatacacccatgtggccactacccaaagcaagatatagaacattttcatgatttaagagagggttctcattcttatttttagttcatccttcacagaaa

SEQ ID NO: 413053 - DNA, 629 bp, Homo sapiens
gaatgctatttttaaaataatctctttaaattatgtgtcaactgtatacattggtcagtattgaaaaaacagaaattcaaatatcttaaaatagtagattatagcaatgtaagaatctgagtagatatgaagaaatgtatgtgctgatgttttaaattaggcattcatgaggagctagtaaagtamaacagaaatagtcaatctggaaattgtggaatgtagttggaagctttagtaagacatgagttttacatttatgaagagtaaagtaagtatagcctgggtgtggtggctcatgcctttaatcccagcactttgggaggccaaggtgggtggatcacttgaagtcaggggtttgagaccagcctcgccaacatggtgaaatgctttctctactaataatgcaaaaatatgccgggcatggtggtgcacacctgtaatcccagctactcaggacactgaggcaggagaatcacttgaacctcagaggtggagattgcagtgaactgagatcacaccactgcactccagcccaggacagaacaagactctctaaaaaaaaaaaaaaaaaaaaaaaaagtaagtaagtcagtatagaaaatacatacaaatttattgacttatttttc

SEQ ID NO: 413054 - DNA, 587 bp, Homo sapiens
acatagctggtagggatgtaatatggatcaaccactttgaaaaaggttttgccaggttttagtaaaattgaacatatatttaccttatgatatagtgattctgtttctayttactaaaaatatatatatgaaaatacatatgcaccaaatataataaaatttgtacaaaaagttacaaagaagctttttcgtaacagtctaaacagctgtcaacacaggaataagttatttttgccatatatagataattaattattgctttgtaatacaaggtatgaacaacagatacatgcaaagacacagatgtattatcacatagtcattatgctgaactaaaaaagccaaacataaaatagcatatactacgtaatcccacttttgaggagaacagagatgtcctgtatattaatagtagtgctgattatagaaatagagggaacatcacacaccagggcctgttgtggggtgggggctaggggagggagagcattaggagaaatacctaatgtagatgatgggttgatgggtgcagcaaaccaccatggcacgtgtatacctatgtaataaacctgcacgttctgcacatg

SEQ ID NO: 413055 - DNA, 565 bp, Homo sapiens
gtaaactgttttctttcatttcccatgctcctacaagtcattcaattccttccctacctgtgctattgcaacaattaatttttcatccaaataggaacatctctattaataaccatactgagccagcaggagaattctacccaaattgtatttgccttacctgccgyttttgacacaaactatctaaaaatcccttaaaaaaactcttgttaaatgcagagatattgtaatattagtgatatttctttttctacattttagctgcattaattctgccatagaatatagctaatataaagtagccttgggttttaaatattgcgttatgatagaaaatattgtatatcttatcataattttatgtttttatgttctgagttagtattaagtccacttggaggacataatgttcaaaccaaaattctatccaaatataagccattgaagtactttaaaattaaagcttgagtataatttgtcactgtccatatgctgggaaaacatactgaacatacatcaaagaaatattttttccaggaataattttcagagctttcaaaagctg

SEQ ID NO: 413056 - DNA, 493 bp, Homo sapiens
cattattgtcttcctttcatttagcttggcatggttttcattttgatgaccctattgtctactgttgcctctttgtagtgagtagcatgaggtcaytgctttagtctgtcttttgaagttaattttttgtttcagaatctggttttagtaaaaaatcctcaaaactacttttgaagggttgtgcatttttatgatgacatagtgcttaggtttgttataaaaattgattacatgtttttataattatctatatgtgagaagtagtcttttaatcagttaaagcatttttgaagattacaaaaaacatctgtttatttttaaaactgcagctacatagcatttgaaaatcaatgtaatagtatttttttttccgtgcattacaaacactgtgagaaaacaagagggcagtataaaggcaacatttgtcccaaagctggggaataggtagacagaattggagttggcctttccaatgttctgtctaagacagtta

SEQ ID NO: 413057 - DNA, 493 bp, Homo sapiens
cattattgtcttcctttcatttagcttggcatggttttcattttgatgaccctattgtctactgttgcctctttgtagtgagtagcatgaggtcactgctttagtctgtcttttgaagttaattttttgtttcagaatctggttttagtaaaaaatcctcaaaactacttttgaagggttgtgcatttttatgatgacatagtgcttaggtttgttataaaaattgattacatgtttttataattatctatatgtgagaagtagtcttttaatcagttaaagcatttttgaagattacaaaaaacawctgtttatttttaaaactgcagctacatagcatttgaaaatcaatgtaatagtatttttttttccgtgcattacaaacactgtgagaaaacaagagggcagtataaaggcaacatttgtcccaaagctggggaataggtagacagaattggagttggcctttccaatgttctgtctaagacagtta

SEQ ID NO: 413058 - DNA, 528 bp, Homo sapiens
ctgtttgtttgctttttacttttaataatagccattctgactgatgtgagatggtatctcattgtggttttgatattttttcatatgtttgctggctgcttataaatcttcttttgggaattgtctgttcatgtcttttgcacactttttaagggggttatttgtttatgytttttcagttatttaagttttttatagattctcgacattagacctttgttggatgcacagtttgcgaatactttctctcattctgtatgttgtctgtgtactcttattgataggttcttttgctgtgcagaagctcttgagttaaatagatcccatttgtcaaatgttgtttttgttgcaattgattttaggacttagtcatagattatttctgaaggccggcatccagaatgccatttcttaggttctcttctaggatttttatagtttgaggtcttacatttaaatctttaatacatcttgacttaatttttgtatggtaaaaggtaggggtccagtttcattcctctacatatg

SEQ ID NO: 413059 - DNA, 565 bp, Homo sapiens
aggcaatatacttatgtagcaaacctgcacatgtaccccctgattctaaaataaaagttaaataaataaataaaattactaattctctcaaaagaagttttaggattagtttcttcttaggcatgttgtgttacaggtaggagtcagcaaactaagacccatgggccaaatctggccttcagcctccttttgtaaataaatataaaaacagccacttctacttttttacataaggctactttcagactstattggcagagttgaatccttgccacaggaactgtatgagctgcaaaactgaaaatatttactatctgagcctttccaagatgtttgccaacaatgggtagagaaacaccctgttcttgttagttcaggatgagggaggtggttagttccacatttgtataccttatgggagaatttccctgagtgatatccatgtgaatggaaaactagaagagcagatggtggtaaaagaaagaggtaattatatttgcagaaaaatatcagtattatttaactgttagtaatatatttgagtctctagaatgcaaaaatacca

SEQ ID NO: 413060 - DNA, 651 bp, Homo sapiens
gaagactcactttttttcttgcaagtgaaactgatcagaagtcttttaaaaatacttttattctgtgtttgtttttcaaaagtacaactctatttattaagcacatttgggaaactattgtcatatgcctccctactaattgcaagaacctgggaatctaaggttttagctgagtatatacttgaggaaaaaaggttattaggcaaggctgtgcaagcatcttttcctttaaatcaactcttgagttatctgtgttcctaaataaactgggttgtattttcagagtggaatttctttttaaatttctcattttctgaactataaaaacaaatgtttctataagtttatattagttattttctcaataattagtgcctcatgtaaaggcaaataaygtgactggaaatgtattgtttttaaaattaaaattatttgaataaaactttacatatatagctcttactgctcaaaaataagattttatatactgtttcttttagttaatgcaaaatctcttgaaaagatactctaaatgaatgaattgccactagaatcaaatttataatttaagtggcaatatatttcataaatacgtgggaagagctgcattgttccaatattggccattctcagattttccagtaaagtatg

SEQ ID NO: 413061 - DNA, 552 bp, Homo sapiens
tacgtaacattcaaacactctccacttcgtctcaaagaaatggtgataattttgaaatgctgctgcatgagaaagtgtctgaatttttctgttctggaatctttcctttttttttctcacattgaatttattctccatggtatagactgtgatggaatgccaaattatttcttctgaagccttattagtaaatattagtctaatcaaatatttagtcaagacataatcttccattactgaattttyatttgttcattacagaagtgctggatatttccaaacctgaacacactctctgtagatacttcatgggaattaatattattgcactatcacatgtatgttcttatcatgctatgaacatggcaattaaaagccctgtgactactactactaactcagttggaaaagcaattatccacttactcatcaccaaggcacttcttaggaatgcatttcagaacaataatcaatagagatatttatgttgatatagtattggttatattcatgtctgatataatatgggttacaatgacactacaaagttta

SEQ ID NO: 413062 - DNA, 576 bp, Homo sapiens
agatagaccataggctgagtcagtataaacgtttctacaactatcttaaaaacatttatgaaactgtccaagacctgacattatgcagaatatgttctctgaccaaaattgtattaaaatagaaattagtaacaataagatatccagaaaatgtgtgaatatttagatgttattgaaagcatactactaaataatatctggttcctttaaaatattaataaaattaataatcactagaaagactggtgaataatatagaatacacagattgccaatatcaggtttaaatgagktaacattgcattagatgcttcaaatatcaaaagaataaaaagaaaatttttggaacaatgtttcgacaattaaaaagctaatttaaataaaatgtgaaacaatcttgaaagaaacacattaccaaaactcactcagaaaagaataaaaaatctattttgtcttatatatcttgcataaactgaattcatgatttaacaagttccgacaacaaccagaaaaaatactccaggaaaacatggcttcagtggtgactctagtattttaggaatatgtaatattaat

SEQ ID NO: 413063 - DNA, 603 bp, Homo sapiens
ttcctaaacacaattaatcttttaactattcctgtatatttccaaagcacattgtgtrcacccttattaagaaactcaacactatcttacagaagtgtaagcacttgtctgtcttccttgaagggaaaaaaaaattgatttgttgatttgtacatttttacacttcatagtaagaataataaggattaacatagtagcaattaacaatatttgttgttagataaacaatacagaattctcaatcatttctgtaactcaaaaataaaagtatagtcctggaatctagaaggctaataaaagaaacagaggtaccccaaattttcaaacaggattccaaaaatgagtcaagtgtcaattgttgtgagtaaatgaatcaatttccttctctttattatacaagttttgtgtgctggtaatacctaatattaaataaatataatatggggtatttatattcagtactaacagagtattaaaaaaaccctctcctttttttccaaaatagcaattttctctctctgacacagttgtactatagtttatgtttgttcttaaatcatttaggacaatttccaaaaggtctttgcttgtaagacaaggctt

SEQ ID NO: 413064 - DNA, 603 bp, Homo sapiens
ttcctaaacacaattaatcttttaactattcctgtatatttccaaagcacattgtgtgcacccttattaagaaactcaacactatcttacagaagtgtaagcacttgtctgtcttccttgaagggaaaaaaaaattgatttgttgatttgtacatttttacacttcatagtaagaataataaggattaacatagtagcaattaacaatatttgttgttagataaacaatacagaattctcaatcatttctgtaactcaaaaataaaagtatagtcctggaatctagaaggctaataaaagaaacagaggtaccccaaattttcaaacaggattccaaaaatgagtcaagtgtcaattgttgtgagtaaatgaatcaatttccttctctttattatacaagttttgtgtgctggtaatacctaatattaaataartataatatggggtatttatattcagtactaacagagtattaaaaaaaccctctcctttttttccaaaatagcaattttctctctctgacacagttgtactatagtttatgtttgttcttaaatcatttaggacaatttccaaaaggtctttgcttgtaagacaaggctt

SEQ ID NO: 413065 - DNA, 481 bp, Homo sapiens
gttaattcctgtgattaataaggagatgcagtaagtcagatcataacaaatggtacaagttctaacatagatatacgtctttagacaggtcccttaagggcacaacagtaaatctaaatagtcttaacaaatataattttggttgtttgttattatgaaagttgtcacacttctacatttctgcttacccattctatattttcctctggagtaaataacaaagaatcagaggtgccttgctgatggcagtggtcatggtgatggtgatgatgataatgatgstgatgatgataatgatgctgatgatgataatgatggtgatgatgatggtttatttagaagttccaagtttgctagagctacccattaagtttctttcaaataaaaaggtccactctattaagtttcagctgtccctctggaagccttattcactaaacaaacacaaacctaaccactccttttggtgatttgataaaat

SEQ ID NO: 413066 - DNA, 504 bp, Homo sapiens
ccactccttttggtgatttgataaaataggcaaactctctaggtcacaatgtgcccrtattgttatggaaaagacaagtgttcagctttctagatatagagcctgaaactaggaaaataatttttttttatcgtctactgcccatcacctgcctcttagccaattgctctctctgcttaaacagcctcatggttgaaggaaagtcacttaacagaattattaaatactttattttagtaggtgaattgacaagtgaaagttaaaaataaaataaaaagaaaaaatcactggcattacccttctcctggacaatcttttctttgtcctttttcctcataatgagggcttctgaataggatgatccaggtaacacaattcttctgtgaccctttgggagaagagaggtgaatttactggtagtgcataaaatgatggcaaaaaaatggtaacagatcttataaagggtcatcaaatttgaccgtctcttaactagttccagccaac

SEQ ID NO: 413067 - DNA, 597 bp, Homo sapiens
tgttcagctttctagatatagagcctgaaactaggaaaataatttttttttatcgtctactgcccatcacctgcctcttagccaattgctctctctgcttaaacagmctcatggttgaaggaaagtcacttaacagaattattaaatactttattttagtaggtgaattgacaagtgaaagttaaaaataaaataaaaagaaaaaatcactggcattacccttctcctggacaatcttttctttgtcctttttcctcataatgagggcttctgaataggatgatccaggtaacacaattcttctgtgaccctttgggagaagagaggtgaatttactggtagtgcataaaatgatggcaaaaaaatggtaacagatcttataaagggtcatcaaatttgaccgtctcttaactagttccagccaacctgtttcctcagcaatagcagttattatatggggctgagggtttagtccctctctgtatgtgaacttcttatgtatgtaagttttagtacatcttaatatggaaatttttccaaaatttaaaaattttagggccactgattctgagactatgaattttttaagtggtgtca

SEQ ID NO: 413068 - DNA, 603 bp, Homo sapiens
tttaatctaaagaattttatctcttatatatgttgatattttcaatcttctgtatgaattgctaatgaagctcagtagaacaaataaccttttgagacctttaaaagataaaacatataatgcagaaatggtagaaaaaatattttggtgagtaagaagcagaagaaaagatttcaaaatcattgaaggtatttagatagattgtacatatgtcttattttattatgcatttattataattagtcaaattactgacaagtcataaagaaagaacttaccactgtgtttcaaaagtaagtgaatatgagggaattttaaacccaaggagctaaacattataaaatgttagaaatagyacataaaagcaaatttaaaaaaatttttatatttttaaagtggcttttaattctatttaatttcttatttaatgtgaatgcactgattggaaaactattagtgaaatcatgttaaatctgtattccaaagattgatagattctataggacatatattgtgatgtaaatgctttagaagcagtagcataagataattcacttgctattgctttttggtaattgcaaaatactacatgtaaacaattca

SEQ ID NO: 413069 - DNA, 526 bp, Homo sapiens
ggccctagcacagtgctgatggaatctggaaatatcgccaggggatcatttgcaagactaacctaataaattacattatttttttcctgggatgaggaaacaaggacagagttgaaacaccttcccccagaaatgtgcttgcctctctcagaccacaggtaagggcttaatatgatgtgagaaagaggatttctggcttggaatgcaattcatttctattaacatttagaaagcatcttgggtgggcaggaatgaaaaccagacactgtacatgctatgacatagttttcaatcactaaggagatgaagaggcaagctatcagtgtaacagaaagcagaatgaaagaaagaggggctcagtaaagccttattcttttgtagaaggcatgagatcctatgaggtaggcataggcaagtattaccctcattttccagatgrcaaaacttgcttacctgcctcagagtttaagtggcttgtttattgtcacagagctaataattagcagattagggtctcctagctggg

SEQ ID NO: 413070 - DNA, 578 bp, Homo sapiens
tcagcttttcaaaggactgtggtctgggataacaaagaagtaagtggtatttgtgaaaccacagacagttaattcagatacaccagcccagggctgagtgcccagcagtgagggatcgcacaatgtgtatacacacgcccgcacacactgggacacagtggtggcagggtatgtaaaactgctcagtcaccatcattcttctttattctcttcatagtagaagcactttaaaattctgcttctgtagtccttttttttttttcttgagacagggtcttgctctgttgcccatgctgaagtacagtggtgtgatcactgcttactgcagcttcgacctcctgggctcaagtaatcttcccccatcagcctcccaagtaggtggcactacaggtgtgcaccaccacacccagctaatttttgtattttttttaragatggggttttgccatgttgcccatggctagtcttgaactcctggtctcaagcaatccacctgcctcgacctcccacagtgctgggattacagcatgagccactgcactagccctgtaatccttttaatacttgcttaacttgtc

SEQ ID NO: 413071 - DNA, 580 bp, Homo sapiens
agcatgcattggtcccatatgttatgtatccagaaaagttaatatcccaacttttctcacctcctcaataacttgtctgaggggaccagtccctgcagcttcaatggcaagtgtatccatgcaggagttgtagaactggaaggctttctcctccccagagcctgggtgccaggaattctggacctctagaaaggaagcatgggagtgaggactaaactctgattttttttatcttgccccaaattcctatcaaaggggtctggggagtcatgccctatatcataagttctcatcagatgggttttatttaacccatgtaacatgatttactttctaacctgattctggcataacattacgagacaaagaagaaaacaaaaatattttaccccaaaacatgtttctttgccacattttgaaatggccctgcaaagctgttctttgtggrggaaaatttgcatctgtaaagcatctctattagctattaacatatctcattaacatagctagatcttttgattaactaagatctgaataggaaacatttgtcacctattgtctctaagggcagccactataa

SEQ ID NO: 413072 - DNA, 521 bp, Homo sapiens
tctcatatttataaatggcaggtcttgtcttcattcctgacaggctcttctcttctgacgtctcagttgtcagttcttctcaattgggtgtgaaaactctaatctctagtatgtcttaaaacctctgtgtattttgtacctgtctctgaccatgacatgggatgggggagttccactgcctcagsaatgcactaccttctctaggtctccacttcatcttctggcctagggagttttgggagttgctgtttctgaaaaaagacaggtattgggagttgggtagggccagggtgaatgtgtgttctgacacccagagggagaaagaggcagacaacatacaagtatacaaatgaatagtataatttcaggtcaagataactgctgtgaagaaaaataaagcagaaaagggggacagagagaaatggtagggtgtaatgaggtcatttttgataaggtgatccagcatttgagcagaaggagtaaaggagttgcctatgtgaggatctgagggaacacgttaa

SEQ ID NO: 413073 - DNA, 609 bp, Homo sapiens
tacaatggccaccaaagttcaacatgagttttgaaagggaygtgcaaaccatagcagtaggaaacctaggaaacttgtactatgcatacactgtggcctatttttaagtttgttaattctttcttcagctatgttgaatctaccaatgaacctgtgaaaataattcctcatctcccatatcgtggttttatttataacatttccattatattctttcttatagttttaagctgtctatcagaaaccttttcttgtttatgcatgttgtccaccttttcaacaacatcatttaacgttttcattacacatattatgtttgcattaagtgaatattttttctatggcagtcaacccttcatatccatggattcttcatcttggattcaaccaactgcagataaaaaatatttgggaaaaaaaggttggttgtgtatgtactgaacatgtacatgctttttaaaaatcatgatttcctaaacaatatagaataacaactatttaccttgtattaggtattataagtaatctaaaatgatttaatgtatacaggatgatgtatgtaggttatatgcaaatagtatacaattttatataaagaacttgagcatc

SEQ ID NO: 413074 - DNA, 646 bp, Homo sapiens
attggcttgaatagagtgactattatgttttctgtcttggtaggctgcccttttcctgctccttttgctggagagagcaggctttccttggggctcttattgtctgcatccatttcatttctgggtttctgaattattcacctccatgactgggatatatgaggctaaatgaaaacccaggggaagtcatctcactctgcaagtcacaaagtcactgccttcatagctcactgcagccttgaactcttgtgctcaagttatcctcccacctcagcctcagccttttgagtagctaggactaatttttaaaatttttcatagagatgagatctcgttatgttgcccaggctataaaaatgacattttaaaaagaaaaaccatagaccaagcttgcttattaataaagactacactcttgaagtaaatattcatagaattcaaatgatgcctgatccattcatctggggatacacatgatgtcatatgaacatcagcacctcaaatatcctgttcttgcctctcccaaaaagttcacttcaagtgtttttggaattccctgaggggtaggttttcacaggaaataaatcatccagkcagctgtggttactatgcagcatccactgtgttatttttcttttgctcttat

SEQ ID NO: 413075 - DNA, 568 bp, Homo sapiens
cataatctctgacccatagcataagtgaattcatcaacgacagtgaggaacttgataacaggatttactggatataattctggtgggtcgctgtctgtcaccaagacagaaaactgacattgattttatcttcagatttttgcttgacctaccaatgtgattgtggcgctggttatcagggagctctcaaaatgggatatgagcccttgtttaatcagcattgtgtctgccttgtccctgattcttattatctaatgcaaatgggcttccttattacctaacatagtaggttcaagctgggaragccaaacaaactgaagctacaaaatgcaagcaactgagcactgtcttgtcttagggacaaagtaaataaatgcatcaattccccaacacaaatgcactacaataaccaaagacagaagaaatcacttccaaagaattgaatggaaagtgtttaattttgtacttgtttccacgattttggaatggaaaccagtcctttcaactcagaagactataccaattgcctctattttccccacctccactaccaaattcctattatttg

SEQ ID NO: 413076 - DNA, 594 bp, Homo sapiens
ctgggtaatatttagtaaccataataataatagttaatgctactaactgcatgctaaattctgtgctaatcatttacatgcattatttctctaaatcctcagtgagattttctgtgtagctaccaytattatccccatttgacagatgaggaaacagtgaatccgagaggtaaaatgacttgcctaatattacacagctagatgatgtctgagctgaaactcaaacctagatctagctaattacagagcctacacatttaagctctgtattatgttatcacccaaatctactgatagcaggtaaagttctgctataattcctatatctgagataagagaatctgcatctgtgagataagagaatatctattgtacatatccagtgtgtaggtgtagctctcatcagaattagtagaattagtagtctgtgcctactcctttccctcactctcctcccctaactttcaatgcattttctttctcccaagtgttccatgttgtctggtcatttcctatttggaaattacctgataggttaattcacattaagttatgaaagattactagcagttccatatgttaatccttccagga

SEQ ID NO: 413077 - DNA, 591 bp, Homo sapiens
gtcaatttagatgaggaagctgactgaaagggcaggtatgtgcccaaggttttaccgccaataaacagtgtctccaggtttcaaacactgccctccacattccttgcctcttctcagctcctatcagtgtgtggcctccatggcatggatctaatcaggagacagaagctacacgagtaacatgaacaaggactatctaatattaaaaaggtattaactagtaacaggggattaagtactgaggggatttagttgtatacgattgttcagtgttctttaaggattcctagtgtcccaagtcaaactgttaactcaaggcaagaaaagtgtttgtgcttctgttatattcccctaygatgccaagcacaatcctgggcataaaataactcgggcgttcacacccaagttcaaatcctcactttgctacttaccagctgggtgaccttgagcaaatcacttagcctctctataaaacaaggataataatgcctatattaaagggttatagaaagaataaagtgagataataaatgcaaatgactcagctaaataagtggtggctactactgctactactattatcattattaa

SEQ ID NO: 413078 - DNA, 470 bp, Homo sapiens
ccctgggcaagcaggaatatagaggtaccattagctaagatgagaaagaccacaggtggagcaggtggaaaggggaaaggcagtgatggtccaggacatgaggaatttgggatgtctgtgacatggaactgtcaagcatgcagctggacagacaaatctggagttcaagtggaagactccttctgtagatacacaactgggagtcagcaattgtgagaaggccacgtctccccagatctcccagaccacctaaaagcaatgcaaaaacccttttgyagatctaatttttgtttctggtcaaaataaataaaattaatcagaatgctcatcctcagaagcccaccacacatcttgatttttcatgaagtctttcctaattgctgcagtccctatggtaccctcttaatttatacaattgtttgcttcactgactcatcaattaatagttatctattgaacaaattttgtgt

SEQ ID NO: 413079 - DNA, 613 bp, Homo sapiens
gagaagataacatgaatactaaagatttcattttccatttacactgaaattattgtcttctcatcaactgacttattttagaactaccctcatttctcagcaatattcaatgttatatttttcctcagtaatttcttctatacttaaatattaatacttggatgtccactttgtgcaaaaggagaaagcaaggacccagaaatgatgtgattgcttccgagctctcccaatgttgggggtgggggaatctgagcaccccatgaagcccaccttggctcttctgcttcccaaggaagcctagtcagagagtcacctggmctgagactgacacttaggggatttcctggcaatatcctggggaatggcagctccctaatgggaggaatctaaatccagtgcagtggacaaatcctaccaagacacagaacttaaaatgagatactgacgtttaggccccaacattattgcccatgcccctggaaattgcttcaccctgatgaatttatttatgaatgtggaaggttaaatgttcacatttttaaaacgtcatgtgtcttatcaggatcttggattcatcttcagttaaggccttcaatatataaaagttagtttc

SEQ ID NO: 413080 - DNA, 569 bp, Homo sapiens
cgtggcggcccttgcccaggcagcgaggaggtaattcagagcccggcccggtgggcagaaagtgctcagttttagccagagttagctctgcccacaggcaaggctgtccctgctgcaggacctcctctctcctcctggccacacagggaggacaggctctggggagagggccaggggggatcctcctctaggaaaggcaactaagcaggaaccaggctgcctcatcggtgtctgctctgcctctgagtgaccttgatcaagcctcctacttctctgagtctctgtttccccatctgtaaaatgagggcaggaatggaatacatagggttatgagaagggctaatcattaagcacccaatcaatgttagctctggctaattttccagcagaagtgtgcaactcagccctccaaggaaagggctgtaagtccgttaaaaaccagctggcccgaaggcgacatggtatcctggattgtgtcctaggatagaaaagggacattartgtaaaagctggttaaatgcaaataaagtttgtagtttagttaataatattaccaatgttaacgtgtt

SEQ ID NO: 413081 - DNA, 534 bp, Homo sapiens
atatcctccctgcccctccatccaggtttcttagctattactatttcattgcagctgcttcatcactttctcactttctccattatcatttgttatttttttagagtatgtttgagagcaagttgtactcttaatgccccattgtccctaaacactccaaaacaaagtacatgaccacatacctatttccaagtcaggaaatgaacattgatacaacactaccctcaaatccacagacaccattcaaattctatcaagtgatctaaaacggttcttttttctttatgttccagaatcttatccaagaacaaacactgtatttggtcatgatttattttcagtctcttctgtcttggagcaggtctcaatattttcctggatttcatatcattgatagttttaaaaagcacaagccttacattctgtaagatgacattcatctttggtccatttaatgtttcctaatgaccaaactcagattcaggtaattatttttggcacraataccacaataacgaagctatgcttttctta

SEQ ID NO: 413082 - DNA, 589 bp, Homo sapiens
cataaataacattatatgaaaaaatcgtatattttctaaaacaaaaaaatttagcgagtggcattgttttaaattgctgcaaatctttttaatgcaaatctcttgcaattattgcagatttcttttcttcttagaagtcagttggattttcatctctgcttctgaattcaatcaattgttataggttatatgggttgaagtattctaagaaaagtcagcctcacacaaatgtgtgagcgaagaggaagtattttattagcttttaaagatgattatagatattctttgatactatgctaaaattctacaggtgttagattcttaaaggtaagttgcaatgataaatctgcaatcatatcaatgtgcttttaatactctgttatgctaaaatccactggtctctcttacactttgaatgttattttgggayatcatgcattggtcatttggaaaatattaggttccctgagttatacagattatcaaaacattggtgcatattattcattagtatagtatagtatagtatagtatagtccctaagtattggaaagctatgtacctcaccatagtaaatacaagtattccc

SEQ ID NO: 413083 - DNA, 602 bp, Homo sapiens
ccacccatatcaagaaccagtgcatggccagcatctggaagccccctgggtggtctttcttcatcataaagtcctccctacccyccatgttaaccatactactaaatattctgaaattcacttttttttacagtgtcactatctaattgtagatctcaaaacaccatggcttagtctgttgcctgtttttgaaattggtatattgaatcatacagtaactttaaagtctggcttcttttactttatattgtaaaggtttattcaccttttgcatgtaactgcatatattgaagtctagcatttttatgaatgaatattcaatagtttgtttacccattctaatgttgatgaacatttgggcatttccattttgagagtataatgaacagccttgctctgaacattcttgtccatgtttcctagttcttatacatacatggaacggagactgctagatcatataatgtgtgtttttaatgtcttccagatagtgtcaagctgctttccaaagtgaccattaccatttcatatcctcattattaatttatgaaagttcgttttgctctacaaattcaccaatatttgatgctttcaactttaaa

SEQ ID NO: 413084 - DNA, 625 bp, Homo sapiens
acccatatcaagaaccagtgcatggccagcatctggaagccccctgggtggtctttcttcatcataaagtcctccctaccccccatgttaaccatactactaaatattctgaaattcacttttttttacagtgtcactatctaattgtagatctcaaaacaccatggcttagtctgttgcctgtttttgaaattkgtatattgaatcatacagtaactttaaagtctggcttcttttactttatattgtaaaggtttattcaccttttgcatgtaactgcatatattgaagtctagcatttttatgaatgaatattcaatagtttgtttacccattctaatgttgatgaacatttgggcatttccattttgagagtataatgaacagccttgctctgaacattcttgtccatgtttcctagttcttatacatacatggaacggagactgctagatcatataatgtgtgtttttaatgtcttccagatagtgtcaagctgctttccaaagtgaccattaccatttcatatcctcattattaatttatgaaagttcgttttgctctacaaattcaccaatatttgatgctttcaactttaaaattttgccaagttgtaagttgtaga

SEQ ID NO: 413085 - DNA, 570 bp, Homo sapiens
tatttttatatgtattttttgccacacagtttaaccatcacatctccttgtgaattgaatcttttatcattataaagtatctctcattacctctagtaaagaatctttaaatttatttgctctattttgtctgatataattgcatcaaaccagcttccttttaataagcaaatctctttccatctgtttacttttagtctttccatgtcgtatctttcacatgtgtcttttgtgaacactgtctattttgagttttgtgtttttaaacccwctgcaataacctttgccttttatatagagcatttagactattaatattttgtgcagtgtattttgagtatactagtatatttgagtttatacctaccatcttacaatgtaacctctatctgtaattattgttccatgtttattttcctcttttttgcatataattgactactatactagttagggttccattagagagtcagtaccattaggagagatgatgacatagatagatatattatagagttaaaggaatttcttatatagattttaccttgtataattatcagagttggttaa

SEQ ID NO: 413086 - DNA, 570 bp, Homo sapiens
tatttttatatgtattttttgccacacagtttaaccatcacatctccttgtgaattgaatcttttatcattataaagtatctctcattacctctagtaaagaatctttaaatttatttgctctattttgtctgatataattgcatcaaaccagcttccttttaataagcaaatctctttccatctgtttacttttagtctttccatgtcgtatctttcacatgtgtcttttgtgaacactgtctattttgagttttgtgtttttaaacccactgcaataacctttgccttttatatagagcatttagactattaatattttgtgcartgtattttgagtatactagtatatttgagtttatacctaccatcttacaatgtaacctctatctgtaattattgttccatgtttattttcctcttttttgcatataattgactactatactagttagggttccattagagagtcagtaccattaggagagatgatgacatagatagatatattatagagttaaaggaatttcttatatagattttaccttgtataattatcagagttggttaa

SEQ ID NO: 413087 - DNA, 613 bp, Homo sapiens
caagttaggaccaataatcataagctagagtccacagcaaagactgaaacctgtctcaatcctcattgtctagagccttaatagtgtcctgcagaagccaggaaccctcattatggagctaactacacacaccccttgctcaagagtcagagaagctgaaggaggatccaaagaaagctggagcaatttcaggcctggccaccgagtaaagtcaatggggtagaacaacaggtaaagggcaacttgtgtgagctaagcataaaggctgttgctttgctcccccttccaaatccctcaccagaatttttcttagggatatcctaaccagaaacttataggaacactgggaaatgtagtttagcctagccaagtgacacattgcaaagccaccacaactgttttatattatttcatgtattccatattttggaattacamacatatttatactcctttaatgactaccctaacaattagtttgtatgaatactttattctgaaaggccaatattatttgcacttttacgctgatcccagttaatactcctattttaactccatttaccccctccaacatatacgctattgttgtggtatattttcattctctctc

SEQ ID NO: 413088 - DNA, 485 bp, Homo sapiens
tggaattaaaatgtctttaaagaatacaacattcttttcattaaacttcacagaaaagctcagtgaaaataggcattcaccacaasttcctgtctccttatctttctttccagctgctctgattctcctaaaagtcaactaacttctcttggtggtttctgtgaataggtaataggacaagtgatttaaatcactgattactctcttctggctttcaaaccattctagcatgcttctggttagaataatgattgcagtgataggtcgatgtgagaagatggtaattttacacattaatggaatagagcttctgagatttacatttagcttttgcaataataaaaagtgctaatagtagaggaaatatttatgaatatctgaaatatatatgtgccctttagcaagattagaggactacacaggccttgttcggattcattatgctgcaacaaaacatttatttctagtatcagtaattggtaaac

SEQ ID NO: 413089 - DNA, 568 bp, Homo sapiens
ttgggattagaatccaggtttgcttaacttcaaagcactttttcttgactgccaagcccaaataactcctcacacaggctccctaaggatccacaaagagtagtggattccggtcccttaatatttaaatactgtaacatataatctgtatgttgagaaatgtgtataaccttgtgatgtgtggctacattttccaaaatgtatcgctgtgctttatttggataattgcaatgtcttttaaagaacatttcacatcatacatgtactcatttaaaaggagaaataatctttaatattggaacaagtaatctgtggttygggcttaataaggacaaaattttttttttctgttgtttgagaagtcctcttattgtctcagttctataaaatcacagctaatatcacacacccttgtcattcagaatgttaagtattattaggcactgaaggagatctctgcttgaattctccaactttatttcactctttaatatcaggaagtcctgttattttcggggtagtgttgttaatatattgtttatctttcccccctttctcctctccatgt

SEQ ID NO: 413090 - DNA, 586 bp, Homo sapiens
aaccgtttcaggcatcttcaaattctcctcacctaacacagtgagtgtctgcacatagcgggtttataactcccataatgtgactgaacagtcaggattcttttggtctgtccaataratccagattttcaagtgttttcctcctgaaaagcagtatcctttcagtgggcacccgcaggcaagatgggatggtgacatgagggcacatggaactgactgataatttggtgcctcttacaactgataatcactttcagtgttggctggccattatttaggagaagccaaaggcttctttggggaaggacagagaaagtgctggtagtaatccggctctcattttgtgtataaaccaatcagcactggtaccaaacttgaatacagtgctttgcaaaacaaaagccctgtagttaactaatctaccctactcaaaataatttagtgacaatctgttgtcactcaaacttgttgctggaggtatcatctcaatcacccccaagtggttcctttttcaatatttctactaactacatcagtattttccctcaaaaggacccagggagataaaacttggtgcttgtttata

SEQ ID NO: 413091 - DNA, 566 bp, Homo sapiens
ggaactgactgataatttggtgcctcttacaactgataatcactttcagtgttggctggccattatttaggagaagccaaaggcttctttggggaaggacagagaaagtgctggtagtaatccggctctcattttgtgtataaaccaatcagcactggtaccaaacttgaatacagtgctttgcaaaacaaaagccctgtagttaactaatctaccctactcaaaataatttagtgacaatctgttgtcactcaaacttgttgctggaggtatcatctcaatcacccccaagtggttcctttttcaatatttctactaactacatcagtattttccctcaaaaggacccaggkagataaaacttggtgcttgtttataggtccttggttccccagaaatgtacctatgcctggagaaggttcatatccagcttattttcctgattaattttcaatactgccacattgcaaggcacaaactcagaaattttctgggtcctattggaaatctcattttcattgccagaccctcttactcaccttcatgttttcccaactgaagcatta

SEQ ID NO: 413092 - DNA, 602 bp, Homo sapiens
atttgaaacttatgaaaaggaaaataggcaaatgtcacatatcttttctggttgcggccttgcaccctactgccctcagggaaacttgatctgacttcaccaagcaaccttttggaagtagtcccttctgagcctgtccttttccataatgtccaaattcttaatgaatgcagttgataaaccttgtaataatgtgtcaacagcatgatacttctttcatagaatatgcatgaactgtgtagaaacaatgcattgtctcatcagagaagatgcaaatttcattctctatgaaaacaaagatggactgtcatgagaatgccatcagggcactgaatatgaggagagaagaaataagagacaatcaggggcatttgtaattatgaagaaaccactgtttttttttttctgtagacctcctctgtggacaaccactatttttttgattcaacttttattttagatacagggggtacatgtaccagtttgttacatgagtatattgcatccaggaagtgagcataatactcgatagrtagttttcaacccatgcctccctccttccctgacccctctagtattctgcagtgcctgttcatatgttc

SEQ ID NO: 413093 - DNA, 556 bp, Homo sapiens
atttttagctaagtcctcaaaagcaattgcaacaaaaacataaattgatgagtgggacctaattagactacagagcttccacacggcaaaagaaactatcaacagagtaaacagacaacctacaggatgggaaacaatattcacaaactatgcatttgacaaaggtctaatatccagaatctataatgaaattaaatgcatcaacaagcaaaaaaataaataatcccattaaaaaatgggcaaagggcatgaatagaacagcattttttcatatgcttattggctgcttgtatgtcttctaaagaaaaaatgctcatcatcactaatcatcagagaaatgcaaatcaaaaccacaatgagaaaaacaacagatgctgscaaggctgtggaagaaaagggaatgcttataccctatttctttattcatttgtatctcccttaaatttcatctctaggtaagtgctcccccaggtgagaacaggcctcattttattttattggtatttctcttctttccacaggctaaacttcttagagggaaagatggaggagtagg

SEQ ID NO: 413094 - DNA, 589 bp, Homo sapiens
tcaaatgagcatatacaaccttaagtttgctatgctatcactgctttaagacaagtccctaatctctagcatctccaaaactaactgaaattaacataaaatctaagtaaaaagagcattcttcttgtgaaagcattttatgataaatctcctacctcctacttcccaccagatagccattcctcagtccctagagtttagaaattctagagccagccactaaggcttacgtattctccccaagataatgtgtccttacctctatggttggccctattgtcctcctaaaattcccatcttttctcctttctttcttgtgactggagcagcggtgctacagctctccttcctctgattcaatattactaagcccatgtgagtccattcatactccccacatagcctctaatactaaagacagctctgtgctgggctttgtcaataagcatgatgctgccctcaggagccatcccaggacacaaataccagtaacagcaggtgggcatttagtccraagataaatcaccagggagaaaaattgctagacatatgcccagaagggcaaaaaaagaaaggacaaaggaccaga

SEQ ID NO: 413095 - DNA, 534 bp, Homo sapiens
gttaaaaatgtaggtagtgaaatcaatttagtgggtcaacaccatcaatttttttaatgaaacaaaacagaatcaaatagatgatgtcgggaaggctatcatatgctaaaggcagcatgattttctgaaacttttgtttcatttgtgttatgtgtgtcagtagacatgcaaatatatactgagttgctaaactgtatttcttagggtagattctggccaaaaaatgttaaagtcactgttcagatgacttctcaagaactaggatttttcctagcattatctgagaccaataaaaaggtaacagatccaaaataatttggtgatctcttaattctctctgtagtcaccagtgaaactatgtaattggtttatgttagcatgcaaggaaaattmttattattgttttgtgataagcgtacatttaaattgattttttgcatttttaaaagatgaggggcatgagggcaagcagaaacacaaatggaacaaccatgactaattctttaatgataaagtatactacacaaataaaga

SEQ ID NO: 413096 - DNA, 641 bp, Homo sapiens
acagtcaacatacttccagtgatcagtacagaattaaaacccaaagacgccttcttgaatatcccactacttaaaagactcccaaggacgttctataacatggtttggtgagaggtgggaggaatgctgatcccaatctaataactgatactgactttaccatgaaggggaactgaagtgtgatttaaattttacttcaagaaaaaagaaatgtgatacttcttcatgttccattatcctgatgcatctatgctttgtaatggtatagaatgagagttttaaaaaaccctgttaagacataaaacaaaatacatataaaattgtgtaattgtatctgcatctgaattataattttattaaattccatacagtgaactaaaaatttgaacagctctgtgctggactatattcaaaataaaaatgaattcacaatatgcaatatartccaactgatgttcacaaaatagatgtactgagctcacaaggtttaccactctgcatcaccaatggcttttgcaaatacatagtctctccctccaaaacacataacaccatctttcaaatagaatttccatttgttcttgcttcgatgaatctggagggagaaaagtagtttacattaattaattttacaagttaaa

SEQ ID NO: 413097 - DNA, 546 bp, Homo sapiens
gcatttctctgctacagtaaatgggattattctcacccgaaatgtgagtgccttaaaattaaaatctcctcaagatagtttgtttattccataaacatttgagttcctatgtgttagacactgttttaggcactggaaatatattagtttaagatacatatatttctatactgtatatattatatataaaaacacacatcctgtatatgtaaaaccaaaaaaaatccctgccttttaagagtttacattttaatagggaaggacagaaacctaatacataagtaaattatgtagaatattaagctgtcatttgaggtgacacttgagcaaaaacttgaagaaggtaaggagtaaagcaaggcagatattkactcaggagcattccagataaaaggaatagaagtgaacagtcctaaagaggggcatgcctggattgttcaagaacagcacagagtccagtatgtctgcaaaggaataaacagggaagatgtagccaatattatcagaaatgaaaaagtgatacttcatcatgaggaagaaagtccc

SEQ ID NO: 413098 - DNA, 587 bp, Homo sapiens
tatgtagaatattaagctgtcatttgaggtgacacttgagcaaaaacttgaagaaggtaaggagtaaagcaaggcagatatttactcaggagcattccagataaaaggaatagaagtgaacagtcctaaagaggggcatgcctggattgttcaagaacagcacagagtccagtatrtctgcaaaggaataaacagggaagatgtagccaatattatcagaaatgaaaaagtgatacttcatcatgaggaagaaagtcccaataaagcactgaacaaggtcagaatatacagcttataatctgtaagactctgctggctgttttctagattccataaatcagcctagacacagacacaataaaaaataagaaattttaatacttcaagaggtaacaagccataaaatcattgctacctctaagtaaactgcaagtgactatttaaaagccctaggaatatatgatctgagatcaagagtaaaatttaaacctagttgttgactacaaatagtcaaatccaagaacaaaggctgtgactggtattcagatgcattttgtgaagcataagaaaacacacaggataaaccc

SEQ ID NO: 413099 - DNA, 596 bp, Homo sapiens
atgttaggaacttattaatataaaaatcatattacttcagttactgacaaatcatataatcacctctaattgtgttgaaaaagtatttaataaaactattgcatattagattttttaaaactccagaaaaaatattaaagactgtgtattacacacacacacacacacacacacacacacacccatctcagagtttacaactatgacacttatactgtcttccccaaacctcacaatcttccccatctcactgggaaatgaccacttattcttctaagagctcaagtcaaaaatcttagaggtattctttatgcttgctacttacatcccatatccagatccatcagtaagtgttagttctacctacaaaacatattcatattccaaaaacttctaccacttccactactgttactcttatctcagccatcatcttctcttgcccaggtcaatacaayagcctcataactagttcctgtttttacccttgttccctgacaacacccacttcagtctactataaacaggatacccagagtgtctgctaaaaacataaatcagatgtcatttctcttgtcgaaactctccaatgactt

SEQ ID NO: 413100 - DNA, 526 bp, Homo sapiens
ttaaatgaattttagtaatcctacaataggatattatacagccattaaaatatcatcacaaagaaagcctcctcatatgggaagatctgacagatacgttgtttaaagaaaaaaagcaaggtacagaatatagtgttatttatgctatcttttgtatttgtatttgaataaagaaattcgatgaaaactaatataactacttatttgcattcaaaacaggaaaaggagctactaatagaaagcaaaaatgatgaaggaatgtgaaccagacttttcattgtatacctttttacagtattttgattttttaaccatgtgtatgcactatctattcaaaggaaatgtacatatatatagactattatatagagagatatatagatayatataaagagactatatatacacatatatacatatctctctctgtatatataaagaaaccatgctacacacctagaaattaatcattgtatagcatctaagggataaagtcagctataagcaagtctgctaaactgtcaaa

SEQ ID NO: 413101 - DNA, 606 bp, Homo sapiens
gtggctatgttaccaccagaaaaaaaatggattttaggtcaaaaactgttatttaaaaagraaaaaataatttttaatcacataatgataaaataatcaatataccaagacgatataacaattataaatacatgtgcaccaaacatcagagcccccagatatatgcaacaggccaggtgcagtggctcatgcttgtaatcccagcactttggtaagctgaggcaggcagattacttgaggtcaggagttcgagatcagcctggccaatatggtgaaaccccgtctctactaaaagtacaaaaattagccaggagtggtggtgggcacctataatcccggctactcaggaggctgaggcaggagaatcacctgacccaaaggcaaaggttgcagtgagcggagattgtgccactctactccatcctgggcaacagagtgaaactgtctcaaaaaaaaaaaaaaaaaaaaaaaaaaaagtttggggatgcagtgaaaacaatggggagggacatgtataagtgcttacattttaaaagagcaatctcaaattaacagtttaactttacatcttaaaaaactataaaggagagaacaaatcaaaactaa

SEQ ID NO: 413102 - DNA, 482 bp, Homo sapiens
agaatcaaattgaaagtcttaaatttcttgatttcaaaacatactacaaaattacaataataaaaatagtgtgatattgggattatgtaaagcaatcaaatatatgaattactggcattcttgaaagagaaaaactaaacaacctagaaaacatatttgatggaataattcaagaacatttccctaatcttgctagaaaggtagacatccaaatacaagaaattgagagaacaccttcaagacactatacaaaatcaacattatcaaggtgtatagttaccagactatggaaggwcactgctaatatatatataaaggcaactagagaaaaaagtcaagtcatgtacaaagggaaacccatcagattaacagcagacttctcagcagaaaccttaccagccaggagagattgtaggcctatttctagcatcttaaaggaaagaaattccaaccaacaatttcatatcccaccaaactaagct

SEQ ID NO: 413103 - DNA, 482 bp, Homo sapiens
agaatcaaattgaaagtcttaaatttcttgatttcaaaacatactacaaaattacaataataaaaatagtgtgatattgggattatgtaaagcaatcaaatatatgaattactggcattcttgaaagagaaaaactaaacaacctagaaaacatatttgatggaataattcaagaacatttccctaatcttgctagaaaggtagacatccaaatacaagaaattgagagaacaccttcaagacactatacaaaatcaacattatcaaggtgtatagttaccagactatggaaggacactgctaatatatatataaaggcaactagagaaaaaagtcaartcatgtacaaagggaaacccatcagattaacagcagacttctcagcagaaaccttaccagccaggagagattgtaggcctatttctagcatcttaaaggaaagaaattccaaccaacaatttcatatcccaccaaactaagct

SEQ ID NO: 413104 - DNA, 498 bp, Homo sapiens
gtaccagctgttatagccctcccagcctattgttggatctttctgtagagtagctatgttgttacttaagaaccatgtccctcttaaccagaaatatctctttgccttatttgttaatgctcctgccttttaggagataaaaactctttatttcatttttaaagataacttttttttttttttttttttgagctggagtcttgctctatcacccaggctggagtgcagtggtgggatctcggctcactgcaacctttgcctcctgggttcaagcaattttcctggctcarcctcccaagtagctgggactataggcatacaccaccatgcctagctaatgtttgtatttttagtagagatggggtttctccatgttgaccaggctggttttgaactcctagcctcaggtgatccgcctgcctcagcccctcaaagttttgggattacaggcgtgagccaccactcccgacaacgataacattttaaatgaaaagaccc

SEQ ID NO: 413105 - DNA, 599 bp, Homo sapiens
tttagtgcagagaaaataaaaaaaaaggaagcatttcctctgtcagatgacatcatctgcattagaattgttgacatttctttcacgtttggctggaattcatagatgtatcagcagcgactttcctttaacattcaacaggctaaaaataccagtgtttcttagggctgccaacatctgattttaatcattatttgtacattgataccatcaaagaatttttatgttgtgagttcttttttttttttttttttaaattggaaactgacatctttgtaataatgaaaagtttggttagtaaaatttggtactctataccattggagctcctgagatgcttggcaaacatggttttgctgctttagtaaagaaagcgttgctgtctatwtcagcacatggcatgcattagtgctaagacacagccaataattctaaaagaagtctcatctgctgacataaaactcaaatatattagagccacggttttgaattattgtgtttcccaagacatttatcaaaaaatgtaggcagaatattaaattcttcatgcagaatttttctggcttttcaaaggacaatgcttgaagcccttgtttgat

SEQ ID NO: 413106 - DNA, 559 bp, Homo sapiens
tactttctgtgcctgtgaatatgcctattcaggacattttatgtaaactgaatcatacaacatatggcttttgtgtctggcttcttycacctagcataatgtttccaaggtcatccatgtggtagcacatatcactgcttccttccttttcaaggctgaagagtagtccactgcatggaaatatcacactttgtttatccatttatcagttgatagacatttggtttgtttccactttttagttactttgaaaaatgctgctctgaatatttgtgtataagtttcgtgtgatcctttttcttgagtatatacctaggtgtggaaaaaccaggatttgaatacaggtcacttcagcccaacctgatacaacaaattactgaaattattctaatgacaccagaggcagtgaagtgtagggaccacaacactgatgtggggcttgggtaacccaaattctgggcaccactctgtcactcactagctgtgtgcacagcctctccagacattcagggattacactagaatgagctctgtggtcctttccaactccaaagtgatg

SEQ ID NO: 413107 - DNA, 524 bp, Homo sapiens
aagccctgaactaactaattgtccctaccattttaagtggtgatcagcaataggagggttcacacaaaacacgaacaaaggttgcacttgcacacagtttgtacaatccacccctttctcccacttaagaaatcatattggaattctttttttttttaatttgagactgagtctcactctgtcacccaggctggagtgcagtggtgcaatctcagctcactacacttctacctcccgggttcaagtgattctcctgcctcaggctcccgagtagctgagattacagatgtgcatcaccatgccctgctaatttttgtatttttagtagagatggggtttcgccaygttggccaggctggcctcaaactcctgacctcaagtgatctgtctgccttggcctcccaatgcgctgggattacaggcatgagccaccatgcccagcctggaattcttgtaagagtattacggagattatcatgaattgactctaaatcgtttaaaaatacatctttcacaaacagcaa

SEQ ID NO: 413108 - DNA, 450 bp, Homo sapiens
tcattttacctgaacatgactaaatatagctgttagaatgtcattttccctcatctttaataaaaacacaaactttagcatgtttatatgttaatgtaatatttattatggcctgtttttcacaaactgcattaaggaaaattgccccaaagatctgttcctgacattagaatggctccgtcacataaaacaaacaactcataaaagcaaacatttttttaaactaaccattccttccacgttaagacaacagaagaaaggctacagattgatggttaatgaagcacagaattatttttatsctctgttcatctacgaccttgcttattaacaggcattattttagaaaagctaaattagaaagaattgaactggcaggaacacagtggtattagtcttcattagctgaagtgagcaaagcttaagctgctgcagcttaagtaatagccg

SEQ ID NO: 413109 - DNA, 621 bp, Homo sapiens
gtttacaagtattttgttaaggatttttgcagtgatgttcaacaggaatattggyctgaaggtttctttgttgtgtctctcccaggctttggtatcgggatgatgctggcctcacagaattagctggggaggagtccttcctcctcaattttttgaaatcgtttcagtaagaatagtagcagctcttcttcgtacatcaggtagaactcagctgtttatccatcaggtccttggctttttttggttggtaggctatttattactgattcaattttggagttccttattggtctgttcagggaatcaatttcttcctcgttaagtcttgggagggtgtatgtgttcaggaatttattcatctcatctaggctttctagtttgtgtgcatagaggtgttgttcacaatagtttctgatggttatttttatttctgtggggtcagtggtaacactcccttcatttctagttgtgtttatttggatcttctctctttattagtctagccagcagctagactgatggtttctgatggttatttttatttctgtggggtcagtggtaacattcccttcatttctaattgtgtttatttggatcttctctctttagtagtctagccag

SEQ ID NO: 413110 - DNA, 379 bp, Homo sapiens
gtgtccctgttcctcccttcccttccttccatcatgactgatagtatcatttwaaaaagatcatgtgacatgaagaccaaatacagaagctgacttgaagtcccctagaaataaggtaatcatagggtgactacacgtcccaatttgcccaggacagtcccagtttacacctgttattctgaggtaattattaatagaaccccatttgtctctctctcaaaactagattataaattacatatagtcaccctacatgcagaacaacagttctcggagtgtaatatacaaaccactgaggctacctaagaccattttcagggtgtttataaggtcaaaactattttcatgataccaagacaaagtatgcctttttctcatt

SEQ ID NO: 413111 - DNA, 379 bp, Homo sapiens
gtgtccctgttcctcccttcccttccttccatcatgactgatagtatcattttaaaaagatcatgtgacatgaagaccaaatacagaagctgacttgaagtcccctagaaataaggtaatcatagggtgactacacgtcccaatttgcccaggacagtcccagtttacacctgttattctgaggtaattattaatagaaycccatttgtctctctctcaaaactagattataaattacatatagtcaccctacatgcagaacaacagttctcggagtgtaatatacaaaccactgaggctacctaagaccattttcagggtgtttataaggtcaaaactattttcatgataccaagacaaagtatgcctttttctcatt

SEQ ID NO: 413112 - DNA, 596 bp, Homo sapiens
gcacagtcattttcattacgtgaagctctctgcatgtttaaatgggcgtgtacacatttgtggggagacagaaatcatggacacaggcagaaaagagctgaatagcaatctcagtgaagacagcaagaaaaaaagaaacatttaaatgaaaatttagaaaattaagatgtacaaaactagtgcacgcagcctaaggttgagacttggtaacagcctaggatgccacatgtcacacttgtttggaaatctcttatgaaacrcaaagagggaccaacagtttctccaacagagatttctctgaatcatgttatcatcttcaagacagataaacaggaggaatgactattatacatgaacatataaattggcttggctttatccattgtggcatatggaacattgcaaagacgattaattgatcactaataagtagggtttggacttctttctgtgtgctagaatattttgttttagtggagggatgttgggtgcgaatagagaattaaagcagagactcacagagagaaaaggaagttatttttagaagctgaatcacacacaaaaaagatttaaaaaaaaaaaagaggaagaagttg

SEQ ID NO: 413113 - DNA, 517 bp, Homo sapiens
ggactgaactctcttctgccaggagtgttttcttcctggagttctgagagaatttagtgtttgtggcaggtgctgggctgggctccctagagaccttgagactccatttgggccaggaatgggagcacagatgacggcagggtcaccatcccatctgggctctgcctgctgccttgaggaggcatttacttcaggggtctgcaccacaccagaggccagaggcaggaggtagggacgggggcatgttgaactttcctgacaccttccagtagcttctgggtcatagcaacaggcagggccagatgtaagactccctgacaccaagaagcctcacataatcagagccgactaacggaggctcatggacacgtcttactgccccatcccacccccaaccatggaaataacttcagagatttctttttcattttaraagaaatagctattcattgcataaaattcaaacaagttggagaaagtacaaagaaaaaaaaagtataaatcacctgtaaaatcc

SEQ ID NO: 413114 - DNA, 511 bp, Homo sapiens
agtgacagatacatttctaataattgcaacaccaaataactagaaattttcttgaccttaacaagagcctagacaagcacagttataaccacagacatccaaaacaagggtcagctgctcagtgccgtgggagcattgacaacacagacattctatgagtcttacataaatgagaattttgaggtggtgacctttattttctataccacctcaacgggaaacattggcataaccaccacttattagccctgactatgttgtaactataagagctatactaatttttataccttggtttgattagtagtttccctgtttattttatcacaaaatcacttgagccatgttctctatacattaattattasagactacacaaatagaaagcaattatgttagaagagaaaacatgttgtgtcgatcatttctgctcacattactttgccatcagtgcagttagcaaggtactggctgtttaaaaaaattttgtcccaaagattttccccagaag

SEQ ID NO: 413115 - DNA, 540 bp, Homo sapiens
ctgatacatcatttatttgctattaagtatttgattattatgcctttttaaattcaatatctttaaagcaagtttttaattagcgttacttggagcagttcagagtactttttttcttcctgttcttcttccccctccccactcccccaatctctttttgttttgaaagcagagctcctaggggttgtaacttatgctcttttggcatgcaacatttcaatgagaaggttattatagggcacatccccrttcaggtgcttgtagtagaggtattcttcagcctgcatactgatggcccggatttcgggtagtcgaagaagtagctgtccaaatttctctgtctgctgcgggtagttacacattgtgtagtccagcagggcggcattgacttgttcctggacaccttctaccagctggaagttttcaaggtttttgacatctgcattaaaaaaaaaaaaaaaaaaagcaacatttcaatagcatttcaattcctgtttactaaagcaatgtgttcaattaatggatgtattttccttttga

SEQ ID NO: 413116 - DNA, 515 bp, Homo sapiens
tttgacctgttaaattatttcacaagccaatttccttcctttttctaactagaaactgattttcaaaaatttggcatatatgtaatggatctctccctgaaataaaatactgtactttacatgtaatagtcttttctattcaaaaagtcctgtgatgaatccttttgtgatctgaataatcaagttctaatttayatgttttgcaaatgaggattttcactggtcagttttgtgttaagggaaacgtgcttatgttctcatttggactggaatcagtccctgggatgctgcggactggacctgacagacaggtagaccctggattttccactgtaattgaggtagttcacagatagttcacaaggacctaaaagcaatggaagagattaagtgccaaaatacaaatgataacacctcccagaagacctggaattttcactcatttatgtggttcacttgtatttactttttaggaagagtttagaaacttaagtgtgtttcctcggtactcatgg

SEQ ID NO: 413117 - DNA, 515 bp, Homo sapiens
tttgacctgttaaattatttcacaagccaatttccttcctttttctaactagaaactgattttcaaaaatttggcatatatgtaatggatctctccctgaaataaaatactgtactttacatgtaatagtcttttctattcaaaaagtcctgtgatgaatccttttgtgatctgaataatcaagttctaatttacatgttttgcaaatgaggattttcactggtcagttttgtgttaagggaaacgtgcttatgttctcatttggaytggaatcagtccctgggatgctgcggactggacctgacagacaggtagaccctggattttccactgtaattgaggtagttcacagatagttcacaaggacctaaaagcaatggaagagattaagtgccaaaatacaaatgataacacctcccagaagacctggaattttcactcatttatgtggttcacttgtatttactttttaggaagagtttagaaacttaagtgtgtttcctcggtactcatgg

SEQ ID NO: 413118 - DNA, 527 bp, Homo sapiens
aaaaccactaggtttacatgacacctactgataataacattattcactttgcattcttttacacccaagtcaccctggagtatactaaggctgttacactctgaaaggaaggaataaactctaggtgacattcagcagctgtccaggtgatggctgaggagctgacctggtagaaggggagcactccttggagaaaggatcttctacctgtacctgagcacataaagaagtgaggatctacccaaagaagcaaaaaggaatctcaattcctgacaaggatcgatgtctagaatggacaagtttcttagcaagaagaactatggagaagttgagttcttacaggagccaaaaggacttgagttttaccagagtatctcaaatcaaccaacaggttcagaaatttgtactcctargtatttcctggattttgtgagacataaatgcaatatctagatacatatgccttccactagggagacattagaaacctttctcctcttggaacctgtccacaggttccaagacct

SEQ ID NO: 413119 - DNA, 535 bp, Homo sapiens
gatagggggatgtggcaggagaaaaggcaactcctgggtgcaaaacaggaatgcctgttcccacttagggccaygggtttccaggcttgagggtggggcttttgcgcaggaatcgccctcttctacccagtatttccatgtctcctgtctgtatcaatagtgccccgtgccatgccaccccccatctaccactgccctcatcatgtctattaggctggactcataattctgcaatgctgattttctagcacagacggctgtgtttttatatggcattctaaattgtttattaactattgccacctatgctgtgattcagaaaggaaatggctttcaggagtgtggaagccaatcaatctaagcaggaattgccacctgtgggaatacagaagttaaaaattgccaatacttttggtggtataaatgtttatacttgaaaagcacaaacttgcttagaaggaatgaaggtttgctctataatttctcaagaactaaatgtcacacagagtggggaataaaaaaagtctattagcat

SEQ ID NO: 413120 - DNA, 535 bp, Homo sapiens
gatagggggatgtggcaggagaaaaggcaactcctgggtgcaaaacaggaatgcctgttcccacttagggccacgggtttccaggcttgagggtggggcttttgcgsaggaatcgccctcttctacccagtatttccatgtctcctgtctgtatcaatagtgccccgtgccatgccaccccccatctaccactgccctcatcatgtctattaggctggactcataattctgcaatgctgattttctagcacagacggctgtgtttttatatggcattctaaattgtttattaactattgccacctatgctgtgattcagaaaggaaatggctttcaggagtgtggaagccaatcaatctaagcaggaattgccacctgtgggaatacagaagttaaaaattgccaatacttttggtggtataaatgtttatacttgaaaagcacaaacttgcttagaaggaatgaaggtttgctctataatttctcaagaactaaatgtcacacagagtggggaataaaaaaagtctattagcat

SEQ ID NO: 413121 - DNA, 535 bp, Homo sapiens
gatagggggatgtggcaggagaaaaggcaactcctgggtgcaaaacaggaatgcctgttcccacttagggccacgggtttccaggcttgagggtggggcttttgcgcaggaatygccctcttctacccagtatttccatgtctcctgtctgtatcaatagtgccccgtgccatgccaccccccatctaccactgccctcatcatgtctattaggctggactcataattctgcaatgctgattttctagcacagacggctgtgtttttatatggcattctaaattgtttattaactattgccacctatgctgtgattcagaaaggaaatggctttcaggagtgtggaagccaatcaatctaagcaggaattgccacctgtgggaatacagaagttaaaaattgccaatacttttggtggtataaatgtttatacttgaaaagcacaaacttgcttagaaggaatgaaggtttgctctataatttctcaagaactaaatgtcacacagagtggggaataaaaaaagtctattagcat

SEQ ID NO: 413122 - DNA, 467 bp, Homo sapiens
atcatgtgccccagcagttgcactgttgtgcatttatcccagagaaatgaaaacttgtgttcacacaaaaacctgtacacaaaggctcatagaagctttattcgtaatagctaaaaatttcaaacagtgtagatatcgctaaacaaatgaatagttactgtattacataaacaccatggactactattcagcaataaaaaggaatgaatattgatacatgyaacagagaattacgcttggtaaaaacagctaattcccaaagttagttatactctatgaaaccctttatataacattttcaaatacaaaagtttggaaacattagtgatttccagggcttatggaagtggactgcctgggaggggggcagtcgtgttaaggaaagggcaagagaaaagatcctgtggcgatggaactgttcagtatcttgatcctggtggttgatacacagatctacgcatgtgata

SEQ ID NO: 413123 - DNA, 613 bp, Homo sapiens
attgcatgtgaatatacaattatctgaataaaaattcaaatataaaagattaggataatagtctattactttatataacactgagtaaatgaaagtataacgattaagtgaaaacgtcaaaggattataattctgtgagtcattcttcttacataaatattgatattaataataaaaggacaggttcatatatacatttatgagtatagagtcagcatcaaagtgacagamaaatgtgtaaatattgatatgcaaaatctatgtagagcggaagggtataaagggaaagtgtctgggataaagaggcaaagtatgtcaagtgaaatatccggaaacgtttgggacagtgactctgaatcttggtataaatatgcagatgtcaggacacaactcccagacatttctgatgcagtggatctgggatgggactctggaatcatcgtaggtgatcttgaccttcacagagctccattccataggagaaaattgtcctccacttttttactagtaatcaatgatgtgtaaagctattataatgtccttaatttttgtctgtttgactgttcaattcaatgagaactttttagaaataaggctaggtataagtctagcc

SEQ ID NO: 413124 - DNA, 613 bp, Homo sapiens
attgcatgtgaatatacaattatctgaataaaaattcaaatataaaagattaggataatagtctattactttatataacactgagtaaatgaaagtataacgattaagtgaaaacgtcaaaggattataattctgtgagtcattcttcttacataaatattgatattaataataaaaggacaggttcatatatacatttatgagtatagagtcagcatcaaagtgacagacaaatgtgtaaatattgatatgcaaaatctatgtagagcrgaagggtataaagggaaagtgtctgggataaagaggcaaagtatgtcaagtgaaatatccggaaacgtttgggacagtgactctgaatcttggtataaatatgcagatgtcaggacacaactcccagacatttctgatgcagtggatctgggatgggactctggaatcatcgtaggtgatcttgaccttcacagagctccattccataggagaaaattgtcctccacttttttactagtaatcaatgatgtgtaaagctattataatgtccttaatttttgtctgtttgactgttcaattcaatgagaactttttagaaataaggctaggtataagtctagcc

SEQ ID NO: 413125 - DNA, 551 bp, Homo sapiens
tctgttttctctttttctaccagtatcacactgttttggttactgtagaattatagtagtttgaattcaggtaatgtgatgcttccagttgtgtgtttttgtttgtttgttttttcttaggattgctttggctatttggactccttttaggttccatattaattttagtatagtttttttctaattctgtgaaaaatgagattggtagtctcataggaatagcattgatyctgtacattgctttgggcagtatggccatttaaataatattgattcttccaatccatgcacatggaatgtttttccatttttttgtgtgtgtcatatatgatttctttcagtagtgtttcgcagttcttataaacatctttcaccccttgttagatgttttcttaggtattttattttgtgtgtgtggctattttaagtgggaatgtgttcctgatttggctgtcagctaagacattcttagtgtatagaaatgctactgatttttgtacattgattttataccctgaaactttactaaactcggttatcagttccaggaa

SEQ ID NO: 413126 - DNA, 606 bp, Homo sapiens
atttgcctagggtgctgcaacctcttaattggttccagagttctcataaaggctttttggattatatattcctgttaagtcagtgtctttgtaggggaaaattgtctggggatttttttttttttttctctgatggagtctccctctgttgcccagactggagtgcaatggtgtgacctccacctcctgggtttgagcaattctcctgcctcagcctcccaagtagcagggattacaggcgcctgccaccacacctggctaatttttgtatttttaacagagacggggtttcaccatgttgggtaggctggtctcaaactcttgacttcaagtgatcttcccgccttggcctcccagagtactgggattacagtcatgagtcacaacacccagcctgtctggggatttttattcaactgttctgctgatgtcactcagaatacatattacttttaagaacatgtggaataatgatagaaacttattgtgcrttaggccacaaaagaaagcttcaataaatttcaaagaatttacaaatggactgagttcttagacatttgtgcgtgtgtgtgtgtgtttatgatgaaataatagtagccttaaaaa

SEQ ID NO: 413127 - DNA, 525 bp, Homo sapiens
ttctttttcccctgagtctagtgtagattttggaaagaaataataataataaaaaagaactttatctcaatcaataaacaaccctatcttgttayccttgatttctctttttgttttccttagataccaggtctaatttatcggtaaatcccgtggaccccacctcaaatatacatttataatctgaccacttctcacatctctactaccaccaggctagcataaaccaatgtcatgaatagtctgtattacaagagttttcataatagtttgtctttcttctgcacttcaagtctattcataacataatagataacttgttaggtatgtggctctgcttaattccccccataggcttcccatctgaataagtgcaaaagtcgaactcctagcattgactgactattgtccttttatttctctttgtctatcctctttagttcacttgctgtatactctgctactctgcctcacttgcttttttcccccgcctttaggtatccccatggccaattttcttgtctc

SEQ ID NO: 413128 - DNA, 644 bp, Homo sapiens
aaactttagtttttatactaaactggctgtaaaagtgcaaaatgtttarttcagatcaaaacacgggtttttgaagtacaacatttattttgcctttattcatttattttaacctgaatagttctgaaagctgtcagagttctgatttaacattcattccttaactgaactctacttgttttatagtggttatgaagagaatgaaaatgaaaaccagtatgaaaaaacaatgatattaatcttaaaagtttcataaaacctgtaagaacttcagaagggtcaaatgcagaagaactttttttttttaagaaaaacgttgtatttctttatagtaatgtaatttacatgatgattaaaaaaaattttgagacgacagaggcaaaacaaaaaaggtaaatgaaaccaatttaattcagcaagcactctttggagtactagcatgacacagttattaagaaattattttaggtagatagagaaggtaaaatgagtccttggtaaggctttttctgatagagaaggtaaaatgagtccttggtaaggctttttcttttaataaaaacagctcccagaacttttctttactaacagaaagtggctttaaaaaccagaccagcaagcattgttatgcaaatgcaggtgat

SEQ ID NO: 413129 - DNA, 571 bp, Homo sapiens
agccatagcaatcttgaacaaaaagaataaagtagggggcattgtactatattattttaaaatacactacagagctatagtactcaaaacaacatggtactggcataaaaacagatatatcaaccaataaaacaggatagaaagtccaaaaacaaacccactcatttacggtctattgaatttcaaggaagatgccaagaatacatgatggggaaaggagagtctcctcaatgaatggtgttgggaaaactagatgtcaacatgctgaagaataaaattcgacttttatctgacactatatacaaaaactactttaaaaattatcaaagacttaagagtaagacctgaacatataaaactatgagaaaaaaattttttttaaacttcttgacattgctgtggaaaaaatgatttttcagatataaccccaaaaacacaggtaaaaattgacaaaaaagattgcatcaaaattaaaagcatctgcacagcaaaggaaacaatcaactkagtgaagagacaatctacgtaatttaagaaaatatctgcaaaccatgcatctgactagggctac

SEQ ID NO: 413130 - DNA, 448 bp, Homo sapiens
tcttatttgtcaattatactttaataaagctggaaggggtacaaagaatataatcaaatcccaaaaggaaatmagagcagggattgatagtcaaatctgtcaatcagcaaatactcattgaaatgctactacatgctatttacagtacatataattgataagtgtgtctaatatcaacattcatacatatcagagcatcattttatccattcatcagggagctcattcattgaacaaatatttcttgtcacattggattatttaatgtagacaccatcatgaacgaaaacagacacattctccacatgacttgaatatacaatctagtatagtgacagatatttatcaccaaatcacactagggtaaatttatgttgtgagagagatgagaggaagaagtacattgttctattaaagtatacattagaaaaacgaatgcatttgagaa

SEQ ID NO: 413131 - DNA, 582 bp, Homo sapiens
gtttttatgggctcagaatgggggagtgcatgctgattggtccatggcgggcctggaaaaagcaccatttgattggctaaaaggcattgaggaagttctcgctccaggtcatggacttcacccagaactggcagcctggttttcaggctttaggctgtttttggcttgaagatggggtttcactggggacccacctctttctgcctaggaatctgtctgcctcctgcctctatcattatctccaaacttcttttaygtgagattgaaaataaaccattttgctcatcagctgaatcttcttaaaagagaacattatgacattgattctatactaaaccagtctttttagtcaggcattctcacatctttatttcttcctatgctatttattttctccagaagacaattaaattcaacacaatgatgtagtaaatttgacacactgccaggcaaatatttgataatttcccactccatggtgtatatgtagtgcattttctttatccaatccaccattaatcagctaggttgattccttgtctttgctattgtgaatagtctgtgatgaatgtatgagtttca

SEQ ID NO: 413132 - DNA, 546 bp, Homo sapiens
tgaaaacgtgtgttcagtaaaacatactttgtcctgggtgtagcccaaagacaatttgctaaagagattagcatagatagaagggagtcagctgctattccttgacagtggtagaaagagtcccaaaagcattttagagattttcaaggctgcccttcccagcacaakcccagagatcttggaggccaaatggttttatggggaaggccctggatgctctctaggggttcattacccagggccaccttggactctgcttagtgcaccccacttattgcaccctagtgcaccactccatgtccactccagccctggctccagtggccccagctgtggttcttgcaactccataaggtacaagttgtattagcaacatccacatggtgccaattctaaaggcttgcagaaagcaagagctgtggaggcttcacagcctccacccaaatttcaaaagatgtcatcaaaagcctagggaccattgtcctagagcagagtcaccacaaatagccccttctagggcagtgctgagcagaaaaaatgtggagt

SEQ ID NO: 413133 - DNA, 556 bp, Homo sapiens
atctttcaatttatttgtgtctttttcaattgattttatcaatgttttatatttttttagtgtacaattgtggggaaaagaaagagagatcagactgttactgtgtctatgtagaaagaaatagacataagggactccattttgttccgtcctaagaaaaattcttctgccttgagatgctgttaatctgtaaccctacccccaaccctgtgctccctgaaacatgtgctgtgtcaactcaagggtaaatggattaagggctgtgcaggatgtgctttgtgaaacaaatgcttgaaagtagcatgctygttaagagtcattaccactccctaatctcaagtacccagagacacaatacactgtggaaggccgcaggacctctgcctaggaaagccaggtattgtccaaggtttctccccatgtggtagtctgaaatatggcctcgtgggaaggaaaagacctgaccatcccccagcctgacacccctaaagggtctgtgctgtggaggattagtaaaagaggaaggcctctttgcagttgagataagaggaaggca

SEQ ID NO: 413134 - DNA, 495 bp, Homo sapiens
gaattttctatatagtttcaatatgaaaacatagaaactaaaaataatatgcagaacaagttcaagaattacaacaatcttcattcsctaggaatactcagccccatgtagctaatgataatcactgtcctggtctcatttagcaacttttattctttctatatatactcctgttagtatatgaatgaatattttctagtatcaggatttatgtataaatttcaaggaattttgcctctttctgcaattaataatatttttcgtgttattctatctccaccatctggagttctgttatagtttttccagaagtgaatcacattcccctaaaacattattaaataatgtctgtttcaaccattgttcttaatagtggggtgtctacttttttactgttattatttgtttcataaaaaattatacaattcttagaaataagcaaaaaggaatggcatatactttaaatttcatactgatgcattgttttataagcac

SEQ ID NO: 413135 - DNA, 504 bp, Homo sapiens
tatatactcctgttagtatatgaatgaatattttctagtatcaggatttatgtataaatttcaaggaattttgcctctttctgcaattaataatatttttcgtgttattctatctccaccatctggagttctgttatagtttttccagaagtgaatcacattcccctaaaacattattaaataatgtctgtttcaaccattgttcttaatagtggggtgtctacttttttactgttattmtttgtttcataaaaaattatacaattcttagaaataagcaaaaaggaatggcatatactttaaatttcatactgatgcattgttttataagcacatggaatgattaattctctaggagaatgtacctgtgcttggttttgctgcttatctaatagattagaagccagatattgtgaagttgcatgttaatttttagatttctatctagtagaaaatataattccaaaagttatggctttgaagctgttaaattgtttagtctga

SEQ ID NO: 413136 - DNA, 518 bp, Homo sapiens
ggctggggtgcagtggcaggatctacttcaagcgatactcctgcctcagcctcctgtgcagctgggattacaggcatgcaccaccacactttgmtaatttttgtatttttagtagagatggggtttcaccatgttggccaggctggtctaaaactcctgacctcaagtgatccgcccaccttgacctcccaaagtgttgggagtgcaggtgtgagccaccacacccatcagagaccatcctttaagactacaggctgcatgggagtggggtgaggctggtgactgccagctttcctctactttccaggccacctgtgtgactctcctaggaatataactccattggcttgaaaaccacacccttattccccacagcagctgcagcaagccccacccatgccagagtctgagctcagacatgcctatccctgcctgcacctggtagtctttctctacctgccctgttagttgaagacaacagtcataatctcttgggagctctatggccctgcctacca

SEQ ID NO: 413137 - DNA, 528 bp, Homo sapiens
  misc_feature (1)...(528): n = A,T,C or G
caacattctaaacatttcaaatctactgaaatatttgattgtaatcaaggatttttaatgttcttaggtaaagaaactggatgacagatacagcattaaaggacccagtgacacaaggaggatggagtttttgtgaaagagtgtgataatatgggcagcctgaacaatcagtatgtccaggctagagaggctccaacattagaatttcatgctcctctacatgggattcatttaacttcatctgtaggtgaagccacagacctanaagacatggtcatgtcttttatagtttctgccatgtttcataattttctagccacactgacatctacctccataggtttgaccaaatttcaaatttttcccatttttatagtatacttaaaaaaatttatgagggattaagaataatttattttttggtaattggcaaaatgtcactatttacaaattgagcatatctaccacttcactgatrttgtcctttaaaggctggaaaaaatacagttctgaaaactggagcccaag

SEQ ID NO: 413138 - DNA, 602 bp, Homo sapiens
ttaacgtcttatattactatgcagttgtcataactaacaaaccagtagtaatacattattattaactaaagtccacactttatttagctttcttcagtttttgccaaaagtcctttttctgttccagaatcccattcaggatatcacattacatttagttgtcacattgccttagactactctagactaagtttttccaactttccttgtttcttatgacctggaaagttttgaggaatactagccaagtgttttgtagatgttcctaaactggggttcgtctaatgttttcttcattattagactgagtgaagggttatggggaagaagcttacacargtaaagtgtcattctcatcacattacatcataagttcatactatgaatatgtctcatcatgttgatttgttgatgtttaacatggtcacttaactgaaatagtattttcaaagtttccccactataaaattactatttttttcctctttccataatgtactcttgggaaagtgtattaatccattctcacactgctataaagacatacctgagactgagtaatttataaagaaaagtttaattagctcatggttcctgtgtac

SEQ ID NO: 413139 - DNA, 573 bp, Homo sapiens
gttgcttctaattatacagataaagcattcattcttacccaattaaacatagtgttagytttacgttgtttgtagatgttgttatcacactgaagaagtttccctctattcctattgttctagaagtttgttataaaacattctatgcatcaattaatagagcatgtgatttttcttcctcagatcattagtataatagattatattgataagtttgtgatcttgagccacctttaaatccctgaaataaaccagcttagtcataatgtataattatttttatatattgataaattctgttggagaataatttgttaagaatttttgtgtcatattcatgataatatttgtgtttttcttatactctccctgtctggttttgatattagggtaaggctagcttcataaaatgaatcgggaagcaagtcttttatttttctgaaagagattcacagaattattgttcattgttctttaacattttagtatattctccagtgaaactattttgaactggagatttctgtttgtggaagtttaaattagtaattcaacttacttagtaattaaaag

SEQ ID NO: 413140 - DNA, 573 bp, Homo sapiens
gttgcttctaattatacagataaagcattcattcttacccaattaaacatagtgttagttttacgttgtttgtagatgttgttatcacactgaagaagtttccctctattcctattgttctagaagtttgttataaaacattctatgcatcaattaatagagcatgtgatttttcttcctcagatcattagtataatagattatattgataagtttgtgatcttgagccacctttaaatccctgaaataaaccagcttagtcataatgtataattatttttatatattgataaattctgttggagaataatttgttaagaatttttgtgtcatattcatgataatatttgtgtttttcttatactctccctgtctggttttgatattagggtaaggctagcttcataaaatgaatcgggaagcaagtcttttatttttctgaaagagattcacagaattattgttcattgttctttaacattttagtatattctccagtgaaactattttgaactggagatttctgtttgyggaagtttaaattagtaattcaacttacttagtaattaaaag

SEQ ID NO: 413141 - DNA, 616 bp, Homo sapiens
ccccatgtgtcaagggagggaccaggtgaaggtaactgaatcacggggtttgtttccccgatgctgttctcatgatagtgagtgagttctcaagagatctgatagttttacaaggagctcttcccattttgcttcgcacttcttcctgttgctttgtggaaaaggtgccttgcttccccttcaccttcctccatgattgtacgtttcctgaggcctctccagccaagctgaactgtgagtcaattaaacctctttcctttataaattacccagtcttgggcagttctttaaagcagtatgaaaacagactaacacagatgatatattttttttttacactgatatgtccatggctgaaaaaatatatttcatgtacacatggtggaaactaggctacataaaaatcctgagtgataactattggattggccattcaatatttcctctggtaataccgaggctttcaaatgttagactgcagaagaatagatttacattaataatatctagctcrgaagtgaaataaatgttagttaatgggaattagcacgggaaaattctttctcttaaaatgatcagagctataattccttaatctttgtttttacttcaataa

SEQ ID NO: 413142 - DNA, 546 bp, Homo sapiens
taaatgctattttatctgactcaattgttcattctgttgctggataactttttctaaagaagcataattttagtgtttatatagttgattctaaattgattttttaaaacaatatttactcacaagtcatgttacactaactttactttctccttttcagagatgaaagggatataatatgaatttaaggaaagcatttgaaaatattttaatagtattctcatgtaacataaagttaaataaatttgaaataggttgagttatcctagaaatgctgctaaggaaatggtagtaaataagataaatatgctctataacttaatggagataaaaatctagtgtgggaactgatgctaaataatctaccaagtttgatgtacattaaaaactgagacatttaaggaacatggtgcagtagaaacatgtaataatgtgatttaagctstattagggattccaaaagagactctggggagttgatacttaatgtgagatttgaagaatgagtaggtattagccaaataatgggaacatgaatgagaaaga

SEQ ID NO: 413143 - DNA, 571 bp, Homo sapiens
taatatatgtaacattagtttacagttgtgggtaggacaatgagaaattaagcatagcagcctggagggatggagaaatctgctatttcatggaaaaatatttggtataggagtcaccaataactaactgatgacagaatcaaacatttattaagttgtagctctatagcaagtagttaggagtcagaattacaatgtrtatagaatatcatctgctgcactcactaatgtgagaaaaacataagaaaacataaggaaaacacaaacataagaaaacataaggaaaacaaagaaaacaaggcttatttcaggtataaatgtaagctaatagagaaagtccaggaatggggtgccccaaggtattgaaaaagcaaatttcaaaatcttggtaggaaaagaccagagatgttttcagtgacaagtttctagtaagatttttttatttaaaaaaatgaccaaatttaaggttttatcttcacagcaaaactaattgtctcaggcatcctcaagacagcctgcattaatttgagaaatgtcaagtaagaatggaagcagataagtgaattgggct

SEQ ID NO: 413144 - DNA, 571 bp, Homo sapiens
taatatatgtaacattagtttacagttgtgggtaggacaatgagaaattaagcatagcagcctggagggatggagaaatctgctatttcatggaaaaatatttggtataggagtcaccaataactaactgatgacagaatcaaacatttattaagttgtagctctatagcaagtagttaggagtcagaattacaatgtatatagaatatcatctgctgcactcactaatgtgagaaaaacataagaaaacataaggaaaacacaaacataagaaaacataaggaaaacaaagaaaacaaggcttatttcaggtataaatgtaagctaatagagaaagtccaggaatggggtgccccaaggtattgaaaaagcaaatttcaaaatsttggtaggaaaagaccagagatgttttcagtgacaagtttctagtaagatttttttatttaaaaaaatgaccaaatttaaggttttatcttcacagcaaaactaattgtctcaggcatcctcaagacagcctgcattaatttgagaaatgtcaagtaagaatggaagcagataagtgaattgggct

SEQ ID NO: 413145 - DNA, 505 bp, Homo sapiens
acaagaagtaactttagcatttatatttgtatcaataatctcttcaaggcaatctaggctttttctgcttacctcaagattcttccagcttctacttaccgcctgatcctaaagtctcttccacctttttaggtatttattacagtggcaccccaccattttccagtacaaaaaatctatagtagtttgctatggctgtcatagcaaattaccacaaatgatgtgtcttaaaacaacagaaacttattctcttacaggtttggaagccacgagtccaaaataaggtgttggcagggtcatgatcatgttaaaggctctaggggaaaakcttttccatgcctttttcttagcttctggtgaacactataatccttgatgttccttaagtcttagatgcatcactacaatctctgccttcagcatcaaatgatgttctctttatgtgtatatctgggtcacgtctccacttcttataagaacaccaatgatatcagattaggtccca

SEQ ID NO: 413146 - DNA, 587 bp, Homo sapiens
tccttggggaactggctcctcaattctcaacaatccaatcttttctctccttcaagaaaagcacaaaggaagtagtatttcaaaaaaatatgcattgtgtatttggaggttttttaactaaaggtattcgtcttctatttaaattgcattctaattattgaagctcatgtgattttcaaaggtcccctcaaagttatttggaatgttttggcgaggctgctaattttgagaatgtaatggtctatgatatttcctttgaatccattatgatctattttatgagtgttttggaatgactattttttacttttcatactccagaatcagtccatcyaacacttatgttagacaattctgaacactctacagccccttttaatttgataaaataacactcatagtagtacagatttcatattcagatttgatttgtattgctggagaagaggtgttagaaaggaagcgcttcatgactctctcttgttatggcctatttgtatgcagtcctagatataaagcacaatctagttagtggagctttttggagaagtttagtgaagacccgtctgtgctgtgccccaagcaaa

SEQ ID NO: 413147 - DNA, 419 bp, Homo sapiens
gccattaccttctatagaactagccatttctatttctaatttctttgttgctgtagagacttatgttaggaagtgatagatagacccgtggtcagtttttagataggcagtgaagttttggtatggcaattactaggaaaaagagaaagaatccagagaacaatcttttttcacattattttagaacgctgaaagaaactgggtttgagtacattcctgaattaaaaataaagtaacaatttcagaatacattattcttttatggcaaatatcacactgaattgaaattatttgcttacatttccatctttctcatttagacactaagttcttgagagaaaataatgtgtcttattcttttttwaaatcccagcctgatatataattgcttgacaaaaaacgtttgtgtagtaaattga

SEQ ID NO: 413148 - DNA, 457 bp, Homo sapiens
cacttctgtattagtgtttcctgttttttctttgctttcaaatgagggtaaaacaaataggagaattagaaacaaagaggtggcctatacttgagaaactataatatgcasctaacattgtacatcacaagaagaaacaaaggcaataggatttttccaagaagagttttggcaacagcctttcccaaagctctggaacccaatccagactcccttcacaaggtgaattcaaagtgtgttaaagctgtgttcatgtaatatgatacttcaattgccttaacaatgattaagagtagctagaaattggcagtaagaggacctaattttatctaggcatttgaggtctttggagttttgtttcagttagtcaggttcatgaaatggggaggagatctaacaccaccaagagcccctgaggacagctcatttcaccttagcaaagccctttagtgactct

SEQ ID NO: 413149 - DNA, 457 bp, Homo sapiens
cacttctgtattagtgtttcctgttttttctttgctttcaaatgagggtaaaacaaataggagaattagaaacaaagaggtggcctatacttgagaaactataatatgcacctaacattgtacatcacaagaagaaacaaaggcaataggatttttccaagaagagttttggcaacrgcctttcccaaagctctggaacccaatccagactcccttcacaaggtgaattcaaagtgtgttaaagctgtgttcatgtaatatgatacttcaattgccttaacaatgattaagagtagctagaaattggcagtaagaggacctaattttatctaggcatttgaggtctttggagttttgtttcagttagtcaggttcatgaaatggggaggagatctaacaccaccaagagcccctgaggacagctcatttcaccttagcaaagccctttagtgactct

SEQ ID NO: 413150 - DNA, 641 bp, Homo sapiens
gatcctgacttccccaggcttgtgagatattgcccaagaggcccaattctgcctcattccacccaaactactgagagcgtcagcataactatacagtctagaggagttagaagtggggaaaaatgatgggggctcactgaaactttcaagtgaatttcaaaaactggacacagatactattaactgtcctgaaaactttcccaagaggcctgcccatgacccctgtgagacatctcacctaaagcccctgcatgaacttagcattccacaggtatccttgagatggtatatgaaagtctctgcagcacaggtgagtccctgcagattatgaacaagcactcacagagagacagcttgattttggaatattgaaagaggacatacaatcttaaaaagaagaaacaagaggtgtgaggcaggcgcatccatagaaaaggcctgacagatttcccaaatatctagctgggctgactaataaaagtctttctgtcctaaaattagtcagtaaagagtggaggagaaractacttcttcaaacacaaggacagtaagacaaacttcaaagaacataaagaatcaagaaaacataacaccaacaaaggaacaaaataacgttccagtggctgactccaacgaaatgg

SEQ ID NO: 413151 - DNA, 431 bp, Homo sapiens
tggaaccactagtatataaaagggatagtaacaaaactgaaaggagtaatacaaaacaatacaatgatagtaggggctatggtctgagtgttggtgtcttccctaaattaatatgttattactaaattcccaatgtgattgtattaagaggtgaggcytttgagaaaagattaactcatgagggcagagccctcacagggttattgcccttcatgtgagagtccagtgttccccccttctgccatggaagaacacagcaagagataccatctaagaaacagacagtgagccttcaccagacaccaaactgctgacaccttgatcttggacttcccagcctccagaattgtgagaaataaattaatattatttataaattaccctgtctaaggtattttgttacagcagtccaaatgtaccaagaaagtagg

SEQ ID NO: 413152 - DNA, 431 bp, Homo sapiens
tggaaccactagtatataaaagggatagtaacaaaactgaaaggagtaatacaaaacaatacaatgatagtaggggctatggtctgagtgttggtgtcttccctaaattaatatgttattactaaattcccaatgtgattgtattaagaggtgaggcctttgagaaaagattaactcatgagggcagagccctcacagggttattgccyttcatgtgagagtccagtgttccccccttctgccatggaagaacacagcaagagataccatctaagaaacagacagtgagccttcaccagacaccaaactgctgacaccttgatcttggacttcccagcctccagaattgtgagaaataaattaatattatttataaattaccctgtctaaggtattttgttacagcagtccaaatgtaccaagaaagtagg

SEQ ID NO: 413153 - DNA, 521 bp, Homo sapiens
agtacgtttttcaacaggagataacaattataaatattgatgtacccaacactggaaccactagtatataaaagggatagtaacaaaactgaaaggagtaatacaaaacaatacaatgatagtaggggctatggtctgagtgttggtgtcttccctaaattaatatgttattactaaattcccaatgtgattgtattaagaggtgaggcctttgagaaaagattaactcatgagggcagagccctcacagggttattgcccttcatgtgagagtccagtgttccccycttctgccatggaagaacacagcaagagataccatctaagaaacagacagtgagccttcaccagacaccaaactgctgacaccttgatcttggacttcccagcctccagaattgtgagaaataaattaatattatttataaattaccctgtctaaggtattttgttacagcagtccaaatgtaccaagaaagtaggagactttaatactctaccttgaacattacatagattat

SEQ ID NO: 413154 - DNA, 431 bp, Homo sapiens
tggaaccactagtatataaaagggatagtaacaaaactgaaaggagtaatacaaaacaatacaatgatagtaggggctatggtctgagtgttggtgtcttccctaaattaatatgttattactaaattcccaatgtgattgtattaagaggtgaggcctttgagaaaagattaactcatgagggcagagccctcacagggttattgcccttcatgtgagagtccagtgttccccccttctgccatggaagaacacagcaagagataccatctaagaaacagacagtgagcyttcaccagacaccaaactgctgacaccttgatcttggacttcccagcctccagaattgtgagaaataaattaatattatttataaattaccctgtctaaggtattttgttacagcagtccaaatgtaccaagaaagtagg

SEQ ID NO: 413155 - DNA, 431 bp, Homo sapiens
tggaaccactagtatataaaagggatagtaacaaaactgaaaggagtaatacaaaacaatacaatgatagtaggggctatggtctgagtgttggtgtcttccctaaattaatatgttattactaaattcccaatgtgattgtattaagaggtgaggcctttgagaaaagattaactcatgagggcagagccctcacagggttattgcccttcatgtgagagtccagtgttccccccttctgccatggaagaacacagcaagagataccatctaagaaacagacagtgagccttcaccagacaccaaactgctgacacyttgatcttggacttcccagcctccagaattgtgagaaataaattaatattatttataaattaccctgtctaaggtattttgttacagcagtccaaatgtaccaagaaagtagg

SEQ ID NO: 413156 - DNA, 305 bp, Homo sapiens
ctacaagaaaagaaaatcacgggccaatatctttgatgaacacagatgtaaaaatcctcaacaaaattgaacagcataataaaagcattttcaccattatcaaatgagatttatccctgggataaaaggatattcaacatttgcaaatcaataaatatgattcaccactttagcagaatgaaggagaaaagtcatagkatcatctcaatagatgcagcaacatcatttgacaaaattcaatatcctttcatgataagaactctcaacaaactaggtacagaaggaatgttcctcaacataataaa

SEQ ID NO: 413157 - DNA, 602 bp, Homo sapiens
ttctcattagtcttaataagactttgatgcctcttygttgtctacagaagagactgcaaataccttacaatggctttcaaggttctctaagaggtctttcccagcccacctttacttcctaataagcactttattaagcaatatcagattattgtctattcccagaatttttcaaagccatcctagttcgctgcccttgctatttccagtacttggcattccctctacttctctatgcctgaaaatgatggaaatggctttggaattgggcagtgagtggaggctggaagaattttggaaagcatgctagaaaactcctaggtgcctttgaacagactattaaatagggacactgttgaggaaaataaggagaattttagaaaaatcttagaaatcaccttagaaaaagcctaaattgcagtaaacagactgttagtagacatctgtacttgaaggatactactagccagggctcagagggaagtgagtgacttggtattggaaaccagaagaaatgggatccttataatacagtggcaggaagcttagcaaaattgtatcttgtacgttcacagagagacttgaagagtgaggaagactaa

SEQ ID NO: 413158 - DNA, 602 bp, Homo sapiens
ttctcattagtcttaataagactttgatgcctctttgttgtctacagaagagactgcaaataccttacaatggctttcaaggttctctaagaggtctttcccagcccacctttacttcctaataagcactttattaagcaatatcagattattgtctattcccagaatttttcaaarccatcctagttcgctgcccttgctatttccagtacttggcattccctctacttctctatgcctgaaaatgatggaaatggctttggaattgggcagtgagtggaggctggaagaattttggaaagcatgctagaaaactcctaggtgcctttgaacagactattaaatagggacactgttgaggaaaataaggagaattttagaaaaatcttagaaatcaccttagaaaaagcctaaattgcagtaaacagactgttagtagacatctgtacttgaaggatactactagccagggctcagagggaagtgagtgacttggtattggaaaccagaagaaatgggatccttataatacagtggcaggaagcttagcaaaattgtatcttgtacgttcacagagagacttgaagagtgaggaagactaa

SEQ ID NO: 413159 - DNA, 602 bp, Homo sapiens
ttctcattagtcttaataagactttgatgcctctttgttgtctacagaagagactgcaaataccttacaatggctttcaaggttctctaagaggtctttcccagcccacctttacttcctaataagcactttattaagcaatatcagattattgtctattcccagaatttttcaaagccatcctagttcgctgcccttgctatttccagtacttggcattccctctacttctctatgcctgaaaatgatggaaatggctttggaattgggcagtgagtggaggctggaagaattttggaaagcatgctagaaaactcctaggtgcctttgaacagactattaaatagggacactgttgaggaaaataaggagaattttagaaaaatcttagaaatcaccttagaaaaagcctaaattgcagtaaacagactgttagtagacatctgtacttgaaggatactactagccagggctcagagggaagtgrgtgacttggtattggaaaccagaagaaatgggatccttataatacagtggcaggaagcttagcaaaattgtatcttgtacgttcacagagagacttgaagagtgaggaagactaa

SEQ ID NO: 413160 - DNA, 548 bp, Homo sapiens
ccttagtaagttcaatttcttttccaccttcagaaccatcttattttatgttgtgtaatatccaagtatttattagttgtatttacaagagagatgcagacaaaaatttgcatctagcatagatgccaataaaaatgtacctatgccatcttgttctggaactgggcaggaatatcttttgccctttgtaaagataaaaaacattcagcctggtatgagaagtgggtgggactctcatttagttactggacttaaataaaaaccctatgtattttccatttctcaagaaagagtgagggaaagattacttatctaraataattaccaaaatctctacccagccttgttttgcaaaatctgcaattaaataatgatttttttccttggactgatacgtgggttttttcaattatccttctttataatgactctacaccttttagtgattaacattatgataaaaatagttatttggccactatggtcacttccagctgaattttgtgagttttaatataaaggggaatgctaattctttccagaagtcc

SEQ ID NO: 413161 - DNA, 619 bp, Homo sapiens
ctctgcaatgactgcggcctctggcgtgagagcttctccggatgagaaccctggcttcagcaccacagcccacaactgttcagaagaatgtttacacccacacctgctggggaaatgtcagggccttggcagattgctgcttagagattcctgcaatcagagtgcttccctccccacactgcttctctagatgttcttataggatcttcactgctccttattcttcctctccctccacgtgtgctgccggcctatgccatgcgaggtcctattccagactcagggtgcggcagtgaccaggtaagtcctgaacctgccttctcggactttttaatctaggcagagacaccttccaaaaagacagggaaatgaatgtaccagtatgaagttttagatcaggatcacccctctgaaaccaataaataaggtgttatgttatatacacacttatctgaaggcccrtgtatcacaggagaccttttagccttgaagactgaagaactgcccactaaatcagtttatttaatgtgctactaagatactatggagggtgtggactgctggaccaaaatggcttcatatcattggcagtctctgcattactacaaaaggaaaggcc

SEQ ID NO: 413162 - DNA, 543 bp, Homo sapiens
ccatagttgagggttattccttgtgttgtacattctatgggttttggagaaatgtatattgacatgtatccatcattacagtggtatacagactcatatccgtaccctaaaattcctccatattctgcctattcatctccccccatccccgaaaatcccttgccttttccgggatgtcatataattgaaatcatacagtatgaagccctttaagattggcttctctcaccccatgaattaagtttcctccatgtcttcatgtggcttgatagctcgtttcttgtttatcrctgaatgatattttattgcatgtattatcagagtttgtttatcctttcagctaccaaaggacactttggtggcttctaagtttgggcagttatcaatagagcttctataaacctatatgaggctttttctctagacgtgagtttttaacttgggtaaataccaagaaggacaagtgctggaatgaagatgtttaattttagatgaaactgacaaactatcttccaaagtggctgtccatttgcattcccacca

SEQ ID NO: 413163 - DNA, 543 bp, Homo sapiens
ccatagttgagggttattccttgtgttgtacattctatgggttttggagaaatgtatattgacatgtatccatcattacagtggtatacagactcatatccgtaccctaaaattcctccatattctgcctattcatctccccccatccccgaaaatcccttgccttttccgggatgtcatataattgaaatcatacagtatgaagccctttaagattggcttctctcaccccatgaattaagtttcctccatgtcttcatgtggcttgatagctcgtttcttgtttatcgctgaatgatattttattgcatgtattatcagagtttgtttatcctttcagctaccaaargacactttggtggcttctaagtttgggcagttatcaatagagcttctataaacctatatgaggctttttctctagacgtgagtttttaacttgggtaaataccaagaaggacaagtgctggaatgaagatgtttaattttagatgaaactgacaaactatcttccaaagtggctgtccatttgcattcccacca

SEQ ID NO: 413164 - DNA, 542 bp, Homo sapiens
tagggtctatcttggaaccttgctacatgaatatcatcttaatatagttgaggacacccaggttctgtacatactaccaagaacagacaagcaaaacgctcggtgtccactgctgtctgtaaaagacagtgcataaaatgagctggtgtgggtttagcccctgtgctcttcactgccaactttcatggtgaggttgtgtgagggtaggaaagctccaagctccagagtcttgtcctgaagtgcagtggcagtgaccttctcccctctaatgcccctcatgggtgtccctgcaggattccctcagtrtctacagggcgctctgctgtggctctgctctaggaggtaccttacatggtgctgcttcctactgccaacagtggtcacttcctgggactcatcacgtccagtcttcagtgggttcactgtgagccttgctgtgacacccttggctctctgcagcagatgggcagggagctcccagcccctctttggaagcccactctattagacagccgtggatgctggatgagcacgttctctgg

SEQ ID NO: 413165 - DNA, 542 bp, Homo sapiens
tagggtctatcttggaaccttgctacatgaatatcatcttaatatagttgaggacacccaggttctgtacatactaccaagaacagacaagcaaaacgctcggtgtccactgctgtctgtaaaagacagtgcataaaatgagctggtgtgggtttagcccctgtgctcttcactgccaactttcatggtgaggttgtgtgagggtaggaaagctccaagctccagagtcttgtcctgaagtgcagtggcagtgaccttctcccctctaatgcccctcatgggtgtccctgcaggattccctcagtgtctacagggcgctctgctgtggctctgctctaggaggtaccttacatggtgctgcttcctactgccaacagtggtcacttcctgggactcatcacgtccagtcttcagtgggttcactgtgagccttgctgtgacaccctyggctctctgcagcagatgggcagggagctcccagcccctctttggaagcccactctattagacagccgtggatgctggatgagcacgttctctgg

SEQ ID NO: 413166 - DNA, 626 bp, Homo sapiens
actgttgctagggtgactggatatccacaggcaaaaaaaggaattatgagctaaacttcatatcttatacgaaaattaaaacaaaatgtatcaccatgcttaaatgtaaaacagaaacctgtaaaacttttagaataaaatataggagaygatattaagcctgaagccaaatgcacaatacataagaggaaaactaaattgaacctcatcaaaattaaaaactgactctggaagaccctgttccaaattacagactggaagaaaatatttgccaattacatatacaagaaatgactcatgtctagaatatatttaaaaatccctctcaaactcagtagtaaaacacaagtaattcaaaagcaaatgggcaaagaaatgtacaggcatttcactgaagagattatatagatgccacataggcagatgaaaatatgtttaacatcattagccattagataaatgcaaattaaaactaaaatgaggtgttaatacatacaaccagaatggctaaaataaaaaaatcaataacactaagtgctggtgaggatgcagagaaactggatctctcatacattactggtgggaatgtaaaatagtaaaaccactctggaaaagagtttataagt

SEQ ID NO: 413167 - DNA, 626 bp, Homo sapiens
actgttgctagggtgactggatatccacaggcaaaaaaaggaattatgagctaaacttcatatcttatacgaaaattaaaacaaaatgtatcaccatgcttaaatgtaaaacagaaacctgtaaaacttttagaataaaatataggagacgatattaagcctgaagccaaatgcacaatacataagaggaaaactaaattgaacctcatcaaaattaaaaactgactctggaagaccctgttccaaattacagactggaagaaaatatttgccaattacatatacaagaaatgactcatgtctagaatatatttaaaaatccctctcaaactcagtagtaaaacacaagtaattcaaaagcaaatgggcaaagaaatgtacaggcatttcactgaagagattatatagatgccacataggcagatgaaaatatgtttaacatcattagccattagataaatgcaaattaaaactaaaawgaggtgttaatacatacaaccagaatggctaaaataaaaaaatcaataacactaagtgctggtgaggatgcagagaaactggatctctcatacattactggtgggaatgtaaaatagtaaaaccactctggaaaagagtttataagt

SEQ ID NO: 413168 - DNA, 596 bp, Homo sapiens
gttaaatttattgtattaatagtacacctctaccatgaaatgtcactcagcaaaaaagggagcaaaatattgacacacacaactatgtggataaacctcataaaaggtatgttgagggagagaaaaactaatcttaaaataatactcattgcaagattccttatataggacgttcatgaaacaacaaagttgcagatatgaacagcagagtagtggttgtcaaggggttagtgtgaaggggcagggtgcgtgtggctatgtargatagcatgagggagtgttgtgctgattttacagttaagtacactgattgtgatagtgattacacaaagcttcacatttgataaaatggcattgagctacataaacacaaatgcatataactggtgaaatctgaataagctcgatggttgcatcatgttaatttcctggttgggatattgtgctatagttttgcaagatgttaacattgcgagagtctgggcgaagggtacctaagatctctctggacattcttttgcactctcttgtaaaattatatttatttcaaaataaaaattttttgaaaaaatgtaacaaaggtgatagggtggcta

SEQ ID NO: 413169 - DNA, 610 bp, Homo sapiens
tataattttctacatataacatcatatcatttaaaaacaaaaattgttttactttttcctctccaatttggataccttgtatttcttcttcttacctaattgctgtgatgagaacttccattattattttgaacgaaagtagtgaagatggtcatccttgccttgctctattttagaggaaaagctttcartgttttactattgagtatgatattcactgtaggttttttcatatgtggcttttattatgttaagatagtttccagctattccttctttgtcgagtgtttttatcatgaaaaacgcgaaagggtgttgttttgtcagatgcctttcctgcattaattgagatgatcatgtggtttttgtccttcattctattaatgtggtatattacatggatccatccttgcattccagggttaaatcccacttgtccagggcatataattcttttaatatgctgctgaatttggcttgctggtgttttgaggatttttgtgtcagtattcaaaagtgatattcatatacagttttcttccagtacgatctttgtctggctttggtatcaggataatgctgacctcactgaatgagttgaaagtattcc

SEQ ID NO: 413170 - DNA, 610 bp, Homo sapiens
tataattttctacatataacatcatatcatttaaaaacaaaaattgttttactttttcctctccaatttggataccttgtatttcttcttcttacctaattgctgtgatgagaacttccattattattttgaacgaaagtagtgaagatggtcatccttgccttgctctattttagaggaaaagctttcagtgttttactattgagtatgatattcactgtaggttttttcatatgtggcttttattatgttaagatagtttccagctattccttctttgtygagtgtttttatcatgaaaaacgcgaaagggtgttgttttgtcagatgcctttcctgcattaattgagatgatcatgtggtttttgtccttcattctattaatgtggtatattacatggatccatccttgcattccagggttaaatcccacttgtccagggcatataattcttttaatatgctgctgaatttggcttgctggtgttttgaggatttttgtgtcagtattcaaaagtgatattcatatacagttttcttccagtacgatctttgtctggctttggtatcaggataatgctgacctcactgaatgagttgaaagtattcc

SEQ ID NO: 413171 - DNA, 579 bp, Homo sapiens
tctgggtgattgtcattggagagatggagtcagagatgtgggaggaggcgtgcactgattgtgctggtgcctaagagaagaattcttccaattcctggggtagggggcgggggctgataggrtttggctgtgtccccacccaaatctcatcttgaatgatagctcccataattcccacgtttagggagggacctggtgggaggtaattgaatcatgggggctctttctcccatactgtcttcatggtagtgaataagtctcacgagatctgatggttttaaaagggatttccccttttgcttggctctcactctctctcttgtctgccgccatgtaagacatggcttttgccttccaccacgattgtgaggcctctccagccacatggaactgtgagtccattaaacctctttttctttataaattacccagtctcgggcatgtctttatcagcagcgtgaaaatggacaaatactggagcgtgacacacctgggcagctgcaggaaggccacagtggctggagctgaaggacgatgtgggaagtgaagggaagagccaggccacacggggacaccagg

SEQ ID NO: 413172 - DNA, 579 bp, Homo sapiens
tctgggtgattgtcattggagagatggagtcagagatgtgggaggaggcgtgcactgattgtgctggtgcctaagagaagaattcttccaattcctggggtagggggcgggggctgatagggtttggctgtgtccccacccaaatctcatcttgaatgatagctcccataattcccacgtttagggagggacctggtgggaggtaattgaatcatggggrctctttctcccatactgtcttcatggtagtgaataagtctcacgagatctgatggttttaaaagggatttccccttttgcttggctctcactctctctcttgtctgccgccatgtaagacatggcttttgccttccaccacgattgtgaggcctctccagccacatggaactgtgagtccattaaacctctttttctttataaattacccagtctcgggcatgtctttatcagcagcgtgaaaatggacaaatactggagcgtgacacacctgggcagctgcaggaaggccacagtggctggagctgaaggacgatgtgggaagtgaagggaagagccaggccacacggggacaccagg

SEQ ID NO: 413173 - DNA, 619 bp, Homo sapiens
aatctgattagtttgatatttgggacatcaatattgggtaaatagcaggggaggatgagatgtgaaagacacaacctggccaacatggtgaaaccccatctctactaaaaatacaaaacttagccaggcatggtggcatgcacttgtaaccttagctactcargagcctgaggcaggaaaatctcttgaacccaggaggtgaaggaggttgcagtgagccaagatcgtgccattgcactccaggctgggcgacagagcgagactctgtcaaaacaaacaaacaaacaaaaaacatcaagtaggcattcattaaatattagttgtacaacacgatgcttaaaaccactgactggttagctatgctaaaagctgatggaacatcaaaatgtgagaaagtaaaagtaggaagcatggccaacttgcttgagtattttttctacagtatagaacaaaacagagcagtagctagaaagcaagggttgaatttttcatcaagaatgttacagcattcattatatcttcagaaatgttaagaagagagagaggaaaccaataatgtagtacaggagttaattataggagaagccattcagtaggtaagagatagaatactgttacc

SEQ ID NO: 413174 - DNA, 540 bp, Homo sapiens
cattaatgttgacaattacctgtttcactgcatgaattttcctgtacatcttcttgttctaattagagttttaagataggttctaaaaacctgcattttttttttgtyaacttgtttgattaagcacttgtttaactgtcatgtatctatggaacatacatatttggggttacaattttaagaaattccttgtttgataagctataactagagttgtgagttgcatattaccattaatattcacaaaaaattgtggaagagtagtaatattgatattatttttcttgttatttacagtatgtgggagatttatttatgtgcagaactaaatacctaaatttctctataattcagaataataagtatgatgacaactagactattttaatatatatttagcataatatacatataaaataatatacatatacttgtgaatcttactgtgctactgaagctaagtggaattaaaaaatattcacccattcaaatactacattaaaaaaggggaaaaaaggacatttggctaggcaatatcag

SEQ ID NO: 413175 - DNA, 597 bp, Homo sapiens
tgatattatttttcttgttatttacagtatgtgggagatttatttatgtgcagaactaaatacctaaatttctctataattcagaataataagtatgatgacaactagactattttaatatatatttagcataatatacatwtaaaataatatacatatacttgtgaatcttactgtgctactgaagctaagtggaattaaaaaatattcacccattcaaatactacattaaaaaaggggaaaaaaggacatttggctaggcaatatcagaatgacacaaagggagaaatataataaggacaaataataatgagtatatttttaagaaaaaggaataatactcttttgcaatcaggcataatattcccatacactgaaagaatgcagccttagaaacaggctatcaattcaaaggtttagagtgacaattttgccatttagaagtaagcataataatattcctgccttgatcacttatggtggttattaaaataaaatgaaataattttatatgaaataacacattgtaatatataacagtgaaaataggaggattttgtagtaattaaaaacattttttcctttctcaaacaccat

SEQ ID NO: 413176 - DNA, 618 bp, Homo sapiens
actttgtaacgatacgagactcttgtatgcaatacttaaaatattagattgaacacttttgtgttccatctttctattgtatgtacttgctccacaaagtcttargcaaaattttaaggtctaaaatttttctaatatttattatataatcaatgatattttcttcctcatgggaaataaataaacaatgtattacaaactttccatgaagaaagtcaccaagttattttctccttttctagcaagataaaatttgcattattgcaacaaataatatgtaaaatatgtaatgtttctctgagaaatctgccaagaaattgtgccactttactgtataatttagtccattcaggttctggagacaaaaaggacaagatcaaaagtgcaggaagaatccatgtttggtgactacccattccttatagatcgcgccttttctcgcatgctcacatggtagaaaaagcaaggcaaccctctgggcctcttttataaagtcactaatcccattaatgagggctttgccttcatcacctaatcactcccaaagtccccacctcccaataccaccatctttagggttaggttttcgacacattaattttgaggaaacataaacat

SEQ ID NO: 413177 - DNA, 353 bp, Homo sapiens
ctcagctggaaatgcagaaatcacccatcttctgcctcgctcatgctgggagctgtagactggagctgttcctattcggccatcttctataccagtctataactttaatttctaaaagatattttttattatyctatcacttttcacaatcacttattcttaagttgttaatttccacttgtgtttacctgagaattttctggacttaactctcaaaggcctttaaaaacgaaaagacttatgctgtgaataaccccaccttccaagtttccttactttctcttgaccataactgagcatataaaagaaacttttgttgcattgtatgaaatattttgtggtggtgtctacaa

SEQ ID NO: 413178 - DNA, 471 bp, Homo sapiens
cttccacccacacacacacactctctattactcctgcttttgccatgtgccaccttctctctcttcaacttcttttatgattgtaagcttcctgaagcctcccagaagctgagcagatgttggtaacatgcttcctacaaagcttgcagactgtgagccaattaaagctctgttcattataaattacccagtcttacgtatttcttatagtaaygaaagaatgatctaacacagaaaatttataccaaggagagaggcactgctggaaagatacttgaaaatgtagaaattgctttggaattgggtgaaaggcataggtctgaagagtttggagggctcagaagaggacacaaagatcaaggaaagtttggaacttcttaaggactaattattaggccattcttgcattgctataaagaaatacctgagactaggtaatttatgagaaaactgtaattggctaacaattct

SEQ ID NO: 413179 - DNA, 599 bp, Homo sapiens
gtttcagaacctcccaggcttctagagtattatggatctcattaatgctctgacttacgtgtgacagaaaccatttccttgggaagctccctgaaaagcaacatggttgcatgcatactctgtgtcaggcctctgagcccaagctaagccatcatatcccctgtgacctgtgtgtatacatctagatggcctgaagcaactgaagatccacagaagaagtgaaaatagccaggtcctgccttaactgatgaccttccaccatwgtgatttgttcttgccccaccctaactgaccaattgaccttttgacagtataccctccccgcccttgtgataatgtactttgtgatattcccctgcccttaagaaggtactttgtaatattctccccacccttgagaatgtactttgtaagatcaccccctgtccataaaaaattgctcctaactccaccgcctatctcaaacctataagaactaatgataatcccaccaccgtttgatgactctctttttggactcagcccacctgcacccaggtgattaaaaactttattgttcacacaaagcctgtttggtggtctctttacacggacgcgtg

SEQ ID NO: 413180 - DNA, 571 bp, Homo sapiens
tctaccatatggatatatcacattttgttcatttatcacttcttagatattatggttattttaacattttggttcttgtgaataatgctacaaggtttttatgacgaatactgcaaaagcaactgcaacaaaaacaaaaattggcaagtgggacctaactaaactaaagaacttctacacagcaaaggtaaccttactaaactaaagaatttctgcacagcmaaggtaactatcaatagagtaaacagacaatctacagaatgggagaaaatatttgtaaactacacatctgacaaaagtctaaaatccagaatctataaggaacttaaatcaacaagcaaaaaaccaacaatcccactaaaaatgggaagaagatacggacacatctcaaaagaagacatacacatggtcaataagcacatgaaaaaaatgctcaccatcactaatcattaagaaaatgtaaatcaaaaccacaatgagataccatctcacacagtcagaatggctctgaaaaaaaagtcaaaaaataacagaaactgacaatgttttggagaaaggggaacagttagac

SEQ ID NO: 413181 - DNA, 571 bp, Homo sapiens
tctaccatatggatatatcacattttgttcatttatcacttcttagatattatggttattttaacattttggttcttgtgaataatgctacaaggtttttatgacgaatactgcaaaagcaactgcaacaaaaacaaaaattggcaagtgggacctaactaaactaaagaacttctacacagcaaaggtaaccttactaaactaaagaatttctgcacagccaaggtaactatcaatagagtaaacagacaatctacagaatgggagaaaatatttgtaaactacacatctgacaaaagtctaaaatccagartctataaggaacttaaatcaacaagcaaaaaaccaacaatcccactaaaaatgggaagaagatacggacacatctcaaaagaagacatacacatggtcaataagcacatgaaaaaaatgctcaccatcactaatcattaagaaaatgtaaatcaaaaccacaatgagataccatctcacacagtcagaatggctctgaaaaaaaagtcaaaaaataacagaaactgacaatgttttggagaaaggggaacagttagac

SEQ ID NO: 413182 - DNA, 536 bp, Homo sapiens
atcattgtaagaagagggtaagagtgaattactttatgtgttaaatcatagaggatttttgaacctcttgaattttgaacttcagtttcttaggaatattaatattagattaataaaaatatcaagtataccataatagaataaagtttatatgcaaatttcaagtatttctacatttctaaaaattgaaatatcaaaatatgtacatttatttccattgcgtaatctctgatgagracaatgcataacattggttgtaggttacactatggtcctttggagagtaaagtcaaaactgcctaccagtggtctatggagtgtctatgaaagactggcagctgattgtgagtagtcccatgaaggaaggacacagggtcaattctaaattgtaatatttaagagatcaaaaacctatgaaatattcaggaggatgcttattataccctcttattttcttaaggggggatttttttcatgaatactcttggtatcctccccttccttcttatgtttctactggggattagatgagtcat

SEQ ID NO: 413183 - DNA, 536 bp, Homo sapiens
atcattgtaagaagagggtaagagtgaattactttatgtgttaaatcatagaggatttttgaacctcttgaattttgaacttcagtttcttaggaatattaatattagattaataaaaatatcaagtataccataatagaataaagtttatatgcaaatttcaagtatttctacatttctaaaaattgaaatatcaaaatatgtacatttatttccattgcgtaatctctgatgagaacaatgcataacattggttgtaggttacactatggtcctttggagagtaaagtcaaaactgcctaccagtggtctatggagtgtctatgaaagactggcagctgattgtgagtagtcccatgaaggaaggacacaggktcaattctaaattgtaatatttaagagatcaaaaacctatgaaatattcaggaggatgcttattataccctcttattttcttaaggggggatttttttcatgaatactcttggtatcctccccttccttcttatgtttctactggggattagatgagtcat

SEQ ID NO: 413184 - DNA, 572 bp, Homo sapiens
gctgtctttattgggagaagacctcccctaatgagtgagtgtgaggacacccactgggttggttgtgatggttctggctatacacttaaacttgtaaaatattgatgaaaaaaattgaaggagaaaaatatgtggaaaaatactttgcattcatgaattggaagaattataattgttaaaatatccatactacacaaattggtacagactaaatgcaatccttctcaacatcccaatggcatttttcatagaaatagaaaaataattataaaatatgtagccaaccaccaaamactctaactagccaaagtaatattgagtaaaaaaataaaactggagacatcacactacctcatctccagatatactgcaaagctatagtcataaaacagcatgggactagcataaaaacagacatatctaccagttgaacaggatagagaagccagaaataaatccagcatgtacggtcaattgatgtttgaaaaaattgccaatacacacaatggggaaaggatagtctcttcagtaaatggtgttgtgaaaactagatattcacatgcagaagcata

SEQ ID NO: 413185 - DNA, 572 bp, Homo sapiens
gctgtctttattgggagaagacctcccctaatgagtgagtgtgaggacacccactgggttggttgtgatggttctggctatacacttaaacttgtaaaatattgatgaaaaaaattgaaggagaaaaatatgtggaaaaatactttgcattcatgaattggaagaattataattgttaaaatatccatactacacaaattggtacagactaaatgcaatccttctcaacatcccaatggcatttttcatagaaatagaaaaataattataaaatatgtagccaaccaccaaacactctaactagccaaagtaatattgagtaaaaaaataaaactggagacatcacactacctcatctccagatatactgcaaagctatagtcataaaacagcatgggactagcataaaaacagacatatctaccagttgaacaggatagagaagccagaaataaatccascatgtacggtcaattgatgtttgaaaaaattgccaatacacacaatggggaaaggatagtctcttcagtaaatggtgttgtgaaaactagatattcacatgcagaagcata

SEQ ID NO: 413186 - DNA, 546 bp, Homo sapiens
atattttatgtatccattgcatgtttttggtttgaggttaccatgaaggttattatgatcttataacccattatattaacctgataacaacttaactatttgcataaacaacaaaccaaacaaggaaaaaggaaactaataataactctatgcttaaatttcaaccccctgctttttaactttttcttgtttctatttatatcttattgtgctatgtcttaaaaagttgcaattattatttttgactggttcatcatttagtctttttacttaggataagagttgtttacacaccatagttacaatgttataatattctgggtttttctgtgtataactattaccagttaattttgtaccttcaagtgattatttagtgctcattaatgtcttttkctttctgactgaagtattctctttagcattacttgtagggagacctgacattggttaaaaaaaaaaaatctctcagcttttgtttgtcttgaaaagtcttttaattatccttctagtgtgaagagtattttcaccagatatcctattcta

SEQ ID NO: 413187 - DNA, 645 bp, Homo sapiens
tttggtctggttttcccttctgctgtaacaggacaggatctgctctaacaggacaggacaggattgagttcaatgcctcacaattgctgtgttatatttctcctagtatccagggaaactctccacaccacaccactgctgctaccaagggtgagggaggggtggcctcagagatttaggactgctttttccacctcttcagttcctctttcggtgatacgcagttaaaaccaggtactatgagtgctcacctgatttttggttcttatgaaggtggttttctttatttttatttttttctgtgtagatacttgttaactggatgttcttgtgargggcatgataaatggagctttctattatcccatcttgctccacctctatccctacatcattttttataagagacttgcttatccatggattttggtatccacaggggttctggaaccaatccccagtatacaggggtgactgtatgcaaatcataggaaatgacaaagccaatcaaagatgatttctctccactgagagaggtgtgcttggtacttttttcaaacatattatgctagttattattaccacatgtgcacaatcctaatgacaaatactttaatatcatggttatcataatagcattttact

SEQ ID NO: 413188 - DNA, 607 bp, Homo sapiens
gatggagcaaaaaacgctggatatgaaagaaatctcaagtaaatacactatcagtcctatcattaatttatttgctataatttaaaggctgaaaatcccaaaagctaaagagttaagctgaaaatatctaatgggcagaactgaatttcccacagtctttcaggaacaagtaggaaaagcaaaggaaaacaaacaaacaaataaaaacaaacaacagatcctgccagcctcttaaaaataaggaggagaaaatctaaacttaccaaggctgtatttttgccaagacctagctcaatctgaagctttatcaatgtgctcagattctcattgtgtttgtataatggaggaaaagagggatgttccctggtagatgataacattattggggcctccatagttcttctatacaaggtgcatagatatggttaagaattgtcaaacatgcaaagaaacaaagatatattgactaccaagtataaaaacatacaggatcattaacataacaaataatgcaggaagtaatgttaaaaaatgacttkgaaataactaaaaataatatacaggcatgtctcagatatattgtgtgttcagttccagatcgttgcaa

SEQ ID NO: 413189 - DNA, 590 bp, Homo sapiens
ggtcactactgaaagtgagggtggttgtggcaatttttaaaaataagacaacaaagaagtttgcagcattgattgactcttcctttcacaaaaggttcctctgtagcatgcaatgctgtttggtagcattttacccacagtagaactcctttgaaaattggagtgaatcctctcaacccctaccactgcttagtcaacaaagtttatataatattcaaaatctgtgttgtcatttcaacaatgttcacagtatcttcattgggagatttatctcaagaaaccaccttttttgctcattcataagaatcttctgatgcattaaagctttatcttgagattgcagcaattcagtcacgtcttcaggatccacttctaattctacttctcttatttccaacacatctgtagttaatttctgtactgaaggcktgattctcttaaagtcttccattggagttgaaatcaatttatcccaagctccagttagtattgttattttggcctcctctcatgaatcatgaattttcttaatggcatctaaaatggttgaatcctttttagaaggttttatattaactttgtccagatcc

SEQ ID NO: 413190 - DNA, 602 bp, Homo sapiens
ccttgtgcttaacctcttaaaggctcagtttactcattttcaaatttcggctgataacaacatgtgtttcatagatttgtttgtttgtttgtttgttttaatggttgaatacagagtctattcgagcacaaaactcgaagacagctgcctgggaaacaaaaattccaaagaatggacrtcaatgttccaaagggtagaagtttggactcattttattagacaaggtttgggtaagctttaacagaatttcaatatctttctatacaaggcttactgcattgttacaacaatctgactagttgaattatcctttttcttttaggaaaatatatttaacactccacactgaatatttaacagtcatggtatctttgctccagctgatctaaacacaggacaataaaagacatggttaatctacaacaaaggtcagtgattaaaaggggaggaggcatgccactgcactccagcctgggtgacacagcgagactccagtactctgtctcaaaaaagagaaggggaggaggcctggtctctggtctctcctaatcatttacagaacaataacagtgaggaagagagctaacctataatctaagaag

SEQ ID NO: 413191 - DNA, 602 bp, Homo sapiens
ccttgtgcttaacctcttaaaggctcagtttactcattttcaaatttcggctgataacaacatgtgtttcatagatttgtttgtttgtttgtttgttttaatggttgaatacagagtctattcgagcacaaaactcgaagacagctgcctgggaaacaaaaattccaaagaatggacatcartgttccaaagggtagaagtttggactcattttattagacaaggtttgggtaagctttaacagaatttcaatatctttctatacaaggcttactgcattgttacaacaatctgactagttgaattatcctttttcttttaggaaaatatatttaacactccacactgaatatttaacagtcatggtatctttgctccagctgatctaaacacaggacaataaaagacatggttaatctacaacaaaggtcagtgattaaaaggggaggaggcatgccactgcactccagcctgggtgacacagcgagactccagtactctgtctcaaaaaagagaaggggaggaggcctggtctctggtctctcctaatcatttacagaacaataacagtgaggaagagagctaacctataatctaagaag

SEQ ID NO: 413192 - DNA, 468 bp, Homo sapiens
aacagcgccagtgtggaatgtacatccgttgagataagggggttcactcgaggagagaatatagagagaagagggggaaaagagtgagctctaaaaacatgacaacatttagaggcataatagaagagaagcaatagcataagagacttcacagaagcagcaagtgaggtagatgaagcttgagtagaggttcttctagaaactaaaaggaaagagcatttcaaaaaaaaaaagtagttgattgtatggaatactttcaatatatcaaacaagatgaagaaagaagtgtggctattgaatttttcagctgcatgwtcactaatctttattcagagtaatgtcagtgtaatggaaagagaagtcataatagagtggagcagaaataaggaagtatgcagcagatcctcttaggaatttgggtagaaaataaagtagggacatggaatggtagctggaagacaaagtggt

SEQ ID NO: 413193 - DNA, 567 bp, Homo sapiens
acaatcttgataaataagaacaaagttgaaagactcacttcctgatttcaaaacttttcacaaaactacagtaaacaaaayggtgtggcactggcataaagctagatggatagatcagtggaataaaattgagagtctaaaatcaaaccctcacaattatagcagtcacctatagattacagtatgttgatctttaacaaagacaccaaaatccatcaatagggaaatgtattttcaatgaatgatgctgggacaactagatatccacatgcaaaagaatgaattgtgtctctgccatattccacatacaaaaatgaactccaaatggataaaataagtaaatgtaagagctaaaactgtaaacctcttataagaaaacatagacgtaaatctgcatgacattggattaggcaaagttttctcagatatgacacctacagcacaagcaacaaaagaaaaaatagaaaaactggaaatcatcacaatttaaaacttttgagctttaaatggcaccctcaagaaagtgaaaagacaactcacaacataggaagatatttgcaaataatg

SEQ ID NO: 413194 - DNA, 607 bp, Homo sapiens
attcaaatcaaaaccataatgatatatcacttcacatcaacgaggatggtgataacaaaaaagacagataaaaacaagtattgacagtatgtagagtagttggaattcttatacactgatggtgggaatgcaaaatagtgcagccaccaaaactttaagagtgagtgcactcttacttgaaaaccaaaacttcattttatccagttctcctctctattcttgctccaaattgttttttctcattttttctagttttcattaatgttctacatcttctgcttccatttttttcttcatgcgttccttaactaatttttaatattctattctactrtgctttagaaagcagtctagctgttcctcaaatgtttatgcagtgacataagatacagtaattcccctccaaatatatacctaagagtaataaacacatatatccacacaaaaattgcatgtgaatgtttatagtgtcattatttatgatagtaaaaacatggaagcaatacaaatgtccttccattgataaataggtaaaacaaatatgttacatccatatgatgtgctattttttgccaataagaagaaatgtgctgatacatgttacaac

SEQ ID NO: 413195 - DNA, 575 bp, Homo sapiens
atctcaaaaagatcagtgtggtaaattgtggtagattattatattaatgccccctttcttgtattgggtatgggtttagccatctgactactttgtcaatgtgtagcattgacacaagaagagtcttgaccactgcttgtccttcatgccttgctctcagaatgtttctgccattgtgtaaaacaggctggaatgagacagaagcctagtcttcccaaccattccatcaatcccaggtgagaccccagacactagcaaggtgtcaaattggaccatctgccctaaacatracattcagctactgcagtcaaatgaggagcccaagcaaaatgattagaactgcctatccaacgtactgaattatgagaaaattaattgttttaattaaaattttgtgagtgacttgttcggcagctatcgattattgatatagaaattggccttcagtgagccaatccactcttctataaggccaattatttttgggtgatgcaatatgcactaaaaccaataccatctgtgaggggtaagcctgatacacctcctctttcattataaaataagtgtttttttgt

SEQ ID NO: 413196 - DNA, 575 bp, Homo sapiens
atctcaaaaagatcagtgtggtaaattgtggtagattattatattaatgccccctttcttgtattgggtatgggtttagccatctgactactttgtcaatgtgtagcattgacacaagaagagtcttgaccactgcttgtccttcatgccttgctctcagaatgtttctgccattgtgtaaaacaggctggaatgagacagaagcctagtcttcccaaccattccatcaatcccaggtgagaccccagacactagcaaggtgtcaaattggaccatctgccctaaacataacattcagctactgcagtcaaatgaggagcccaagcaaaatgattagaactgcctatccaacgtactgaattatgagaaaattaattgttttaattaaaattttgtgagtgacttgttcggcagctatcgattattgatatagaaattggccttcagtgagccaatccactcttctataaggccaattatttttgggtgatgcaatatgcrctaaaaccaataccatctgtgaggggtaagcctgatacacctcctctttcattataaaataagtgtttttttgt

SEQ ID NO: 413197 - DNA, 594 bp, Homo sapiens
tttaaattacaataataattttctggggatcctccttttttcctctcatatatttcttartggcgggcactgttctcatgctagtgaatgttcatgaggttccgttgtatagtatgtgaaacaaatgccaggcatgtaaaaatgattatttcacaaataacatctggcactttgctgggcttccaagacagatgctaatgtactaatgccaaatttctcaagtggtcatcctggtgtgcaactgctctctggcccaaatgccaccccactcccaaatgtcacattgattctcttgccaccttcctatgaatgagaatgaaaaagatttctgcaaagaacactgttttatgtcttcattttatgggaaaggctaaccatctcaagtatcttacagttcggacttagcgcagtgcctgaaatctaatttcattcatttgttctctttttccactagatatgtaaacattgacagcttctctagctaccaagattgggaccacagtggttatatctctagcttttgtgcatccttcacagtaggaaacaaatatatgcttttaaattaattttttagcccaattaccattcacttca

SEQ ID NO: 413198 - DNA, 594 bp, Homo sapiens
tttaaattacaataataattttctggggatcctccttttttcctctcatatatttcttagtggcgggcactgttctcatgctagtgaatgttcatgaggttccgttgtatagtatgtgaaacaaatgccaggcatgtaaaaatgattatttcacaaayaacatctggcactttgctgggcttccaagacagatgctaatgtactaatgccaaatttctcaagtggtcatcctggtgtgcaactgctctctggcccaaatgccaccccactcccaaatgtcacattgattctcttgccaccttcctatgaatgagaatgaaaaagatttctgcaaagaacactgttttatgtcttcattttatgggaaaggctaaccatctcaagtatcttacagttcggacttagcgcagtgcctgaaatctaatttcattcatttgttctctttttccactagatatgtaaacattgacagcttctctagctaccaagattgggaccacagtggttatatctctagcttttgtgcatccttcacagtaggaaacaaatatatgcttttaaattaattttttagcccaattaccattcacttca

SEQ ID NO: 413199 - DNA, 563 bp, Homo sapiens
tttgtccctgtaatagtggtggggcaggcaacatcctgtctggcagcaacagcaaccctagagcrtaaatatgttgcagcccatgcctatgatggtaactaaactgatcaaagggatatgagtggtgctggccacatagaaataatgcagggcacattacacgtagtacccctttgcaactgcaaattggtagctttcagaaatgtccccaccggataacctgaaaagcaacatgaaactatagtaagaaagtgagcagtgcatttgtttttctaagatgactttgtctctttctagaggaggccaggctaaatcggacaccagattagaataagaaaaagaagaaaaagaggaagaagaggaggaggcagaggaaccaggataataactggaactctgatctctgaaactgacacttttccaaattcagagtaaaatacaacttaccatggcacggatccctcccatttccccaggtgccaactaaatgtgttggtaattaaaacttttatcaaacttctcaacacttaaattctgaatggagaattctgggagcattgaag

SEQ ID NO: 413200 - DNA, 563 bp, Homo sapiens
tttgtccctgtaatagtggtggggcaggcaacatcctgtctggcagcaacagcaaccctagagcataaatatgttgcagcccatgcctatgatggtaactaaactgatcaaagggatatgagtggtgctggccacatagaaataatgcagggcacattacacgtagtacccctttgcaactgcaaattggtagctttcagaaatgtccccacyggataacctgaaaagcaacatgaaactatagtaagaaagtgagcagtgcatttgtttttctaagatgactttgtctctttctagaggaggccaggctaaatcggacaccagattagaataagaaaaagaagaaaaagaggaagaagaggaggaggcagaggaaccaggataataactggaactctgatctctgaaactgacacttttccaaattcagagtaaaatacaacttaccatggcacggatccctcccatttccccaggtgccaactaaatgtgttggtaattaaaacttttatcaaacttctcaacacttaaattctgaatggagaattctgggagcattgaag

SEQ ID NO: 413201 - DNA, 526 bp, Homo sapiens
cacacagcaggaggggacagggtcagacttaggaatggtggccttcatgttctatagctgacaattagctgccacttttcacagccatcagtcccagaccagaccatagtacagtctactgcccaggttctgggaatttctgagctgtttaataaccaataactccaagtacagcagtaacagcaaaagaatctctcactacatgaatatatgaatatgaaattgttgcaagaagctggtgtctcccttccaaaggatatgtggcaaagtcaccagatgaagctgacgcaattgtcaaaaaattaggttctaamgatgttgtgataatggcacagaattttgcttgtggtagacaaaaaggaacatttggaagcagtccaaaagaggagtgaagatagttttctatcaagaagaaaaagctgttccctctcaaattattggggaaaagttgtttaccaagtaaacaggagcaaaggacagaatatgcaatcaagtattgatctgtgagcaaaatatcccagtgaga

SEQ ID NO: 413202 - DNA, 388 bp, Homo sapiens
ttatgttattacacagggtatagttctggctgtgaaagattttgaaattaaaatatctgttgtggtacatttacaaggttcactagttaatgatgctaaggcactactagcagaaaagctactagaatggcttcaaagctctctgaaatagtgaccttartcaagcaaacccttgtgtgtgtgtgtgtgtgtgtgtatatatatataatgtaagttgccaacatgatcttaaaaagccactgaatggctgaaaatgttaatttgctataatcattgaaaatactatgttctgtgttattgttctttttcttttcagtgtgcgaagactgtaattgtgatctaggcacacagacttttagaagcatttggtgtgcatttcattctgcta

SEQ ID NO: 413203 - DNA, 570 bp, Homo sapiens
tgtgaatactgctttgatgaacatgcaagtgcatgtgtctttgtggtagaaagatttggatatacacacacactcagtaatgggattgataggtcaaatggtacttcttagttctttgagaaacctccaaactgcttttcayagtgactgaactaatttacattcccatcaaccgtgtataagcattcccttttcttcacagccttgccaacatccacttgtctgtctgtttgtctgactttttaataatcacctttctaacttgtgtgagatggtatctcatgtagttttgatttctacttctcggatgattagtgatgtggagcatttttcatatgtttcttggccacttgcatgtcttttctcttctgagaattgtctgttcatgtcttttgcccatttttaaagggggttattagttttttgcttcttcaattgcttaagtcccttatagattctgtatattagacatttgttagatgcatagtttgaaaatattttctcccattctatagattatctctttatgctattgatagttttctttactgagcagaagctctttaatta

SEQ ID NO: 413204 - DNA, 582 bp, Homo sapiens
agccttggcagcttccatgtggtgttgaacctgtgagtgaacagaagtcaagaactgggtttggaaacctctgcctaaatttcagaagacgtatggagatgtctggattcccaggcagaagttttctggtggggcagggccctcatggagaacctctgttagggcagtgcagaagggaaatgttgggtcagagctcccacacatagtctctactggggtactgcctagtggagctgcgagaagagggccacagtcctccagaccccaraatggtagatccactgacagcttgcagcgtgcacctggaatagccacaggcactcaacaccagccgatgaaagtagctgggagggaggctgtgccctgaaaagccacaggggcagaggtgcccaagaccatgagaacccacctcttgcatcacagtgacctggttgtgaggcatagagttgaaggagatcattttggtcctttaagatttgactgccccactggattttggacctgcatggggtctctagtccctttgttttgcccaatttctcccatttagagtgggtgtatttactcaacgcctgtaccccc

SEQ ID NO: 413205 - DNA, 619 bp, Homo sapiens
atttctgggtgctactctagtttttgattcaataggtctgggatgagtcagataatttgcctttctaaaaagctcctaggcgattttgaccatgagagtccaggaagccacacattgagaatctgtggtctagttctggcatctcttttcatccaaatatttccagaaarctatcttaaggaaataattggacaagtgtttgtggggaattttttcagacaacgaatattaaggataataacacagtgcgaatatagtatctgaattaaagacttatatatatatataaaaatgtatatatatataaaatgggaagaatctagaagattatacacccgaatattaggatcaaatgatatagatttgtacttttgtttatttttgatttggtggcttcaaaatgtcatacattgaacatgaattacttgtgtaacaatttgaatacatcctatttttaaaagctatggctcaacttttaaccttattctaaacacatttggaaatgaaatgtctacttaagtccaccttatccacatatcaccaataaatgagtgcatgcatataatcttatgcatgtatacatatatgtattcaaacacactctctcattcatacacat

SEQ ID NO: 413206 - DNA, 577 bp, Homo sapiens
gatacatgaaaaataactaccacagaattaaaacatactgctagagaaaatcatttaaccacaaaggaagacaggaagaaagtaagacagtaagagaaaaacaggaagaaaggatctacaaaacaacctgaaaacaaagatggaggcatcatactacctgacttcaaattatactataaagctataatacccaaaacagcatgttactgtcataaaagcagatacatagaccaatggaacagaatagagagcacagaaataaatccatgcatttatagctaactgatttttgtcaaagatattaagaacatatattttggaaaagacagtctcttcaataattgatgctggggaaactagatatccacatgaagaaaaatgaaactagaccctatctctcaccttatacaaaaaatcaactcaaaatgaataacagacttaaatctaagacccaaactataaaactactagaagaaagcagagaagaaamacttcatgatatttgctgaggcaaggaattttggggtaggatctcaagaaaacaggcaataaaacaaaatatggacaaatgagattg

SEQ ID NO: 413207 - DNA, 649 bp, Homo sapiens
attgtaacccttcttctctagaaaaagctggcaaaatgcttacattttcaaagctcttactggagagctacatctggaaatcaaccagtgagactactaaattcttgtgatccagtcctatctcaagcaccagtgaggggattttgctaagcctgggataagtcataattaattgagccaacattaagctggaatgcaaggacatcaggaatgtgactctattagtgcacccattgcgaagttgtctstattgccaagcctatgggtattcctccataacctttgagggatcttttgtggcctatccctgcccatctctaagaaaatatttacctggggaaggtgtttatgtgggatttttttcatccttttttttttcaagaaaaaagagctagatacagagaatgctctaatgtgtgactgatatcaataaaagacatgaagtttcaagaaattgatgtgacaaagattgcttcaaatcctcatgctctagtgcatcagttttctggagctccactgagaagacttcagaaagtgtatattttctactgcaaaaacaagtctatgggtcttcgctaacaacaaagctaaacaaagcttgttgaaccagctttccagccactagggcggtgttcactacagccattgc

SEQ ID NO: 413208 - DNA, 556 bp, Homo sapiens
aacagtaattctagctgctcaggatgctttcattaatgcagatgcctttgaatcatcaggaagcgtttgattggaatgggatgaggatccagattgtaaagtccagcaggttttcacaggaatttatctgcccttacattgttttgctccgaataaagcaagctgtctccttttctccaactaggctgggttggttggtagggaggttgctgcttccctaacactgattgctttcttcctgtcactcttacttcgtatgttggtttcctgtggccatgcaacaatgttactacaaatgtagtggctttaaacaacacacatttattatctcacaggtctttgtgggttagaagtctgggcacaacttagcttggttctctgcttagggtcccacaagactacagtcaaggtgttggccagtgcktgggtctcatctcaaggttgactgggaagatccatttccaggcttatgtggtttcagcagaattcacttccttacagttgttgggggtttcagtttcttgctacccctagttcttaggtatatgccaacgca

SEQ ID NO: 413209 - DNA, 582 bp, Homo sapiens
tggctaggttgcatgtgtccaggaatttattcgtttctccttcagctatctaatttgttaaatttagttgttcataatagtgttttatgatcttttgtatttctttcttttcttttcttttccttttttttttttttttttttgagacagtctcactctgttgtccaggctggagtgcagtggcataatctcagttcactgcaacctccccctcctgggttcaagctattctcctgcctcagcctcctgagtagctgggattacaggcatgcaccaccatgcccaactaatttttgtatttttaatagagatggggtctcaccatgttggccaggctggtctcaaactcctgacctcaagtgatccacctgcctcagccccccaaagtgctgagatyataggcatgagccaccacgcctggccaatcctttgtatttctgtggtattagttgtaatgtctgctttttcactgctgatttaatttatttgggtcatctctcttttttcttggatagtttaaactttgtcaagttgttcatatttggggaaaaaaaactattttgttaatattttgtattgttt

SEQ ID NO: 413210 - DNA, 582 bp, Homo sapiens
tggctaggttgcatgtgtccaggaatttattcgtttctccttcagctatctaatttgttaaatttagttgttcataatagtgttttatgatcttttgtatttctttcttttcttttcttttccttttttttttttttttttttgagacagtctcactctgttgtccaggctggagtgcagtggcataatctcagttcactgcaacctccccctcctgggttcaagctattctcctgcctcagcctcctgagtagctgggattacaggcatgcaccaccatgcccaactaatttttgtatttttaatagagatggggtctcaccatgttggccaggctggtctcaaactcctgacctcaagtgatccacctgcctcagccccccaaagtgctgagattayaggcatgagccaccacgcctggccaatcctttgtatttctgtggtattagttgtaatgtctgctttttcactgctgatttaatttatttgggtcatctctcttttttcttggatagtttaaactttgtcaagttgttcatatttggggaaaaaaaactattttgttaatattttgtattgttt

SEQ ID NO: 413211 - DNA, 526 bp, Homo sapiens
cctccctttgtcccccaggctgaagtgcagtggcgtgatctcagctcactgcagtctccacctcccaggctcaagcaattctcctgtctcagcctccagagtagctgggactacaggtaggcaccaccacacccagctaatttttgtattttttgtagagacatggtttcaacatgttggccaggctgctcaggaactctggaccccaggtgatccacccccgtcagcctctcaaagtgctggtgaactccagtttttgtcacaacatcactgtgactcttcccgaagcttttcttttatttttaacttggtagttgctactttctgttgatttaattttgggcacttgcgtagcttacaattcagcaaatacctcgaagctgtaaaatggtacaaaatgttatattttygctctactttcttctttctcagatgttgaccctctcagtctggctattgtggtaactctgggctctatttgtctttccagatgtgaacaactgatgaattttggtgtgcctttttg

SEQ ID NO: 413212 - DNA, 621 bp, Homo sapiens
ttgtcatagcctgaattagaagtccttaacttatttttatgtatttttcctgaaactaattggggtgcataatgaatataagttttgatgtatttgtctatttcagcattatgttgcaagcctttctcatgtcattacacattttagaaacctaatttttaatacctgtattatattgcmtatatgaataacccatgattactatttcttcaatattcatctttgcttggactccaagtttaacaattaaaactaattatagaaatagcattgtccagttgtaagaaatattcatgaaatgttcggtttgagttgtaatcatagtgatcaataaaacttgcgttcttactatgaacataggtcactatggtagttgctgcagggagttcaaaatatgaaaatgagtgattcctctcctccaggcaacataatttggagaaatgaagcatagatttagaaaactggtccaaattagtttttcatcaaaacttcatgaatgatacatataataagaatgggaatgttcaaaggagaaggagaccattaggcttgaaaaggcaggaaaaatgttttgaagtcaatacgatctgcaatggattggaatgtattgaatggagtgag

SEQ ID NO: 413213 - DNA, 526 bp, Homo sapiens
gaaagtgccatcagaataatacatagaataaataaaggtaaatctacaactaaatacctagaagtggaaatataaataaaaaggataaaaagaaaatattaaatctaccccccaaaacatgttacccacaggagaataatacraagtatatggagagacattttagtagcagcagtaaatgcctaaaggaatagccttacactgcaagattaggattttattctagccaaactacagacatcagattagtactattgcagggtttctcattcaaaagccagcttaccacatgttacactacagttgtcacccaccagtcaacacattctgtcagagcactgagatagaatcgactttataaggccagatacttgaggagaaccttctacataaaaggccaaaggaggcaaacatatcaaagaaaaagaaaagaaaaaatagtggtaagctagaaacagaagaaatcacttaaaaaaatttaataatatgatcacagataaagaattccctggattcctaaataaga

SEQ ID NO: 413214 - DNA, 588 bp, Homo sapiens
tttcacaaatttaagcctagtttagtaaaatttgtgtattgagtgtaaaaaggatgtgtgtcaagagatgagtcacaataaatcaacagaaggcatattacaaatgtctttgggattcattttaagaaacagactcctcatgaagataatgcaaagtcattaaagaattctgaggttagattttgactcttaaaactatcactgtgggtacaattggagtacagacagaaattcgacaaaattkgagtcaggaagagaaaacatgcaacaaggcttttgcagataaccaggcaagacatgaaggtgatctgaattcgcatagaattaacatcatggtataatgtatagaataggcagatattaaaaagaaacagacagaatttggtttgggattaagaaaaaaggagaagtcaagggtgacacccagctttctcattgggtgtgtggtagcaccctctagtaagatggggactaatgggagagaaacacatttataaggaagatgttaggataagttttgtatctgttgaattgaaggcacccttggggcagtcatgctaatattctagtagacaattgaatacatag

SEQ ID NO: 413215 - DNA, 592 bp, Homo sapiens
  misc_feature (1)...(592): n = A,T,C or G
aggaacagtgcattcccgcccagatgctacacttttcccaggatgcttgcaacccatagaccaggagattccctcaggtgcctataccaccagggccctgggtttcaagcaaaaaactggtgcncatttggaagacactgagctagctgctgtaggttttttttgttgttgtttttctataccccagtggcacctggaaagcgagttagaaagaatcgttcactcccctggaaaggggtctgaagccagggagccaaatggtctagctcagtggatcctactcccatggagcccagcaagctaagatccactagcttgaaattctcactgccagcacagtagtctgaagttgacctgggacactccagctgggtgaggggaggggcatccaccattactgaggcwtgagtaggctgttttcccctcacagtgtaaacaaaccctcaggaagttccaacntgcagagcccgccacaggtcagcaaagccgctgtagccagactgcttctctagattcctcctctctgggcaggtcatctctgaaagaaaggcagcagcccagtcaggggcttagagataaaactcccatctcc

SEQ ID NO: 413216 - DNA, 592 bp, Homo sapiens
  misc_feature (1)...(592): n = A,T,C or G
aggaacagtgcattcccgcccagatgctacacttttcccaggatgcttgcaacccatagaccaggagattccctcaggtgcctataccaccagggccctgggtttcaagcaaaaaactggtgcncatttggaagacactgagctagctgctgtaggttttttttgttgttgtttttctataccccagtggcacctggaaagcgagttagaaagaatcgttcactcccctggaaaggggtctgaagccagggagccaaatggtctagctcagtggatcctactcccatggagcccagcaagctaagatccactagcttgaaattctcactgccagcacagtagtctgaagttgacctgggacactccagctgggtgaggggaggggcatccaccattactgaggcttgagtaggctgttttcccctcacagtgtaaacaaaccctcaggaagttccaacntgcagagcccgccacaggtcagcaaagccrctgtagccagactgcttctctagattcctcctctctgggcaggtcatctctgaaagaaaggcagcagcccagtcaggggcttagagataaaactcccatctcc

SEQ ID NO: 413217 - DNA, 576 bp, Homo sapiens
agaatcaagtgggtaataatcagcagaacatttataaatgaaggcaacagagctccactgttctcactggtgtgcctgataaaatgcaaagtccctggatacattcatttctgcccatgttttatttgcttggaaaaatgtttgatatgtgaagacatgtttacaagattttatctgttctcaaaataatatcaatataatttactcaattackctgagaaaaaaagaaaatctcaacttatctgtactacgcttcgccagagaaacagaatcaatagaatgtacacacacacacacacacacacacacacacacacacacacagaaagagagagagagagagagacaagcatgcataaagacagagactgtggtaagtctgaaatctgcacagcagaatggcagcctggaaattttggcaggagttgatgtcatgctcttgattcttacgacagtcttgaaggagaattccttcctctttgtgagacctcagtctattctcttgagacctttaactgattgaatgaggcccacccacagtgcaaaaggtaatatacttttctctaagtctatttg

SEQ ID NO: 413218 - DNA, 576 bp, Homo sapiens
agaatcaagtgggtaataatcagcagaacatttataaatgaaggcaacagagctccactgttctcactggtgtgcctgataaaatgcaaagtccctggatacattcatttctgcccatgttttatttgcttggaaaaatgtttgatatgtgaagacatgtttacaagattttatctgttctcaaaataatatcaatataatttactcaattacgctgagaaaaaaagaaaatctcaacttatctgtactacgcttcgccagagaaacagaatcaatagaatgtacacacacacacacacacacacacacacacacacacacacagaaagagagagagagagagagacaagcatgcataaagacagagactgtggtaagtctgaaatctgcacagcagaatggcagcctggaaattttggcaggagttgatgtcatrctcttgattcttacgacagtcttgaaggagaattccttcctctttgtgagacctcagtctattctcttgagacctttaactgattgaatgaggcccacccacagtgcaaaaggtaatatacttttctctaagtctatttg

SEQ ID NO: 413219 - DNA, 584 bp, Homo sapiens
ctgagcacaagaaagtcactgatacaagtcttagtctgagttcaaaatcctgaaaaccagaagcaccaatgtctaatgagagaagatgatgaatgtccgtgctaaaggagaaagagcatttgcctttgttctgccattttgttctatttgggccttcagtggattgcatgatgcctacctgcgtgggtgagactgaccttctttactcagtctactaatacaaagactaatctctcttggaaacaccctcacagtcatgctcagaagtaattttttaccagctatctgggtatctcttagagcagtcaagttgacacataaaattaatgatcacaaccactaacactttggattactttggrcaacgttctttaatctccaggtaatcacattctaaaagaagatgccaatcctataaaataaggtttctagtgaggaaatatcagtcaatgtgacaggcagaagggtcttcaacctagatatgatacaaaacaggcattgatggatattatttccttttcccattcagatggcaatgtaaaaaacagcagaagctagtcataggaccattatgagaccccaaa

SEQ ID NO: 413220 - DNA, 629 bp, Homo sapiens
agagcagtcaagttgacacataaaattaatgatcacaaccactaacactttggattactttggacaacgttctttaatctccaggtaatcacattctaaaagaagatgccaatcctataaaataaggtttctagtgaggaaatatcagtcaatgtgacaggcagaagggtcttcaacctagatatgatacaaaacaggcattgatggatattatttccttttcccattcagatggcaatgtaaaaaacagcagaagctagtcataggaccattatgagaccccraaattcaattgggcaacatgtggaattgaatttattaaataactgtggtattgctacaagcataatgaaatgacagtaagccagctgggaataccaggaaaatgagttactcaattcaaacccattcagatcaccctaaaaagtgatggttagccatgccagtttaaacatagaaagcactcagaatatttgtggttaattagaaatttcaggatagtgacagcatttcaagaatctcccaattgtttggtcacagttttgtgggctcaaacccaagacactactacaggagaatattggagtgcagatgtcatcctccacctcttcagttcttaagattgattt

SEQ ID NO: 413221 - DNA, 544 bp, Homo sapiens
cagtcatcacaataattttattaaatataagaggcagagataatcagaattaataatataacattagctatagttgccctattgtgctattrtatatttcaaagtagcaagaagagattaggaatgtttgcaactcaaagaaattaaaattgtttgaggagatggatatcccaattacccttagttgatcattattacacatcatatgtttgtatcaaaatatatgtaccccaattaataggtaaaattatgtatcaaaaaataataatgatatataaaataactattacaaggtaaataacaaaaaattgataaaaattacaaaagccaaaaatgagtttattataagcaagaaacttaaagtacaaagggagaatgaaatttaaataatgggatgaaaaacatgtgccatacaaacataagaaagttgtgtgactgtattactgtaagaaaatagacctcagaacaatgagtattactgtaggcatgaaagaatatatcaaaattataacagggttcatgtacattaaacaaagtgttcata

SEQ ID NO: 413222 - DNA, 485 bp, Homo sapiens
aggaaatatgatgctggccattggctgggcttcaaggaaacccttaggaaacttacaatcatggcagaaggtgaaggggaagcaggtttgttttacatggccagactaggaataagactaatgtgggtgatatggtttggctctgtgtcctcacccaaatctcatcttgtagctcccataatttccatgtgttgtgaaagggacctggtaggtgatgactgaattatggggatggatctttcytgtgctgttcttgtgatagtgaataagtctcatgagatctgatggctttaaaaatggagtttgcctacagaagctctctctttgcctgctgccatccacctaagatgtgatttgctcctccttgccttccaccatgatttggaggcctccctagccatatgaaactgtaagtctgattaaacctctttttttgttttttgtaaattgcacagtctcaggtatgtctttatcagtcacgtgga

SEQ ID NO: 413223 - DNA, 567 bp, Homo sapiens
agagagcctttagaccaaccctagccagtggggtctcatccatcctagcagtgggagactgagctctagctagcccactaccataagctacagtactctggggtcctaaataaatctgaaaggcagtcgagacgacaagagtggcaattcttgggcaagtcctggggttgtgctgggcttggggccagtgaatttagggtgcagtggcttagtgaggcatcagataaggaggccaarggggtgctcatgtaaccactactccaacttcaggcagtgcatcttgcagctctggcagagagtccttccactcaaggaaaggagaggaatgagtaaagaggactttgtcttgcaacttgggtatcagctcagccacagtagaatacagcaccaagcagagtcctgaagcccttattctgggctgtagctctcggatgaaatttctggacctaccctgggccaggaggaaacctgctaccctgaagggaaggacccagtcctgacaatattcaccacctgctgactaaagagctgctgggcttgaataaacatcaatggtagtcaggcagt

SEQ ID NO: 413224 - DNA, 437 bp, Homo sapiens
acaaaacaaatcttaaaaagttcagaaaatgtacgtttatcaagtttcttcactgaccacaatggaataatgctagaaatcaattccaagaggawttttagaaactatataaacacattgaaattaaacaatatgctcctgaatgcgagtgtgtcaatgaagaaattaagaaggaaattaaaaatttcttgaaacaaatataaacagaagcacaatatcaaaatttatggaatacagcaaaagcagtactaacaggagagtgtgtagcaataagcatctttacaaaaaaatagcaaaactagcaatgcatcttaaataattagaaaaggaagaggaaaccaaacccaaagttagtagaggaaaataaacaataaagatccaagcagaaataaatgaaattgaaccaagaaaacaatatgaaagcttaatgaaacaaa

SEQ ID NO: 413225 - DNA, 437 bp, Homo sapiens
acaaaacaaatcttaaaaagttcagaaaatgtacgtttatcaagtttcttcactgaccacaatggaataatgctagaaatcaattccaagaggatttttagaaactatataaacacattgaaattaaacaatatgctcctgaatgcgagtgtgtcaatgaagaaattaagaaggaaattaaaaatttcttgaaacaaatataaacagaagcacaatatcaaaatttatggaatacagcaaaagcagtactaacaggagagtgtgtagcaataagcatctttacaaaaaaatagcaaaactagcaatgcatcttaaataattagaaaaggaagaggaaaccaaacccaaagttagtaraggaaaataaacaataaagatccaagcagaaataaatgaaattgaaccaagaaaacaatatgaaagcttaatgaaacaaa

SEQ ID NO: 413226 - DNA, 581 bp, Homo sapiens
tttctgtaaataattggtaacattaacccaatgttctttcctttttgtagaccctagtgtttcatgaatttccacacattctggacactaagctagaagtagccacatatccactcaatagtgacagaaacaacaccatatgaagcaaagccgggattcctacatttaaaattctgaatcaaagcattagaatattataatttggctgccagattgttgaacattctggattcagtggaatacaraaataaaatggttttcggctttttttttaaacgactttcactatgccaggagggctgttcatttaccacctctttgtaaaatctcagtcaatttccatagttttccagccacttccagttatcaaaaagttcgatccaatttgtcatttcaaactttagtcttttatccacgcttcctctagttcaagttagctgtggcctgaagaatatggaataaggaaggggcatggagtgctccattaactcatctttgttcccttgctgagtccccttctcttgtggcatgtgggaagcagacaggagaaacgaaagattggaagcaaacgtttcttactt

SEQ ID NO: 413227 - DNA, 597 bp, Homo sapiens
gctccattaactcatctttgttcccttgctgagtccccttctcttgtggcatgtgggaagcagacaggagaaacgaaagattggaagcaaacgtttcttacttatctatagctacagcagtcctctctgtgagatgatcttgatatgatggccctcgaatggacacataagtgggatctttagatgacccttrttgggtcttctaactaaaatttctgcctgaggatatttggtctagattgacattgtcaatctccataagtgtcttcctatactcattcaacccacagcctcttgcttctaggttgcctttgcctggaagatactttgcctatgagtattgcatccatcctgccatgacagggggagtgaggtgtacccctgctccatttttatcccctccctcatttatgccatatttctccagttccttttcttttgcttaattccacacagagagcagctcagcaagttatccacctgggcatacatcccacagagaatgagatgccagtggctgtctcctctaatctctaggattggctcctttggatctcttgactcagggaaggaagtgattcctcaaggaaccactat

SEQ ID NO: 413228 - DNA, 606 bp, Homo sapiens
accactatctatcgcttctgtagaggaagtaaaagtgtttcagttatctctgcttagactccaattattctcaaatttctgtagtctgtatagtttctgctcatatagataggtagtcaggatacagtgatgtttgaagtaaaacagccaacttggtcatcttttaataagacctgaaaaggtctggccccaatagtactcattaagtaaccttattagaacatgggrattctacgtgtccttctgcttctaattctggatccctgtttccaattctggaacaatagcaagtctcacttgacaatgtgttaggtagggtaacaagtcccttagtttcttagttaagggacaactaattagaattgttcttattggaattattctatatattagaatttctagtcttagactgcttctgatacatacaaatgcattctttttatttacatcaccaaataatctgccttctgctattcaaaattttattaaacactgcttttcctaagctaagtaattaatcaggctaatgtaatttaatgccaaaagtgattagcagtaaagaatgttctggctagaaagaaccattataaactcagtgaaattcta

SEQ ID NO: 413229 - DNA, 606 bp, Homo sapiens
accactatctatcgcttctgtagaggaagtaaaagtgtttcagttatctctgcttagactccaattattctcaaatttctgtagtctgtatagtttctgctcatatagataggtagtcaggatacagtgatgtttgaagtaaaacagccaacttggtcatcttttaataagacctgaaaaggtctggccccaatagtactcattaagtaaccttattagaacatgggaattctaygtgtccttctgcttctaattctggatccctgtttccaattctggaacaatagcaagtctcacttgacaatgtgttaggtagggtaacaagtcccttagtttcttagttaagggacaactaattagaattgttcttattggaattattctatatattagaatttctagtcttagactgcttctgatacatacaaatgcattctttttatttacatcaccaaataatctgccttctgctattcaaaattttattaaacactgcttttcctaagctaagtaattaatcaggctaatgtaatttaatgccaaaagtgattagcagtaaagaatgttctggctagaaagaaccattataaactcagtgaaattcta

SEQ ID NO: 413230 - DNA, 595 bp, Homo sapiens
tatatataaaccaaaagattatatatgtagtgataatggttcctcagcccagcttccttatttgggctcattgatataactaatctttattgagctcttaacttctgccaataatgggaatataataatattagacaagacatggtctctaccattcaggaatttattacctctatgggaaataaatgagtacagcaataattacaatgagaaatgacactaattgtatcacttcctgcatcttgctttgcatctctcttwtgtcttgatatacagttccttgggtatgctaatattactcctactacagggtaagctctttgggaatagtgattatgtctttgaggcttttgcagtgcttggaaatgccaaatattttacaagcaaaagggattactttgactatgagcaaagcgttacaatttatgaacaacttttaagtccacaaagtcacttggctaagggccactataaccctatgaaatgtttagggcctgtatgattatccctatttcttagtcagtgaaaatgaggtttggaaatctcaaattgatttcccaatgtaagtggtagaagaggcactaggctctatttt

SEQ ID NO: 413231 - DNA, 595 bp, Homo sapiens
tatatataaaccaaaagattatatatgtagtgataatggttcctcagcccagcttccttatttgggctcattgatataactaatctttattgagctcttaacttctgccaataatgggaatataataatattagacaagacatggtctctaccattcaggaatttattacctctatgggaaataaatgagtacagcaataattacaatgagaaatgacactaattgtatcacttcctgcatcttgctttgcatctctcttatgtcttgatatacagttccttgggtatgctaatattactcctactacagggtaagctctttgggaatagtgattatgtctttgaggcttttgcagtgcttggaaatgccaaatattttacaagcaaaagggattactttgactrtgagcaaagcgttacaatttatgaacaacttttaagtccacaaagtcacttggctaagggccactataaccctatgaaatgtttagggcctgtatgattatccctatttcttagtcagtgaaaatgaggtttggaaatctcaaattgatttcccaatgtaagtggtagaagaggcactaggctctatttt

SEQ ID NO: 413232 - DNA, 547 bp, Homo sapiens
gtttttgccatgtagtggcctttttrtgagcctcctccccccatagttctcccctacttatttttaaatattttgccactattatttagtccaaaaataaagaaaacatgtcacaactctgcaaggaatgcacaaactaatgtgagatgtaaatctgtaattaaataactgtacaataaacatattatcctctatcttacgccctttcaatctgcttcatctcaggaaatggtgccactgttcactcagctgcccatgtctccagcctagacttcatcattcattcctgtttccctcattgcccaaatccaatccatttgaagtttaccagcatggctactgctcttaattcagctcaattatcacttccttagaaagaccatccctgacctcttgatttaatgcagccagcctccctgctgtggtttgaatgtgttccctccaaaattcaggtgttgccaatgtgatagtgttaagagggagggcctttgacaagtgattaggtcatgagaggtcctccctcatgaatggaattaatgcccttata

SEQ ID NO: 413233 - DNA, 577 bp, Homo sapiens
tgaggtttaatggctgcctgtattagtccgttttcactctgctgataaagacatatccaagccaggcacagtggctcacacctgtaatyccagcattttgggaggccaaggtggttggattacaaggtcaggagttcaaaaccagattggccaatatggtgaaacactgtcgctactaaaaaaaaaaaaaaaaaaaaaaattagccaggtgtggtggcacatgcctgtagttccagctactcgggaggctgagacagaagaatcacttgaacctgggaggcagaggttgcagtgagccgagatcatgccactgcactccagccttggcaacagaacaagatcccatcttgcaaaaaaaaaaaaaagacatatccgataccgggcaatttacaaaagaaagaggtttaattacagttccacatggctaggaaggcctcacaattgtggcagaaggcaaggaggagcaagtcacgtcttacgtggatggctgcaagcaaagagcttgtgcagaaaaactcccccttataattccatcagatctcatgagagttactcactatcacaagaacagcatggg

SEQ ID NO: 413234 - DNA, 577 bp, Homo sapiens
tgaggtttaatggctgcctgtattagtccgttttcactctgctgataaagacatatccaagccaggcacagtggctcacacctgtaatcccagcattttgggaggccaaggtggttggattacraggtcaggagttcaaaaccagattggccaatatggtgaaacactgtcgctactaaaaaaaaaaaaaaaaaaaaaaattagccaggtgtggtggcacatgcctgtagttccagctactcgggaggctgagacagaagaatcacttgaacctgggaggcagaggttgcagtgagccgagatcatgccactgcactccagccttggcaacagaacaagatcccatcttgcaaaaaaaaaaaaaagacatatccgataccgggcaatttacaaaagaaagaggtttaattacagttccacatggctaggaaggcctcacaattgtggcagaaggcaaggaggagcaagtcacgtcttacgtggatggctgcaagcaaagagcttgtgcagaaaaactcccccttataattccatcagatctcatgagagttactcactatcacaagaacagcatggg

SEQ ID NO: 413235 - DNA, 577 bp, Homo sapiens
tgaggtttaatggctgcctgtattagtccgttttcactctgctgataaagacatatccaagccaggcacagtggctcacacctgtaatcccagcattttgggaggccaaggtggttggattacaaggtcaggagttcaaaaccagattggccaatatggtgaaacactgtckctactaaaaaaaaaaaaaaaaaaaaaaattagccaggtgtggtggcacatgcctgtagttccagctactcgggaggctgagacagaagaatcacttgaacctgggaggcagaggttgcagtgagccgagatcatgccactgcactccagccttggcaacagaacaagatcccatcttgcaaaaaaaaaaaaaagacatatccgataccgggcaatttacaaaagaaagaggtttaattacagttccacatggctaggaaggcctcacaattgtggcagaaggcaaggaggagcaagtcacgtcttacgtggatggctgcaagcaaagagcttgtgcagaaaaactcccccttataattccatcagatctcatgagagttactcactatcacaagaacagcatggg

SEQ ID NO: 413236 - DNA, 577 bp, Homo sapiens
tgaggtttaatggctgcctgtattagtccgttttcactctgctgataaagacatatccaagccaggcacagtggctcacacctgtaatcccagcattttgggaggccaaggtggttggattacaaggtcaggagttcaaaaccagattggccaatatggtgaaacactgtcgctactaaaaaaaaaaaaaaaaaaaaaaattagccaggtgtggtggcacatgcctgtagttccagctactcgggaggctgagacagaagaatcacttgaacctgggaggcagaggttgcagtgagccgagatcatgccactgcactccagccttggcaacagaacaagatcccatcttgcaaaaaaaaaaaaaagacatatccgatacygggcaatttacaaaagaaagaggtttaattacagttccacatggctaggaaggcctcacaattgtggcagaaggcaaggaggagcaagtcacgtcttacgtggatggctgcaagcaaagagcttgtgcagaaaaactcccccttataattccatcagatctcatgagagttactcactatcacaagaacagcatggg

SEQ ID NO: 413237 - DNA, 622 bp, Homo sapiens
aaaccaaatccaatagcacatcaaaaagataatataccacaatcaagtgggatttatactaaaaatgcaaggatggttaaacatgcaaatcaataaaaatgatacattaygtcaacagaataaagcacaaaaccgtatgatcatctcaatagaggcagaaaaggcatttaataaaattcacattccttaatggtagaaattatctttaaactaagcatagaaggaatattctatgttgggagacttttcattactgattcaatctcactactcattattagtctgttcaggttttatatttatttctaatttaatctctaatcaaaataacaaagtctatatatggtacacccacagctaacattataatgagaaaaagttgaaagcatttactttaagaactagaacacgataaggatgcccaattttaccactcttattcaacatagtactggaagtgctagccagatcaatcaggcaagagaaagaaataaacagcattggaaaagagaaactaaaattatcctcatttgctgatgatataattttatatctagaaaaacctaaagactttaccaaaaaaccctcttggatttgataaatgaattcagtaaagttgcag

SEQ ID NO: 413238 - DNA, 622 bp, Homo sapiens
aaaccaaatccaatagcacatcaaaaagataatataccacaatcaagtgggatttatactaaaaatgcaaggatggttaaacatgcaaatcaataaaaatgatacattacgtcaacagaataaagcacaaaaccgtatgatcatctcaatagaggcagaaaaggcatttaataaaattcacattccttaatggtagaaattatctttaaactaagcatagaaggaatattctatgttgggagacttttcattactgattcaatctcactactcattattagtctgttcaggttttatatttatttctaatttaatctctaatcaaaataacaaagtctatatatggtacacccacagctaacattataatgagaaaaagttgaaagcatttactttaagaactagaacacgataaggatgcccaattttaccactcttattcaacatagtactggaagtgctagccagatcaatcaggcaagagaaagaaataaamagcattggaaaagagaaactaaaattatcctcatttgctgatgatataattttatatctagaaaaacctaaagactttaccaaaaaaccctcttggatttgataaatgaattcagtaaagttgcag

SEQ ID NO: 413239 - DNA, 622 bp, Homo sapiens
aaaccaaatccaatagcacatcaaaaagataatataccacaatcaagtgggatttatactaaaaatgcaaggatggttaaacatgcaaatcaataaaaatgatacattacgtcaacagaataaagcacaaaaccgtatgatcatctcaatagaggcagaaaaggcatttaataaaattcacattccttaatggtagaaattatctttaaactaagcatagaaggaatattctatgttgggagacttttcattactgattcaatctcactactcattattagtctgttcaggttttatatttatttctaatttaatctctaatcaaaataacaaagtctatatatggtacacccacagctaacattataatgagaaaaagttgaaagcatttactttaagaactagaacacgataaggatgcccaattttaccactcttattcaacatagtactggaagtgctagccagatcaatcaggcaagagaaagaaataaacrgcattggaaaagagaaactaaaattatcctcatttgctgatgatataattttatatctagaaaaacctaaagactttaccaaaaaaccctcttggatttgataaatgaattcagtaaagttgcag
